United States Patent Application Publication US 2008/0168583 A1 - sequence listing, part 2

SEQ ID NO: 6646 - DNA, 429 bp, Gossypium hirsutum
  Clone ID: LIB3120-010-Q1-K1-A1
agaagcctcatcgataccgtcctggaactgttgctcttcgtgaaattcgtaaataccagaagagtactgagcttcttatcaggaaattgcctttccagaggcttgttcgtgaaattgcccaggacttcaagactgatttgcgtttccagagccatgctgttctagctctccaggaagctgcagaggcataccttgtgggtctttttgaagacaccaacctttgcgcgatccatgccaagcgtgtcacaattatgcccaaggacatccagttggctcgtaggatcaggggagagcgtgcttaatttccagaagtgtggatcagtcgcttagaagaaactattgtttatttttaggcaaatgtattggttttttgttttttctaatcatcttttaagccatgatggtagtggtaggttcaatgtgatgtga

SEQ ID NO: 6647 - DNA, 429 bp, Gossypium hirsutum
  Clone ID: LIB3120-010-Q1-K1-A2
cccgtctctgttttgctcccatttctttcttcaactatcttttctcttcaaagatttcaactcttttctcagaatgggaagtaccgatgggaccagctatggtgcttacacctatgatgccctggagagggagccttactggccatccgagaaacttcgaatttccatcaccggtgctggtggcttcattgcttcgcacatcgctcgacgtctaaagagtgaaggacattacatcattgcttctgattggaagaagaatgagcacatgacagaagatatgttctgtcacgaattccatcttgtcgatcttcgagtgatggaaaattgcttgaaggttaccaatggagtggatcatgttttcaacctcgccgctgatatgggtggcatgggcttcatccagtccaaccactcggtcattatgtacaacaa

SEQ ID NO: 6648 - DNA, 412 bp, Gossypium hirsutum
  Clone ID: LIB3120-010-Q1-K1-A3
cccacgcgtccgaaaccaccaagcctgttccttctggtagcccatggtacggtcctgaccgagttttgtacttgggtccactttccggtgagccaccatcttacttgaccggtgagttccctggtgactatggttgggacactgctggactctcagctgatcccgagacctttgctaggaaccgtgagctcgaagtcattcactgcagatgggccatgttgggagctcttgggtgtgttttccctgagctgttggctaggaacggtgtcaagttcggtgaagctgtatggttcaaggccgggtctcaaatcttcagtgagggtggacttgactacttgggtaacccaagcttgatccatgctcaaagcattttggccatctgggcttgccaagttatcttgatgggagccgt

SEQ ID NO: 6649 - DNA, 381 bp, Gossypium hirsutum
  Clone ID: LIB3120-010-Q1-K1-A4
ctcctaaaacatacttcgtagaatttgctttgcactttgcaatggcattcgagataacaaatgaaatgctggttggcagtttaatgccagttattgtttattgggtttatggtggactgtatacaattttaggctactcttgtaacaattacaggttgcatcctaaagaagatgaggatgagaagaactttgccttcaaaaagaccgtcatcaaaggcgtccttgggcaacaatttcgtcagttcatcgccactaacctattatatatgataacaagaggaaatgatcccggagcttcttcagggcagtcaacttccttctttgttatagcaagacagtttattgtagcaatgttcgtattcgatacttaccaatattttc

SEQ ID NO: 6650 - DNA, 414 bp, Gossypium hirsutum
  unsure (1)..(414): unsure at all n locations; Clone ID: LIB3120-010-Q1-K1-A5
gtgagactcttttgtataactgtagcatatagtactagtaagcagtaatagcaatggcctgctccatgatctcatcggcaaccattgccaccgtgaactgctcctccccggcacaggccaacatggtggcccccttcaccggcctcaagtctgcctctgctttcccagtcactaggaaggccaacaacgacatcacttctcttgcaagcaatggtgggagagtgcaatgcatgcaggtgtggcctcctcttgggaagaagaagttcgagacactctcatacctncccgatcttacacccgtagagttggctaaggaagtagattaccttcttcgctctaaatggattcctngcttggaattcgaattagagganggattcgtgcaccgtaagtactcgagcttacccacgtact

SEQ ID NO: 6651 - DNA, 358 bp, Gossypium hirsutum
  Clone ID: LIB3120-010-Q1-K1-A6
gtttatttcttaattttcaaattaccgcaatcagggtttgatatttcccttttttgcatggttcacatttttgaagaaaatacttagagagggtaatttagaatttcaatctgaggtaggggtttttaaagcttccaatggcgtttttaggcgacgcgctacggcaagcgtttatgccgaagcacgagtacgagagcctacgggaggaagataaagcttggacgaagctacaaaggccgatcttaatcggttccatagtgatcatttgtgttgcgatcttcgttggcatgattataagcttgaagattgtgtttccgggagatgatttgaagcgaccgttttgcgatgaccggagact

SEQ ID NO: 6652 - DNA, 445 bp, Gossypium hirsutum
  Clone ID: LIB3120-010-Q1-K1-A7
atttagctatagcatacactactagtacccactactagcaatggcttcctcaatgatctgatcggctaccattgccactgcctctccggcacaggctaacatggtcgctcctttcaccggtctcaagtctgcctctgctttcccagtcaccaggaaggccaacaacgacattacttctctcgcaagcaatggcggtagagtgcaatgcatgcaggtgtggcctcctactgggaagaagaagtttgagactctctcatacctccccgatcttacacccgtgcagttggctaaggaagtagattaccttcttcgctcaaaatgggttccttgcttggaattcgaattggaggagggattcgtgcaccgtaagtactcgagcttacccacgtactacgatggacgctactggaccatgtggaagctgcccatgttcgggtgcaccgac

SEQ ID NO: 6653 - DNA, 309 bp, Gossypium hirsutum
  Clone ID: LIB3120-010-Q1-K1-A8
cccacgcgtccggagacttatttactttaggaattttctagaaccttctcgaaggcaatggctgaggcgaccagcaccgagagatccactggcacagtcaaatggttcagcgcccagaaatgttttggtttcatagctcccgacgacggaggcgacgaccttttcgtccaccaaacctctattctttcccaaggctttcgtacactctccgataaccaacccgtcgagttcttcgttgatgtcggtgaagatggccgagctaaggccgttgatgtaactcctatgcctcgaccttggccgtccttcccg

SEQ ID NO: 6654 - DNA, 453 bp, Gossypium hirsutum
  Clone ID: LIB3120-010-Q1-K1-B1
tcgactacgcgtccgacacgcgtccgcagacaatcgacaccagcaagacatagtttacggttacggtcagacccattttaggccatatgctagtgacgtgaaacgggaaatggcacatattctggcaccttcaactcaatggccgatgagagtaccaaagagctggacctttggaagccccattgcaacaaagatgtggaggtctctgatcttgaaacagaccatgaaaggagcagccaaaagtgctggcaaattcagagtgcttgccttgcactctgagaacagcactgtcaacatgacagacatgctactaaacatggacattactccatacactgacaaaatcattgctgaatatatctctataggaggcactggaatcgacatgcggagcatgtcaaggacaatttcaaagcctgttgaacatccctacgaactttctaagtggaacta

SEQ ID NO: 6655 - DNA, 348 bp, Gossypium hirsutum
  Clone ID: LIB3120-010-Q1-K1-B2
gctacgcgttcgctctcttcatgctgctgatctatacgccgctacgtcatatctctatcatgagatgaaccacatataatctgctctataccattcgagtgtcactcttcccgctcggtcaggctatcgcgatcgctgctgactaggctaggcccaatgctgctccatatgcagtcgatagtgtaagaggaaagtctgcttctgtccattgatgtgtcgtaaagatcaactgaactgaaagcccaacatatcaatagtatgccgcaccagattcgacgacatgactactagagttactcatacagacatagactgatacaaagtagaccttttctggacaagctagac

SEQ ID NO: 6656 - DNA, 332 bp, Gossypium hirsutum
  Clone ID: LIB3120-010-Q1-K1-B3
aaaacgcgagactatcaggaggactaatatgagatactacatctaaactttccacaaaggtcacctaattggtatcccaattaaaactcctttccctccttgaaatctaagctgtaatatagggaccaatacagagaccggagcaaaaaagggggagatggggatggctatgacaaagctttttacacagcttttcagccagatggacatgcatattgtaatgctgagtctagatgcagctggtgaaactactattttatacacgctcatactcaggctaatactcaccaatatactcaccattgtgttcaacgtcgagacaaatgaataca

SEQ ID NO: 6657 - DNA, 217 bp, Gossypium hirsutum
  Clone ID: LIB3120-010-Q1-K1-B4
aaatgatctaatcattattttgcatcttttcatagtttccttctacatgttgtcctttggtggatctacttcactgatgtgtctctcaactctttgtttcacttaatttggattatgttttatggtgttaattaatgtgtgtaaattatcctagagatatatgcttgtatttagttatcaatgaaggattcttttttatctccatatgttcccctct

SEQ ID NO: 6658 - DNA, 255 bp, Gossypium hirsutum
  Clone ID: LIB3120-010-Q1-K1-B5
cgcgtgcgcttacttgaggctttgggatcacgaggaatcctgccttgtgtgggtgcttacggtgcagggcgagtggactaaagcgacccataggacgcaacgaagacatggaaatacttcaattggtactactttcacatgggggtatccatacttagcgctattacaacgcttgtgtacattcaacataacattgagtggggattgatccgaggagtccgcaccatcgggatattcatagccattatcacgtac

SEQ ID NO: 6659 - DNA, 348 bp, Gossypium hirsutum
  Clone ID: LIB3120-010-Q1-K1-B6
cgttggtggaagcttatcccctattttcccgagaaaaaattgtggtcagtgaaaatgaagtcgctgccattgtcagcaggaacttacatccccaaaatcctcaaccctaaaatcctaaacaagaatgtggaaaacccagtgattagatggtcaaaaacgaagccgaaaatgggttcaatagcaattgttgagcaacaaaatgataaagccatagtgttgttgaagaggagagaagcggttggtcttggtttatatgttgggattgctgatgttttgttgcagttgctgccacaaccttgtcccagtggtgcagctgttgaagtagccccagcggcttgtgaattgact

SEQ ID NO: 6660 - DNA, 435 bp, Gossypium hirsutum
  unsure (1)..(435): unsure at all n locations; Clone ID: LIB3120-010-Q1-K1-B7
catttttctcacctcttcattctccaaaactcatggctgccgtaactgctgcagtctcctttccttctaccaactccacctcttttactactcgaacctctatcatctctcctgaaagaatcacattcaagaaggtttctttttactacccagatgtttcaagtggagggagagtggtttcagtgcgagcccaggttacaactgaagctcctgctaaagttgtaaaggaatccaagaaaaatgatgaaggtgttgtggttaacaagttcaagccaaaggaaccttacattggcaggtgccttctaaatactaagatcaccggtgatgatgctcctggagagacatggcacatggtcttcagcactganggagaggttccttacagagaaggacaatccattggagtgattccggatggcgttgaccagaatggga

SEQ ID NO: 6661 - DNA, 360 bp, Gossypium hirsutum
  Clone ID: LIB3120-010-Q1-K1-B8
atttgtttctaaggatttaatctccaaaccttcttcccatttcttcattacattgttcaagaaaaaagaagcaaaaaaacatggccaaagttctgttgttcattgcactatgtgtgcttccagctttggttagtgctacacgcattctgaataatcaattggtggtagaaggctatgtgtactgtgatacttgccgtgctggttttgaaacccctaagactagaagcctagctgatgccatggttaggttggtatgctccgacaggaagagcggccaagttgtcttcaaaaaggagggatacaccgacaaaaccggaaaataccagattcgtgtattcgaagatcacttggatcagatct

SEQ ID NO: 6662 - DNA, 436 bp, Gossypium hirsutum
  Clone ID: LIB3120-010-Q1-K1-C1
aataatcggaccaaacattataaaaaaatataatcccacatttggatacttacctcatttttgaaagacatttgggttgcaatggcacaagcaatggcatcgatgactggtttacgtggctcttcacaagctgtgttggaaggtagtctccaactcatcggccaaacccggttgaacgttgctagcaccaacatggtggctgtggctagacctggttttaccgttagagctcaacaggtccctgccgagcctgaaactggacgcagagctgtgctgggtcttgttgctgctggtttggctactggctcctttgttcaagctgtgcttgctgatgcacgaagcatcaaggttggcccgccttcaccaccctccggtggattgcccggaactttgaattccgatgagccaagagaccttgatctggcgtacatagatc

SEQ ID NO: 6663 - DNA, 449 bp, Gossypium hirsutum
  unsure (1)..(449): unsure at all n locations; Clone ID: LIB3120-010-Q1-K1-C2
gttagctatagcatacactactagtacccactactagcaatggcttcctcaatgatctcatcggctaccattgccactgcctctccggcacaggctaacatggtcgctcctttcaccggcctcaagtctgcctctgctttcccagtcatcaggaaggccaacaacgacattacttctctcgcaagcaatggcggcagagtgcaatgcatgcaggtgtggcctcctactggaaagaagaagttcgagactctctcatacctccccgatcttacacccgtgcagttggctaaggaagtagattaccttcttcgctcaaaatgggttccttgcttggaattcgaattagaggagggattcgtgcaccgtaaatactcgagcctacccacgtactacgatggacgctactggaccatgtggaagctgnctatgttcgggtgcaccgactcggc

SEQ ID NO: 6664 - DNA, 367 bp, Gossypium hirsutum
  Clone ID: LIB3120-010-Q1-K1-C3
gctaggtgtaacatccactgctaggctccactggtaactatgacgatcgtagctaccagagaaattacaaagcgcacagaccgaccaggaccgagggaagggccttgcttataatatcttcaatgaccaacaatgacattaccagaatgaaaggtgtcatcaactcattgtcccaagctcgccatcaacgacggtactcactatgctatcatgagctcgtattactacattaaccaaaggcttgagacatacgacattggacaacaacatggctcgattgtacattgccccagctgtcattgacaagcttggttctcacatgaccaataactacatgaccctttctaacattaaagttcctcttatc

SEQ ID NO: 6665 - DNA, 397 bp, Gossypium hirsutum
  Clone ID: LIB3120-010-Q1-K1-C4
cacaaactcccatcacccgagatcatctttccccttcagaatggcggctgcaaccatgggtctctcttccccatctttcgccggaaaggccgtcaagctctctccttccgcccctaaaatccaaggcaatggccgtgtttccatgaggaaaaccgctaccaaggctgctccctctggaagtccatggtacggtcctgaccgagtcttgtacttgggtccactatctggtgagcctccatcttacttgaccggagaattccctggtgactacggttgggacactgctggactctcggcggacccagagacatttgccaggaaccgtgagctcgaagtcatccactgtaggtgggctatgttgggtgctcttgggtgtgttttccctgagcttttggct

SEQ ID NO: 6666 - DNA, 416 bp, Gossypium hirsutum
  Clone ID: LIB3120-010-Q1-K1-C5
ggaaagcttaagcaatggcggccgaggaggacagcggtgagttttacctgcgctactacgggggccacatagggaaattcgggcacgagttcttggagttcgagttcaggccagatcggaagctcctgtacgctaacaacttcaactacataaacgacactatgatccgcaaagaggtcttactaactcctgccgttcttaaggaatgccgccgcatcatcgacgagagcgagataatgaatgaagatgataacaattggccagaaccagaccgtgtcgtgcagcaagagcttgagatagtgatggggaatgagcacatctctttcacaacttcaaagattgggtcccttgttgatgttcagagcacttaggatcctgaatgtcttcgcatattttattatctggctcaggatttg

SEQ ID NO: 6667 - DNA, 336 bp, Gossypium hirsutum
  Clone ID: LIB3120-010-Q1-K1-C7
tcgctcgtgacctactgactctaccctgcacttccttcttgtgctagccaaaatcccttcttggttttatatatatatatttaaatatctcttctgttcagctcaaattttagtattttcgcaggcatacctttcctctgtctattgacactcttcattcctttttttctccataaagctagggtgcctctgcatatctgggtttttgtgaatttcattttgtttggttggtcaaaaccaatagtatttttaaactaggtatgaaagtagagtgaaagttgttaaatcttactggcgagagatgagttcgtcgtggttaagcaggacgcatgcttt

SEQ ID NO: 6668 - DNA, 384 bp, Gossypium hirsutum
  Clone ID: LIB3120-010-Q1-K1-C8
cccacgcgtgcgtaaaactcaggttctcactctacattctccacgattaaaaagaatatatatttcttatataaatctgctcaaaactaccctctactctctcaaattttctctaattcttcttcaaggattaaagagttcagataatgccacaggtcaatctggaaaccctcgatttcgcctgcgcttgcagctcttgcgacaacaaaattgtctgcgagactttaacaaccaccgaatgcgactacgacgactgcctccacaccgcggagaaacttctagaagaagaaacccctgcggattttccgccagaatcgtttttgttgaccaaagacgctgaactcgtcttgttccatagcaacgcttttctagaaacggcagatt

SEQ ID NO: 6669 - DNA, 445 bp, Gossypium hirsutum
  Clone ID: LIB3120-010-Q1-K1-D1
gctcaaagcattttggccatctgggcttgccaagttatcttgatgggagccgtcgagggctaccgtattgccggtggaccactcggtgaagtgactgacccattgtacccaggtggcagctttgacccattgggtcttgctgatgacccagaggcattcgctgagctcaaggtgaaagagatcaagaacggtaggttggctatgttctcaatgttcgggttcttcgttcaggccatcgtgaccggaaagggaccattggagaacttggctgaccaccttgctgacccagtcaacaacaatgcttgggcctatgccaccaactttgtccccggaaagtgaacttagagagtgagaagggatttgtcttgtttatgtgtttatttggtggtgtgaatttaaatttgttgcacaatcaatgaaagtataatgtgaattttgtgtgctc

SEQ ID NO: 6670 - DNA, 447 bp, Gossypium hirsutum
  Clone ID: LIB3120-010-Q1-K1-D2
ccaattttcatttcaaagattctctcaaaacagtgagggagtagtagttcgagttatcgacgacgttttttttcaacacgaaaaaaaatggattacttttatggaccagggaggaaccatctcttcgttccgggtccggttaacataccggaacccgttattcgagccatgaaccggaataacgaggattaccgttccccggctattccggcaatgacaaaaacccttctcgaagatgttaagaagatattcaagactacgaccgggactccttttatgatcccaacaacaggaaccggcgcatgggagagtgcacttactaatacgttatcccccggtgaccgaatcgtatcgttcctcattggacaattcagtcttctttggatcgatcaacaacaacgtctcaagttcaacgtcgacgttgtcgaaagtgagtggggacaaggt

SEQ ID NO: 6671 - DNA, 414 bp, Gossypium hirsutum
  Clone ID: LIB3120-010-Q1-K1-D3
cccacgcgtccgatcagaaactgtatcagaatgaaggcacttattcttgttggaggatttggaactcgattgaggccattgactctcagtgttccgaagccacttgtcgaatttgctaataaacccatgatcctgcatcagattgaggctctcaaggctgttggtgtaagtgaagttgtattggctattaactaccaacctgaggtgatgttgaacttcttgaaggaattcgaaactaaacttgggatcacgatcacgtgttctcaagagactgagccgcttggcactgctggtcctcttgctttggctagggacaaactcgttgacgagtccggtgagcccgtttttgtccttaacagtgatgttatcagtgagtatccattcaaagaaatgattgaattccacaaagctcat

SEQ ID NO: 6672 - DNA, 375 bp, Gossypium hirsutum
  Clone ID: LIB3120-010-Q1-K1-D4
ggagtttagttcagaggctaaccagcgcattgccaggctcgcagcccatctccaacctgagatggaggaaagttgtattttgaggcgagctgactgtagagcgaaaggagggtcaccagggttcaaagttgctatcttaggagcagctggaggcattggccagcctcttgcaatgttaatgaagatgaatcctctcgtctcggttcttcatctttacgatgttgtgaactctcctggtgtcacagctgacctcagtcacatggatactggtgctgtggttcgtggtttcctagggcagccgcatcttgagagtgccttgaccggcatggaccttgtgatcatacctgctggtgttccaaggaagccttgaatgac

SEQ ID NO: 6673 - DNA, 410 bp, Gossypium hirsutum
  Clone ID: LIB3120-010-Q1-K1-D6
gacggcgccaatcagctgtccgccttgactgaccgtccggcatcgtcttggccctcgattttgcccttttgtaaaccttttttttcaccaattcccgaaatggcagtgaaaccctccaaggccgataagaaaatcgcgtacgacgcgaaactgtgccagctcttagatgagtacacgcagatcttgatcgccgcagccgacaatgttggctcgaagcagctccagaacattcggaaaggtctccgaggtgactcagttgttttaatgggtaagaacactatgatgaaaaggtctgttaggatgcatgctgagaagactgggaacgaagctttccttaaccttatccctttgcttcagggaaatgtgggtttgatctttacaaagggtgatttgaaggaagtcagttagga

SEQ ID NO: 6674 - DNA, 416 bp, Gossypium hirsutum
  Clone ID: LIB3120-010-Q1-K1-D7
ttgatgataacatacgctgccgcatccactgtacacgcccaagccctcactccttccggtctatccttcaagtccaacaagcctaccttttctattaacccacttgctctcaagacttctatagacggaaaatccggcatcaaatgggctaatctatacccccagagtgattccaagcaccatgtcatggctgccgtggctgcggaggctgaggtggctgaggctacggacgaaaatgatggagtggcagctgagggtggcaccgctaccgctattgctactgctccacccaagcccaagaaaggaaaggctgcgttgcctcttaagagagacagaacgagatcaaagagattcttggagattcaaaaattaaaggaaaccaaataggagtatgatctaaagacagcaatatcttt

SEQ ID NO: 6675 - DNA, 428 bp, Gossypium hirsutum
  Clone ID: LIB3120-010-Q1-K1-D8
ctttctctggcatcctgaacaagaaacgtatattcaatccagacgtttacaattggaacagaatcaaagtcaggtattgtgatggatcatctttcaccggcgatgttgcagcagtcaatccagttgctaatcttcacttcagaggtgcaagggtctggcttgctgtcatggaggatctattgagcaaaggaatgagaaatgctgaaaatgctattctttcgggatgttcagcaggtggattggcatcaatattgcattgcgatagcttccgagccctcctacctatgggtactaaagtaaaatgtatttcagatgctggttattttatcaatacgagagatgtgtctggaggacattatattcaaaccttctttgatcaattagttgcgacacatgggtctgcatagaatttgctttcatcatgtact

SEQ ID NO: 6676 - DNA, 365 bp, Gossypium hirsutum
  Clone ID: LIB3120-010-Q1-K1-E1
cccacgcgtccgcagtaaaacagcaattgtagcagtagtgaagtttttagattttagtgagaaagaaaaaggcataaccaattagggccttgtcggaaagttgcccacaaaaaggttctatgatgaatcaacacgacatatctttccaatcagctgctattgacagtagttccgagatgtttccgatgggtggttactttgcacctccccccatgaatttctctgggaattccagtatttttactacctcccctgctttaatcgaacctgggaactcttctggctcttcccttattgactcagtcgcagggttcacacatgatacagggttggctgtcgaatggtccgttgacgagcagtacgta

SEQ ID NO: 6677 - DNA, 437 bp, Gossypium hirsutum
  unsure (1)..(437): unsure at all n locations; Clone ID: LIB3120-010-Q1-K1-E2
atggtttaaaccattgattgtgctggaggaacgcgaagaggtgtatgataatctggaagggtattatgattattatccttacgaagatgaggacgatgaagaagatgaagtttattacaccaattcaccgagtctccgcatcggcaaccggagatggggtgatagtggatatgtaaggtcagggcgccaagaagccaggcctgttcaacgatccaatttccaggactccactggtgccgggtcctcacgcgagcctaagaataaagaaaccacaaaaagtacaatggggagacgagcaaagagaacgctcaaacgtgaggctgccaataaggctgctgaagaaaaacatcaagagcatttgatgagttcgaggctgaagtgattntcttcgacgttgaagtgtttaataaaaaccttatactgaagaataaggataa

SEQ ID NO: 6678 - DNA, 431 bp, Gossypium hirsutum
  Clone ID: LIB3120-010-Q1-K1-E3
cccacgcgtccgcccacgcgtccggcaaattatcatctctttccttaaacacatcgtctttgttaagctcttcttcatcttctccaaaaacaagggtcaccatggctatgattccagtacgtttcaaattgccttataaagatcaaaattgtgactgcaaatgcaatggttggcaatcgcgtcaagctgagattgggaataaaaatggaggttttaatggacatcaatggcgtctttggacattcactagtgttcatccaagacccttctccatgaaagcattgcccaaagaaaattcacacctgatctctttggattcttattttcgaaagcttcaagaagattcaaataagggttcttccatggtgttggttgatagaagtggagaaagtagcataaaagaggggcttgctgaatctcttgaaagctat

SEQ ID NO: 6679 - DNA, 278 bp, Gossypium hirsutum
  Clone ID: LIB3120-010-Q1-K1-E4
tttttctctaatgacatctctcatggaatctctactactgaaaaaaaggaaagagagaagcgctgatcacttgagcacatcctacatacgcgtgcgtgcccattcctatctctcctgtacggtccacatagcctaatttagtgcacaactgtgactaccgatgcaactgttaacaccctcgctatgcccaacttgatcatctagctgcacgtctcaatttacataaatggcgttattagcacattcactcgcgttcatccaactccctaactcatgaa

SEQ ID NO: 6680 - DNA, 425 bp, Gossypium hirsutum
  Clone ID: LIB3120-010-Q1-K1-E5
cttccctttcttattactattcttcttctcttcaaccttgatccatttatgctactctgtgtttttcttttccttcatttggtgttgaggaacgttatatagttaggagaaagaaagtattgagaagccaaaagagaggggaaaaaatgtcaatggacttgacatctgaacgtgtttggtatgttcactgcaacttctgcaacaccattttagcggttagtgttccatgcaacagtgcgttcaacatcgtgactgttagatgtgggcattgtgccaatctgctgtctgtaaatatgggaacttcacttcaaacagttcccagtcaagatgctcagaaacagcagataacgattgatgaagatcattcaaataaggaatgttggtcgtctttcaaatgcaacaaggtttctgcaatttgattctac

SEQ ID NO: 6681 - DNA, 435 bp, Gossypium hirsutum
  Clone ID: LIB3120-010-Q1-K1-E6
cttaatatcacccagacacgtttaataacagaaagtagcagaatgaaaattcacgtacgaaaatggctatgctgggagcaagttcaattaggttctcaagctatccaccgtcttcttcatatctcacttccaccttcaaacccacctgctcttccacactatcattagttgtggtggggaaatcaactatctatcgtcgatgtgtcgcctgctccgctgttcaggaatcttctactcctacagccactgctgaaaccaacggaaccactccaccatcagccggcgttgctggtggtgaggacgaagtgaatgctgcacctaaaagcagctgcagcaaagcctaaacctgctgcaaaggctcctgccaaatctttgccggagctgatgtccgaggatgtcatcccttcattgaaaacaatacttgaagctcaagat

SEQ ID NO: 6682 - DNA, 434 bp, Gossypium hirsutum
  Clone ID: LIB3120-010-Q1-K1-E8
ctcagagagagaaagaaacgaaatacccacgaaacacacagcctgccaatgccattgccattgccagggtgatcggtgattggtgatgcttcgcagttgcctcttccttcatcacccattaatcaacaataccttccaattttagctttgcgcgcaaatatgagttggttatcaattttgtgcggcttgctgttgcttttatgcatcttgaaacccggaattcgttcgtcggcagataggttagatgggagggtgttggagttggacgattccaactttgactccgccatttcctctttcaattacatcctcgtcgacttctacgctccctggtgcggccactgccaacgcctttccctccagttagatgaggctgccccaattcttgctggattaaaggatcccataaccgtagccaaactaaatgctgacaa

SEQ ID NO: 6683 - DNA, 416 bp, Gossypium hirsutum
  unsure (1)..(416): unsure at all n locations; Clone ID: LIB3120-010-Q1-K1-F1
tggagatgtaattccagggcctatgctagcccacaaagcagaagaagatggtgttgcttgtgtcgagtttatagctggtaaacatggtcatgttgattatgacaaggtccctggagttgtctacactcatcctgaggttgcatctgtcgggaagaccgaggagcaggttaaggcacttggtgtcgattaccgtgttgggaaattccctttcttggcaaatagccgagccaaggctattgatgatgctgaaggaatagtcaagatattggctgacaaggagacagacaaaattcttggagtccatattatggcaccaaatgcgggagagctcatccatgaagcagtccttgccattaattatgatgcatcaagtgaggacatcgctcgagtgtgccatgcacatnctacaatgagtg

SEQ ID NO: 6684 - DNA, 261 bp, Gossypium hirsutum
  Clone ID: LIB3120-010-Q1-K1-F2
cccacgcgtccgcccacgcgttcgaaaccaacgaaatccttcaagaatttgacaatttgcgcttctcttaaatcatggaaaatctctcattttcatctcagctagccagtgttcttgcaaaaagcccccatggaagacgacttcgatttcccaacagccaacaacgtggaggaagaagagatgggcatcccagaagatgacccagtcaactcacttctcgaagtcggcgaggagaaagagattgggaaaaacgggttgaag

SEQ ID NO: 6685 - DNA, 444 bp, Gossypium hirsutum
  Clone ID: LIB3120-010-Q1-K1-F3
ggaagtttctctttgtatttctccttcacttacacccccagtctcactcccccaatcaaagacccacattcacaaggtattcaaatccaacggtgaaagtcacttccatccaaagatgcaaatctttgatacgaaacagtcaacggcttacaaccaaggttgctgccaatattcatgatgtttccgtcgtagctgatcctgctcgagtcgatatcacttggcaaattgttgttggagctctagctggggttacccctttttttgttgcagggattgaattcagcaaaagaattattgcacaaagaagatgtggtgaatgtaggggctcaagacttgttttcaggggcaatgattattttaaatgccctgaatgtggtggatttcttccatggcaatcatggaaaaagttcttcactggttaaaaaccatttactacttttcaat

SEQ ID NO: 6686 - DNA, 412 bp, Gossypium hirsutum
  Clone ID: LIB3120-010-Q1-K1-F4
agaaggttcagagattttagagagaacaaacaacaatggctgctacatctggggctgtacgtaaatggattaggctcttcatttctttgtgggggaaagaggagccaagcccttttgggtgctagcattggggccaaaggctcgccctcccctgctgctggaactagaaagttgatcgttgtggcagccgccgcacctaaaaagtcttggatccctgctgttaaaggtggtggcaacttcattgacccagagtggctcgatggatcgctccctggagactacggatttgacccactaggtcttggaaaagacccagcattcctcaaatggtaccgagaagctgagctgatccatggacgttgggccatggctgctgtcgtcggcatcttcgtcggccaagcttggagtggca

SEQ ID NO: 6687 - DNA, 375 bp, Gossypium hirsutum
  Clone ID: LIB3120-010-Q1-K1-F5
ctcgtcactcggcggcagaagcagagagcctcaacatctacactgtatcctcaaatcatgactttcaagcgtaggaatggtggccgcaacaaacatggccgtggccacgtgaagttcatccgctgctctaactgtggcaaatgctgccctaaggataagtcgatcaaaaggtttcttgtgaggaacattgtggagcaagctgctgtgagggatgtccaggaagcttgcgtctatgacacctacactctgcctaagctttatgtgaagatgcaatactgcgtttcatgtgctatccactcccacgttgtgagggtccggtctcgcactgacaggaggaaccgtgatccacctcaacgcttcatcaggcgcagggat

SEQ ID NO: 6688 - DNA, 161 bp, Gossypium hirsutum
  Clone ID: LIB3120-010-Q1-K1-F6
cccacgcgtacgtgtgcatatctgctttccactacaacaatatgctagtattcattagatatgacatgaatagctgaagggaattccccgaagagaaaatggattatgggagtgtgtgactcgaactattgattggaccgtgcagaaatatcgccttatct

SEQ ID NO: 6689 - DNA, 359 bp, Gossypium hirsutum
  Clone ID: LIB3120-010-Q1-K1-F7
cgttggtggaagcttatcccctattttcccgagaaaaaattgtggtcagtgaaaatgaagtcgctgccattgtcagcaggaacttacatccccaaaatcctcaaccctaaaatcctaaacaagaatgtggaaaacccagtgattagatggtcaaaaacgaagccgaaaatgggttcaatagcaattgttgagcaacaaaatgataaagccatagtgttgttgaagaggagagaagcggttggtcttggtttatatgttgggattgctgatgtcttgttgcagttgctgccacaaccttgtcccagtggtgcagctgttgaagtagccccagcggcttgtgaattgactgttagtccttc

SEQ ID NO: 6690 - DNA, 438 bp, Gossypium hirsutum
  Clone ID: LIB3120-010-Q1-K1-F8
caatcactcccaatactttcataacatttcacgaacttcactctgcagtctccaatggcggctgccgtctccaccatcggtgctgtcaaccgagcaccgttgagtttgaatggatcaggtgccggagcttctgctccaagctcagctttcatggggaacagcttgaagaaagtgagcgctaggttcaacaacaacggcaaggctccagtgggaagtttcatgattgtggctgccaaagaaatcgacgaagacacacagaccgaccaggaccgatggaagggtcttgcttatgatatctccgatgaccaacaagacattaccagagggaaaggtatggtcgactcattgttccaagctcccatgaacgatggtactcactatgctgtcatgagctcctatgagtacattagccaaggccttcgcacatacgacttggac

SEQ ID NO: 6691 - DNA, 315 bp, Gossypium hirsutum
  Clone ID: LIB3120-010-Q1-K1-G1
cccacgcgtccgcccacgcgtccgggcaaaagagaaataaaaacagtttcatttccattctaagtttgtgttttttatttgccttttgtgggttttttttaaaaaaaattcagcaaaaatgtttattgagagttttaaggtagagagccccaatgtgaagtacacggagaatgaaattcagtctgtttacaactatgaaactacagagcttgttcatgagaacaaaattggaacctatcaatgggttgttaaacccaaaactgtcaaatatgaattcaagactgatatccatgtccctaaattgggggtgatgct

SEQ ID NO: 6692 - DNA, 437 bp, Gossypium hirsutum
  Clone ID: LIB3120-010-Q1-K1-G2
tcccttttagcatatagacaatagcaaatacagcaatggcttccagtgggcagcttcatgtggatttcgagctcaagtctcctgcagaaaaagtgtggggaaccattagggactccaccacgattttccctcaagccttgtcccatgattacaagagcattcaagtgctagaaggcgatggcaaggcccctggatctgttcgtcttattaactatgccgaagggtctccaatcgttaaggtatcaaaagagagaatcgaatcagtggatgaagctgagaagaaatatgtttacagcatcattgatggggatctcctgaaatactacaagactttcattggcaagatcattgtggttcccaagggagagtcgagcttggttaaatggtcctgtgagtttgagatggcaagtgaagagatccctgatccaagcgtcatt

SEQ ID NO: 6693 - DNA, 389 bp, Gossypium hirsutum
  Clone ID: LIB3120-010-Q1-K1-G3
cccacgcgtccgcccacgcgtccgattttcccacgctttctttctcaagtaagctaaaaaccgccacggaaatggagatggagctttctccacctgtttcattcactgctcctattattcttctcacacttgctattgttttcgttgtcacctttgcactaagacccaaacccaaatcgagtctcgccaaagagcttccaccagggagcttagggtggccaatcgtcggcgaaactctcgagttcctgtttgggaacccggaaaatttcgtgtttaatcggatgagaaaatatgctcctcgtattttcaaaacaaggattctcggcgaagaaaccgtcgtcatatgtggtccggaaggacacaaatttttgttctcaaacgaacaaaag

SEQ ID NO: 6694 - DNA, 378 bp, Gossypium hirsutum
  Clone ID: LIB3120-010-Q1-K1-G4
caagatcccatcttcaagcaatacagcctgcccccacacgagtgcggataccctggtggcgattttcaaccccctcaactttgctcctacacttgaggccaaggaaaaggagcttgccaatgggagattggcaatgttggccttcttgggattcataattcaacacaatgtgactgggaaaggaccatttgacaacctgttgcagcacctctctgatccatggcacaacaccatcatcaacacaatcaggggttattaaattcaatttcccagtttttgagtttccttttttgttttttaattcaagatttcaatcgtcttctcattgcaaacaaagtagctccaatttacaagttaaaaaaacaaatttttggtttt

SEQ ID NO: 6695 - DNA, 425 bp, Gossypium hirsutum
  Clone ID: LIB3120-010-Q1-K1-G5
aaaaaatagagattaattaatgaattcattagtgagaggtaaactttatgataaagataaagaaacacaggaggaacccatatacaacttcagacgaagtatacgctttaggtcaacatatatgtatgtctgctcacaaagcacgaagaataattgatcagattcgtggacgttcctacgaagaaacacttatgatactagaactcatgccttatcgagcatgttatcccattttaaaattggtttattctgcagcagcaaatgctcgtcacaataggggtttcaatgaagcgagtttaatcattagtcaagtcgcagtaaatgagggaactactctgaaaagactaaaacctcgagctcgaggactgagttatctgataaaaagacccacttgtcatataactattgcattgaaagatcttgaa

SEQ ID NO: 6696 - DNA, 421 bp, Gossypium hirsutum
  Clone ID: LIB3120-010-Q1-K1-G6
ctcatttctttaaaaccagttgaattttcactttattggtatcccatgaataatccaaggaatatcaaatcttgaaaatcgccattgaagctcaagagaattttttttccatcggaatatggaaaagaagtagcaagaaaaagagtttacctttccgccgccgttaatctttgctacccattttctttaaaaaccctaaattcaagcttgtaagaaaagaaattatgtctcatctcgacgacattccatcaacgccggggaaattcaagatggaaaaatcacctttcattcagagtagaatgaggtggcactggcaatcttcacttgcgaagctcactttttggtcaattattttcttctgtttgattttgatcttcttttttcgatccccatcttcaaatcccctccttcaagatccata

SEQ ID NO: 6697 - DNA, 402 bp, Gossypium hirsutum
  Clone ID: LIB3120-010-Q1-K1-G7
gctcccatgaatgatggaactcactatgctgtcatgagttcctatgaatacatcagccaaggtcttaaaacgtacaatttggacaacaacatggatggtttctacatcgctcctgcattcatggacaagcttgttgttcacatcagcaagaacttcatgtccctccctaacattaaggttcctctaatcctgggtatttggggaggcaaaggtcaaggaaaatctttccaatgtgagcttgtgtttgccaagatgggtatcaaccccatcatgatgagtgccggagaactggaaagtggaaacgccggtgaaccagccaagttgatcaggcaaaggtaccgtgaagccgtcgacataatcaaaaagggcaaaatgtgcgccttgttcattaatgatctcgat

SEQ ID NO: 6698 - DNA, 256 bp, Gossypium hirsutum
  Clone ID: LIB3120-010-Q1-K1-H2
ggcgaatcagagtatgagccgatcgtccatagattcttctttgcattctcgtcgacaccatagattcttctttgcattctcgtcgacaaacgatggtttgactgcttctatgcgtgattttgaaagcaatgttcaagcctttcaaagttgatcctccatagattcttttatattattatttattctatttcgcaatatatattgtgtttctacttgaaatttactttatattatatgaagcaaaattattatgtgc

SEQ ID NO: 6699 - DNA, 429 bp, Gossypium hirsutum
  unsure (1)..(429): unsure at all n locations; Clone ID: LIB3120-010-Q1-K1-H3
gtccaggtttcaaagaagacgtttgctgaagaggtgaacgctgctttcaaagagagtgcagagaaagagctacagggtatactttcagtgtgtgaagaaccccttgtttcagtggacttcaggtgctctgatgtgtcctccaccgttgatgcatcactcaccatggtcatgggagatgacatggttaaggtgattgcttggtatgacaatgagtggggctactctcaaagggttgtggatttggctgacattgttgccaatagctggaagtgacttcaatgtgctatacatatatgcataacaatgtcaccgatggttgattnttgcatgctcacttcattnntattctttcggcttcagcaatttctcattttgtcaaggctactatataatctgtaatgtaatgttggatacatacaatctctaata

SEQ ID NO: 6700 - DNA, 341 bp, Gossypium hirsutum
  Clone ID: LIB3120-010-Q1-K1-H4
cttttgtttgtggcttcatttctgatttggttggagatatatggaggttatcaagtagcgtaattcaacttgcttcagcttctgaagctacagtgagcagcacgtatgaggtttctgtatggcgttcactttggaatgaccttttttcccaggtttttcgtgctgtcagaagtatattaaatggatttgttgccttcttcgcagcctgcaacagacatcgcctaagcatttataatcacgtacaggatgtcattcaaagacgctttggtggagtcccaagatcacagacctcagatcctagacgaagcaaatcaacgtgtggaaatcaatgtcaatcagaa

SEQ ID NO: 6701 - DNA, 369 bp, Gossypium hirsutum
  Clone ID: LIB3120-010-Q1-K1-H5
ctgttttagagttgcagaagaactaaattccccagaatttgcttcagtaatggctgcctcagttatggcttcttcagttaccctcaagccttcattcaatgttgagaaatctggtgtaagaggggttccttcccttgctaggtccccttcttctttcaaggttgaagccagtggtggcaagaagatcaagaccgacaagccttatggaatcaatggtggtatgaacttgagggatggtcttgatgcctctggaaggaagggtaagggaaagggtgtttaccaatatgttgacaaatatggtgctaacgtcgatgggtacagtcctatctacaacaccaacgactggtctcccagtggtgatggttatgt

SEQ ID NO: 6702 - DNA, 332 bp, Gossypium hirsutum
  Clone ID: LIB3120-010-Q1-K1-H6
gttctggaccagaagtttggtaattccttttaacactatattaatatagatgatatgccctattacgagtttctgactaatgctaatgtaatatatatgacaggtatcatcaagggcaccatgactaccactcactcgtacaccggtgaccagaggcttcttgatgctagccaccgtgacctcaggcgtgctagagccgcagctctcaacatcgtcccgacttcaactggtgcggcgaaggccgtggcccttgtactccctactctcaaaggcaaacttaatggcatcgcattgcgtgtgccaacaccaaatgtgtcggtggtggacctagt

SEQ ID NO: 6703 - DNA, 423 bp, Gossypium hirsutum
  Clone ID: LIB3120-010-Q1-K1-H7
cggacgcgtgggcggacgcgtgggttggaaaagccctaatttgacagctctctcagtctctcattttgcctgaaaaccatgtcgaggagaaaggttagggagcccaaggaggagaatactacccttgggccggctgtacgagacggcgaacatgttttcggggtggctcacatttttgcttcatttaatgacacatttattcatgtaacagatttgtctggaagggaaacaatggttcgcattacgggtggtatgaaggtgaaagctgatagggatgagtcttccccttatgccgtcatgcttgcagcacaagatgtttctcaacgctgcaaggagttgggtattacagcccttcatataaagcttcgagctactggagggaacaaaaccaagacacctggtcctggtgcccagtcaggactt

SEQ ID NO: 6704 - DNA, 368 bp, Gossypium hirsutum
  Clone ID: LIB3120-010-Q1-K1-H8
aagcgtgtccagaaggttcagagattttagagagaacaaacaacaatggctgctacatctggggctgtactaaatggattaggctcttcatttctttgtgggggaaagaggagccaagcccttttgggtgccagcattggggccaaaggctcgccctcccctactgctggaactagaaagttgatcgttgtggcagccgccgcacctaaaaagtcttggatccctgctgttagaggtggtggcaacttcattgaccctgaatggctcgatggatcgctccctggagactacggatttgacccactaggtcttggaaaagacccagcattcctcaaatggtaccgagaagctgagctgatccatggacg

SEQ ID NO: 6705 - DNA, 416 bp, Gossypium hirsutum
  Clone ID: LIB3120-011-Q1-K1-A1
tcgcccactcgttcgcccactcgttcggtggaccactcggtgaagtgactgacccattgtacccaggtggtagctttgacccattgggtcttgctgatgacccagaggcattcgctgagctcaaggtgaaagagatcaagaacggtaggttggctatgttctcaatgttcgggttcttcgttcaggccatcgtgaccggaaagggaccattggagaacttggctgaccaccttgctgacccagtcaacaacaatgcttgggcctatgccaccaactttgtccccggaaagtgaacttagagagtgaaaagggatttgtcttgttcatgtttttatttgttggtgtgaatgtaaatttgttgcacaatcaatgaaagcagaatgtgaattttgggcgctcaaaaaaaaaaaaataca

SEQ ID NO: 6706 - DNA, 317 bp, Gossypium hirsutum
  unsure (1)..(317): unsure at all n locations; Clone ID: LIB3120-011-Q1-K1-A10
cctaaatggagaaatccagtaattcaacaactttaggtggaacaaaatcggatcaggtgggggagacgctggcggcggttttcaaatcgcctacgtcgcagagtgatctagcgccgggaacgtcggatagcggtggaactttgtcacggaaatcgagcaggcggtttgtagtgggggcatcgccggcgcggagcagtggcggcggttgtagaaatgcacacattaggaaggcgaggagcgctcanatgaagttggacttggaagaactgagcagtggggcggcgctcatcccggcttctagcgctagcttgggcttt

SEQ ID NO: 6707 - DNA, 398 bp, Gossypium hirsutum
  Clone ID: LIB3120-011-Q1-K1-A12
cccacgcgtccgcttgttccttccttcgccgtctattgcttttagttgcctcgatttcaagtgaatcagaatgggtaaggaaaagactcacattaacattgtggtcatcggccacgtcgattctgggaaatcaaccaccactggccacctgatttacaagcttggtggtattgacaagcgtgtgattgaaaggttcgagaaagaagctgctgagatgaacaagaggtcattcaagtatgcttgggtgcttgacaagctcaaggctgagcgtgagcgtggtatcaccattgatattgccttgtggaaatttgagaccaccaaatactactgcactgtgattgatgcacctggacaccgggactttatcaagaatatgattactggtacgtcacaagctg

SEQ ID NO: 6708 - DNA, 361 bp, Gossypium hirsutum
  Clone ID: LIB3120-011-Q1-K1-A2
gacaggcgttcgactgcgcgtgctcaaagacgtactgcttcgcgtgcgttacaatggctctcttcatcactaatgcttatgtcaaagaacatatcaataactcaactaatattatcatcaagatcaaagttcagtgatgcttaatatctttaatctgatgtggatctgaccaaattctgccatcgtgtcaagtagttatttatctggataattgcacgaggcatatgatcttacgaatacaatccaacaccatatgcctgtaatacctactcactatgacctgttaaccttagttagaaccgctactggtacttagagacgagatccttaatacggacctagacaagctcagcgagtgaca

SEQ ID NO: 6709 - DNA, 472 bp, Gossypium hirsutum
  Clone ID: LIB3120-011-Q1-K1-A3
tcggtttaccgtcaaacttgaagacggacgtatcggtgtgtaaagactggatcggagggtgttacaagacggtgcaagaggccgtcaacgcatcaccggcaaatgcagagagtacacgccgtttcgtgatatatataaaggaaggtgtgtacgaagaaactgtgagggtgccactggagaagaaaaatgtggtctttttgggggatggaatgggtaaaaccatcattgcgggtgctttaaatgcagggatgcctggacttaccacttatgagactgctactgtcagtgagtactactaccctcctacactacttacgttaaacatttaactttgtttaagaattgtcagttttacatatatgaatgagcttgataagatactgtctatagactttcatggtttcccagagcttatatatagtagtagtacccataagcctatgtcgagtaaaagtctcttatgtaactcatc

SEQ ID NO: 6710 - DNA, 464 bp, Gossypium hirsutum
  Clone ID: LIB3120-011-Q1-K1-A4
ctttgttttccaatagttcgtaacaatgtcggtctcacttcaagctgcagctaccctgatgcaaccaatcaaggttgctgcaccatcaaggaccaatgtgctgctcaggtcctcccagagcgtttctaaggccttcggtttggagcctgttggtgctaggctcacctgctctttgcaaactgacctcaaggacttggctcatacgtgtgttgatgctaccaagctcgctggtttcgctcttgctacatctgctcttgttgtctcgggagcaagcgctgaaggagttccaaagcggctaacctacgatgaaatccaaagcaagacatacatggaagtcaaaggaacaggaactgctaaccagtgcccaaccatcgatggtggtgtcgactcttttgccttcaagcctggcaaatactacgccaagaagttctgcttggagcccacttacttcactgtcaaggctg

SEQ ID NO: 6711 - DNA, 444 bp, Gossypium hirsutum
  Clone ID: LIB3120-011-Q1-K1-A5
caaaatccaaaaaggaaaaaaagagaaaaaagaaaaaaaaatcctccaaaaatggcgacttcagctactacactcacttcactttccttcttctcttcttcccttttcctctcttctccttcccctaaactctcaacttccctttccttctctttcaaaccttcttcgaacccgtctctttccatttcttcccaactttccaatctccccattttgtccttcaccggcgaaaaaatcggcgaaacttatctcgacctcaaatcagcccctcccgaaaccgctagagccgtcgttcaccgagcaatcatcactgacttacaaaacaagcgtcgtggcacagcttctacactcactcgtggtaaagttcgtcgtggagggaaaaagccttaccctcaaaagaaaaccggtcgtgctcgccgtgggtctgcgcgcaccacgctccgt

SEQ ID NO: 6712 - DNA, 461 bp, Gossypium hirsutum
  Clone ID: LIB3120-011-Q1-K1-A7
cccacgcgtccggcaaaacataaggcaatggccactactacagccacctgttttcacttacaaaacataccatcatcaccatgggtgaacaacaccagcagaataacaacatacaaagccatggatggatcattaagagcttcaaacccccgaacccaaacattcattaaacccgtgaaatgtagtagtagtagtagtagcggaaatgagataggcatagccgatttcatcggtggagatctattaaaattcgatttagggcaatggctatcggatgtagaacaacacaaagcccttgctatttacacccctcacgaaggtggctacgagggtcgttactttacacggcttcgacaccagggttactatttcctcgaccttactgctcgtggccttggtgatcccgaaactacactcactaagatccatcctgtttgccctcctcatgttgggaagcaacc

SEQ ID NO: 6713 - DNA, 394 bp, Gossypium hirsutum
  Clone ID: LIB3120-011-Q1-K1-A8
gcggagatgtactggacaggctggatgggctggaagaactatgctagtgagtattcttgaactatacagaatgaagctcgagttcattgtatcataaaagaagttggtgaagcatctcatgaacattttccccaagatggcgagagtgggcaagaatctgcttctcaagttgaacaactgcaggaggatgatcaggaaaatgaagacgcaatgtggcaggaagctagtgttgagtataatgtatcgatggatggtcataatgaagaagcctctggcatgcaccatgaagatggtgggaatgacgatggtagcttgcttgagacaacacggaattggttgcaatggtcttatgatcaagaacccggtgggagagcagacgcattttattttcctg

SEQ ID NO: 6714 - DNA, 353 bp, Gossypium hirsutum
  Clone ID: LIB3120-011-Q1-K1-B1
acgcaaacgcgctcgcaaactcatgtccaacggtttgaaccggccacgtctgcaaccacgaagagagaccacccggtaatccattttgaagctcaggggttcaagcctagaccattgtctcattcattattcaatctacgtctcttacactgttgctgcttcatcatccaaagctttaaccacccctgcactcgtcaaaccatagaccaaagctgctccgagaaaggctgcacctataccatagccaaaggtcgatgatggaatctttggcacctttggtaggacagtgttaaccaacgcaaatgagctctttgttacacgtgtagccatgataggccttgctgcatgcctat

SEQ ID NO: 6715 - DNA, 341 bp, Gossypium hirsutum
  Clone ID: LIB3120-011-Q1-K1-B10
cccacgcgtccgtccacgcgttcgtccacgcgtccgtttttttttaagacaagaacaaagtggagattttataacacaaaaatagaggatgcatatccacttaaatcacaaaaggaaaacaacattcaattaagacacaaaggggggatttcctttgtttgtgcccaatatatatttttttcttcccttagagcttaatttcccatttagaaagctcctctcttgatagcatcgtcattagcatttacaagggcagcttcactcaaatatttgtgagccaattgaaccctctttacattctcttgctcagcaacaagcatgtatacatattccaacagctt

SEQ ID NO: 6716 - DNA, 163 bp, Gossypium hirsutum
  Clone ID: LIB3120-011-Q1-K1-B11
attgctccggatattgacgaataatgctactatagctaaaggaccgtctgctgcataagtggttgagcgcctttttcagatgatgtcaagatcagaagttgggcctgatggacaacatattgctttacaggcccttgtaaatattctggagcatccacagtgc

SEQ ID NO: 6717 - DNA, 378 bp, Gossypium hirsutum
  Clone ID: LIB3120-011-Q1-K1-B12
aaacaatgctggtaatgtcaagtaccagcgtttcaaccagccatgttgtgaacttgaagagagatcaccctttactccattttcaagctcaagggttaaagcctaaaccctcctctcatttcttattcaatccacactctaacactgttgctgcttcatcatctaaagctttcaccacttttgcactcttcaaaccaaagaccaaagcagctcctaagaaggctgcacctaaaccaaagccaaaggttgaagatggaatctttggcacctctggagggattggttttaccaagcaaaatgagctctttgttggacgtgttgccatgattggctttgctgcatccttattaagtgaaagcaatacaaggaaaggaattc

SEQ ID NO: 6718 - DNA, 458 bp, Gossypium hirsutum
  Clone ID: LIB3120-011-Q1-K1-B2
cccacgcgtccgcccactcgtccgcccacgcgtccggttgcttcaaactagaatcttctcctagtctgacactcaaaggcaccggcttggaccgaattatctgcagcttccagctaatgctcccaaatgtgctcatcacaataatcaccatgaaggttttatgaattttatgcatagagatgaggaggtgaactacttcccttcgaggtacgatcctgttcgccacgctgagaagcaccctattcctagcaccgtttacagtggcaaaagagagaagtgcattatcggtaaggagaacaactttaagcagcctggggaacgataccggtccttttcagctgacaggcaagaacggcttattaatcgctggattgatgcattgtctgatccaagggtcacacacgagatccgcagcatttggatctcatactggtctcaggctgacaaatctttgggtc

SEQ ID NO: 6719 - DNA, 475 bp, Gossypium hirsutum
  Clone ID: LIB3120-011-Q1-K1-B3
tcgcccactcgttcgcccactcgtccgaagagataagattatagtgaaaaactaaacataataaagccccttcgacttgcttcattgatttgccctctcaaagcccaagaaaaatggcttctgcttccgctactctcctcaagtcttcacctattatcgacaagtccgagtggattaagggccaaaacctccgccacccttcggtttgttttgtacggtcacaccctacatcggccgcctttgccgtccgtgctagttcatatgccgatgagcttgttaagaccgcgaaaactgttgcatctccaggtcgtggtattttggccatggatgaatcaaatgctacatgtgggaaacggcttgcctcgattggtctcgagaataccgaggcaaaccggcaagcttaccgtacccttctcgtgtctgcccctggcctcggtgactacatctcgggagctatccttttcgaggagactct

SEQ ID NO: 6720 - DNA, 433 bp, Gossypium hirsutum
  Clone ID: LIB3120-011-Q1-K1-B4
tcgcggactcgtgggcggactcgtgggactaactcaatgaaggcgcttggggtagacattttaactggttttggtactattgtgggtccccaaaaagtgaaatatgggaaggttggtttcactgacaacgtagtaactgcgaaagatatcatcattgctactggttccgtcccttttgttcccaagggcattgaagttgatgggaagactgttattactagtgaccatgccctgaaattggagtttgttcctgattggattgcgatcgtaggaagtggttatattggtcttgaatttagtgatgtatacactgcacttggcagtgaggttacttttattgaagctctagatcaacttatgcccgggtttgatcctgagattagtaagttggcccaaagggtgctgatcaacccaaggaaaattgactaccata

SEQ ID NO: 6721 - DNA, 412 bp, Gossypium hirsutum
  Clone ID: LIB3120-011-Q1-K1-B5
acgccgacgcacacgcgcgcgtccactcgtccgaagagataccattatagtgcgaaactaatcatattaaaggccctccgacctgcttcattggtttgtcctctcaatgcccaagactaatgagcttatgcttccgctactctcctcaagtctctacctattatcgacaagtcctagtggatcaatggccataacctccgccacccttctgcttgtcatgtacagtcacaccctacatctgccgcctttgccgtccgtgctagttcatatgccgatgagcttgttaataccccgaaaactgctgcatctccaagtcgtggtattttggccactgatgaatcaaatgctacatgtgggaaactgcttgccttgattggtctcgtgaatacccatgcataccggctagcttacc

SEQ ID NO: 6722 - DNA, 355 bp, Gossypium hirsutum
  Clone ID: LIB3120-011-Q1-K1-B6
tcccactcgttcgcccactcgttctaccacacttatcgaatgcttcaaactataaacattttatatggttacactactattcggcgtgctcaaccagattatcatcagcttgcagctaattctcacaaatttgcatctgacaatgatcaccataaagctactatgaactttattcatagacacaaggacattaaactctttcctaagactgacaatactagttaccacgccttgaaacaccctattgctagcaactgtaacactatcataagaaataattacattatccttaaatataacaacttttacccttctcttgaacgataccttacctttatagaagacaatacatcaa

SEQ ID NO: 6723 - DNA, 453 bp, Gossypium hirsutum
  Clone ID: LIB3120-011-Q1-K1-B7
cataaacaggcaaagagagtgtgacagagtttaatgaacttcaaccttcaaagcatgaacccatcatcatcatttgtggctaccagagatcaagctctctctgttttcaaccaccctttctcacaatctcactctttccttgtttctaatttcaaaaatggctcctttctatctcccatcaatacccacacaagaaggccaaagacccacacttcttttaccactcctaatcgattccaacccatcactggttgtttaggtgagaggaatacacctgcataggcacttagacagattctggaatcgcctggtgctcaccaaggccctgcttgtttcgatggtctcagtgctaagcttgttgaaagagctggctttcagtattgtttcaccagtggattttccatttctgccggtcgcctgggactaccatacaccggatttatttcttatgga

SEQ ID NO: 6724 - DNA, 455 bp, Gossypium hirsutum
  Clone ID: LIB3120-011-Q1-K1-B8
gttttaaatatacatatatttctcacttctattgtaaatagacagtaattcagatcaaagggtatccgtttcttttcttatttttcgttttaatttctcgagcttttacggttcaaaaatggcggacaaagctaaaaccgaaaacccatcttttctccatggaaaatacgagcttggccgtatgttgggtcatggaacgttcgccaaagtctaccatgcgaagaaccttcaaacagggaagaatgtcgccatgaaagtggtgggcaaagagaaagtgatccaggtcgggatgatggatcagatcaagcgagagatctccgtcatgaaaatggtgaaacaccccaacatcgtcgagctgcacgaagtgatggcgagcaagtccaagatttacttcgccatggagctcgtccgcggcggcgagctcttctcgaatatgccaaaggtcgtctcaagga

SEQ ID NO: 6725 - DNA, 179 bp, Gossypium hirsutum
  Clone ID: LIB3120-011-Q1-K1-B9
gtttatttacttactttccgtttttctcgattttctcttttattttccttccttttttcccttcgtggttttttctttgattgtgatcatcaaaaaaggcttctttcataacacatgctttccttcaacttccaaagattcgttctgaaagagggaccaaaaagaaagatggtttgttt

SEQ ID NO: 6726 - DNA, 188 bp, Gossypium hirsutum
  Clone ID: LIB3120-011-Q1-K1-C10
cttcaaatggaattgggaccattcctgccttctttgagatttcaataccattgtctccaccattgaaggttatactcttaactccagggtgcataataaggacttcaccaatttcatagcctttccccgtcacacatattctaatctctatggtaaagccagtctaatcaaatcattcctccttatta

SEQ ID NO: 6727 - DNA, 279 bp, Gossypium hirsutum
  Clone ID: LIB3120-011-Q1-K1-C12
gggatctaaagagcattacaagaaatgcatggagcaaaggtttaaggaattggtggcaagcaaggcccgggagggtctccaggctgaggttactgatatggactgggaaagtaccttctatttgcgccatcttcctgaatcaaatatggctgaaatcccacatctaaccgatgaatacaggaaggtgatgaaagaatttgcattgaaatcggagaaactagcacaggagctgctggacttgttctgtgagaaccttggtctcgagaaagggtacctcaa

SEQ ID NO: 6728 - DNA, 100 bp, Gossypium hirsutum
  Clone ID: LIB3120-011-Q1-K1-C2
gtgcttccgaaatgaattacctagaaagaacaagataccgaagctggaatcccttcaagtaaagggaagcctgttgcaccaatatatacgtgaggtgaaa

SEQ ID NO: 6729 - DNA, 422 bp, Gossypium hirsutum
  unsure (1)..(422): unsure at all n locations; Clone ID: LIB3120-011-Q1-K1-C3
ggttcgatgtgaacggctcttgcacatgggttagtcgatcctaagagacgggggaagcccgctcgacagcgcgtccagcgcgagcttccaaagggaatcgggtcaaaactcctgtaccgggacgctgcggctgacggcatcgttagggagtcctgagacgtcggctgtggcctcgggaagagttatctattcagtttaacggcctgaccaccctggaaacggctcagtcggacgtagggtccatcggccggaagagcaccggacgtcgcgtggtgtacagcgcgcccacgacggtcctggaaaatcgccatgaccgagtgccagccgcgcacggtccgtactcataaccgcatgaggtctacaaggtgaacagactgtggtcaatggaacaatgtangcaagggaagtccgctgaatggatc

SEQ ID NO: 6730 - DNA, 469 bp, Gossypium hirsutum
  Clone ID: LIB3120-011-Q1-K1-C4
accacgcgtccgcatgttttcactacccataagcatgcaatggcttccgctgcaaaaggcgagccaacgttcgggtgaataactgctcgtgaaatcggaacctcatcgtgggcatttcttgctattatgccagagcacaatctacatctctctttctcaaagacaccatcaaaattgattttaacaatcgatccagttgggtgtctccatttggccatcgttctactcctgaccaaagagtccacaaagcacattcaaacattcgactctgatgctgagagctctccacaaaaacctgggacactctctaaagatatggtccacagacttcatttcttcaccacatcgaggacattctatgttcaccatcaatcttctttgtcttaaatatgggaaaataggaataaaatctttcgtaattctccatattgtaacttttactttagttggaagctgtaaggtccacaac

SEQ ID NO: 6731 - DNA, 264 bp, Gossypium hirsutum
  Clone ID: LIB3120-011-Q1-K1-C5
acggactcgatgtgtacggctcttgctcatgggtttgtagatcctaagagacctgttaagcccgtgcgacagcgccttcttcgcgagcttcgaagggtaatcggattaaaactcctgtaccgtaacgcggctgctgtcggccactttagatagtcccgagacctcggtctaagccttcggaacacggatcttttctgcttaacggccttaccaccctggaaacggctcagtcagttgtagtgcccagccggacggaacagcacc

SEQ ID NO: 6732 - DNA, 474 bp, Gossypium hirsutum
  Clone ID: LIB3120-011-Q1-K1-C6
tcgcccacgcgtgcgcatgttttcactacccataagcatgcaatggcttccgctgcaaaaggcgagccaacgttcgggtgaataactgctcgtgaaatcggaacctcatcgtgggcatttcttgctattatgccagagcacaatctacatctctctttctcaaagacaccatcaaaattgattttaacaatcgatccagttgggtgtctccatttggccatcgttctactcctgaccaaagagtccacaaagcacatccaaacattcgactctgatgctgagagctctccacaaaaacctgtgacactctctaaagatatggtccacagacttcatttctgcaccacatcgaggacatcctatgttcaccatcaatcttctttgtcttaaatttgggaaaataggaataaaatctttcgtaattcttcatattggaatttttactttaattcgaagctgtaagttccacaactt

SEQ ID NO: 6733 - DNA, 435 bp, Gossypium hirsutum
  Clone ID: LIB3120-011-Q1-K1-C7
cttcactgcatcatcgttcttatggagcatctaaagcctatggagccgaccagaatccactcaaatggcgattctctgattcaggacatgacctttgctccggatattccagtctacgtgacatcagctgcttacaacatggacccctgccccaataagctgcatttggatattggcgtttaccgaacagaggacggaaaatgccatacattaaatggtgttaaacaagtggagcacacactagctaatgatctgtcatgctgacaaggagtatcttcctatgacaggaattcctgaatttaataaattaagtgctaacctaatcggtggctctggcagccctgccatcaaggaaagtcgagtagttactgtccaatgtgttactggttgactatcactgatggttgcagctgacattttagcaaaacattacca

SEQ ID NO: 6734 - DNA, 467 bp, Gossypium hirsutum
  Clone ID: LIB3120-011-Q1-K1-C8
gtccaatcactcccaatactttcataacatttcacgaacttcactctccagtctccaatggcggctgccgtctccaccatcggtgctgtcaaccgagcaccgttgagtttgaatggatcaggtgccggagcttctgctccaagctcagctttcatggggaacagcttgaagaaagtgagcgctaggttcaacaacaacggcaaggctccagtgggaagtttcatgattgtggctgccaaagaaatcgacgaagactcacatgaccgaccaggaccgatggaagggtcttgctcatgatatctccgatgaccaacaagacattaccagagggaaaggtatggtcgactcattgttccaagctcccatgaacgatggtactcactatgctgtcatgagctcctatgagtacattagccaaggccttcgcacatacgacttggacaacaacatggatggattctacattg

SEQ ID NO: 6735 - DNA, 375 bp, Gossypium hirsutum
  Clone ID: LIB3120-011-Q1-K1-C9
cttttcgcaccatcccgaaagcttgcacatgttcaccttcctgtttgatgacatcggtgttccacaggattataggcacatggatggctctggtgttcatacctacacactaatcaacaaagctgggaagtcacactatgtgaaattccattggaaacccacttgtggtgtaaaatctttgttggaggatgaagccataagagtaggtggcgcgaatcacagtcatgccacacaagatctttatgactcgattgcagccggaaactaccctgaatggaagctgttcattcaaataatggatcctcttcatgaggacaggtttgattttgacccacttgttgtaaccaagacatggccagaggacatcttcccgtt

SEQ ID NO: 6736 - DNA, 402 bp, Gossypium hirsutum
  Clone ID: LIB3120-011-Q1-K1-D1
acgcagacgcgtgcgaccacgcgtccgagatggcagtgagcgcaacggtgatcggagcacttctgggactgggcacccatatgtactgcaactctctacgcaagctcccttatatgcgacatccgtgggagcacctgttggagatgggtctgtgagccgtgttcgttaaccagctcgtgaattgcgacgctcatctacaacgggaccttgacaatatgctcgaaaaggccaaggctggcaacgagcgccgctactttgatggagatgatgattaacgctttagcgctatcatcagatgagacattcatgcgccaagctactgaggtcataaaccggctcagattgcgagtgggccactctggactcttgctttgggccgattccaagcccgttgaaccttct

SEQ ID NO: 6737 - DNA, 215 bp, Gossypium hirsutum
  Clone ID: LIB3120-011-Q1-K1-D11
gttgaaaccatgtcaagttatcaacgttactgcacccaaagaggtagccataggcaattcttacattgcgtgtgtatcatgtttgacctccgtgcctattcaaatttgatgttttacgtcatgacatattttggagtgacgagagacaataattattcattttcttttaaaaaatagaaaatttaaaggctatgatttttatattacaaacttag

SEQ ID NO: 6738 - DNA, 470 bp, Gossypium hirsutum
  Clone ID: LIB3120-011-Q1-K1-D2
tcgcccactcgtccgagagaactagcgttagggctgcagctgcagatgaagctgctgctgccgctgccacaaaggaagctccggtgggtttcacccctccagaattggacccaatcaccccatcacccatcttcggaggaagcactggtggactgctgagaaaagcccaagttgaagaattctatgtcatcacatgggattcacccaaagaacaaatctttgagatgccaactggtggtgcagccatcatgagacaaggacctaacttgctcaagctggccaggaaagaacaatgcttggctttgggtaccaggctgaggtctaagtacaagattaagtaccagttttacagggtttttcctaatggtgaagtccaataccttcaccccaaagatggagtttatcctgagatagtgaacccaggtcgccaaggatttggccagaacttcagatcaattgggaagaatgtc

SEQ ID NO: 6739 - DNA, 426 bp, Gossypium hirsutum
  Clone ID: LIB3120-011-Q1-K1-D3
acgatcttgctctccacccttgaaccatgtcggctttagctggcaagtgtgcagaggagttgatcaagaacgccgagtacatcgccacgccaggcaaaggtattttggcggctgacgagagcacaagctccatcgggaaacgtctctcgagcataaacttcgataacatcgattgcaatcgccaagacctccgtgagctcctatttacctctcgcaacgcattatcctggctctacagtgtgattcttttcaaggaaacactctaccagagataatctggcaggtaacccttcagcgaaatcctcgtagagaacaatgtcattccaggtatcaaggtccataatggcaccgttgagatagcccgcaccaatggcgagaccactactcatgggttcgactccttgagtgcgcgttgtgagcaattct

SEQ ID NO: 6740 - DNA, 469 bp, Gossypium hirsutum
  Clone ID: LIB3120-011-Q1-K1-D4
tctttctacccacccttaaaccatgttggcttttgttggcaagtatgcataggagttgatcaagaacgccaactacatcgtcacgccaggcaaaggtattttggcggacgacgagagcacaggctccatcgggaagcgtctctcgagcatcaacgtcgagaacatcgagtacaatcgccaagcccttcgcgagctgcttttcacctataccaacgcattatcctgcctctccggcgtcattcttttcgaggaaacactttaccagaaaacatctgacgggaaacccttcgatgaaatcctcgatgagaacaatgtcattccaggtatcaaggtcgataagggcaccgttgagatagccggcaccaatggcgagaccaccactcaagggttcgactccttgggtgctcgttgtcagcaatactataaagctggtgcccgtttcggcaaatggcgtgcggagctcaagatc

SEQ ID NO: 6741 - DNA, 455 bp, Gossypium hirsutum
  Clone ID: LIB3120-011-Q1-K1-D5
cccacgcgtccgcactggtggtgttaagcaggcttctcaccttctcaaatatgattccaccggtggcatcttcgctgccgatgtcaagcctgttggcactgatggcatctctgttgatggcaaggttatcaaggatgtttctgaccgcaaccctgccaacctcccatggggggacctaggaatagatctagtcatcgaaggaaccggtgtgtttgtcgatagagaaggtgcaggtaagcacattcaagcatgagccaataaagtgctgattactgccccaggtaagggtgacatccccacctatgttgatggagtgaatgctgacacctacaacccacatgagcctatcatcagcaatgcttcttgcaccaccaattgccttgctcctttcgtcaaggttctggaccagaagtttggtatcatcaacggcaccatgactaccactcactcgtaca

SEQ ID NO: 6742 - DNA, 356 bp, Gossypium hirsutum
  Clone ID: LIB3120-011-Q1-K1-D6
acgtattcgcgtgcaccattactcgcggtagggttttaacatctagtgtacttaatacttcatctggcacgacggctgcttcggtgggcctcacaactgcataatgggggccgacgagtgcatatgcaccatgcggaagaggctctggtgcattaacgtctaaaacatcaagtgcactagtctatgtcttcgctagcggcttatcccctgtacaaactcatgagacgtcctctgcgggttgcagcatcatgaggatacgctctaacttacttcatctggcggtcaaagatcaattgatagcttatgataccacagtgttcttccaggtctaaaagtcgttccaggctctcatggga

SEQ ID NO: 6743 - DNA, 459 bp, Gossypium hirsutum
  Clone ID: LIB3120-011-Q1-K1-D7
cgaggatggtgaacctaatacagagatcataagaaagttgttcgagacaatcgatgagaacggtgacggtcgtctttcaccttccgaattgaaagcattgattataggaatcagatttgaagagatagacttcgacaaggatgactctgtgatgaaagtaatggcagattttgatacctccctcgactcttatattcaaaaagaagagtttgtaagaggaatcacaaagtggattaatgaagcaaagcaaactgggggtgcttatcttgaacctaatgctggaacgtttaagtttattgaccaatttcaccagcaaaccaagagagaacatgctttgttggggtcagaggaacaaagtgatgaagttgttgaacatgttgaaaacccaaggtggatctccttcaaagcagtactaatgctactactaggcaccttgattgcagctgcatttgctgatcc

SEQ ID NO: 6744 - DNA, 463 bp, Gossypium hirsutum
  Clone ID: LIB3120-011-Q1-K1-D8
cccactcgtccgttcctatattcctattcctattcttatcatcactctctcaatcctttgcttattacaactaatcctttttcttctttatttttcacctttcagttcaaatcatcaaacccagaaagcgtggctacaacaaactgcaaaaaaaggaaacaattagagaaagaagctatggaagttggcttaaagatgacgatgaaaggaggcggaggagatcatgttggaggttgcgacaaagagaagatggggtttgaagagactgagctgaggctagggttgcctggtggtggtggtggtggtggtgtctgtgaagttgtgaggaaaagaggcttctctgaaactgttgatttgaagcttaacctttcctccaagcaagacacctatgtgatcgatcccaatgatgagaaagtgaaaggcttgcaccatgagaagaatcttctcctttctgccattgatg

SEQ ID NO: 6745 - DNA, 330 bp, Gossypium hirsutum
  Clone ID: LIB3120-011-Q1-K1-D9
gttttctgctctgtttttcattgacaagtttcaatggcaaaaccagtttccattgaagtgtggaaccgaaatgggaaatacagagttattagcaccaaacctatgcctggaactcgatggatcaacctcttaatcgagcaagattgccgtgtcgaaatatgtactgagaagaaaacgattttgtccgttgaggatatcatttctttgattggcaataagtgcgatggggtgattggacagttgactgaagactggggggagactttatttgcagctttaagcagagcaggaggcaaagcatttagtaacatggctgttggttacaacaat

SEQ ID NO: 6746 - DNA, 458 bp, Gossypium hirsutum
  Clone ID: LIB3120-011-Q1-K1-E1
acgcagacacgctttgactgaaactagctgatgctgcaaccgatggacgcatgatgtctaaatggcggggcttctgtccaggtcggcatgatacattattgccaaggcaggatctaattatgatttccatccattaactaatgattcctgcataagtgacgctgtttacactgttttgcttgaagcataacaccgaatcgtctatgctattgcaacccaagacatccctagtctgaaagacctgtcaccacgacaaattaaggttatggcagcactcatatcgattaatgatgtactagacgatctaattgagtcatgcagcatgagtggagaagaagaacagctactgctttgtaatgagtatgtgaatgaacaacatcctagccttctggagtttctgctgatgttatgggatgatgcatctagcaagcttctgcgagatgattcaatgacaatgc

SEQ ID NO: 6747 - DNA, 339 bp, Gossypium hirsutum
  Clone ID: LIB3120-011-Q1-K1-E10
accaaagctccctgtaagaattgcttgaaagatgctggcatttccacaaatgatgttgatgaggttcttcttgttggagggatgacacgtgtacctaaagtgcaagaagtagtttcagggatctttgggaagagtccaagcaaaggagtcaatcctgatgaggctgttgctatgggggcagcaattcatggtggtatacttcgtggggatgttaaagagttgcttctgcttgatgtaacttctttgtcacttggtattgagacactaggtggaatattcactaggctaatcaaccggaacacaaccattccaacaaagaaaagtcaggtgttctctact

SEQ ID NO: 6748 - DNA, 341 bp, Gossypium hirsutum
  Clone ID: LIB3120-011-Q1-K1-E11
ggctctcatgaagggatggcgccttacctactttcattactacaacaccacctgctatttttgcgatcgccgactacctacattgctggcttccatcgcctctaacaccatctattatacctgtcctgctactgttattcaaaaccccccaatttttccttgccctgttcctttgctcaacccaagagaagagatgggaaacaagtcctaaactaatccattgaagctctcaagaaacttctcactgtggaaggagaactgaaagctgaagcagctgcaagggtagatcaaataacagcagagttaaacacaacatcagctgacggcaaaccatctgactc

SEQ ID NO: 6749 - DNA, 275 bp, Gossypium hirsutum
  Clone ID: LIB3120-011-Q1-K1-E12
cccacgcgtccgcatcggtcggtggcggaggcagatacatggccttctctccgtcgccttgcgcccctgactctccccatctatgcggccttcgttccgccgccgccgctctccttgaccaagagaaatatctctcggagttactggcagagcgttacaagcttagtccatttatgacagtgattcctcatacctgtagactgttgaaccaagaaattttgcgtataactacactgttggggaatgcatcagttttaggtcaaaatgggcttgaa

SEQ ID NO: 6750 - DNA, 461 bp, Gossypium hirsutum
  Clone ID: LIB3120-011-Q1-K1-E2
tcgtaaacggttcattgtcggataaccttatccttctctcccgttactgaatcaaccgaataaaaaagaagaagcagcacgctcttccatttcttaagatcaatgaaaaaaacaattctttggatgatgaattggagtttaatttcatgttaatttatttattcggagataaaaactttcgttacttaagagattaagaactcctccattattacaatgtggattgcagcatcatcaacgtcgagttcaaccttgtctttctttcaaatacaatgctctgattctaaccgtaaacggggtttcggtcccagaaaatccaatcaaaaggctacatcaaaggaggagaagggttttaacttacaacataggaaattagctagtaagcagtccggtccttacctgctgcggacctgtttaagtgtccatttgatggaaatctaataccgttcttgacattgact

SEQ ID NO: 6751 - DNA, 461 bp, Gossypium hirsutum
  Clone ID: LIB3120-011-Q1-K1-E3
aagaaaatgaagatccaactgttaccaaaatgtttcactacaaaatgttgtccgacttgcttggaagcaaggaagcagcaaaaagttcaatgctttatagctataaacatggcttttccgggtttgcagccaggttgacagattcccaggcaaaggaaattgaagcatttcctggtgttgtccaagtgattcctaatcaagttcacaagtttcatacaactagaagttgggacttcatggggctaaatgatcattctacaacaaatcttttaactaaaagcaacatgggtgaaggaataatcattggagtaatagactcaggagtgtggccagaatctgagagtttcaatgataggggtatgaatccaattccacctcattggaaaggtatatgccaagagggacagttgttcaactcctcaaactgtaacaagaaacttatcggagctcgttggttcgtc

SEQ ID NO: 6752 - DNA, 435 bp, Gossypium hirsutum
  Clone ID: LIB3120-011-Q1-K1-E4
gaaaaccttccaagacttccttgtcggatgctccatcctctccaaccgacagcccgctggaatagccgtgttcggccggagcgctgagtctataccctcccaattaggcctcaagaaattctcttactgtctcgtttctcgccggttcgatgacactggcgtcagctgcaacatgttgttggaaaccgggtctagttccggtgatgccaagaccacaggccttagctacacaccgatttacatgaaccatgatgcttcaaacccagttttcactgagttctactacgtaactctacttataattctagtgggcgactagcacgtcataagctgcgtacaggtatttggtcccaggatcatatcgagtaaagtggcaccatagtggactcggtatcaacattcactcttatggagagaccactgttctaggtcgtg

SEQ ID NO: 6753 - DNA, 372 bp, Gossypium hirsutum
  Clone ID: LIB3120-011-Q1-K1-E5
tcgtccacgcgttcgcttgattttgatttaagttcattgcttgatccatttcgattggatcaaaggcctgatacagtagtaatcgtctatataacggaaggactaggtgatgatgttaggctgggatcatataagttcagggaaaggcagcctataggaactgctgctcaaactcaagataccatggactacaaggatccaactgctgatacactgtttgatcctgactagttatgcttatgggactattacagggctggcattgccgctttcgtcgccacttgctagtgtatttacattaccgttataactgcaatagttgtcgctaaatcttcaacctagagtgatactgtaatgaatcaagtcacagct

SEQ ID NO: 6754 - DNA, 175 bp, Gossypium hirsutum
  Clone ID: LIB3120-011-Q1-K1-E6
gaaacggttcattgactgatttgcctaacgctctatcctgttactgcgtcaaccctctgaaagagacgaagcaggtcgctgcgcgatttcttaacatcaacgattaaaacatctctaaggatgatgacttggagtttaatttcatgttaatttactcattcggaggtaaaaactt

SEQ ID NO: 6755 - DNA, 392 bp, Gossypium hirsutum
  Clone ID: LIB3120-011-Q1-K1-E7
attccttttctcctttttctttttctcagacaagatgggttctcagggatcgggtatggctatgcttttgctgatgatgttcactttatcatcagcttccgacatgtccattatatcctacgatgaagcccatcccgacaagtcaacgtctagttggagaacagacgacgaagttatggccatgtacgaggagtggcttgtaaagcatggaaaaacatacaacggtttgggtgagaaagagaggaggctccagatttttaaggataaccttaggttcatcgatgaacataacgccgatgagagtcacagttttaaggttggtttgaaccgctttgctgatcttaccaacgaggagtaccgagccatctacttgggaatcaagtatcccaacc

SEQ ID NO: 6756 - DNA, 422 bp, Gossypium hirsutum
  Clone ID: LIB3120-011-Q1-K1-E8
cctgctttgagctgggagaagtgtgtagggaggttgatcttcctgctggtgtcctcaacattctgcccggactaggccctgaagctggtgcatctttggcatctcatccacatgttgacaagatttcatttactggaagcacagtcacagcggttaagataatgacagctgctgctcaaagggtcaagcctgttaccttggagcttggtggcaaaggtccaatagttgtgtttgaggatgttgacattgataaggctgttgagtggaccatattcggatgcttttatacaaatggccagatctgcagtgcatcatcacgccttattgtgcatgaaagtattgcagcagaatttttggacaggcttgtgaaatggagtgagaacattaaaatttcagatcccttggaagaagggtgcaagctt

SEQ ID NO: 6757 - DNA, 339 bp, Gossypium hirsutum
  Clone ID: LIB3120-011-Q1-K1-E9
cccacgcgtccgggggaaacaatatttcttggggttcgagaagtactttggagggtctggtgagccggcataccctggaggaccactgtttaacccacttggttttgggaaagatgagaagtcattgaaggatttgaagctgaaagaagtgaagaatgggagattggcaatgttggcaatcttgggttacttcatacaatggctcgtgacaggtgtaggaccataccagaacctgttggatcacttggctgaccctttcaataacaatgtcttgactaacctcaagttccattatatgaaagtgcctatatttgttccatggaactacccttccccccc

SEQ ID NO: 6758 - DNA, 408 bp, Gossypium hirsutum
  Clone ID: LIB3120-011-Q1-K1-F1
ataccacaggctcccatcaaccgacatcatctttccccctcagaatggcggctgcgaccatgggtatctcttccccatctttcgcgcggataggccgccaagctctctccttccgcccctaatatccaaagcccaggccgtgtttacatgaggaaaaccgttaccaatgctgctcactgtggaagtgcatggtacggacctgaccgagtctagcacctgggtccactatctggcgagccttcatctcactcgtccgaagaataccgtggtgactacagttgggacactgctgaactctacacggacccatagacatatgccaaggaccgtgagctctaagttattcactgtacgtggactatgttgggtgctataacgtgtgttttccatgagattttagctaggcat

SEQ ID NO: 6759 - DNA, 312 bp, Gossypium hirsutum
  Clone ID: LIB3120-011-Q1-K1-F10
gagtgactgaacgagtcgagttcgaactcatattacccaaaatggcattcacattgtggagtgtgaatgtaccgcccaactaaacgaggtcggaagaagcacggggccgggtcttcgacttcttcataaaaggatgtggattaatcggcactattatggatatctataacctacacgacttggtcgacatatgcgtggtccggtctttcatatgatccgagatccgcgagaactgtcatgtttctaaccataacgtgattgatttactgctgaataagggtatagaagagctgaacaacattgttgtacatg

SEQ ID NO: 6760 - DNA, 251 bp, Gossypium hirsutum
  Clone ID: LIB3120-011-Q1-K1-F11
aaatctcgttatcaaatcttaatactttcttttcggttttttaattgttaccgctgaagtgaaagattggaattgggaggaaaatccaagattttgaggttttgagacggataagagtttggttcctggttaaaaaatagaggtcaggaaataagatgagagaattttggggatttaagatcttggattctctccatatatagaaaaaatgttgaaactttgtttaatggcttctcatgggtacactccca

SEQ ID NO: 6761 - DNA, 400 bp, Gossypium hirsutum
  Clone ID: LIB3120-011-Q1-K1-F12
acttgatgtcattgcaatcaatgacactggtggtgttaagcaggcttctcaccttctcaagtatgactctacccttgggatatttgaagccgatgttaagcctgttggtgataacgccatatctgtcgatggcaaggtcatcaaggtcgtttctgaccgcaaccccgtcaacctcccatggaaagacttatggatagacctggtgatcgaaggaactggtgtgttcgtcgatagagatggtgcacgaaagcacgtccaagcaggagcgaagaaagtgctcataactgccccaggaaagggtgacatcccgacctatgttgtcggagttaatgctgacatatacaacccagatgagcccataatcagtaatgcttcttgcaccaccaattgccttgctccc

SEQ ID NO: 6762 - DNA, 451 bp, Gossypium hirsutum
  Clone ID: LIB3120-011-Q1-K1-F2
gaaaaaagggattcgcttaacagccaacattttgtttccttctgctactggctagggtttaaatcaggggttttccttcttctgctcactgcttcaccactattccaccatcaacaaccaatggatagataccagaaagtagagaagccaaagcctgaatcacccattaacgagaatgagatccgaatcacttcccaaggtgctattcggaactacatcaactatgctattgctcttcttcaggacaagcatgtgaaggaaattgtcttgaaagcaatgggacaggcaatcagtaagacagtagccattgccgagattttaaagaaacggattcctcgcttgcatcaagatacttccattagctcggtgagcataactgatgtgtgggagcctattgaagagggccttgttcctgtggagatgattcgccatgtctcaatgatatctatta

SEQ ID NO: 6763 - DNA, 472 bp, Gossypium hirsutum
  Clone ID: LIB3120-011-Q1-K1-F3
caatactttcataacatttcacgaacttcactctccagtctccaatggcggctgccgtctccaccatcggtgctgtcaaccgagcaccgttgagtttgaatggatcaggtgccggagcttctgctccaagctcagctttcatggggaacagcttgaagaaagtgagcgctaggttcaacaacaacggcaaggctccagtgggaagtttcatgattgtggctgccaaagaaatcgacgaagacacacagaccgaccaggaccgatggaagggtcttgcttatgatatctccgatgaccaacaagacattaccagagggaaaggtatggtcgactcattgttccaagctcccatgaacgatggtactcactatgctgtcatgagctcctatgagtacattagccaaggccttcgcacatacgacttggacaacaacatggatggattctacattgccccagctttcatggacaa

SEQ ID NO: 6764 - DNA, 391 bp, Gossypium hirsutum
  Clone ID: LIB3120-011-Q1-K1-F4
cccacgcgtccgcgaagcctgcccaacaactccctgaatatccggatgccgatgagctcgattcggtactcaaaacgatcgggtccttcccgccaattgtgtttgctggggaggcaagaagactggaggaaaagctagccagcgccgtcgtcgggaaagcgtttctgttacagggtggtgactgtgcagagagtttcaaagaattcaatgggaccaacattagagacactttcagagtccttttgcagatgggaattgtcctcacttttggtgcccaaatgcctgtcatcacttgtgggaggatggcatggcaatttgcaaagccaaggtcagatccatttgagataaaagatggcgtaaagttaccgagttatcgaggagattacataaa

SEQ ID NO: 6765 - DNA, 446 bp, Gossypium hirsutum
  Clone ID: LIB3120-011-Q1-K1-F5
tcggtcccatcaaatgtgcctgaaaggttcttcttcaagtggaaacgtccttatacaggatgacatgtccggtgaacttgaagaaaacgggataatgtcacgcatccctttgcttttggcttcatctgaaacttcatagatagcacttgaaagaatcatgtcagcattcgcaagaagcatctacaagaacttccggcaggtgatctaagagtattggtccattaacagatagccctactgatacaacttctgagattgatgatgatgatcaagtttacgatagctagtaattccctcaacatgctgtaccgtgcaaacacggggacaggtgctgctactaatgcgacatctaccgtgacgctaggtatgaatacatgaggccgatggttgaaggatacaagagagtatgacatgggagatacgcgttctcacaacgctaatctaca

SEQ ID NO: 6766 - DNA, 304 bp, Gossypium hirsutum
  Clone ID: LIB3120-011-Q1-K1-F6
gccactcgtgcttcaagcctgagcaacaactccgtgaatatccggatgccgctgagctctatgcgatactcaaaacgatcgggtgcttcccgccaattgcgattgctggggaggcaagaagactggaggtaaagctagccagcgccgccgtcgggaaagcgtttctgttacagggtggtgactgtgcagagagtttcaaagacttcaatgggacccacattagagacactttcagagtcctattgcagatgggaattgtcctcacttttggtgcccatatgcctgtcatcactgttgacaggat

SEQ ID NO: 6767 - DNA, 153 bp, Gossypium hirsutum
  Clone ID: LIB3120-011-Q1-K1-F7
tcgctgactcgtgggctgttttgcgttaaaacatcattggcctaatattgacattcaggatcaatggtccttacagaggagcatctgacatttaatacatcaatggccatatctcatggtctaacatcacttatatttacacacatcatcaga

SEQ ID NO: 6768 - DNA, 235 bp, Gossypium hirsutum
  Clone ID: LIB3120-011-Q1-K1-F8
tgacaacttggaagcaatcaggcatcttacttctactaaacattatgaacatcgagagaggcactgtccagaaaaaccacggaggtgccttgttcctcttgctgaatgatataagcgtacaatcgagtggccaaatagcacggaaaagatttggtactacaatgttccccataccaaattgacacaacataaagggcatcagaattgggtgaaacgtactggagaataccttaca

SEQ ID NO: 6769 - DNA, 315 bp, Gossypium hirsutum
  Clone ID: LIB3120-011-Q1-K1-F9
gaaagcatggacttcagttttaatatctgtcacttcctatgcattggggatcttcatgatttcaaaagccccatggtatctacttcctttagcttgggcatggacaggaacagcaataactgggttctttgttataggccacgattgtgctcacaaatcattttcaaaaaacaaattattggaagacattgtgggaactctggcctttctaccactaatatacccatatgagccatggcggtttaagcatgacaggcaccatgcaaagacaaacatgttatcagaagatacagcttggcaccctgtttgtgaaaa

SEQ ID NO: 6770 - DNA, 425 bp, Gossypium hirsutum
  Clone ID: LIB3120-011-Q1-K1-G1
tcgggatgtttaatgaaattagaccgaaaagaattccgtgcatctacaatcatattttgattttgggtctgtgaattcccgaaggtgtgtttgaaacgctggacgacagttcctttgattttgagagaaaagagagagagagagaagagtagatcttggcttctctccttcgttcgattccgcttaattatagcccgcgtttctctcatacgtgaaaaatggggctgtctttcacaaagctatttagccggcttttcgccaagaaggagatgcgtatactcatggttgggcttgatgctgctggtaaaactaccattctatacaagcttaagttgggagagattgtcactaccattcccaccatcggtttcaatgttgagaccgttgaatacatgaacatctgctttactggtcgggatgttggt

SEQ ID NO: 6771 - DNA, 420 bp, Gossypium hirsutum
  Clone ID: LIB3120-011-Q1-K1-G10
tcctcaaatatctcatacaaggaattaaattgaatcaatggctcaaaccatgttgctcatgtctagccatgcattgagcttgaagagagatcaccctttactccatttccaagctcaagggctcaagcctaaacctgtctctcatctcttcttcaatccattgtctaacggtgtccatacttcatccaaagctttcaccactttagctatctttaaatcaaagaccaaagcagctcccaagagggttgagccaaagtcaaagccaaaggttgaagatgggatctttggcacctctggagggattggttttaccaagcaaaatgagctctttgtgggacgtgttgccatgcttggttttgctgcatcattgctaggcgaagcaataacagggaaaggaatcctagcacagcttgatttgga

SEQ ID NO: 6772 - DNA, 189 bp, Gossypium hirsutum
  Clone ID: LIB3120-011-Q1-K1-G11
ctttccattttcaatctgttctttcatatctgggcgaaagatatggaccgcgtgctattcactttcgaatctgacaatgagggccacccccacaagatttgcgaccaggcttcacatgctattcttgatgcatgcctagaacaagatccacatagcaaagtagcttgtgaaacttgtaccaagacaaac

SEQ ID NO: 6773 - DNA, 388 bp, Gossypium hirsutum
  Clone ID: LIB3120-011-Q1-K1-G12
ctaatttctggagttttagccccgattagaaagggtccagaaaaactttctagttatgaatcgggtatagaaccaatgggcgatgcttggttacaatttcgaatccgttattatatgtttgctctagtttttgttgtttttgatgttgaaacggtttttctttatccatgggcaatgagtttcgatgtattgggggtacccgtattcatagaacctttcatttccgggctaatccaaatggtgggttaagttaatgccatggcgaaaaggagcattggaatggtcttagttcctgaatattcagataataaaaagaaagaaaaaagtcaaaatattaataacattgagtatgaattccatcgaattttccttacttgttcgaacaacc

SEQ ID NO: 6774 - DNA, 440 bp, Gossypium hirsutum
  Clone ID: LIB3120-011-Q1-K1-G2
tgacaatttggaagcaatcaggcatcttccttctactaaacattatgaacatcgagagaggcactgtccagaagaaccaccaacctgccttgttcctcttcctgaaggatataagcgtccaatcgagtggccaaaaagcagggaaaagatttggtactacaatgttccccataccaaattggcacaaattaaggggcatcagaattgggtgaaagttactggagaatacctcacatttcctggtggtggaacccagtttaagcacggtgcgcttcattatatcgacttcatagaagagtctgtgcctgatgtagctgggggaaaacggtctcgcgtagtattggatgttggatgtggggtttgcagctttggaggtttctttttgacagaaagtgttgtgccatgtcctttgcacccaaagatgaacatgaagctcaagt

SEQ ID NO: 6775 - DNA, 475 bp, Gossypium hirsutum
  Clone ID: LIB3120-011-Q1-K1-G3
tcgcgagatagcttccagcgctacaatatggatggaattgctgagatattattagcacttcagaggatcgaacaagatgaagagttgacatatgagcaattacttgttctagagaccagcttgttccttaatggcctagacttttatgaccagcatagagacatgagactggatatagataatatgtcatatgaggaattactagccctagaagagaggatgggtaatgtgagcactgggctatcggaagaagcattgtcgaaatgcctcaaaaaaagcatctatgacacagcatcttcggagtttgcaaatgtgagctatgagggtgaaaaggatgatgtaaaatgcagcatatgtcaggtactttttctatatgactttccactaccatgctttttcatttcttctactcatctatgtatggaaagggatgattttgcacatttgcaggaagagtacgtgaatggagatgaaa

SEQ ID NO: 6776 - DNA, 426 bp, Gossypium hirsutum
  Clone ID: LIB3120-011-Q1-K1-G4
cccactcgttcgcccactcgtccgtctttcttttcattttttttcactcaaagaggcaagcagaaaattttagggagcacaacttcccccccccccccagtttcgctgttcagtgacaatggcgattgtgaatatggtgatggctgcggttatcatggcagcgaccctcggagggaaattgggtgcagcacaagtacaccatgtggtcggaggtgaccgtgggtgggacctttcctctgacgtggcatcttggtcctccggtaggagcttcagggttggagacaaaatctggttcgcctactccgcagcacaggagagcattgctgaggtgaatagcccggaagaatatgagtcgtgcgatgtgagctaccccattagaatgtacactgacggcatagatggcatcccgctggatggggaaaggat

SEQ ID NO: 6777 - DNA, 358 bp, Gossypium hirsutum
  Clone ID: LIB3120-011-Q1-K1-G5
tcgcgagatagcttccagcgctacaatatggatggaattgctgagatattattagcacttcagaggatcgaacaagatgaagagttgacatatgagcaattacttgttctagagaccagcttgttccttaatggcctatacttttatgaccagcatatagacatgagactggatatagataatatgtcatatgaggaattactagccctagaagagaggatgggtaatgtgagcactgggctatcggaagaagcattgtcgaaatgcctcagaaaatgcatctatgacacagcatcttcggagtttgcaaatgtgagctttgaaggcgaaaaggatgatgtataatgcactatatgtc

SEQ ID NO: 6778 - DNA, 109 bp, Gossypium hirsutum
  Clone ID: LIB3120-011-Q1-K1-G6
ttcgtacaatttggaagcaatcttccttttcttttactaaacatttgaacatcatgaaagggggtgtccataagaaccacgaaggtgccttgttcctcttcctgaagga

SEQ ID NO: 6779 - DNA, 209 bp, Gossypium hirsutum
  Clone ID: LIB3120-011-Q1-K1-G7
cggacgcgtgggcagacgcgtggactgactcgtgggctgaacatgaagttttcaacttcactggagaaggatgagttgcactggccatgtataacacatatgaggctattcgggcttttgccgaggcttccatgaacactgcttatcagaagaagtggcctatatatcttagcacgaagaatactattcacaagaagtatgatggaaga

SEQ ID NO: 6780 - DNA, 270 bp, Gossypium hirsutum
  Clone ID: LIB3120-011-Q1-K1-G8
ttcacacgtcctcccacgcgtgcgcaattggcgaatggtctacgttcacgtttggattctacaccaatctcatatgtgcacgtggactaactctgcaggcataacctactcgctgatactctagcaatgaggtccccgacgttagcacctaacctaagaccattgctcaaccttgtaagttctaaactactgcttaaaaacactatcacgtatcaagattcgatctgattgtgaattctgggactgccagtctgtgtccagacaaatgct

SEQ ID NO: 6781 - DNA, 288 bp, Gossypium hirsutum
  Clone ID: LIB3120-011-Q1-K1-G9
cccacgcgtccgctctctctctctaaaattcgttgagtttctgtctctagaaagaagtttggatcgtcgattccgccatggacgcagcagcgccgccgtggctcgtctactgcggtgtcgatcccgtccgtttctcttgcccgcgctctaacagagtatctattcgtactcgaaccagaccggttctcgctgtagcaaccgaccctaaacctactcgtaagactgcgtctcagtcctctccttcaaacaacaacgtgaacggctccttcaagtgctccttatctaaaa

SEQ ID NO: 6782 - DNA, 461 bp, Gossypium hirsutum
  Clone ID: LIB3120-011-Q1-K1-H1
caaaatcaatccccattgacaaacaatggcttccatgcttagctctggaactgttcttaggccaaccccatttcttggccaaaccaaaaatgctaaccctcttagagatgttgtctctctgggcactcccaaatatgcaatgggaaatgaactatggtatgggccagacagagtgaagtacttgggaccatcttcagctcagactccatcttacttgactggagaattccctggagactatggttgggacactgctggtttgtcagccgaccctgaggcctttgccaggaatagggctcttgaagtcatccatggaagatgggcaatgttgggagcactaggctgcatcacaccagaagtacttgagaaatggcttagggttgatttcaaggaaccagtatggttcaaggcaggagctcaaattttctcagaaagtggctcggattacttaggcaacccta

SEQ ID NO: 6783 - DNA, 392 bp, Gossypium hirsutum
  Clone ID: LIB3120-011-Q1-K1-H10
ggaacgtcacagttactggtgtggaaatgtttcaaaagacattagatgacgccatggctggtgataatgttgggttgttacttagaggtgttcaaaaggccgatattcagagagggatggttttggctaaaccagggacaatcactccccataccaagttcagcgccattgtctatgtgttgaagaaggaagagggtggcagacattctcccttcttcgcaggttataggcctcagttctacatgaggaccactgatgtcactggaagggtggcttccattatgaatgataaggatgaggagtctaagatggttatgcctggtgaccgtgtaaagatggtagttgagcttatcatgcctgtggcttgtgagcaaaggatgcggtttgctatc

SEQ ID NO: 6784 - DNA, 354 bp, Gossypium hirsutum
  Clone ID: LIB3120-011-Q1-K1-H11
cttctttgttttccaatagttcgtaacaatggcggtctcacttcaagctgcagctaccctgatgcaaccaatcaaggttgctgcagcatcaaggaccaatgtgccgctcaggtcctcccagagcgtttctaatgccttcggtttggagcctgttggtgctaggcttacctgctctttgcaaactgacctcaaggacttggctctgaagtgtgttgatgctaccaagctcgctggtttcgctcttgctacatctgctcttgttgtctcgggagcaagcgctgaaggagtttcaaagcggctaacctacgctgaaatccaaagcaagacatacatggaagtcaaaggaacaggaac

SEQ ID NO: 6785 - DNA, 352 bp, Gossypium hirsutum
  Clone ID: LIB3120-011-Q1-K1-H2
gtttcattgtttatcagagcaagaaaaagaagggaaaatggaagggaaagaagaagatgttagattgggagctaacaagttctcagaaaggcaacctattgggacagcagctcagtcccaagatgataaggattacactgagccacccccagcacccttgtttgagcctagtgagttgacttcatggtcgttttaccgagctggaatcgctgagttcgttgctactttcctattcttgtacatctcggtgttgactgtgatgggagtccttaaggacaaaaccaagtgtacaacttgttgggattcaagggatttgcttgtgcttttggtggtatgatcctttggctcttgt

SEQ ID NO: 6786 - DNA, 276 bp, Gossypium hirsutum
  Clone ID: LIB3120-011-Q1-K1-H3
ggagagaagagaagaatgccgtgaccccattgacggaaatgaagcctgagaggatttttcggaagatgggtctcttgcataggcgagtggatcggatcctgtctagtaagcctacagacttggctaagagtcgtaagatgatctggattgcctgcgatcctgttgagcaacaaagtgttcagctatatgcacttacttataaggtatgggcatggttgcttgacagatttcttgacatagagttcccatattgtgagcaggcattggatgcatatg

SEQ ID NO: 6787 - DNA, 485 bp, Gossypium hirsutum
  unsure (1)..(485): unsure at all n locations; Clone ID: LIB3120-011-Q1-K1-H4
gaaaccctcaaaattccactaaaaaatggcctccacagcttccctctccaccgccgtagccacgacctctttcctccgcgggcatgcggcgccgaaaaccctaaactcccttcctttcaaccaatctcttttcgggctaaaaccccaacgaaatggccgtctcaccatggcagcatacaaggtgacactgttaacacccgaaggaccccaagaattcgtgtgccccgacgacgtatacatcgttgaccaagctgaggaagaaggcattgatcttccgttctcgtgtagggctgggtcttgttcttcgtgtgccggagtgattaagcaaggctccgtcgatcaatccgacggtaatttccttgatgatgaccagattgctgcaagttttgtcctcacttgtgttgcttaccctcagagtgatgttgttattgagacccacaatgaggaacagnctacccgctggatatatatgatactatataata

SEQ ID NO: 6788 - DNA, 361 bp, Gossypium hirsutum
  Clone ID: LIB3120-011-Q1-K1-H6
gtttcattgtttatcagagcaagaaaaagaagggaaaatggaagggaaagaagaagatgttgggttgtgagctaacaagggctgggaaaggcaacctattgtgacagcagctcagtcccaagatgataaggattacactgagccacccccagcacccttgtttgagcctagtgagttgacttcatggtcgttttaccgagctggaatcgctgagttcgttgctactttcctattcttgtacatctcggtgttgactgtgatgggagtccttaaggacaaaaccaagtgtacaactgttgggattcaagggattgcttgggcttttggtggtatgattcttgctccttgttactgcactgct

SEQ ID NO: 6789 - DNA, 471 bp, Gossypium hirsutum
  Clone ID: LIB3120-011-Q1-K1-H8
cccacgcgtccgcggacgcgtggggtttgtgcttcttctgccgttgcagccgttgccatctcatcccccagttcccagaggagtggatcagtagtgaggacaacaaaggcttctttccttacagggaagaaacttcgatcagtcaaaaagtacacaaaaccagcagcagtccgaaccgttccggtgtgtgcagtggctgaccccgaccgacctctttggttcccaggcagtactcctcctccatggctcgatggcagcctccctggagacttcggttttgatcctctaggccttggatcagaccctgagaccttgagatggaacgtacaggcagagctcgtccattgcagatgggcaatgttaggagccgctgggattttcatcccagagttcctaaccaaaattggcattttaaacactccaccatggtactctgctggaaccgaggaatacttcactgacaccaccacc

SEQ ID NO: 6790 - DNA, 448 bp, Gossypium hirsutum
  Clone ID: LIB3120-011-Q1-K1-H9
cccacgcgttcgcccacgcgttcgcccacgcgtccgggcaaatatctttattggattaacataaaggtaaagagtacaaagacagacggtggggaatttattttggaatacatgagagtattataatcagaacctaataatttccccttaagaacaagcttgtagaggaaaattattgtaattttcaaagagtgaccggtttaatgagcaatatgctgataataaccttagttgctttcccaacatatgtatagccatcaccttcgttgtaaatcacattcatcacccttgcaagatttaatatacgattcataacttctattggcatttcggttggtttcaaaaaccctttattcacattcttacaggcactctcgatatgcttgttaaacacattgtatgcttcttgttccattacaccatattcttacatgtaacactcaattcc

SEQ ID NO: 6791 - DNA, 280 bp, Gossypium hirsutum
  Clone ID: LIB3120-012-P1-K1-A1
gttactcttccaggaaaaatcttcatacagtatttctttcactttctttctttgctagaggaaagataaacaaacctgctactggtcgtcatcacatctgagaaagaaaaaaaaaatgtcaggaggggttggcccaacctgcaatgatataagcctaccaaatgaaggaattcaaggccatgaaaaatcattccaccccaatcctcttaaaaccgactcgatttctcaccctcagggcaactcaattgtcttgccgttatgatcatcgtggcggcgagcg

SEQ ID NO: 6792 - DNA, 250 bp, Gossypium hirsutum
  Clone ID: LIB3120-012-P1-K1-A10
tcaaaaccctgaccggcaagaccataactttggaagtcgaaagctctgacaccattgacaacgtcaaggccaagatccaagacaaggaaggcatcccaccagaccagcaaaggctcatctttgccgggaaacaactcgaggacggtcgcaccttggccgattacaacatccagaaggagtcgaccctccatttggtattgaggcttcgtggtgggatgcagattttcattagaaagctgactaaccaaaa

SEQ ID NO: 6793 - DNA, 428 bp, Gossypium hirsutum
  Clone ID: LIB3120-012-P1-K1-A11
ctttctcatcttgtgatttgagcttcgtgtttgtgttgggttaagcaattcgccaagatgcagaacgaatagggtcaaaacatggatctttacatccccagaaaatgttcggccactaataggctgatcacctcgaaggatcatgcttctgttcagaattaatggtgggcatttggatgagcttggcagatacactggaactttctccacttttgctctttgtggttttgtccgtgcccagggtgatgctgacagtgcacttgacaggctttggcagaagaagaaagctgaagtccgacagcagtagtgggagttggattgctttttactacttgcttggtctctgaattttggagggaaaatgtgtttttttttttaaataagggaccttaagttctatcttggcttttttaaaatggattatggtg

SEQ ID NO: 6794 - DNA, 375 bp, Gossypium hirsutum
  Clone ID: LIB3120-012-P1-K1-A12
aggcaatgacctttaccctggtggccaatactttgaccctcttggtcttgctgatgaccctgtcacatttgctgaacttaaggttaaggaaatcaagaatggcaggctagccatgttctctatgtttggtttcttcgttcaagccattgtcacaggcaaaggtccactggaaaatctcttggaccaccttgacaaccctgttgccaacaatgcttgggtctatgctaccaagtttgtgcctggatcgtaaattaacagccctggatcgaactcgttccattatttgcttgtatctatcctctatgtacctgtagatttcgcatcactctgaaattttaaacctgtatcactaagaagtcaatgaaattcatgatc

SEQ ID NO: 6795 - DNA, 374 bp, Gossypium hirsutum
  Clone ID: LIB3120-012-P1-K1-A2
ccagaatcaagttcccagttagctatgggtgcaaccttcggcgttgagccaccaaaagaaaagggtgatgtggacattgcaacccacataagagttgatgatgatggtcctgatcgtagcttgctctatgtggagactgctgaccgtccagggttgctggtggatcttgtcaaaattattactgacatcaacatcaccgttgagtctggggagttcgacactgaggggttgttggcaaaggcaaagtttcacgtcagctccaagggtaaagctatcatcaggcctctgcagcaggtttcttgctaatagtttacgatatttcttgaggcgttctactacggaggaggcgagtttttgagtcaccatgatgatgc

SEQ ID NO: 6796 - DNA, 319 bp, Gossypium hirsutum
  Clone ID: LIB3120-012-P1-K1-A3
cggacgcgtccgcccacgcgtccgaaaaaaaaaaaggaaagaacctagggcgctctctcaattctgcgccgaccaacagcctttcaaaggtctgttcctctgcccatccttttgactcatgtgagagtcaatcaaggcctccttgagtcgaagggctcatgagcttcgtttgtagccccgaatcgccacttagcttcaatcatggtgaaacaagcgtggattcaagggcctcaaatgcaggtgagcgtcgctttccatttttatttacattcaatcaaaaaaaggggcagatgggaagataagagagaaataaggggcg

SEQ ID NO: 6797 - DNA, 197 bp, Gossypium hirsutum
  Clone ID: LIB3120-012-P1-K1-A4
ctcactcatccgttcacgcgttcgaccacgcgtacacatacgcgtgcggcttatttaagggaaaggaaccgccaaaccaatccgtgtcctgtgccaagtttaaattgctacaagcattgaccaagtaccagggcacggtgtaaaccatcgacaaaactggaaatcaagcatcaagattttccaaaggggccaaagga

SEQ ID NO: 6798 - DNA, 356 bp, Gossypium hirsutum
  Clone ID: LIB3120-012-P1-K1-A5
cccacgcgtccggagattcttggagtcgaaaaagcagcatctcagcaagagattaagaaagcagattataagttggcactgagacttcatcctgataagaaccctggtgatgaggaagccaaagagaaatttcagcagttgcaaaaggtcatatcgattctcggtgacgaagagaaacgggctgtctatgaccaaacaggttgcgttgatgactgatcttgctggggatgttgttgagaatttgaaaagctttttcaggactatgtacaaaaaggtcaccgatgctgatattgaagagtttgaagcaaattatagggggtctggtccagaaaagaaaggattgattggactttaca

SEQ ID NO: 6799 - DNA, 220 bp, Gossypium hirsutum
  Clone ID: LIB3120-012-P1-K1-A7
ctttctcatcttgtgatttgagcttcgtgtttgtgttgggttaagcaattcgccaagatgcagaacgaatagggtcaaaacatggatctttacatccccagaaaatgttcggccactaataggctgatcacctcgaaagatcatgcttctgttcagattaatgttgggcatttggatgaacttggcagatacactggaaccttcttcacttttgctcttt

SEQ ID NO: 6800 - DNA, 454 bp, Gossypium hirsutum
  Clone ID: LIB3120-012-P1-K1-A8
tccacctacatacaaaaactacccaacgccaccaccacccaaccctatcgtcccttacttccctttttactaccatacgccgccaccaccgtcggaggcgagaagcttatcatcaacaacacattggctttttatttccatgttgggttttttcctttctttcttttaatattaaaaaaaaaagtaattaaaggagaaaagatggtgaaaataaaatgtagaagatttgcagatctgaagaagccattgcagggatgaaaaaaaaaggaactgagaaatttctgaagatgtatgaagtaataatatttttctcttccttttttctaatatttattttcttcttatgatgtagattttatcctttaatttttgtttttatgaaccattttggatctatttttgttccatatgaatggttaattacaaactaattaagaaaggtaagttcattttc

SEQ ID NO: 6801 - DNA, 246 bp, Gossypium hirsutum
  Clone ID: LIB3120-012-P1-K1-A9
gcttggatttgaatggtggaggtgaggctaatgatgataatttaaaatagtcttagcggatcggagtgagatattactgtcaatgatctgattgttacacacactgtggacttccttttagtaaaaccaaaaatccttttggattttgactttttttaaattcaattcagaggaaataaagggggattggatttttggtatgatgaggtgaaaacactctagtgttgatgggcagtggatttggat

SEQ ID NO: 6802 - DNA, 373 bp, Gossypium hirsutum
  unsure (1)..(373): unsure at all n locations; Clone ID: LIB3120-012-P1-K1-B1
tcgcccacgcgttcggaaggagttagacaccaggacgcgtacaataatatttggtgccgcccccatcagaagtaaaaggttgatccaatgagttccagtacaccatcatctagcgctggaggtgttggatccgctgattctgctgctcctagaagaaattccaagcgacccaaatactctaagttcactcagcaagagcttccagcttgcaagccaatcctcacgccacgatgggtcatatcagcctttatgcttgttagcattgtcttcattcctattggagtggtctctcttgtttgcttctcgagatgtcgntgaaatcattgatcggtatgaaaactgcatgtgtaaccggacggcttacaaaaatgat

SEQ ID NO: 6803 - DNA, 77 bp, Gossypium hirsutum
  Clone ID: LIB3120-012-P1-K1-B10
cccactcctacatccaaaaatgctccttttatcaatcgcattccacatatcacctgtgtgccaggtttaattgattt

SEQ ID NO: 6804 - DNA, 405 bp, Gossypium hirsutum
  Clone ID: LIB3120-012-P1-K1-B11
atcctcattcaagttattcctttactctttgttccttaagaggattgcctcgtgtggggcggtgaatgttcaggtatctactatgtttgtaatggctatcatttattactccaacaaccgacttctttatcatccgagcatgaagttttcaagtaaattgggcaactaggtgtccctcgaaaatcaaaatagctttatggaaatttgttcatggttttgtagccactagatcatgcctatacaatagaagagttgcaaataacccaagttttccgaggtgtaatgttgattacgagacggtgaaccatgtgctaagattttgtgctacagcgagagatgtgtgggtaatgatgggttacctattgctttgggttagtgctcaactggaattccatgattggcttt

SEQ ID NO: 6805 - DNA, 374 bp, Gossypium hirsutum
  Clone ID: LIB3120-012-P1-K1-B12
gtcatctgtctgtctctctgttttactccacaaccactatcactaccattatggcttgggctactgtttctgtagccaaacccaaccttcagattcaggcaaaaggaaagggtgttggttttgcagatttctcaggcctacacaactcctctactagccttccctttgccaggaaaacctctgatgacttccattcactcgttgcttttcagacatctgctctaggaagcaataatggcgggtacaggaaagggatggcagaggcaaagctaaaggtggctataaatgggtttggtaggattggcaggaacttcttaaggtgctggcatggccgtaaagactccccacttgatgtcattgccatcaatgacact

SEQ ID NO: 6806 - DNA, 424 bp, Gossypium hirsutum
  Clone ID: LIB3120-012-P1-K1-B2
atatttatacaatctttgcttaagcaaagatagacactgttcgaagctagtatggggaaattgaaggcggtggtggttgttacaatgatttccaccgttcttctatctattctatggagggcaacgttacatttagaggataatgaaagttttgttcgatgtcttttagatcattctcacccttctcatcccatttcatcagcaatctatacgcctaaatcctcctccttttcatctgttttggaattttacattagaaacctacgattcaacgagtcctccacaccaaagcctttccttattctcactgcactccatgaatcccacatccaagctgccgttacttgcggtaaaagccattgggttcaagtggaaaatccgaaggggggccatgattacgagggcctatcttatggatctactc

SEQ ID NO: 6807 - DNA, 334 bp, Gossypium hirsutum
  Clone ID: LIB3120-012-P1-K1-B3
gcgctttataacactttacgaacttcactctccagtctccaatggcggctgccgtctccaccatcggtgctgtcaaccgagcaccggtgagtttgaatggatcaggtgccggagcttctgctccaagctcagctttcatggggaacagcttgaagaaagtgagcgctaggttcaacaacaacggcaaggctccagtgggaagtttcatgattgtggctgccaaagaaatcgacgaagacacacagaccgaccaggaccgatggaagggtcttgcttatgatatctccgatgaccaacatgacattaccagagggaaaggtatggtcgactcatt

SEQ ID NO: 6808 - DNA, 396 bp, Gossypium hirsutum
  unsure (1)..(396): unsure at all n locations; Clone ID: LIB3120-012-P1-K1-B4
gtgcattaccactttgatctaatcctcaatttcccaatttctcttgaaaccctaatcctaaagcgatttcccaacttcggcgttgtaatggccactgaggaaccaactgtcgccgtggaatctgcgcctgagctggcggaagagaatcccgctgaggctacagccaatcccaaatctggcaaagcatagaaagctaaagagcccaaagccaagaatgctgcagctcctaggaagcgacgagctcctcctgctcatccntcttacgaagagatggtcaaggatgcaatcgttcctttgaggagaagactggatcaagtcagtatgctatcactaaattcattgaagagaaacagaggaatcttcctggaaattttaagaaggctctgcttttccatt

SEQ ID NO: 6809 - DNA, 371 bp, Gossypium hirsutum
  Clone ID: LIB3120-012-P1-K1-B5
cttcactctgggtcacttagtttctttgctttttgctcttggagtgaggaaatccatatgaaggaagtgcgtttcgtctcttttgaattttcataatggctgggactggagtgttttcagacatattggatggagatgtttacaagtactatgctgatggtgaatggaagaagtcttcttctggaaaaactgttgcaattatcaaccccaccaccagaaaaactcagtataaggttcaagcttgtacacaagaagaggtgaacaaggttatggaatcagcaaaaactgcacataaatcatgggctaagactccactttggaagagagctgagctcctttataaagctgctgctatcctaaaggagcataaa

SEQ ID NO: 6810 - DNA, 420 bp, Gossypium hirsutum
  Clone ID: LIB3120-012-P1-K1-B6
tcgtccacgcgttcgtccacgcgttcgtccacgcgttcgcccacgcgttcgaaaaaccagggttctgtcttgggattttctcgtttcaaaacatcttcaaagcttttacttacttacagacatggcgagttcacgtcttccgaggtttatcatggaagttgctccaccacagtttgttactgtgatgagacaaagaacaaggacgatgttggataccattaatgaagaggataatcttgatggttcaaagagtttatcatcaactacaattccagcaggtgctactatggtgactgctgctgctgcttcatcttcttcagctactactgtgacggctcactccaagtatttttctcaaaggagtgtccagctctttaactttcagtaactagaacgatcgtatatttgaagatatgtatc

SEQ ID NO: 6811 - DNA, 317 bp, Gossypium hirsutum
  Clone ID: LIB3120-012-P1-K1-B7
cttatttcctttctcccggggttcctccgactctcgacggagggagagaaagaaagagcccacaactttcaaaagtttaatttctagggatttttaaaattttcttttttcttgtgtggtcgattttcagtttagctagttagataggttggattgagagggagggaagagcataagaaaattaattgaatagaaatgtcagcggcattggaccctgtcgattggcttctcttttctcttagtagagctttccgtagtcctcttgctgtttttgttcagatccagggttgtgttatatgcttgtctcttgctattgg

SEQ ID NO: 6812 - DNA, 287 bp, Gossypium hirsutum
  Clone ID: LIB3120-012-P1-K1-B8
ccatttaaaaaccttatcttcttttggctaagcgaaacaaaggctaaaatggtgcgggatctgctttatttgtgattctgccattttctaaacccaaaaccatatcttttccaaacccaacttccattttaatggtccccttttttcttttccaccggcttcatggcaaggccttcctttcttcctttctttaaaggttcacgcctttaacaaaaaaggcttcttcttttccttctaactttggtagaaacgcttccgcttcattttgagtaccggtcaggaagagg

SEQ ID NO: 6813 - DNA, 153 bp, Gossypium hirsutum
  Clone ID: LIB3120-012-P1-K1-C1
cttcccggtcctgcggagccaaagaccgcaaactgccgtgctttaaaacccaatcgtttggggctaaaaaccgctcgggattggccggtcaacgtagaagcgttcacggggtcaccagtaacacccctggggacccaagtatttgtttgcccc

SEQ ID NO: 6814 - DNA, 377 bp, Gossypium hirsutum
  Clone ID: LIB3120-012-P1-K1-C10
ggctttggaacaaaaagaaaaatgaaagccacacttcccacaccccatctccggtctgtcccttctccaaccccactttcgtttcaaactctccttcgcattccctgaaaccagaaggaaatcactaagcatcagctctactccgaagggaacaccatctccttctttggcttacgtgccactgagggtgagtgccagttctcaagccgctgctgcacctactgtcaatttgacggcaattcccaccgaaatgaaggcttgggtgtacggggaatatggaggtgttgatgtgttgaagttggatgataaagggagcgttccagaagtgaaggaagatgaggttttgtaaaagtggctgcttggtgccttaaccccgt

SEQ ID NO: 6815 - DNA, 379 bp, Gossypium hirsutum
  Clone ID: LIB3120-012-P1-K1-C11
tgagatcataaagcaaaggtgctatttcagggaaaaaggatatggatttaatgatacggcagcgtgaaaagactagcagtgaattacatcagtacacagcaacagatgctacatagcaattaatgttacagctttcagagacatatctataatctaagttcattttccggggacaaagttagtggcataagcccatgcgttgttggccaccggatcggcaaggtggtcaaagaggttctcaatgggaccctttcctgagactacaataaccatcggcatacaaaccaagtcaacctaaagccttaggcaccatggcaacctctgctatccaacaatctgctttccttggccagaccgctttgaagcagtccaatgagct

SEQ ID NO: 6816 - DNA, 327 bp, Gossypium hirsutum
  unsure (1)..(327): unsure at all n locations; Clone ID: LIB3120-012-P1-K1-C12
gcgtncggactacatagttgttgagttaagtcttgaatcttgagtccgatcatgagttgcaacggctgccgagtcttacggaaaggatgcagtgagtcttgtatattacgtccttgtttgcaatggattgagagccctgaagctcaaagccacgccactgttttcgttgccaagtttttcggccgtgctggtctcatgtcttttatttcagccgttcctgaatctcaacgccctgctttattccagtcgctgttgttcgaagcttgtgggagaacagtgaaccctgtgaacggagccgtggggcttttgtggaacggaaactggcac

SEQ ID NO: 6817 - DNA, 354 bp, Gossypium hirsutum
  Clone ID: LIB3120-012-P1-K1-C2
ctctactctgagcggacattgctcatctctgttcatcagcctcagcctctcctcctcagctctggtcatgggcctcacctcatcagctgtgcccctcttctctgtcggtcgaccatcggccttactcaagtctgtattttgaaaaaaaccctaaaaacttagcagccacgataatgtataatctcattctactttttatcaagaccttttgaacatgctgggtcacctcttctcgttagcttgctaaaaaattacagcctcctttgtcacctcttctcgcgattcatcgaaaggtgctgctggagttgctgttcagtacttgcgttacacacctggcctctttaatgtaggact

SEQ ID NO: 6818 - DNA, 155 bp, Gossypium hirsutum
  Clone ID: LIB3120-012-P1-K1-C3
cttatctgtagggaaacatcaggtgcaagtttactctcaagttgaaacgggaacacacaaccaggtcgtcggaaaatcccatcgtctaaaaagcaaaaaccaaattctcaaggaattaattacggatctcacaaaacaaaaactgactaaaccaa

SEQ ID NO: 6819 - DNA, 418 bp, Gossypium hirsutum
  Clone ID: LIB3120-012-P1-K1-C4
cccacgcgtccggcagattatctccaaaatcccagccgagaaagcgcaagaaaattaaagaaggaaaatgggagatttatacgctttggatttcgatggagttctctgcgatagttgtggagaaagttccatctctgctgttaaggctgctaaagtgagatggccggctttgtttgacggtgtggattcggtcttggaagactggattgttgatcagatgcatatggtgcgacctgtggtcgaaacggggtatgagaatctgctacttgtgaggttgttggtggagagtagattaccttcgattcggaaaacttcggttgcagaaggactaactgttgaagatattttagagaactggtcaaaaataaagccagtaatcatggaagaatgggttgaaaacagggatgcttaattgatc

SEQ ID NO: 6820 - DNA, 224 bp, Gossypium hirsutum
  Clone ID: LIB3120-012-P1-K1-C7
cccactcatacatcaaaacttgctttttttcatcccaataagatttttatttttcatggcttgaactttcttcaatggactttctaacttatcctaatccacacattttattatcaaatccactctttaatcaactactttttccccacaatacttcactatcaatactctacattccctacccattcatttccaatattatccattctataccactccctaca

SEQ ID NO: 6821 - DNA, 343 bp, Gossypium hirsutum
  Clone ID: LIB3120-012-P1-K1-C9
tcgtccacgcgttcgtccacgcgttcgtccacgcgttcgcattattgtaacaaaagctagagccttgaaggtgacggaagaggttgaaaggctattgtccgtgagccggccggtgaggatgcattggaccggttgtcccaacacgtgtggtcaagtccaagtggcggatataggtttcatggggtgcatggcaagggatgagaatgggaaaccatgtgaaggggcagacatattcttgggagggagaattgggagtgactcacatttaggagagctttataagaagggtgtcccttgtaagaacttggtaccctgtgttgctgacattttgggggaacacttt

SEQ ID NO: 6822 - DNA, 104 bp, Gossypium hirsutum
  Clone ID: LIB3120-012-P1-K1-D1
cggacgcgtgggcggacgcgtggggttactattttgttgtatgtgtacgttttgaaatattcaattcctctactttttaatgccaacttctctctagttcttct

SEQ ID NO: 6823 - DNA, 147 bp, Gossypium hirsutum
  unsure (1)..(147): unsure at all n locations; Clone ID: LIB3120-012-P1-K1-D10
gagagctttgaattatccatgtagctagcgaattattattataattatcggaagtagggtgtggtagtaaaaatatagggagttagttttttaactntaaatctattttactaactatctttttttttattttttattttacttttg

SEQ ID NO: 6824 - DNA, 378 bp, Gossypium hirsutum
  Clone ID: LIB3120-012-P1-K1-D11
ctctgtcatctgtccgtctctctgttttactccacaaccactatcactaccattatgggttcggctactgtttctgtagccaaacccaaccttcagattcaggcaaaaggaaagggtgttggttttgcagatttctcaggcctacacaactcctctactagccttccctttgccaggaaaacctttgatgacgttcattcactcgttgcttgttagacatctgctctaggaagcaataatggcgggtacaggaaagggatggcagaggcaaagctaaaggtggctataaatggctttggtaggatttgcaggaatttcttaagatgctggcatggccgtaaggacttcccacttgatgtcattgccatcaatgacact

SEQ ID NO: 6825 - DNA, 53 bp, Gossypium hirsutum
  Clone ID: LIB3120-012-P1-K1-D12
gttctagatcgcgggcggccgctcttgatctataactagtccccacgcgtccg

SEQ ID NO: 6826 - DNA, 420 bp, Gossypium hirsutum
  Clone ID: LIB3120-012-P1-K1-D2
agctgctcctgttgggactcctgtgattaaaccttatctacttaccaggcgtcctcgtcgtaaccgtaagtcccctgcattgagagcatcattccaggaaacaagtatatctcctgcaaattttgtatatcctctttttattcatgaaggtcaggaggacacacccattggagctatgccaggatgttataggcttggatggagacatggacttgttgaagaggtggcaaaggcctgggatgttggagttaatagtattgtgctcttccccaaagttccagatgctctgaagtcttccacaggagatgaagcctacaatgacaatggtttaatgcctcgaacaattcgtctgcttaaggacaagtccctgaccctgttatctataccgatgttgctttagatccatactcctcaaaatgg

SEQ ID NO: 6827 - DNA, 358 bp, Gossypium hirsutum
  Clone ID: LIB3120-012-P1-K1-D3
cccgaaatgattggaagcattatcggtgtgtacaatggcaaggcattcaaccaggttgaaatcaagcctgaaatgatcagccattaccttggcgagttctccatttcgtacaagccagttaagcatggtagacctggtattggtgctacccattcttctagggtcattgctctgaaatgaagtccacttctgcatctttacctggaagagacattttgggtgctgcacctataggattttgatttaatgacagacttatatgctttaagttatattcgatactgatacttacgcttgctcatttattattaaggttggtaaggatgacgacttcgcggatttgatatatcttgtgttg

SEQ ID NO: 6828 - DNA, 422 bp, Gossypium hirsutum
  Clone ID: LIB3120-012-P1-K1-D4
cccacgcgttcgggcaccttgtaattgacttgaaccaattctgattctctcttgcatactatcaaatggcagctactgcagcaatcaccactctcccccagttcagtgggttaagacccaaagtttctactgctccagttaggagcctggcagcagttcaaccaatgaaggcgcaaggggaagggtgctctcggtgctcgatgtgatttcatcggatcccccacaaatttgataatggtgactacaacaaccctgatgctgtttgctgggaggtttgggttggctccatcagcaaacagaaaggccaccgctggattgaagcttgaagtaagggactcatgcttgcagactggtgaccctgctgtttttacactagctgacactttggcttgtgggggttgtggccatatttttgggggtgg

SEQ ID NO: 6829 - DNA, 377 bp, Gossypium hirsutum
  unsure (1)..(377): unsure at all n locations; Clone ID: LIB3120-012-P1-K1-D6
tcgtccacgcgttcgtccacgcgttcgaagagacaccatctacgatgtctcaggggggcggcgctggtgccgcantatgaggcatggagtttgatctgtcggaagagattctggcggtgataccgacggatccttacgagcaattggatctggcacgtaagataacgtcgatggctatcgcctcgagagtatcgaagatggaaacggagattgggaggatgagagcaaagattttcgaaaaggatcgtatgatttacgaattggaagagaaagtatcaagattgcagcaagcgaatcatgaggccgaatctcgattaaagcttgtttttgacgaaaatatgaagcttgcaaaggagcgtgattcattggcaatgacc

SEQ ID NO: 6830 - DNA, 369 bp, Gossypium hirsutum
  Clone ID: LIB3120-012-P1-K1-D7
gatgtttccccacacttttatcatgcataactttttttaccccccgcatgtattccggaacaaggtggaaagcaagaaggttctccccttcctgtgagcacctcatttcattcagaccctgatgttgatgactcagaacagcgttaccgctggtgtgatgaagctaccaattcttctaatgttcaaactcttcaagggcagaacaaacaggagcctattgaggaattaaggtgcagttctcttatagatgatcagagtgcttgcaggcatttattgtatgatgttgaaaatcatgaaaagagctgcacacatggagctgttccaagttggagcaatgcaagctctgttgttactcttgctgcatcaatt

SEQ ID NO: 6831 - DNA, 53 bp, Gossypium hirsutum
  Clone ID: LIB3120-012-P1-K1-D8
cactccttatcatttacttttatatttacatttccttttccctatcaaacctt

SEQ ID NO: 6832 - DNA, 342 bp, Gossypium hirsutum
  Clone ID: LIB3120-012-P1-K1-E1
tccacgcgttcgtccacgcgttcgtccacgcgttcgtccacgcgtccgtgagactcttttgtatacctgtagcatatagtaataggaagcagtaatagcaatggcctcctccatgatctcatcggcaaccattgccaccgtgaaccgctccttcccggcacaggccaacatggtggcccccttcaccggcctcaaatctgcctctgctttcccagtcaccaggaaggccaacaacgacatcacttctcttgcaagcaacggtgggagagtgcaatgcatgcaggtgtggccgcctcttgggaagaagaagttcgagactctctcattcctgcccgatcttac

SEQ ID NO: 6833 - DNA, 307 bp, Gossypium hirsutum
  Clone ID: LIB3120-012-P1-K1-E11
cccacgcgtccgcccacgcgtccgcattggcttcctcaatgatctcatcggctaccggtgccactgcctctccggcacaggctaacatggtcacccctttcaccggcctcaagtctgcctctgctttcccagtcaccaggaaggccaacaacgacattacttttctcgcaagcaatggcggcagagtgcaatgcatgcacgtgtggccttctactggaaagaagaagttcgagactctctcatacctcccccatcttacacccgtgcacttggctaaagaagtagatttaccttcttcgctcaaaat

SEQ ID NO: 6834 - DNA, 396 bp, Gossypium hirsutum
  Clone ID: LIB3120-012-P1-K1-E12
cccacgcgtccgattttagatagttcttgagctttcttccatatttcccgaaagcaaggaacatatatttctttcctttgttttccaatcttgtttctttttgtactttgttcggtttgttttggttttgtttcagagagaaatggctgggattgttgtgatttttgatttcgacaaaactattattgactgtgacagtgataactgggttcttgatgaattgggtttcaccgatttgttcaaccagcttcttcctaccatgccttggaatcctctcatggacaagatgatgaaggagcttcatgctcaaggaaaaaccattgatgacattgttgaggttctgaaacgagctcctatccatcctatgatagtccctgccattaaagcagctcatgc

SEQ ID NO: 6835 - DNA, 370 bp, Gossypium hirsutum
  Clone ID: LIB3120-012-P1-K1-E2
cccacgcgttcgaacagaccagcaatggaagttcgtctcgtgcaggtccaatctgcatctgatggagctgattccactctttcaaacccgctgtgcgaggagtctcctcaaaattctccaaaatactctaacagacagagcatacattcaccacctgcctttggctcatcgcctaatcttgaagcccttgcacttgaagcaaataagtctaaggatcaagatggagatagttctttacttgacagttcacatctttcccgacccatgcatgaagttacattttcaacagaagacaaaccaaaacttcttagtcagttgaccgcattgcttgctgaggttgggctgaacatccaggaagcacatgtggttt

SEQ ID NO: 6836 - DNA, 363 bp, Gossypium hirsutum
  Clone ID: LIB3120-012-P1-K1-E3
gggggaaagaggagccaagcccttttgggtgcttgcattggggccaaaggctcgccctcccctgctgctggaactagaaagttgatcgttgtggcagccgccgcacctaaaaagtcttggatccctgctgttaaaggtggtggcaacttcattgacccagagtggctcgatggatcgctccctggagactacggatttgacccactaggtcttggaaaagacccagcattcctcaaatggtaccgagaagctgagctgatccatggacgttgggccatggctgctgtcgtcggcatcttcgtcggccaagcttggagtggcattccatggttcgaggcaagagctgacccaagtgccatagct

SEQ ID NO: 6837 - DNA, 435 bp, Gossypium hirsutum
  Clone ID: LIB3120-012-P1-K1-E4
tcgcccacgcgtccgagaaaaatggcttctgctttttctactctcctcaagtcttcacctattatcgacaagtccgagtggattaagggccaaaacctccgccacccttcggtttgttttgtacggtcacaccctacattgggcgcctttaccgtccgtgctagttcatatgccgatgagctttaagaccgcgaaaactgttgcatctccaggtcgtggtattttggccatggatgaatcaaatgctacatgtgggaagcggcttgcctcgattggtctcgagaataccgaggcaaaccggctagcttaccgtacccttctcgtgtttgcccctggcctcggtaactacatctcgggagctatccttttcgaggagactctctaccaatctaccatcgatgggaaaaagatggtcgatgttcttgttgaacaaaa

SEQ ID NO: 6838 - DNA, 365 bp, Gossypium hirsutum
  Clone ID: LIB3120-012-P1-K1-E5
gaagatattaccccaaaaagagttattgagatagttgagatgctaagaaggggagagaagctgcgacctggcactcaaaatccaaaacgaatcaagagtggaccagaaggtggaaataccactttgctaaccgatccgaaacctcctccatgccgtgatcttgatgcctgctaatgttaacatgccaccgcagtctcaaataatgtgaagcttggattttgccaaggcttttttggatgtatgttcttgttgaatttgtgaagctcaaccaatattttgaattttccatgcaatttaaacttggtacaagttatgagatgactaaatttgcattgtaccaaataattgatgttaatgcttttgcc

SEQ ID NO: 6839 - DNA, 403 bp, Gossypium hirsutum
  Clone ID: LIB3120-012-P1-K1-E6
atttagctatagcatacactactagtacccactactagcaatggcttcctcaatgatctcatgggctaccattgccactgcctctgcggcacaggctaacatggtcgctcctttcaccggcctcaagtctgcctctgctttcccagtcaccaggaaggccaacaacgacattacttctctcgcaagcaatggcggcagagtgcaatgcatgcaggtgtggcctcctactggaaagaagaagttcgagactctctcatacctccccgatcttacacccgtgcagttggctaaggaagtggattaccttcttcgctcaaaatgggttccttgcttggaattcgaattagaggagggattcgtgcaccgtaaatactcgagcctacccacgtactacgatggacgc

SEQ ID NO: 6840 - DNA, 401 bp, Gossypium hirsutum
  Clone ID: LIB3120-012-P1-K1-E7
atttagctatagcatacactactagtacccactactagcaatggcttcctcaatgatctcatcggctaccattgccactgcctctccggcacaggctaacatggtcgctcctttcaccggtctcaagtctgcctctgctttcccagtcaccaggaaggccaacaacgacattacttctctcgcaagcaatggcggtagagtgcaatgcatgcaggtgtggcctcctactgggaagaagaagtttgagactctctcatacctccccgatcttacacccgtgcagttggctaaagaagtagattaccttcttcgctcaaaatgggttccttgcttggaattcgaattggagggtgtttcgagctctacattattccattcctccactctttagtggggatatt

SEQ ID NO: 6841 - DNA, 360 bp, Gossypium hirsutum
  unsure (1)..(360): unsure at all n locations; Clone ID: LIB3120-012-P1-K1-E9
ggaagacgagaggagaggacagacaattgggttctaccattgatttcttttgccttatttcattgaatttggactcatagaaaaaaaaaatatacttcactcattcacctttctttcttttcttttttcattttgtatttttcttggaatgctactactttacttcttccttacttgttttcccatcatcttcctttttaagttgaagaaatcacttccaccatgggctactgaggtgaaattattgtctctctggtttgggaaagacgtttccttttcttccgttaccaagttgatcaaaactagntctagtcctttgtatttcacctccaaaatgcctctcaaaaagatgtctctcac

SEQ ID NO: 6842 - DNA, 411 bp, Gossypium hirsutum
  unsure (1)..(411): unsure at all n locations; Clone ID: LIB3120-012-P1-K1-F10
gggcaaatgagccccatgcatacttgagtggagagtgcattgaatgcatggcaacgtgagacagtgttgtccgggcgggtcttactcccaagcaccgtgatatcataactctttgctccatgctaacatataagcagggctatcccgacatcctgaaaggatttccattgagtccatacatcacaaggtatctcccacctttcgaggagtttgaggttgattcgtgcattcttacaaaaggggcatcaacggtctttccagccattccaggcccttctattttccttgtatttatcgggaagggcacatttcgcattggatcacgggaggacatantgactgaaggagatgtgctctttgcaccattcaacacggagattaccattactacatcgtctgaactgcagctat

SEQ ID NO: 6843 - DNA, 64 bp, Gossypium hirsutum
  unsure (1)..(64): unsure at all n locations; Clone ID: LIB3120-012-P1-K1-F11
nncgccacgcgtncgattntttaggtgcataatagtttgggaaaatgggaaggtatcatcgggt

SEQ ID NO: 6844 - DNA, 416 bp, Gossypium hirsutum
  Clone ID: LIB3120-012-P1-K1-F12
tccacgcgttcgcccacgcgtgcgattttgttccagagcctactcaagtttcagaggcttctggaccggatccagctactgcccttgtggaagagaatcaaaatgttgctgagaaagtttatgagccttcagaccaggaaaaacagttggtcgatgaagacgaggcggttgtgaaaccccagtctaattcaaacggtgatgatattactgtagttgttgaaccggcttcttcttcagcccaagaggattctgcaaagaaatcctatgcatcaattgtaaaagtaccaaaagaaagtccggggccaacaacagtctatgtaccttctaatactacaaaagtgacacccaagaaaactgagaagcaagctcctatttctgcagcacctgctacaccggaagcttctgcaccttccagc

SEQ ID NO: 6845 - DNA, 348 bp, Gossypium hirsutum
  Clone ID: LIB3120-012-P1-K1-F3
cggacgcgtgggcttttctctggccgcaaacaagcctctggcttcaagttccctatacatctggaaattgaataagatggtagggtgtaaacgaagcaatgaatcgcggtcaatactcacaattcatgatgctgctcagtattttaatactggtcttactgtcttagtttgcgtcttgtcttttgaactggatttgccgacttgaactgcgttgttgaaggtttacaaaacccgagcctgcaaatccagtcaaaagttaaaccgggctgagatttacgaatctgatatatattgggaggtattatgtgttaaaactaattcaggtgagcttcttcttttttgggatat

SEQ ID NO: 6846 - DNA, 399 bp, Gossypium hirsutum
  unsure (1)..(399): unsure at all n locations; Clone ID: LIB3120-012-P1-K1-F4
cccacgcgtncgagaaaatcagatgcagagtgaccaacaattttacccccaaaaagcattgccgatacttgcagatcaagtgggcggtaattacatgcatataccagttgcatctgcttttggaccagcttttcctccatgtgcaaaaaccttgccgcccctccatggcattgagtttcaaccctctgaggtttgtcccaagaacttcgttattttcaatcagactgataataggaaccaagtcttgttgaacccggctatcacaaacaagtgtcatggtgatggattaaatgtttttgcaaattacaatgatggaaaatatgagaggaaagatgcttatgatgtgggagaagaaacatactcttttctgaaagaggattcggatgaatattgatgcac

SEQ ID NO: 6847 - DNA, 404 bp, Gossypium hirsutum
  Clone ID: LIB3120-012-P1-K1-F5
tcgcgctcaccaccgaggtactactcgctgtcaatggggttcgcaaaactgagctgaagcctgttggtaccgagttagaaccagaggcgctttccacccctgttattttcggtacgagccaagggagtggggagtattttacccgggtcggagtcggtaacccggctaaacaattctacatggttcttgataccgggagtgatgttaattggatccaatgtgaaccatgtacggattgttaccaacaatccgacccgatttttgacccgtcggcgtcgtcgacttacagtccggttacttgcgagtcaaggcaatgttctcttctacgacaatcggcttgtcgtggcgggaaatgtctttaccaggtgtcctacggtgatggatcttacacagtaggggatttc

SEQ ID NO: 6848 - DNA, 299 bp, Gossypium hirsutum
  Clone ID: LIB3120-012-P1-K1-F6
tcgtccacgcgttcgtccacgcgttcgtccacgcgttcgcaaataccatggtctaataaggaaccggtcggattcgttgataattttttgaaagatttcttcgaaaaggtttcattaactcctcatttatatcgagtagaccttgttgttgcgagaattcttaattcatgagttgtagggagggacttatgtcaccacaaacagagactaaagcaagtgttggattcaaagctggtgttaaagagtataaattgacttattatactcctgaatatgaagtcaaagatactgatatcttg

SEQ ID NO: 6849 - DNA, 262 bp, Gossypium hirsutum
  Clone ID: LIB3120-012-P1-K1-F7
aaaaaaaataaaaaaaaaaaaaaaaataaaaattaaaaaaaaaaaaaaaaaaaaaaaagggtaagtgaaaaaaaaaaatgaaagaaaagatcaaataaattataaataatatggggggtcttttattatgattcaattttactttcctttccttgcaactactttattttttttttgttttccctaatttaatttcttttgccttctttttacaactgtctgtctggtaaaaccctttttttaccaaattttttcctcttta

SEQ ID NO: 6850 - DNA, 280 bp, Gossypium hirsutum
  Clone ID: LIB3120-012-P1-K1-F8
aacaaactttaaactacacttctacttcccactactaacattgtcttcctcaatcaggtcatggggttccattaacactgtctgtgccccacattctttcattgtcttttctttcaccggtctcaagtcctcctctcctttcccagtcaccacgttggtcatcaaccactttacttttttctctagcacatgctctcgagtatcattcattcacgtgttgccccccactgataagaagaactcctatacatcttaataccttaccgatcttactcccgtg

SEQ ID NO: 6851 - DNA, 361 bp, Gossypium hirsutum
  Clone ID: LIB3120-012-P1-K1-F9
gttgcacttgagggaaagaaaaaaatagaagatgaagcttgaatctatttttttgaagatggagggtaaagaagaagatggtaagctaggatcaaacaagttctcagagagacaacctattgggacatcagcccagacagacaaggactacaaggagccaccagcagcacccttctttgagcctggtgaactcaaatcatggtctttttacagagctggtattgccgagtttgtagccaccttcttgttcctttacatcaccgtcttgactgtcatgggtgtgtctcagtctaaaaccaaatgtgcaaccgttggtattcaaggcattgctttggcttttgggtggcatgatcctttgccc

SEQ ID NO: 6852 - DNA, 311 bp, Gossypium hirsutum
  Clone ID: LIB3120-012-P1-K1-G1
gttttctgctctgtttttcagtgacaagtttcaatggcaaaaccagcttccattgaagtgtggaacccaaatgggaaatacagagttattagcaccaaacctatgcctggaactcgatggatcaacctcttaatcgagcaagattgccgtgtcgaaatatgtactgagaagaaaacgattttgtccgttgaggatatcatttctttgattggcaataagtgcgatggggtgattggacagttgactgaagactggggggagactttatttgcagctctaagcagagcaggaggcaaagcatttagttacat

SEQ ID NO: 6853 - DNA, 394 bp, Gossypium hirsutum
  Clone ID: LIB3120-012-P1-K1-G10
caagaaattgcgaagcaaaaggtgtcaaagattgtgtatgactactacgcatctggtgctgaggaccaatggacattgcatgagaatagatttcctttcaccatgatactgtttcgtcctcgcattctcattgatgtaaacaagatagacatgaccacaactgtgttgggtttcaagatatcaatgcctatcatgattggcccaactgccatgcataaaatggctcatcctgaaggggagtatgcaacaactatggctgcatctgctgctggaactatcatgacattatcctcatgggcaacttctagtgttgaggaagttgcttagacaggaccctgcattcggcttgtccaactctatgtatacaaggacaggaatgtacttgcacagctcg

SEQ ID NO: 6854 - DNA, 357 bp, Gossypium hirsutum
  Clone ID: LIB3120-012-P1-K1-G11
caattgctctcaaatatctcatacattgaattaaattgaattaatggctcaaaccatgttgctgatgtctagccatgcagtgagcttgaaaagagatcaccctttactccatttccaagctcaaggactcaagcctaaacctgcctctcatctcttcttcaatccattggctaatggtgtccatacttcacccaaagctttcaccactttagctgtctttaaatcaaagaccaaagcagctcccaagagggttgagccaaagccaaaggctgaagatgggatctttggcacctctggagggattggctttaccaagcaaaatgagctctttgtgggacgcgttgccatgcttgggtt

SEQ ID NO: 6855 - DNA, 299 bp, Gossypium hirsutum
  Clone ID: LIB3120-012-P1-K1-G12
caaagataaacataaccaaaaagaaaaatggcttctgcttccgctactctcctcaaggcttcacctattatcgacaagtccgagtggattaagggccaaaacctccgccacccttcggtttgttttgtacggtcacaccctacatcggccgcctttaccgtccgtgctagttcatatgccgatgagcttgttaagaccgcgaaaactgttgcatctccaggtcgtggtattttggccatggatgaatcaaatgctacatgtgggaagcggcttgcctcgattggtctcgagaataccga

SEQ ID NO: 6856 - DNA, 322 bp, Gossypium hirsutum
  Clone ID: LIB3120-012-P1-K1-G3
gagaggtggcagcagctcatgtgtgataacctgctcagctggtgattcacaaacagttgtgattggtttagctgctgactcaggatgtgggaagagtacctttatgaggaggctaacaagtgtgttcggtggtgcagctgagccaccaaatggaggcaaccctgattccaacacactgatcagcgacatgaccactgcgatatgttcagatgattatcattcacttgacagaactggaaggaaagagaagggagtgacagcacttgacccaagagccaatgactttgacctcatgtatgaacaagttaaggctctcaagagt

SEQ ID NO: 6857 - DNA, 121 bp, Gossypium hirsutum
  Clone ID: LIB3120-012-P1-K1-G4
gcggagaggcggcaccacctcatgtgacataacctaatcattttttaaaacacaaacaaatattagggcagggagttataacacaggagggggggggacaaccttaattatgagactaaca

SEQ ID NO: 6858 - DNA, 254 bp, Gossypium hirsutum
  Clone ID: LIB3120-012-P1-K1-G5
ctctctttgagctttcttcttcggtttatctctgaagtcttatcatttcaatcactgtgctatgcacacacacacacatactttgaagaaaaaaaaaacctttaaagctctctttgaaactcaagcatcactgtataatctgatcatctcttcaaatatgccacgcccttttttccataagcttattctctcctctactctccaagataagaaactgaggatccctgataactttgttaagaaattcaaggatg

SEQ ID NO: 6859 - DNA, 305 bp, Gossypium hirsutum
  Clone ID: LIB3120-012-P1-K1-G7
tggcaagtgtttcttcaatggaattttggtgcatccttaacctcagagccactcttattactcgtcttcttattctcttgtttcatctttccaagaaactttactctaaattctttcctcctccttccgttcttcatcttccttctccttcttcatccacttcccttcctgaatctcaatcaagaatcccagagattgtatctgattcagacttgaagtttttgattgataatctggatgagaagctcgatgaggacgagaaatgggagactgtaattgataagaaaaccaactctttatcctac

SEQ ID NO: 6860 - DNA, 76 bp, Gossypium hirsutum
  Clone ID: LIB3120-012-P1-K1-G8
tcctcactatcacttaaactacctttttcttcttccattaaccaccaatccactatcgggactgggcttcctattc

SEQ ID NO: 6861 - DNA, 354 bp, Gossypium hirsutum
  Clone ID: LIB3120-012-P1-K1-G9
atccctctctctctctacctcgtccgtacgggatctctagggtttcaaccttcgacttcgattgaatcgctagggttttgattatatcctctctcctttgatcgtacattaaattgaatcaagaaattcggaaaaaaatatggtactttctcagaggattcatgaggcattcaaaggaactgtggaaagaataacagggcctcgaacagtctctgcttttaaagagaaaggagttttaagcgtctccgagttcatcctggctggtgataatcttgtatccaaatgccctacctggtcttgggaatctggagagccaagcaagaggaagtcctatttacccgcccgaaaagcaat

SEQ ID NO: 6862 - DNA, 313 bp, Gossypium hirsutum
  Clone ID: LIB3120-012-P1-K1-H1
ccggccggaattccgggtcgggcacgcgtgcgctcagttctccctcactttcaaaccctcaccgtcaccgctcttttccaacttccctcgaacccggttcgggcctttcacaaccgcgggggcaatcgcttcccgtttcaaagtcctggctagtcagaccgggttcttcactcggctcggccggttgatcaaggaaaaggccaagagtgacgtctaaaagatcttctcaggtttctccaaaaccagagacaacctcgccgtcatcgacgaactcttattatactggaacctcgccgacaccgatcgcgtcctc

SEQ ID NO: 6863 - DNA, 400 bp, Gossypium hirsutum
  Clone ID: LIB3120-012-P1-K1-H10
caagtattgccatgcttaaagtctgtcaagcaattcatgtcagcttctcctgatattattttaaagccagaatcatatggtctaagtcgagtcggaaatcttttacataagttcaagacctggaggattgacagttgtggtcagttaagaaagatatgggaggacaattcaagagcattacattcagtaattctagactggcttcaagaaagtttccacaaacattttgaaaagctttggtcagagatgctttctgaaggcttcctagagccccaagaacgttttcccaagagattgaagagaggataaaggaaaaggtggggtgccttatttgaaagtagggaatgaaaaataccccaatttaattaatttaattatgaatcttgcgaatctaaaatga

SEQ ID NO: 6864 - DNA, 108 bp, Gossypium hirsutum
  Clone ID: LIB3120-012-P1-K1-H11
cttcaatttgatctatctgtttctttcttctttgcttcttttcaagctctattattataacaggtgcctctgtttcttcttcttggtttcaattgccattaatttgat

SEQ ID NO: 6865 - DNA, 241 bp, Gossypium hirsutum
  Clone ID: LIB3120-012-P1-K1-H12
tcgcccacgcgttcgcgagtggagactttgagacaacatcttttaggtcccccctaaaaaagggtttgtaagagaaatggctactttggcagtgatcaacttatagaagcttaatggtgatgagagatcaagaatcatggagcaaatcaaggatgcctgtgaaaactggggattttttgaggtgatgaaccatgggattccacatgattttatggacactgttgagagattaacgaaagaa

SEQ ID NO: 6866 - DNA, 362 bp, Gossypium hirsutum
  Clone ID: LIB3120-012-P1-K1-H2
aaaaaaaatggcagctgcccggtctctctcaaatccatcttccaccacctcactaatttcccaatccagaaaccaatcaaaacccacttctcctccttcatttctaaagccccacagtctacaaagtccttggcttggcttcaaaatttcctttcagccatcaaaaaccagaccctacttgcccaaccatcgcaccatcactgcaactatctccttaagtctccccacttcgaaaacagatagggttgcttcagctgggaaagttcccaaatggtcaaggagagcgataaagtcatttgctatggctgaattggaagctaggaaactcaagtaccaactactggaactgagtcgttgctcat

SEQ ID NO: 6867 - DNA, 329 bp, Gossypium hirsutum
  Clone ID: LIB3120-012-P1-K1-H3
attccccctcccccaatcatacaacttagtgttttcttttcgtttgcagcggatccatggaagggacgccaggcagaaagcaggggtatagcaattatatgctattgaaccctaagaaagcctctttctttgatctaatcgccctcttattttctaaaaatttaaagaagagaaaacttatcgaaaccaggatcgaaactgaggacagcttctcgtatagacttggtatattcctctctactctgttacagaagtttctgctttccataaagacgccaatggctttggctggccaaacttttgaggatatgctcaaccttttaactaac

SEQ ID NO: 6868 - DNA, 324 bp, Gossypium hirsutum
  Clone ID: LIB3120-012-P1-K1-H4
caagtattgccatgcttaaagtctgtcaagcaattcatgtcagcttctcctgatattattttggggccagaatcatatggtctaaggcgagtcggaaatcttttacataagttcaagacctggaggattgacagttgtggtcagttaagaaagatatgggaggacaattcaagagcattacattcagtaattctagactggtttcaagaaagtttccacaaacattttgaaaagctttggtcagagatgctttctgaagtcttcctagagccccaagaacgttttcccaagagattgaagagaggataaaagggaaaagtagtg

SEQ ID NO: 6869 - DNA, 299 bp, Gossypium hirsutum
  Clone ID: LIB3120-012-P1-K1-H5
cccacgcgtccgtccacgcgttcgaaagcttttactataccttttgcttataagctgaaccaagtcgtcttcttcgtcttattattattatcttgcttcactgcttccaccattcccctatagcttctctaatctaatggaaaccaaaggttatacccaagatggcactgttgatcttcgtggtcgtcccgtgcttgcctctaaaactggaaaatggaaagcctgtgctttccttgttggatatgaagcatttgaaaggatggctttctatggaatagcttcaaacttagtgaactact

SEQ ID NO: 6870 - DNA, 230 bp, Gossypium hirsutum
  Clone ID: LIB3120-012-P1-K1-H6
gccacgcgtccgggcactcaatgtgaccgtcgaggaagtcagtgaagcccttttacaaggtaatgctggtgcactcggcactgaacttctgtgaaagtttattgaaaatggctccgaccaaggaagaagaacgcaggttgaaggactccaaaatgattcaccagtcaagcttgggccagctgagaagtttttaaaaaccattctttatataccctttgcgttcaaaaagg

SEQ ID NO: 6871 - DNA, 70 bp, Gossypium hirsutum
  Clone ID: LIB3120-012-P1-K1-H7
aaaaaaaaaaaaaaaaaaaaaaaaaaaaaaaaaaaaaaaaaaaaaaaaaaaaaaaaaaagaaaaagaaaa

SEQ ID NO: 6872 - DNA, 403 bp, Gossypium hirsutum
  unsure (1)..(403): unsure at all n locations; Clone ID: LIB3120-012-P1-K1-H8
attgctttaccggttagacttgtaagagttttcgatagatccgtcgaaaattaagaaaaaatgggaggagcagaacatggagggcatggagcagaggatttcaggacgaaggtgtggagcatgtctggtggcccatattgccggcccaagcactggcgtcgcaatactgcgattgctatgttcggcgttttcctcatttgtatcccgatcgccatgaaatccgccgagctcgagcaaaggcctcatcagcccgttcgtccaattccttcacagctgtggtgcaagaactttggaaacaaagattatagatgaagcagcaatgatagttcagacaaacctacgggtgggcagntcagttgtgtatttgcaagtggatttggtaacatgccctatgatttgaatt

SEQ ID NO: 6873 - DNA, 151 bp, Gossypium hirsutum
  Clone ID: LIB3120-012-P1-K1-H9
atcgctctttcggttaaactggtatgtgctgcatctagaaccgtctaaccttaagaaggaatgggatgagcataacagggtgtgaaccgaacaagcgaccttactacgtattatttccgcatgtatgtcggcctaaaatgtcggcccaagc

SEQ ID NO: 6874 - DNA, 180 bp, Gossypium hirsutum
  Clone ID: LIB3120-013-Q1-K1-A1
aaaaaagtgagcaaaaatgcttattgagagttttaaggtagagagccccaatgtgaaatacacggagaacgaaatacactctgcttacaactatgaaactacagatctcgttcatgagaacaaaaatgggacctatcaatgggttgtttaacccaaaactgtcaaatatgaattcaagac

SEQ ID NO: 6875 - DNA, 416 bp, Gossypium hirsutum
  Clone ID: LIB3120-013-Q1-K1-A11
cccacgcgtccgttctgatttccttgttcttttttacattcagcgaaggggtgctctgagatcacataccaaaatggtgaaggccgttgccgtccttggcagcaatgaaggtgttagcggaactgctttcttctcccaagaaggagatggtccaactaccgtgactgggaacctttctggtcttaagccgggactccatggcttccatgttcatgcccttggggacacaactaacgggtgcatgtcaactgtaccccattttaatcctgctggcaaagagcatggtgctccagaagatgagaaccgccatgctggtgatctatggaatgtcactgttggtgatgatggctgtgcaagcttgtccatcaccgacaaacagattcctgtcaaggcccaaactccattatcggaagagc

SEQ ID NO: 6876 - DNA, 300 bp, Gossypium hirsutum
  unsure (1)..(300): unsure at all n locations; Clone ID: LIB3120-013-Q1-K1-A2
gaatcgaccgatcgacccacgcgtgcgtccacgcgtccttacggacacttttttngtccgtagcgcacgccatagccgctcagtcgatctcttactggaagccaaacttcttccttcaatccaaactagccgagaaagatcaacaaattgccgatctctatgctcagatcgaagccctcgatgcttctttatctcaaacttcggataaactccctaaggccgatgaggagaaggggagcttgttgaaagataatgcttcgcttactagtactcttaagaaacctcagagagatgtttcca

SEQ ID NO: 6877 - DNA, 299 bp, Gossypium hirsutum
  Clone ID: LIB3120-013-Q1-K1-A3
ctacttcttatcaacgcagaatatcttattttagatcgggatggctagtaattgctaatatgttgaagaacattgagcctctcgacaattccgttgtttccaagggggtttctgattccgccaaggaatccatgaagcggactatctccactatgctagggattcttccatctgatcacttctccgtttcggtttccgtctccacccctcctcttcatcgccttctattctcttctatcatcactgggtatacgttgtggaacgcggagtatagggtttcactgatgaggaatctggaa

SEQ ID NO: 6878 - DNA, 327 bp, Gossypium hirsutum
  Clone ID: LIB3120-013-Q1-K1-A5
cagtgaagttctccccttccacccctgtaatccagggaactggccgtgtgtccatgaggaaaaccaccaagcctgttccttctggtagcccatggtacggtcctgaccgagttttgtacttgggtccactttccggtgagccaccatcttacttgaccggtgagttccctggtgactattgttgggacactgcttgactcttaactgatcccgaaacctttgctaggaaccgtgagctcgaagtcattcactgcagatgggccatgttgggagctcttgggtgtgtttttcctgagcttgtggctaggaacggtgtcaagttcggtg

SEQ ID NO: 6879 - DNA, 331 bp, Gossypium hirsutum
  Clone ID: LIB3120-013-Q1-K1-A6
cccacgcgtccgcccacgcgtaggctcgggtctagaatttttttataaccaaaggcacaacggctactacgtatgcatatactggtgaccaacgatcactcgatgctagccaccgcgacctcatgcgtgctagagctgcacctctaaacattgttacgacttcaactggtgcagctaacgctgtggcccttgtactccctactctcaaaggcaaactaaatggcattgccttgcgcagaccaacaccaaatgtttcggtcgttgacttaattgaccaggtcacaaagaagaccttcgctgaagacgcgaatgctgcctacagagaaagtgc

SEQ ID NO: 6880 - DNA, 335 bp, Gossypium hirsutum
  Clone ID: LIB3120-013-Q1-K1-A7
gaacgggcggtgctttacctctctttcttcctccaccaccacctggtctttttccgctcgtcgacgacctacattgcggccttcggtcgtcgctagccttaactcttctccttctcctccgactcttatccaagaccgtccggttttcgctgcccctgttcctttgctcaccccgagagaagagatgggaaacaagtcctacgacgaagccattgaagctctcaagaaacttctcagtgagaaaggagaacttgaagctgaagcagcgtgcagggttgatcaaataacagcagagtttaacacaacatcagctgacggcaaaccatctgactctt

SEQ ID NO: 6881 - DNA, 299 bp, Gossypium hirsutum
  Clone ID: LIB3120-013-Q1-K1-A8
gacccacgcgtcgcggatatagatatagcatacactactctgtcctatctttagcaatggcttcctcaatggtctcaggggctaccattggcactgcctttccagcacaggctaacatggtacctcctttgaccggactaaagtatgcctctgctttgccagtcaccaggaaggacaacaacgacattacttctctcgcaagcaaaggcggttgagtgcaatgcatgcaggtgtggcctcctactgggaagaagaagattgagactctatcataccatcccgatcttacacacgtgcag

SEQ ID NO: 6882 - DNA, 323 bp, Gossypium hirsutum
  Clone ID: LIB3120-013-Q1-K1-A9
ctcatgcttacatcggaagaaattttaagtctcatatgctaggacagacaatgacgggcgttgggaatataaaggcttactaaaacatcctcgacaagcccgttatcttgggctaacaagacgacaactcgtgtgcgcttacattttggtcctctgagcaggatgagtacaatcaaactcggtttgacaacattgcttaattaaatagaacgctggaagatgcaggatatgctgatcgtactcgagttcttgaactcttatgccatacggataaggggaatagcacggaaacacgatcgactggtacttcatcctttgatcac

SEQ ID NO: 6883 - DNA, 300 bp, Gossypium hirsutum
  Clone ID: LIB3120-013-Q1-K1-B1
ttccagcatgtcgtggtgctggcattgcatgaacaaacccacgtccttgaacatgcttggctatgaaacttccaataaatctaaaaataaagggaatgaattatctgcattgagtctttaggggttccattggagtatatcggattcattcacataattaaagtgatctgaattcgagtttggcatcttagtgaagactagagtctactcttgtatgcattttccagttggaatatatttcttgcctaagaaatcatgtatcttaatttccacattagttataaattatgacccattatg

SEQ ID NO: 6884 - DNA, 319 bp, Gossypium hirsutum
  Clone ID: LIB3120-013-Q1-K1-B12
cgatgttatctctgtgcacatgcgttttatgctgttcctgtgaatcggtggataagtaggctggagaataattgagtatgaatggatgctttaatatcaccaaaaaagacttaaggatatctgatccgttaaattttaaatttagttgcaagaattgaatcatcgagcatcacgaaacattgatgagtcctttgtaaaccctggaattgcggtaaagcagccattgcatgttgtgatggttgatcctaaagttgcaaataaatcacgatttacggaagagcttatttaaactatcttgctcaccgttgctgttggattg

SEQ ID NO: 6885 - DNA, 262 bp, Gossypium hirsutum
  Clone ID: LIB3120-013-Q1-K1-B2
tctagaatgaccctggcttttcacaccaacaaaaagattatcgaagaagtagctataatcccatccaagaggctccgtaacaagattgccggtttctcgacccatcttatgaaacgtatccataaaggaccagttcgcgggatttctcttaagctctaaaaacaaaagcgcgcgcgtcgcatggattttgtccccgatgaatcggccatcaaggtcgaccaaatcgaagttgataaggaaacactagatatgctttcggtta

SEQ ID NO: 6886 - DNA, 323 bp, Gossypium hirsutum
  Clone ID: LIB3120-013-Q1-K1-B3
ggccaaccccatttccttggccaaaacagaaatgctaaccctctcagagatgtctccgtgggcactgccaaatacacaatgggaaatgaactgtggtatggaccagacagagtgaagtacttgggacccttttcagctcagattccatcctacttgaacggcgagttccctggtgactacggatgggacactgccggtttgtcagctgaccctgaggcctttgctaggaacagggctcttgaggtaatccatggaagatgggcaatgctgggagcactaggctgcatcaccccagaagtccttgagaaatggcttagagttga

SEQ ID NO: 6887 - DNA, 437 bp, Gossypium hirsutum
  Clone ID: LIB3120-013-Q1-K1-C10
cccactcgtccgcgaacatcatcgtttctaattgttagacggcatcgacatggatgttccaagctaccttgaagcccgtgtcgtgaccaatgctttctcaaaatccatatgggttatcttccaactcttcttctatgcgctccgacctttgtttctcaaaccgaaaccccctggttgttgggagttcataaacttattcgttcagctcgccctcgatgcaaccatggtttactttcacgggtggaaatctttcgcttatttgatcctttcgacattcgttggtggtggaatgcacccgatggcacgccattttatctacgaacattatatgtttaaacccgaacaagagacttattcttattatggtcctcttaatcttttgacattgagtgttggctatcacaatgaacatcatgatttccctatgatccctgggt

SEQ ID NO: 6888 - DNA, 302 bp, Gossypium hirsutum
  Clone ID: LIB3120-013-Q1-K1-C11
aaaaaacactctggcgcagcagctttttctgtctatagcatcaatggccgcattacgtggctggtcacaggctgagctggacgggacctttcaactcagcggccaaacacgcttcaacattcctagcaacaacagagtgcctgtgcgtaggtctagtatcactgtcacagctcatcagacaccgtccgtgcctgaaactgcacgcatagccctgtaggctcccgttgctgatgtgatggccaatgactcctttgatcatgctgtgcttgccaatgccagacgcattaaagttgtcccaccta

SEQ ID NO: 6889 - DNA, 353 bp, Gossypium hirsutum
  unsure (1)..(353): unsure at all n locations; Clone ID: LIB3120-013-Q1-K1-C12
cttttgttctcttgtgacactgctaatattttttttattgtcgactccggcgttcgaagatcataaaaaaccggagtcgtttgagatggctacaagaacggatctagatgggaggccaataaagccgatgactatatgcatgatcggtgccggaggcttcatcggctcccacctttgcagagaaattgatgtctgagacgccgcacaaggtgctcgccttggacgtttacaatgacaagatcaagcacctactngagcctgactctctcgcttgggctggccgtattcaggttcaccgacttaacatcaaacacgattctaggctcgaaagcctcatcaagatggcagatctc

SEQ ID NO: 6890 - DNA, 326 bp, Gossypium hirsutum
  unsure (1)..(326): unsure at all n locations; Clone ID: LIB3120-013-Q1-K1-C3
gatatgggaagggcacgagcgtcagaatgtcatctacttcccaatcaacagcaaaggccgccgcgaagggtggcaagaaagctgccaaaaccgccatcaaagagaccctctttgacaccaaggttttacaccaccgactttgatgaaatggaggcgcttttcaacactgagattaacaagaaccttaaccagtcctagtttgaggcactgctgcaagagttcaagactgattacaatcagactcactttgtaaggaacaaggagtttaaagaagctgctgataagatngatggtcccttgagacaaatcttcgttgagttcttgga

SEQ ID NO: 6891 - DNA, 398 bp, Gossypium hirsutum
  Clone ID: LIB3120-013-Q1-K1-C6
atcacgcgctcctacaagcaatagctctagcttattcttttttaagagagagagaaaagagagatcttgcgtgagttaaaaagacaaacgactacagttgcatggtctgtagggttttgcacgtacaagttcgtgtttaatcatcacaatgactagcatcatggacacggtggttgttaactctagcacgacttacttccttgagacagagttacgtttaaggttgcccagcgcctatggaaactaatgtgaaactaccaaaaacaacggaaaaccagggttctcggcgaccgctaattcgaagcttaacctttcatcaaacgagactgtaacactagattccgttatgatgaaagataacagctcaactgacactgcaaagccacctgtcattgcac

SEQ ID NO: 6892 - DNA, 165 bp, Gossypium hirsutum
  unsure (1)..(165): unsure at all n locations; Clone ID: LIB3120-013-Q1-K1-C7
ttcgcgttcaccccaaagcttnagtttgtatttatttttactaaaggatgagaaatgaatatgcatttaattggaataaaaatacaaacagacacggatctccatcgatttgttgttggtgttctcttgtgtgtattctatttgcagtattaaatagcattcatc

SEQ ID NO: 6893 - DNA, 321 bp, Gossypium hirsutum
  Clone ID: LIB3120-013-Q1-K1-C8
cacaagttacaactcagcctctcctttctcctcctctcttcgcctgcaaatggcttgtgccagcactttcaccactctgtccctgctcaaaaccaccggctccaccacctcttgctccgtcttccgctcttctgcatccctcatccgccttccttccacgcgccgccacctcaagtcctctcctctcatccacagcctatgcttctcctccgctgcttctggggactctctgctttccctccatgtctcctccaaagttcgatctttcaagggaaaagggtcaagaagggttgtttcaatggccaagaagagggttgggga

SEQ ID NO: 6894 - DNA, 293 bp, Gossypium hirsutum
  Clone ID: LIB3120-013-Q1-K1-C9
cccacgcttacgcaaacaacaacctttataatggttatacggccgcgacacggaaggaccgagctacatctcagagcgcctcgggacaaatacattctctaaattaacatgagctatctcccaaccctaaccacatgcgctcggacctgcgcctatgaaaccgaaacgcccctgccgttgtgaattcatacacatgataggtcagctcgccctagacgcaaccatcctatacgctgaccgagataaacctcccgcttatgtgatccaatcaacattcgacagacgaagaatgc

SEQ ID NO: 6895 - DNA, 440 bp, Gossypium hirsutum
  Clone ID: LIB3120-013-Q1-K1-D11
cgtcttgagatcatgacaattcctgtttaaccaatgagtgattctttacgggatgtggaagacatatctcttagattctccatagagggagatatcaaactcaatggagagatcgatgcatcagctagacagaagaaaattgttgaagcctttactcgaatggcttctttaaacagcaacaccggcattgtttacagtcctggtagaagacagatgctattcgtaatagcagctgattgctatgatagtaatggagaaactagagacctttcaagcaatgatcatgaatgtgatgaaagatgcaggcttatgtttcggcttacgaaagataggctttgtattgctaaccgggtcaagtttcatagagaccatgcaagcattaagttgttgtccggttaacattgaagattttgatgcactggtctgtaatagtggaagtg

SEQ ID NO: 6896 - DNA, 430 bp, Gossypium hirsutum
  Clone ID: LIB3120-013-Q1-K1-D12
aagtagcttactactgcattatttttctcattctgcttttgctagctagctagcctgcttccatggcaccctcaattgttcttgtttcatggatggttttaggccttgtaatggcaacttcaactattcaagttgaagctgccagggcattttttgtattcggtgattccctggttgacaatggcaacaacaacttcctagcaaccactgctcgagctgattcccctccttacggcatcgatactcccagtcgtcgtgccagcggtcgcttctcaaatggcaaaaacattcctgattttatcagtgatgcacttggttcatagccaacattgccctacttgagtccagaactcaagggagataggctacttgttggggccaactttgcgtcagctggcattggaatactcaatgacaccggagtccaatt

SEQ ID NO: 6897 - DNA, 230 bp, Gossypium hirsutum
  Clone ID: LIB3120-013-Q1-K1-D3
ttgcttggcttccttttcagctgtgtcggcatttgcacatgatgaggaagaccaaggtcttgttatgaacttctacaaagattcttgtcctcatgctgaagacattatcaaggagcaagttaagctactgtacaagcgacacaaaaacactgctttttcttggctgagaaacattttccatgactgtgctgtccagttatgtgatgcttcactgctgctggactccacaa

SEQ ID NO: 6898 - DNA, 304 bp, Gossypium hirsutum
  unsure (1)..(304): unsure at all n locations; Clone ID: LIB3120-013-Q1-K1-D5
aggcaacaagaatnncgatccatccgccatggaagacctaatgaagcttttcgagatcgaatcttacaaggcatgggcagctttggagctagaggaagacaaacaagtgaaaggagctgaaataaccatgcaacaagcagaggattattttgactcggtcatggaaaccgccgcggatgagttcaagcgattccaggaagaaatggaacgcgagtcaaaagctgaactcagtggtgttgatgatactgctgagacagttaaaaaaatgggggacttgatggaaaaaggtgcaaacattgcgtct

SEQ ID NO: 6899 - DNA, 209 bp, Gossypium hirsutum
  Clone ID: LIB3120-013-Q1-K1-D7
agcacgcgatgctggaggcgaccgttagcctttcttcagcgaaggcgagcgacggcagcaagctgctttagttgtgtccgaacgaataaccacagggagaagatctccggtggcggagttccacgaggatagctttcatactgtcaccgtaccctcactttcaacagatgttcatgtaagctagaacaacatgatacttgaaaatatat

SEQ ID NO: 6900 - DNA, 233 bp, Gossypium hirsutum
  Clone ID: LIB3120-013-Q1-K1-D8
cccacgcgtccgcccacgcgtccgtttttacacatttattctaaggcctgatgcctgttatagcgtcttaattgataacagagagagagaaacaggcagcatgtatactgattgggatatccttcctccacgaaaaataaaggatgttaaagccaaaaagcctgcagattgggatgatagagaatacattgaggatcctaatgatgtcaaaccggagggatatgataaaattc

SEQ ID NO: 6901 - DNA, 213 bp, Gossypium hirsutum
  Clone ID: LIB3120-013-Q1-K1-E1
cattgtgggaaagatcaacatcggaatcaatggatttggaaggatcgggcgtttggttgcaagagttgctctccaaagcgatgatattgagctcgttgctgttaacgatcctttcatcaccactgtattcatgacgtacatgtttaagtacgacagtgttcacgggcaatggaagcatcattagctttacggggaggactcaaagaccccttc

SEQ ID NO: 6902 - DNA, 420 bp, Gossypium hirsutum
  Clone ID: LIB3120-013-Q1-K1-E10
agaatcctgaagtgaaacgaaccattttcatttattttacttgtctcgcagaaccaaaaagagcaaatcaaaagaatcatcaatggcttcaatcccgtgtacttttcaaataccctttacttcaaaacccgtgaattctcttgcatctctgccaaaactcagctgcaagtttctgggctctcaaaaaactctatcttggtcaaggccctgacgaattggaccctctaatggttcaagaactcaatgctggttcaagtttggtaagaacggcgttgatgctgaacgtgctggcatttattgcagccagggcatggatgattttgacagggatgatgttgagcagtacttcaactacatggtgatgcttgccgtcgaaggttcctacaataagatggaagctcttttgaaccacaacataca

SEQ ID NO: 6903 - DNA, 424 bp, Gossypium hirsutum
  Clone ID: LIB3120-013-Q1-K1-E11
ctggagccggtcgtatgggaggaactacacttttcacagtgaacaaccaaatggggaacgccacactcatgaacatcgctgataaccccaccaacgttcagctccccggtatgtacaacaaggaagagaaccctcgtgttccgatcattgtcaccggtaacgatttctcgacgctgtacgcgccgctcatccgtgacggtcgtatggagaagttttactgggcacccaccagggaagataggatcggttttgcacaggtattttcaagaccgacaatgttcccgatgatgacattgataagcttgttgacaccttcccgggccaatacattgactttttctgtgctctgagggccagagtttacgatgacgaagtgaggaaatggatcggagaggtaggaatcaataatgtcgggaaaaagctc

SEQ ID NO: 6904 - DNA, 326 bp, Gossypium hirsutum
  Clone ID: LIB3120-013-Q1-K1-E12
ccgatgcttacgattgacttaagtttttagttgttgaaaaagaatggagacagccggggagggcggtaaccaagatggttgatgcggagaagtaaaatgattcgctgactgaaaagttgtagtaaaatggctggtgaattctggtcttaccattatgcttaggattttcctaaactgagacgaaagtttatcctacctcatagccaaaacaaatcccatatcggttgccacacccaacatcgacccttcgaggccccgttctacagtcgtggaacaagttgctgatgaatgtcgatactttagcaggtttcagattgttaaccatg

SEQ ID NO: 6905 - DNA, 127 bp, Gossypium hirsutum
  Clone ID: LIB3120-013-Q1-K1-E2
gaccacgcgtccgccgacgcttgcgctcaaccatacgccaaaatgtggtattctcttaggcaagcccatcaaccggcggcggcctcggtggcaccgagacctctatatcatccccgtcgacgaaaac

SEQ ID NO: 6906 - DNA, 254 bp, Gossypium hirsutum
  Clone ID: LIB3120-013-Q1-K1-E3
atcaatctcaccaagaagatattttcgttaacatatgatattacatcaagagcagcattcggtaacacatgcaaggaccgagactctttcataatagttatagatgaaataataaagttgtcttctggattcggtctagcagatctgtacccttcttttggattgcttgagctaattagtggagtgagacaaaaagctgaggctctccgtgagaagagtgatgagatacttcaagggcatcgttaatgaaacac

SEQ ID NO: 6907 - DNA, 441 bp, Gossypium hirsutum
  unsure (1)..(441): unsure at all n locations; Clone ID: LIB3120-013-Q1-K1-E5
cccaagtttgatttaagttattgaggtcctttttttcctcataagngaagcanggcccaaaggaagaggatggagtgccaactcgagatcaagtcctcagctgataagttctttgatgcctacaagaccaaagcccagcttatgccaaaaatggccaatcaagtcgttagagatgtaaaacttgttgagggtagtggttgggattccgagggttcggttagacaatggtattttgttgccggaggtaagcttgagacttgtaaggaaatgatggaaaaggtgaatgataaagacaggactattgtttacaaattggtggaaggtgaaatcatgaaagctttcaaaagctggaactccatcctcaacgtgatgccgataggggagggaaggttggtgaaatggactatggaatttgaaaagcaaaatgatgatgtccctgat

SEQ ID NO: 6908 - DNA, 326 bp, Gossypium hirsutum
  unsure (1)..(326): unsure at all n locations; Clone ID: LIB3120-013-Q1-K1-E6
ctctgtctaacatagaaaagaaaatgacaatttctgcttcttttttgcaagcnncnaccatgctgctcaccggctgtgttttgggtcctatatctcttgtttcagctaaacatggtgttccatcttatgctcataagaaaatcgcttctaaaccttttgaagggtatcttgaaaatggcaactttgaagaacagcccatcccgactgccttaaagaaaacagtactcaaaggagcacacgcacttcccaaatggactatcacagggctagtcgagtacatctcgggtgggcctcaacctggtgggatgttttaccccgtcgctcat

SEQ ID NO: 6909 - DNA, 330 bp, Gossypium hirsutum
  Clone ID: LIB3120-013-Q1-K1-E7
cccactcgtccgcaccaacctgcattttattatatttttagctggaggaactttactggccagggaaacctccaatctcgttcatcattcacctcacatgttcccacattttctttccctttctgtctttaattttgagtgacaaagaccagcttccccagatttctcttcttaggtaaaagaaaacgtcactgtgcctatctttcaatgccttcactgttcactcaccaaagtcccgaactcacaaaacacgtttcagttctcagttcatcaatcaaatccagggtaaaccagctagttgtacttcaaaatcaatcccctttaatgtac

SEQ ID NO: 6910 - DNA, 219 bp, Gossypium hirsutum
  Clone ID: LIB3120-013-Q1-K1-E8
gccagtcgaccaatgcaggttgcattttttttttttaacctgcacgccaacaggctgaaaagggccatatattgaggccgccgagaaacctccgggctggagccagtctaagtgttcatcgaacgaacaacgtcttgtaaatgcaacgcttaaacagctgtcggtatctagccagcagattatatccctcagagatcatcatgcagtagatcctgtaaa

SEQ ID NO: 6911 - DNA, 444 bp, Gossypium hirsutum
  Clone ID: LIB3120-013-Q1-K1-F10
cccctttcctcccatattcctcttttttcaattccttttcacccttgctaataaaaccaccttattaacatacctaaccatgtcgtggcaaacctacgttgatgagcacttgatgtgtgacatcgatggcactggtcatcacctttctgccgctgctatcgttggtcatgatggcagtatctgggctcagagctctaactttcccaagtgtcagcccaaggagatcactgacatcatgaaagatttcgacgaaccaggtcaccttgcccctacaggcttgcaccttggtggcgcaaagtttatggtcattcagggtgagcctggtgctgtcattcgtggaaaaaagggatctggacgggtgactattaagaaaacagcacaagcacttgtgtttgggatatatgaagaatcagtgactccggggcaatgcaacatggttgtgga

SEQ ID NO: 6912 - DNA, 445 bp, Gossypium hirsutum
  Clone ID: LIB3120-013-Q1-K1-F11
cccacgcgtccgctcaatcatctttttccttttttaacataatatataagtctccttgcttgagcttaaatttccagccatgaatcacaaccagcaacacttcaatcaatcatcagcaggtcggttctcttcttcaatctttcctttcttatatagcttacatgaaaaacccagaaatattaatgtggtttagtacttgtttaatgatcaaacagctgcatacccaccaccaccaccctccacggcgccaggaccctacgtgactgcaccgtcggccggttacccgatgagcaaagacgagtacagtcagcaaaatccggctgctgtcgaaaccaagtccagaggtgatggattctggaaaggatggtaagtactacctaatacctatacatacatacatacatacatatatacacaatgaaatcttctctttcttgtatatatt

SEQ ID NO: 6913 - DNA, 438 bp, Gossypium hirsutum
  unsure (1)..(438): unsure at all n locations; Clone ID: LIB3120-013-Q1-K1-F12
ataaaagttactacagaccacggttttgagttgatagcagatgttgtactctttgccacaggcaggttaccaaactcgaagaggttgaatctggaagctgtaggtgtggaacttgataacacaggagctgtgaaggtggatgagtactcacgtactagcattcctagtatatgggctgttggtgacgttacaaatcggatgaacctaactcctgtagccttaatggaaggaacctgctttgcgaaaactgtttttggtaatgaacctatcaaaccagactacagccatgtaccttgtgctgtttttagcatccctccactttctgttgttggtctcagtgaagagcangcaattgagcaagcaaatggtgatgttctggttttcacatcaaccttcaatccgatgaagaacactgtatctggacggcaagaaaagact

SEQ ID NO: 6914 - DNA, 353 bp, Gossypium hirsutum
  unsure (1)..(353): unsure at all n locations; Clone ID: LIB3120-013-Q1-K1-F2
cccacgcggtccgtccacccgnccgctcagctctcatagttttcnnccccnnaggncagnggagggcaggagcttctctctggatcacaatgactatcctcattgatcaacccgagcttggtgttgaagcatgngttaacaagctcgataatgcagacaatgaactggtgttggatgggggatttgtggtgccacagacaatactctttggccaaacctttagagattatcatgttgaaagtgagaggcaacagggtgtggagaacttctaccggaccaatcatattaattcagacttctgactttgtcaagagaatgagaacagagtatggtaaaactgaacaaagatggag

SEQ ID NO: 6915 - DNA, 413 bp, Gossypium hirsutum
  unsure (1)..(413): unsure at all n locations; Clone ID: LIB3120-013-Q1-K1-F3
gcggttattaaaacgtgggattcatcccattctaatntgtataggggaatgaaatggcttcaagaatcgccgttgagcatttggagcacatatctcagaagtttgattttggagcatcaaatatagagcctttggttcaaacatgcatgaccactttgtcctcaaaaattgtgaaccgatgcaagcgccatttggctgagatttctgttaaagcagttctttctgttgctgatctagagaggaaagatgtcaatttagatatgattaaggttgagggggaaagttgggggaaaattggaggatactgagctaatatatggaatcaactgtgataaggacatgagtcatccacagatgccaaaacaaattgaagattgctaaattgccatattaacttgcccatttgagccccc

SEQ ID NO: 6916 - DNA, 275 bp, Gossypium hirsutum
  unsure (1)..(275): unsure at all n locations; Clone ID: LIB3120-013-Q1-K1-F4
gagttgaagattcaacaagaaactgttgtctaatggtaagcatatanaagagctcangaaggaaattgaggtggctaatgaggaacatgttctagtcgaattggctaagatggaggcatcaaaagaagctgcagatatcgaagctcaaaaagagaaagaagtaggtgaactgtcatgtatgatggcaggaacgaagaaaaaaatggaggacatgatcaacgagattgatcagactggagagttggaacaaagattgactgtcactttgtctgaca

SEQ ID NO: 6917 - DNA, 302 bp, Gossypium hirsutum
  unsure (1)..(302): unsure at all n locations; Clone ID: LIB3120-013-Q1-K1-F6
gacccacgcgnccgctaattgtaccctatactatcaaaggccactttatatgttttcatcggcaaccanagccaccggcgctccggcgcaggctaacatggacgctcctttcacctgcctcaattctgcctctgctttcccagtcaccatgaaggccaacaacgacatttcttctctcgcatgctatgactgcagagtgcaatgcacgcatgtgtggcctcctactgtaaagaagaagttcgagactctgtcatacctccccgatattacaccagtgcagttggcttaagaagaagattacc

SEQ ID NO: 6918 - DNA, 299 bp, Gossypium hirsutum
  Clone ID: LIB3120-013-Q1-K1-F7
ctaaggcctgcccatctaatgtgcttttcattttttctgatgaagcggaactggaccgtaatgtggctaacatggtgccaccatatgaccacattaaatatgccggcattggatctgctattgaatatgcagttttgcatctcaaggcacaagaaattgtggtgattgtacacagggccatgggtggaaacaaggggcttatgtctttgccatttgatggaaacaactcaactgatttcatacaggattgggttaagattggaatcccagctaagaccaaagtgctagctgaacatggt

SEQ ID NO: 6919 - DNA, 380 bp, Gossypium hirsutum
  Clone ID: LIB3120-013-Q1-K1-F8
acgatactcaacggtgttttgtgatttaaatttcttccaagattgtggcaaaacaagatggcttccctgcatgaaccatggctagtggacaacgggttgaaggggtctagcaaggagattcgccatggcaggactgcacacaacatgtcgtcttcgtcgttgcggaaaaaatcggacctgacgcttgtttccaaggttcggtatgcaatgcttaggcagttactcgccaatcttcaagaggtcatattagggaccaagctctccgttctcttcccagctattccattggccattgttgctgagtgttatggatttggaagaccctgggtgtttgcattaagtttacttggacttacaccattggctgaacgagtcagctt

SEQ ID NO: 6920 - DNA, 316 bp, Gossypium hirsutum
  Clone ID: LIB3120-013-Q1-K1-F9
accacgcgtccgttaagagttcaattttgatataataaaaacaaacagaaaataactcttctgcggatgggaaagccaggattgttggatcttgagaaccattttgcgttttatggggcatatcacagtaacccaattaacatcttgatacatactatatttgtgtggccgatatctttcacatctcttatactcttctactttacccccagctttctatgatctttctcaatctgggattttcccttctggaattaatcatgcgtacgttctcaattattgatctgctttctctatttcctaggcttgtttatgt

SEQ ID NO: 6921 - DNA, 186 bp, Gossypium hirsutum
  unsure (1)..(186): unsure at all n locations; Clone ID: LIB3120-013-Q1-K1-G1
cccacgcgtacgatggcctctttagccaacactgantggtgtctcccncggcaacgccaaaaggcgcggtgaccctctgtattgcagtcgtggacctaggtcatcggctccaacaccatccaactcatccactgtctagaccagtgctctcttctccaagaagaaagccggtcctacaaagcccaa

SEQ ID NO: 6922 - DNA, 428 bp, Gossypium hirsutum
  Clone ID: LIB3120-013-Q1-K1-G10
cccacgcgtccgctcttacccaacttttcattctctgtatcggctttcccttgtgccctcacttcctgtaacacaaggccccataaattcagaattcatgcaaacttgggggaaggagaaggagagctcaagcctaaaggaaagaagaaatttataactagagaagaagaaccggagcagtattggcaaactgcatgagaaagggaaggagagaatcccatgaagacccctctcccttacattataatatttggaatgtcaacacccttcgtaatcttagccattgcttttgctaatggctggattaaagttcctgttcgatgagtcttgagaattgagagactgggtttttcaatgttggtttactccaaatgcacctttaattcagccttctcggctttctactgtatgcatatatcgttaacaca

SEQ ID NO: 6923 - DNA, 287 bp, Gossypium hirsutum
  unsure (1)..(287): unsure at all n locations; Clone ID: LIB3120-013-Q1-K1-G11
cgggccgaccgacgcgtccgaccaatcgtccgaccaaccatcattttcagtttttttcataagatanacaccgcggcgcaggggggtaaataaacaggcataggtcacaaccagcaactcttcaatcaataattagcaacacgggtcccctcctcgatcattagttcataatatacgatcacatgaaaaacacaggctcattaatgcggttcagaacgcgtgtaacgatcaaacagttgcatacatacaagaaccaccattgacaaatccagtgacccttcatgacc

SEQ ID NO: 6924 - DNA, 356 bp, Gossypium hirsutum
  Clone ID: LIB3120-013-Q1-K1-G12
aataaacaacattggcaactccattttcagtttttaagctatcccgtaccttctggcacacgcgcgtgactgctctcactttagctcgtacttccacctcaccaacaacaaatatcctcgacgtcttagctgcttggaaacaagctcagcatattctttactttgatcctcaaatctctaatggtcgttacaaaagccatccacttatcgacaactcttcttcttgatcgaactctggttgttcgatccgacttcattcacggagctctctgcgaagaacacatcatgttgattataaaaaccttgtgcgatcctgactcgaccgtgattgagcccgagttaacacgctcaccacc

SEQ ID NO: 6925 - DNA, 267 bp, Gossypium hirsutum
  Clone ID: LIB3120-013-Q1-K1-G2
ttcctcagctttgttcacccctatcttctccaccgtccaaaagaagaatggcattgttaccccctccagcatctcattccacggccttagacccctaagcaagggcaaatcttcatccaacgccatctccttctcaagaaactcaacttgctagtgccaggcttgcaatcaaaacagagctgagcgcccaagttgtgataagcgtcagcactgctctctcccttttcttgggtagatttgtgttcttcaacttccaaagagagaacg

SEQ ID NO: 6926 - DNA, 398 bp, Gossypium hirsutum
  unsure (1)..(398): unsure at all n locations; Clone ID: LIB3120-013-Q1-K1-G3
nccacgcgtccgtccacgcgtagcgccacgcgtttctgatttcttgtgtgacagttctccttttgactgggttccttgcaacaattctcatgcgggtcttgaagaatgatttcattaagtacggtcaagatgaagaagcagctgatgatcaagaagagactggatggaagtatattcatggagaacgtattccgtttgccaaagtacaaatctctctttgctgctgctctcggatctggaacacagctgttcactttaacggtgctcattttttatgctgcaactgttggtgtcttttatgcatacaaccgaggagctctatttactcgcctggtggtaatatacgccctcacgtcagggattgcaggctacgtagcaacttctttctactgtcagct

SEQ ID NO: 6927 - DNA, 248 bp, Gossypium hirsutum
  unsure (1)..(248): unsure at all n locations; Clone ID: LIB3120-013-Q1-K1-G5
aagtggaaacgccggtttanatctcttgttgatcaggcaaaggtaccgtgaaggtgccgacataatcaaaaagggcaaaatgtgcgccctcttcattaacgatctcgatgctggtgccggtcgtatgggaggaaccacccaatacaccgtcaacaaccagatggttaatgctaccctcatgaacatcgccgataaccccaccaacgttcagctccccggtatgtacaacaaggaagagaacccccgtg

SEQ ID NO: 6928 - DNA, 312 bp, Gossypium hirsutum
  Clone ID: LIB3120-013-Q1-K1-G6
cccgtccgcgcagatagaccaatgcttgttggcaactctttttttaatttgttcgagaacaggcttaaaaagtccagatgttgttacttcccaaaatcctctttaatggtgccagtcaaagtattcatcgaaagatcaatttcttttaaattcaacgctacaacgggttttggtatctcaccggacagattattcttgaagagataaacatgcgttagattcttcaaagaaaacagcctacttggaattggaccttccaagttgtttctagctaagtccatatgctgcagattggtaaggtcgctgaaagat

SEQ ID NO: 6929 - DNA, 324 bp, Gossypium hirsutum
  Clone ID: LIB3120-013-Q1-K1-G7
atcaaggcctacgccaaacctagattttgttgtcttctgccggggtgttagcgaccagcacggagatcgatgctaagggcaacaatgtactcaaagttgtcgattgggacacgtttgtgattctacctccgtacattgcgttcaaaggaaacaatgacatgttcttgcgtaccgccgagatcgatggttacccgtatttacagctcttaagataggatattgaacacgcagctgtggaaatggacgttttgtatactctcaatggtgacattaggatcataccggtttgttccgataaagattggaagcgtaaaccgaattgga

SEQ ID NO: 6930 - DNA, 413 bp, Gossypium hirsutum
  Clone ID: LIB3120-013-Q1-K1-G9
cccacgcgtccgcgacggcttctattttcgggtgttgccttacctgctcttattacaccactaccaccttctatgtgtccgctcgtcgacaacctacattgcgggcttcagtcgggggtagcctaaactcttcttcttctcatccggctcttatccaaaaccgcccagtttttgctgcccctattccttagctcaccccgagagaagagatgggaaacaagtcctacgacgaagccattgaagctctcaagaaactttcaagcgagaaaggaaaactgaaagctgaagcagctgcaagggtagatcaaataacaacagagttaaacacaacatcagctgatggcaaaccatctgactcttctgttgagagactgaaagaaggctccgtctactttaagaaagaaaaatatgaa

SEQ ID NO: 6931 - DNA, 135 bp, Gossypium hirsutum
  Clone ID: LIB3120-013-Q1-K1-H1
ccacccctcaaatccagggaactgaccgcgttttcataacgaaaaccaccaacccctgttcctacctgcaacacaaggtacggtcctgaccaaggtatgtacttcggtccacaccccgctgagacaccatcttac

SEQ ID NO: 6932 - DNA, 244 bp, Gossypium hirsutum
  Clone ID: LIB3120-013-Q1-K1-H10
ggcacagaagctgactggcgctatttttgttttgattaaaactatgattgacccaagcttggtggctggttttactatcaggtatgggagttcagggtctaaattgattgatatgagggttaagaagcaattggaagagattgctgctcagcttgatttgggtgatattcaacttgctgtatgagttttgaattctttttttccctttgtgagaattgggtttgaaacatctctggttattatt

SEQ ID NO: 6933 - DNA, 444 bp, Gossypium hirsutum
  Clone ID: LIB3120-013-Q1-K1-H11
aacggagtttcgtgattaaaaaaactaccattattgtggcaaaacaagatggcttccctgcatgaaccatggctagtggagaacgggttgaagggatctagcaaggagattcgccatggcaggactgcacacaacatgtcgtcttcgtcattgcggaaaaaatcggacctgacgctagtttccaaggttcggtatgcaatgcttaagcagttcctcgccaatcttcaagaggtcatattaaggaccaagctctccgttctcttccctgctattccattggccattgctgctgagtgttatagatctggaagaccctgcgcgtttgcattaagtttacttggacttacaccattggctgaacgagtcagccttctcaccgagcaaattgcttattacactggtccaacagtgggagggcctgtgcatgcaacatgcgggaatgca

SEQ ID NO: 6934 - DNA, 191 bp, Gossypium hirsutum
  unsure (1)..(191): unsure at all n locations; Clone ID: LIB3120-013-Q1-K1-H12
cgcgtccgancccaacctaggtcctcttatttttggcctctttaaggcggcncttcggccctcttccttgggaacacaacataggtaattcgggttttaagggaaggccccgccgccgccgccggcgccgccgccgttgcctaaattcaaccaatcttggtattccaccttggcacccaaagggtccgttt

SEQ ID NO: 6935 - DNA, 285 bp, Gossypium hirsutum
  unsure (1)..(285): unsure at all n locations; Clone ID: LIB3120-013-Q1-K1-H3
cccacgcgtccgaaaccaagtcaacctaaagttttatgttctatggcaaccacngcnanccaagaatctgctntcgttggccagaccgcttctaatcattccaatgagctcttacgcaaagtcggagctttcgatggtggtcgtgttaccatgcgcagaactgtgaaaagtgcccctaccagcatcttgtacggtcctgaccgtccaaagtacttgggtccattctcagaccaaatgccatcatacctgacatgtgaattccctggtgactatgggtgggacact

SEQ ID NO: 6936 - DNA, 275 bp, Gossypium hirsutum
  unsure (1)..(275): unsure at all n locations; Clone ID: LIB3120-013-Q1-K1-H4
ggcactgaagctgactggtgcaatttatgttctcttccncgacacacccgcccancgggataatggctgccgtccaggagctcatgcgaatccctactcacgcggatgcagaagaattacacgctgtcggcggtagatttatttttacaagcacttttaaataataaaataatattgtttcatttataattacgaatgccgtcgccgtcattgtgattggatggattgatgtggataaaattattattattaacttttaccaaatattattaaat

SEQ ID NO: 6937 - DNA, 305 bp, Gossypium hirsutum
  unsure (1)..(305): unsure at all n locations; Clone ID: LIB3120-013-Q1-K1-H5
gcgaacggggannngtncnnnnatnncttttgatgtggtcttgagcaacaaaaccacgactgcggtgggtgctaagagagcaaagcctactattattgccccaactgtcaatcaagatatggctcatcctgaaagatagaatgctacacactatgccgcgtatgcttctagagactatatggctgactcactacataacgacttatttaaaaccaaccgggcaatggtagtatgctcacaccgttacatagccaacgacaaggatggaattaattgttcacttgctcgaggaacatttcagacac

SEQ ID NO: 6938 - DNA, 167 bp, Gossypium hirsutum
  unsure (1)..(167): unsure at all n locations; Clone ID: LIB3120-013-Q1-K1-H6
nnnnattcnaggnnnnnacaatattgcaggctgatttgccgcccgccaccaaaggcaactaggctgttcaacatgggataacagctatctgagaaattgaacgacctcttttgtagggtattatttgtagtatggcagcaaaagcttgtttgagcaaggaagaagag

SEQ ID NO: 6939 - DNA, 365 bp, Gossypium hirsutum
  Clone ID: LIB3120-013-Q1-K1-H7
atagttcgtaacaatggcggtcgcttttcatgtttcagctacccggatgcaaccaatgaaggttgctgcaccatgaaggaccaatgtgcctctcaggtcctgccagagcgtttgttaagccttcggtttggagcctgttggtgctaggcttacctgctctttgcaaactgacctgacggacttgtctctaaagtgtgttgatgctaccaagctcgcaggttgcactctcgctacatctggtcttgttgtctcgtgagcaagcgctgtacgagtgtcaaagcggcttacctacgctgaaatccaaagcaagacatacatggaagtcagaggaacaggtactgctaaccagtgcccaaccatagatg

SEQ ID NO: 6940 - DNA, 216 bp, Gossypium hirsutum
  Clone ID: LIB3120-013-Q1-K1-H8
cccacgcgtacgattccgacctgtttttcctttcttacagcatcaacatcgacagactgttcaaggaactgacactaattcatactttttgaaattcccagaacagacaaatatattataaaaaggggtaatttctgtagtggagaacccaacacgaaaaaaaaagaagaagaagctctaagcatcacttgaaatggctagaccgatactacccca

SEQ ID NO: 6941 - DNA, 443 bp, Gossypium hirsutum
  Clone ID: LIB3120-013-Q1-K1-H9
gttcgtcacaatggcggtctcactttttgtctttttctaccctgatgcaaccaatcaaggttgctgcaccatcaaggaccaatgtgccgctcacgtcctcccagagcgtttctaaggccttcggtttggagcctgttggtgctaggcttacctgctctttgcaaactgacctcaaggacttggctctgaagtgtgttgatgctaccaagctcgctggtttcgctcttgctacatctgctcttgttgtctcgggagcaagcgctgaaggagtttcaaagcggctaacctacgctgaaatccaaagcaagacatacatggaagtcaaaggaacaagaactgctaaccagtgcccaaccatcgatggtggtgtcaactcttttgccttcaagcctggcaaatactacgccaagaagttctgcttggagcccacttccttcactgtc

SEQ ID NO: 6942 - DNA, 90 bp, Gossypium hirsutum
  Clone ID: LIB3120-014-Q1-K1-A10
ctttctttctcccggaaatcatgtctgccgtcactacacaagcctcggctgccgttttccgcccatgcacgtcgaaaactaggtttctta

SEQ ID NO: 6943 - DNA, 90 bp, Gossypium hirsutum
  Clone ID: LIB3120-014-Q1-K1-A11
cttactttctcccggaaatcatgtctgccgtcactacacaagcctcggctgccgttattcgtggatgcacgtcgaaaactatgtttctta

SEQ ID NO: 6944 - DNA, 214 bp, Gossypium hirsutum
  Clone ID: LIB3120-014-Q1-K1-A12
cccacacaaactgtgaagcctaatcaaacagggcatctgctatagctaccagattaaatgctggaggcctttcttgcacggttcttgacaaagaaacatctcagaagcaaattttggagaagctcatatggatttgtgcatttatgcttgttggagcttgtcattcctgtggcaattataggcgttgtatagaatgaatacctttttgagagct

SEQ ID NO: 6945 - DNA, 119 bp, Gossypium hirsutum
  Clone ID: LIB3120-014-Q1-K1-A7
gcatacactactagtacccactactagcaatggctttcctcaaagatctcattggctaccataggcactgcctcttcggcacaagctaacatgggcacccctttcaccggcctaagtct

SEQ ID NO: 6946 - DNA, 122 bp, Gossypium hirsutum
  Clone ID: LIB3120-014-Q1-K1-A8
gaaaaaaagaatggcagaggagcatagatgccaagcgccagaaggccatcgtctttgcgtcaataactgcggctttttcggaaattcggcgacgatgaacctttgctccaaatgttacagag

SEQ ID NO: 6947 - DNA, 85 bp, Gossypium hirsutum
  Clone ID: LIB3120-014-Q1-K1-A9
gactcttttaatggtatccactaatataatttcccacttctctctcctctgatcgggtaaaaggaaattcgtcttaaaaaatcca

SEQ ID NO: 6948 - DNA, 264 bp, Gossypium hirsutum
  unsure (1)..(264): unsure at all n locations; Clone ID: LIB3120-014-Q1-K1-B1
gtntaaaaatgtcaaatagagagactttatgcttgagatttgatcttttatttcttgaatattaaaaattggtagcaactcatatataaagactttatgcttgagaaacaaaccaatcaaaaataccaataagacttttagttcaatccaaatttccttagaaaattcaatgttaaaataagtttgactactagaagatctctgccattatgctgattattaaatacctttttatatgactattttaatggaataagctattgt

SEQ ID NO: 6949 - DNA, 210 bp, Gossypium hirsutum
  Clone ID: LIB3120-014-Q1-K1-B10
gagacccacgattatatggcaaaactttattatgcaattatccggtttaataatatattgattgactttgacagagatatatggggatacatatctttaggatactttaagcagattaccaaggcaggtgagattggttcatcaacaatgctctataaaagtaaccctattgattttgaaaacagtgaatgtattcttgttaggctaatg

SEQ ID NO: 6950 - DNA, 343 bp, Gossypium hirsutum
  Clone ID: LIB3120-014-Q1-K1-B12
cccacgcgtccgctgcggcatatgggaaatgggcatctgctatagctaccagattaaatgctggaggcctctcttgcaaggttcttgacaaagaagcatttcagaagcagatgttggagaagctcatatggatttgtgcattcatgcttgttggagctcgtcatcctggggcaactgtaggcgttgtagagaaggaataccgctctgagagctcgcatctgctgctgcagcggagaaaggtataacatttgaagaagctatggaggataggctatgtgcttattctcgagctgtggcccacttcccaacagcagttaaagagttcaagtggaaggaatggatg

SEQ ID NO: 6951 - DNA, 343 bp, Gossypium hirsutum
  Clone ID: LIB3120-014-Q1-K1-B5
gtcagtcgggagtagagactcgatagaaactcagcaaaagagaagcccaaatctctatggcgatggcgagtctaccatcttctccacctgcgccatcaccttcttcaatctccgcttcccattctgagtccttcgtcactcttgccaccgctcttctaccaccgcaggcccaggttgttgctaccgccgaaaatggaacgctcaatgtcgatgaccaaaagcctcaaattgctaaccattttgcggttcttgataatccgggaaacaattggaagtacaagaaatttgaggctgactacgcccgtccggtgatggcaaaatatttctctaaaaataactttta

SEQ ID NO: 6952 - DNA, 262 bp, Gossypium hirsutum
  Clone ID: LIB3120-014-Q1-K1-B6
cttctttgttttccaatagttcgtaacaatggcggtctcacttcaagctgcagctaccctgatgcaaccaatcaaggttgctgcaccatcaaggaccaatgtgccgctcatgtcctcccagagcgtttctaaggccttctgtttggagcctgttggtgctaggcttacctgctctttgcaaactgacctcaaggacttggctctgaagtgtgttgatgctaccaagctcgctggtttcgctcttgctacatatgctcttgtt

SEQ ID NO: 6953 - DNA, 362 bp, Gossypium hirsutum
  Clone ID: LIB3120-014-Q1-K1-B7
gcgcgagtgggaatcagcaactcaaatacctgtatcctttggatattagtattaaagagaaaatagaggcaattgctaagtcatacggtgccagcggcgttgaatacaccgaacaggctgagaaacagatcgagatgtacaccaaacaagggttttcgggtctaccaatctgcatggcgaaaactcagtactcattttcacacaatgctgctgagaagggagcaccaagtggatttatcttaccgataaaggatgtgcgagccagcataggagccgggttcatttatcctttagtgggtacaatgagcacaatgccagggctaccaacaaggccatgcttttatgaaatcgatcttgacact

SEQ ID NO: 6954 - DNA, 292 bp, Gossypium hirsutum
  Clone ID: LIB3120-014-Q1-K1-B8
gatcgagtggtaattagcaactcaaatccctgtgagctgtggatattagtcttaaagagaagacattggcagctgctaagtcatacggcgccagtggcattttctacaccttaccgggtgcgaaacagatcgagatgtacaccaaacactgtgttacggagctaccaatggggatggcgaaaacttattacttattttcacacaatgctgttgagaagggagcaccaagtggatttatgttaccgatcatggatgtgcgagccaacataggagccaggttcatttatgcttt

SEQ ID NO: 6955 - DNA, 120 bp, Gossypium hirsutum
  Clone ID: LIB3120-014-Q1-K1-B9
cccacgcgttcgaaaaaaagaagaatctatgaagagagccttacttaattgtcaaacgagggcgctgaagtatacgattatgtaacgctcgcagctgacatatattaaaaactgataaaa

SEQ ID NO: 6956 - DNA, 271 bp, Gossypium hirsutum
  unsure (1)..(271): unsure at all n locations; Clone ID: LIB3120-014-Q1-K1-C1
accacgcgtccgccacgcgtncgctcaccatcaccgtttttctctaatcgtatggccactccatcgatcctcagaaactctgtatgccctccgctgcaccattcctttcttgccttccctaaagatttcatttccttcattttcctacttcattaaatcaaggcctcttacttcttccattatgagaggaagtgtcttaacaaaggaagtttttgaaaccaaagaggcagtcattgtggatgcatagaagaaaactttatttgtagcttga

SEQ ID NO: 6957 - DNA, 155 bp, Gossypium hirsutum
  Clone ID: LIB3120-014-Q1-K1-C10
attaagcagtcagcgcaaagtggtgttgtcttgactctgtgtgctaacagcacatggacagaggaagcagcttatctgacgatatgagaagctttaaacttgcattatatttagatgaaaaaaagatgaagctatacttcttacatgtttgttga

SEQ ID NO: 6958 - DNA, 318 bp, Gossypium hirsutum
  Clone ID: LIB3120-014-Q1-K1-C11
gtaatgccagctacaaaatgaattaaacaagaaaaacaggggggctgtagcacaagtccaacagaaagttatggtaacgcgacgtggcgcagacaatactacaaagcatttgagggctggagctattgccgtcatcgttttgacaacatttgttgattcggtagagagatgtaagcttgaaattatacatcgtggggaacaaaggaagatatttttgcttgttaagaaaaattgcttaacacaaagatttcttggattattgaaagggaacttaattaagtgttttttgcaccgctacattcaaagcctaaaattttt

SEQ ID NO: 6959 - DNA, 317 bp, Gossypium hirsutum
  Clone ID: LIB3120-014-Q1-K1-C12
cccacgcgtccgctgcggcatatgggaaatgggcatctgctatagctaccagattaaatgctggaggcctctcttgcaaggttcttgacaaagaagcatttcagaagcagatgttggagaagctcatatggatttgtgcattcatgcttgttggagctcgtcatcctggggcaactgtaggcgttgtagagaaggaataccgctctgagagctcgcatctgctgctgcagcggagaaaggtataacatttgaagaagctatggaggataggctatgtgcttattctcgagctgtggcccacttcccaacagcagtta

SEQ ID NO: 6960 - DNA, 156 bp, Gossypium hirsutum
  Clone ID: LIB3120-014-Q1-K1-C2
tcgcccacgcgttcggcccgtccgacagcgcgtccagcgcgagcttcgaaagggaatcgggttaaaagttctgaaccgggacgcggcggctgactgcaactttagggagtccggagacgtctgctggggcctcgggaagagttatcttttttgttt

SEQ ID NO: 6961 - DNA, 171 bp, Gossypium hirsutum
  Clone ID: LIB3120-014-Q1-K1-C7
gatggagccctgaatgtggatgtgaccgagttccagacaaacctggtcccttatcccaggatccattttatgctttcctcctatgctcctgttatttcagctgcaaaagcttaccatgagcaattatctgtggctgagatcaccaacactgcttttgaaccctcttccgtg

SEQ ID NO: 6962 - DNA, 134 bp, Gossypium hirsutum
  Clone ID: LIB3120-014-Q1-K1-C8
ttttgcctgcagtatacaccaagattgggctgatcaatgctccccaatggtacgatgctgggagattctgatacttcgtatcctgctccaccctatttgtgatcgagtgcatattgttccactacgtggagatc

SEQ ID NO: 6963 - DNA, 125 bp, Gossypium hirsutum
  Clone ID: LIB3120-014-Q1-K1-D1
actgatccgtataaatgccagcgtatgacatcaagatgtggactagaccagagtagtgtttctttccacagtacagggagcagactatgcaaactccaaatattttctttaaatttattttatga

SEQ ID NO: 6964 - DNA, 60 bp, Gossypium hirsutum
  Clone ID: LIB3120-014-Q1-K1-D12
ctcatgcgtactatcaagcgtactgtaatttattaagtctagattctatgctcttgtgtt

SEQ ID NO: 6965 - DNA, 238 bp, Gossypium hirsutum
  unsure (1)..(238): unsure at all n locations; Clone ID: LIB3120-014-Q1-K1-E1
accacgcgtncgtccacgcgttcgtgaaacttcatttctctgccacaaaaagctcctccgccccaactcccctgggatcaacagcacaattcttaacccaaaaacataaaataatggcagccagggtagcaacaatgggttatgctcaattgcaaaattgcgctaagcatctagtcttaactatttatgggcaggcctacaaagtcaacccccaaagccccttctctctttttttcca

SEQ ID NO: 6966 - DNA, 61 bp, Gossypium hirsutum
  Clone ID: LIB3120-014-Q1-K1-E10
cagattcaagagaacatagaaggcttcttgatgtttatcccattacttgatctcctgcttg

SEQ ID NO: 6967 - DNA, 147 bp, Gossypium hirsutum
  Clone ID: LIB3120-014-Q1-K1-E11
ccaattctgactatcacttgcatactatcaattggcagcttctgcagtaataacgactcgtgggcaatttatagcgttaagacccatagtttctactgctccagtttggatcctgtcagcacttcatccaatgatgcgcaaggagaa

SEQ ID NO: 6968 - DNA, 350 bp, Gossypium hirsutum
  Clone ID: LIB3120-014-Q1-K1-E12
caaaatgttattcatggctactttatctacactccatactactttcacttgtcattccttgcggtatcagaaatcctttaacacccccttttgccttaacaaaaatcccatttggaagaaaacaatcaaaactccaactctgactgcttcggctgccacggaagctgtcactgatactgaaacaccaatcgactgcatcattcctcagaaacctgaggtggtggtcaagcaagttggaaagtcaagactggttttgaaattcaatatggatggaaaataacatctgtcttgcccttgatcataatataccgggccacggtactgttcctttaaatgcaatatttcttttt

SEQ ID NO: 6969 - DNA, 390 bp, Gossypium hirsutum
  Clone ID: LIB3120-014-Q1-K1-E6
ccgggcgaccacgcgtcgaaggtgctaacctcacgtttggccgataactcgcggccgatcgtacgcacaccattaaggcgttgggtgttgtttacaacgaaaccgctactggagttaccaacaacttggccacagtgagaaaactactatatcattacgggcacccagcactgcttttcgtcgatggagtttcctcgatttgtgctctcgatttccctatggatgaatggggagttgacgtatcattaactggcttgcaaaaggcgcttttctctttcaacctggaatcggtatttgtttgcgctagctcctaaagctcttgaggctaatcaaaactgctaatatttcttcgggtttttttactatttggtactaataacctttaatgtt

SEQ ID NO: 6970 - DNA, 95 bp, Gossypium hirsutum
  Clone ID: LIB3120-014-Q1-K1-E7
caaagtcctaacctcaatactttggccgaacaactcggggccaatcgaacccacaccatgaaggcaggttgtattgtttacgactcaatccttcc

SEQ ID NO: 6971 - DNA, 158 bp, Gossypium hirsutum
  Clone ID: LIB3120-014-Q1-K1-F12
gttaaacatctacattgacaccttgttcaaacaagaaactctctctaaatgacgggtttcttgagttcctattgccaaaacctattcacatcaaaataatctgaacttgtctatcatcgagattagcttgatctatgactttatgatataactatctg

SEQ ID NO: 6972 - DNA, 357 bp, Gossypium hirsutum
  unsure (1)..(357): unsure at all n locations; Clone ID: LIB3120-014-Q1-K1-F4
gactggtnacgtggctcttcacaagctgtgttggaaggtggtcttcaactcagcggccaaacccggttgaactttgctagcaccaacagggtggctgtggctagacctggttttaccgttagagctcaacaggtccctgccgagcctgaaactggacgcatagctgtgctgagtcttgttgctgctggtttggctactggctcctttgttcaagctgtgcttgctgatgcacgaagcattaaggttggcccgtcttcaccaccctacggtggattgccccgaaactttgaatttctatgatccaatagacctttattctgtcgatcaaagattcgggttttccttctaccatttgac

SEQ ID NO: 6973 - DNA, 294 bp, Gossypium hirsutum
  unsure (1)..(294): unsure at all n locations; Clone ID: LIB3120-014-Q1-K1-F6
cccacgcgtncgcccacgcgttcgtccacgcgttcgatcaccaacaaaatcaactgcttcacagtggcctgtacaaccatggctctttctttcccatcattcgccggtaaggcagtgaagttctccccttccacccctgaaatccatggaactggccgtgtttccatgaggaaaaccaccaagcctgttccttctggtagcccatggtacggtcctgaccgagtttttgacttgggtccactttccggtgagccaccatcttacttgaccggtgagttcctctgttgacctatt

SEQ ID NO: 6974 - DNA, 108 bp, Gossypium hirsutum
  Clone ID: LIB3120-014-Q1-K1-G10
gttcgtctggcgatcgagtatatcgacatttccggtggtgaaccaatggagctggtcccgagatgtgccgaaataattgcccgtcaacttgagcttgacaaaattcta

SEQ ID NO: 6975 - DNA, 234 bp, Gossypium hirsutum
  unsure (1)..(234): unsure at all n locations; Clone ID: LIB3120-014-Q1-K1-G3
ggtcgaccacgcgtccgagacatggaagccactgctgtttattgcaacaaaggaagtccatttctttnttcctctaggattacaactaaaaaatcatttaaatcatcacaaaatgctgcaactttctcaccttttctcattcaatccatggctactcaaaaaccattgccttcagttgccaaaactgttggttctagaaagggctcgaacttgaccgtttttccgctcggcgag

SEQ ID NO: 6976 - DNA, 393 bp, Gossypium hirsutum
  unsure (1)..(393): unsure at all n locations; Clone ID: LIB3120-014-Q1-K1-G4
nctgtctctaccactgaaaacaaagaaaaaatggcaacggagatggcccttgtgaagcctatctccaaattcagtacaagcagtccaatttttagcaactcccgatatgggaagttcaccaccgtcagaatgtcatctacttcccagtcaacaacaaaggccgccgcgaagggtggcaagaaagctgccaaaaccgccatcaaagagacccttttgacaccaaggttttacacaaccgactttgatgaaatggaggcgctttttaacactgagattaacaagaaccttaaccagtccgaatttgaggcactgctgcaagagttcaagactgattacaatcagactcactttgtaaggaacaagaattcaaagaagctgctgataagattgatg

SEQ ID NO: 6977 - DNA, 366 bp, Gossypium hirsutum
  unsure (1)..(366): unsure at all n locations; Clone ID: LIB3120-014-Q1-K1-G6
ccggngaccacgcgtccgattcctcgctctctcttttatcctcactttctcagccatcaaagacaccctttttttcttaaggtgaaaagatggcagatgggaggatattcagccacttgttgcgacaatggaactggaatggtgaaggccggattgccggtgacgatgctcgaagccgcgtccctacattgtggccggctcgtcacaccgggtgatggtggatggccaaaaagatgcatatgtggtgataggctaatctaaagaggatttgacattgaatacctatgagcacgattgtgaacaatggatgattggaaagattggcatatacatttacaacagcttctgttggcccgaagagcaccc

SEQ ID NO: 6978 - DNA, 343 bp, Gossypium hirsutum
  Clone ID: LIB3120-014-Q1-K1-H1
gatatatttagctatagcatacactactagtacccactactagcaatggcttcctcaatgatctcatcggctaccattgccactgcctctccggcacaggctaacatggtcgctcctttcaccggtctcaagtctgcctctgctttcccagtcaccaggaaggccaacaacgacattacttctctcgcaagcaatggcggtagagtgcaatgcatgcaggtgtggcctcctactgtgaagaagaagtttgagactctctcatacctccccgatcttacacccgtgcagttggcttaagaagtagattaccttcttccgctcaaaaatgggttctctttgcctt

SEQ ID NO: 6979 - DNA, 265 bp, Gossypium hirsutum
  unsure (1)..(265): unsure at all n locations; Clone ID: LIB3120-014-Q1-K1-H7
gatacattcagcaagccttgcacaatggccaccatcacctctgccgctgtcgctatcccatctgtcaccggccttaaagccggtgcaaccgcagctaaagttagcgccacagcccaaggttgcaagcctctccagtcccaagggtcagcatcaaggcctccctcaaagacgtcggtgttgctgttgcggcaactgctgcaagcgcaatccttgccaacaatgccatggccattgaagtcttgctcggcagtgacgatggnggtct

SEQ ID NO: 6980 - DNA, 378 bp, Gossypium hirsutum
  unsure (1)..(378): unsure at all n locations; Clone ID: LIB3120-015-Q1-K1-A10
cccacgcgtncggtgctgattactgctccaggtaagggtgacatccccacctatgttgttggagtgaatgctgacacctacaactcagatgagcctatcatcagcaatgcttcttgcaccaccaattgccttgctcctttcgtcaaggttctggaccagaagtttggtatcatcaagggcaccatgactaccactcactcgtacaccggtgaccagaggcttcttgatgctagccaccgtgacctcaggcgtgctagagccgcagctctcaacatcgtcccgacttcaactggtgcggcgaaagccgtggcccttgtactccctactctcaaaagcaaacttaatggcatcgcattgcgtgtgccaacaccaaatgtg

SEQ ID NO: 6981 - DNA, 429 bp, Gossypium hirsutum
  unsure (1)..(429): unsure at all n locations; Clone ID: LIB3120-015-Q1-K1-A12
gggagactcttttgtataactgtagcatatagtactagtaagcagtaatagcaatggcctgggccatgaactcatcgggaaccattgccaccgtgaactgctcctccccggcacaggccaacatggtggcccccttcaccggcctcaagtctgcctctgctttcccagtcactaggaaggccaacaacgacatcacttctcttgcaagcaatggtgggagagtgcaatgcatgcaggtgtgggctcctcttgggaagaagaagttcgagacactctcataccttcccgatcttacacccgtacagttggctaagggaagtagaataccttcttcgctctaaaatggattcttgcttggaattcgaantagaagagggattcgtgcacccgtagtactcgagcttacccacgtactacgatggacgctac

SEQ ID NO: 6982 - DNA, 385 bp, Gossypium hirsutum
  unsure (1)..(385): unsure at all n locations; Clone ID: LIB3120-015-Q1-K1-A2
tttttaaaaagggttgcccccttctaactctgaaaggcaatggcttcaatgcttagctcaggaaccgtccttaggccaaccccatttcttggccaaaacagaaatgctaaccctctcagagatgtctccgngggcactgccaaatacacaatgggaaatgaactgtggtatggaccagacagagtgaagtacttgggaccctttttcagctcacattccatcctacttgaacggcgagttccctggtgactacggatgggacactgccggtttgtcagctgaccctgaggcctttgctatgaacagggctcttgaggtaaaccatggaagatgggcaatgctgggagcactaagctgcatcaccccagaagtccttgagaaatgg

SEQ ID NO: 6983 - DNA, 300 bp, Gossypium hirsutum
  unsure (1)..(300): unsure at all n locations; Clone ID: LIB3120-015-Q1-K1-A3
cgcgtccgnccacgcgtacgnccacgcgtacaaccacgcgtccggtcttctgtttatatcaacaggaggtgccttacctgctgttatatcaccactaccacctnctcttttttcgctcgtcgacgacctacattgtggccttcactcgtcgctagacttaactcttctacttctactacgactcttatacaaaacacgcctgcttttgctgcccctattcctttgctaacccccagagaagagatgggaaacatgtcctacgacgaagacattgaagctctctacaaacttctcaatgac

SEQ ID NO: 6984 - DNA, 307 bp, Gossypium hirsutum
  unsure (1)..(307): unsure at all n locations; Clone ID: LIB3120-015-Q1-K1-A4
cccacgcgtacganaaaacttaaccacatttcaaaagtccatcctacaagtcttaattttgggagcaaccttgtataatacctctatcttcaccctaaactgtaccaataattgacacatagatagtcatcacggcactctccattacacctacgcctaactatcttacgaaatagctcatctaaaacgacactttgtactatgctgactttgctatgccatcctacaataaatacaagtcatgtcttttctatatgaatgagattgatgaattctacaatcattgcaaggactataatatgaatac

SEQ ID NO: 6985 - DNA, 338 bp, Gossypium hirsutum
  Clone ID: LIB3120-015-Q1-K1-A5
cggacgcgtgggcaaaaaaaaagaaaaggggaaccaacttgttcaagaaacaattaaaatggcggattcacagatttttaattgaagaatccaagtttatctcatcttgggttttcatttctttggtttccaggttcttcttcattattcctttcctcctttgagttgctttaattataataattgcatattttttccatttatgtatttttattcgactttttattttttgggtttgttttttcgtttattgctttctataattggtcttccttgttatgcttgagaatttggggtttttggcgtatgcttagcttgacttgaagggtatgtttgga

SEQ ID NO: 6986 - DNA, 410 bp, Gossypium hirsutum
  unsure (1)..(410): unsure at all n locations; Clone ID: LIB3120-015-Q1-K1-A6
cccacgcgtncgctttcattgcggttcttggtaatgaaaaagccaacaggggggtgttcaggatttcgggagaaaagaacgtgaccttcgttggattagcatatgcgtgcgccaaggctggtggatttcccgaacctgatattgttcactacaacccaaaggagtttgacttcggtaaaaagaaggcattcccgttccgagatcatcatttcttctcattactcgagaaagcaaagcatgtgctatgatggaaaccggaatttggcctggtctaaggactcacagactcgtataacctatatttcggcaggggaacattcatgaaggaagcttatttttcgaccgatgacatgattctgggcaaaacttttgttctccaatcataaggcatttatctcatcatcactttc

SEQ ID NO: 6987 - DNA, 446 bp, Gossypium hirsutum
  Clone ID: LIB3120-015-Q1-K1-A7
ctttgtgtcctctctgtgtgcttttcttcactgtttgttccccgtcaaaatattgtgtcggaggaagaaaatcccaatttccacgagaaattttaaacaaaaaaagaaacccaaaaatggacaaagaaaagaaattaaaacaaacccaagaagaagaggaaatggaattcaaagactgtgaaaaccatagccaacaagctcaacaagaagaagaagaagaagaagaagaaaaaatcgagataggcgatgaaataattcgaagcaaaattggtatcatgagagcacttgcagagagagatgacccatcagttaaggaagtggatgattttatgatacggagattccttagagctcgtgatttggatatagagaaagcaaacaccatgttattgaagtatttgagttggagaagaacgtttttgcctaaaggattcgtatctgaatcg

SEQ ID NO: 6988 - DNA, 347 bp, Gossypium hirsutum
  Clone ID: LIB3120-015-Q1-K1-A8
gttattctttcctgatggagaagctgaaaatttcaccatctaaaaagcttgaagtgctttgggctgataaatgaccaaaataacctgtcttctcccccttggaaaaacgatctttcctctgctgtgaaagttctatacctatttttttcacattttcgatgcgaaagctgcttcctgatctttgttcctcttccgcacgtgagttcggtttcttcttcttctctttaatttttagatatgctttggatgtatttactttttaattctggcttttgtgcctcttttgctctacttgtatgagcctctactgctgtttgctctgcctcttttgttttgggccctttttt

SEQ ID NO: 6989 - DNA, 425 bp, Gossypium hirsutum
  Clone ID: LIB3120-015-Q1-K1-B1
tgagactcttttgtatacctgtagcatatagtaatagtaagcagtaatagcaatggcctgctccatgatctgatgggcaaccattgccaccgtgaaccgctcctccccggcacaggccaacatggtggcccccttcaccggcctcaaatctgcctctgctttcccagtcaccaggaaggccaacaacgacatcacttctcttgcaagcaacggtgggagagtgcaatgcatgcaggcgtggccgcctcttgggaagaagaagttcgagactctctcatacctgcccgatcttactcccgtacaggtggctaaggaagtagattaccttcttcgctctaaatggattccttgctgggaattcgaattagaggaagggattcgtgcaccgtaagtactcgagcttacccacgtactacgatggacgc

SEQ ID NO: 6990 - DNA, 413 bp, Gossypium hirsutum
  Clone ID: LIB3120-015-Q1-K1-B10
atttaaagaaacttcgcttcgttacggcagctcccgtctcaacgcgcctaccttaccattcgacgcgccacctatcttcggtttcattttccttctctttcattttccttctatcttaaatgaaatgagaaagatctgaaggagattggaagttggtgattgagatttgaggtttctgaggagagagacttattttggtaattttaatgaaggatgaacaacgtctggtgctaagaagaagatgggaggagtaacgtcttcgattgccgcgaaatttgcgttcttcccgccaaatccgccgtcatacagagtgctagaggacgagttatgcgctggtcagctttacataccagaggtaccgaggagggacggtgtcgacgtcttgaagctactcacgcgccgcgggaacgaca

SEQ ID NO: 6991 - DNA, 203 bp, Gossypium hirsutum
  Clone ID: LIB3120-015-Q1-K1-B11
tcattaacgttgttcatgaaatatgggctttgcatggacgggcacccagggaaacctcaaacctgtcccagaaaagatgcacaaagctgacgaagaagtgtatgtttgaactatattggtgaaaaattttgtgaataggatatggttgatgaagggatgatatatagcatattattataagccatctatagatgtaattttgc

SEQ ID NO: 6992 - DNA, 205 bp, Gossypium hirsutum
  Clone ID: LIB3120-015-Q1-K1-B12
gtatggctttgcattaaatatgcatcattagatatagacgtttgtcgtacataaataatttattctttgcctttttttaatgcaaaaactggtgttatattagaattgatggttgtcacgacatcgttttgatttcgtttaacgcacagtcttcaatacggataacaaccattcagtaatccaaacatacaatttcaccacatac

SEQ ID NO: 6993 - DNA, 328 bp, Gossypium hirsutum
  unsure (1)..(328): unsure at all n locations; Clone ID: LIB3120-015-Q1-K1-B2
cccacgcgtncgatactcccaaaatgtctcttacaatccccactaacctatccaaatccctggtgaagccagagattaactcccaactcacccccaaactttcacgatcattggtggtatgctccaccgacaagacttcatcgccaccatcatcagcttcaccactccaagccttctcagcagatcttgctctttcttccattcttctctcagccccgcagactgccgtagctgatattgcacgcctcacaccatgcaaagagtgcaagcaattctgcaaacgtgagaagcagctgatcaagaagctggaatcgtcgttgaagctata

SEQ ID NO: 6994 - DNA, 373 bp, Gossypium hirsutum
  unsure (1)..(373): unsure at all n locations; Clone ID: LIB3120-015-Q1-K1-B3
acgcgtncggcgaaattgataccaaggacaaaactgatattgatgcttcttacagaactgttcaacgggctccagcagtgcttgttgagcatgatataaatgatatattgttgttttctcctgatgatgttggtcttaaggcaggcctaccattactgttttcaagcatgcgaactccaaaaaatcagcatcatataagccttggagctatatcaaatcatggtcttgcttctgaatgtttatctggaaatgcatgcataattgttagctctcctactctgaaaataaagaagagtgaagacccctccattgctgatactacagtacaatttttcaagtcatcaacaaccctaaaaaattccgttgataatac

SEQ ID NO: 6995 - DNA, 359 bp, Gossypium hirsutum
  Clone ID: LIB3120-015-Q1-K1-B4
gtttctggaaaaaagagccgcaaaaagtctggttctttaattatcttcagcattaaggaggacaacaccacagtggagttcttttggtcaccatttctggttgaatctaattcagacaatccatggcggcacagtataaaagaccgtataatcaagcctgaatcaatcaagaacaatggagatgattggaaaggcgtagattacttgattttcaacacatatatttggtggatgaacagtggatatatgaaagtcttacgaagatcgcttgatgcagaaccggtcgagtacgatgaaatcgaaaggcctatagcttatgggaaggtagtaaaaagaagggctaaatgggttgatgaaaa

SEQ ID NO: 6996 - DNA, 319 bp, Gossypium hirsutum
  Clone ID: LIB3120-015-Q1-K1-B5
aaataaatcataccacccaaaattttctcttttctcttctcttctcgggttacataaatcgcttcggtttaggaactgctggggttcgattttgtcttcaagatcggccaaattaaaacttcaggcgatcggagaagatggagtctcatgatgaaactgggtgccaagctccagaaggtcccatcctgtgcgtcaacaactgtggcttctttggaagtgcggctaccatgaatatgtgctccaagtgtcacaaggcaatgattctgaagcacgaacaggtgcaacttgcagcagcatccattggaagcattgttaatgg

SEQ ID NO: 6997 - DNA, 131 bp, Gossypium hirsutum
  Clone ID: LIB3120-015-Q1-K1-B6
ctcactcgtacgcttacccttaaatatattttaacagtatttacatcaattcttaacttggggactaaccttatattatacctctagatcctcctaaacattaacaataaccctcacatatatattttcca

SEQ ID NO: 6998 - DNA, 271 bp, Gossypium hirsutum
  Clone ID: LIB3120-015-Q1-K1-B7
aacggtgttttgtgattaaaaaaacgaccaagattgtggcaaaacaagatggcttccctgcgtgaaccatggctagtggagaacgggttgaagggatctagcaaggagattcgccatggcaggactgcacacaacatgtcgtcttcgtcattgcggaaaaaatcggacctgacgctagtttccaaggttcggtatgcaatgcttaggcagttcctcgccaatcttcaagaggtcatattagggaccaagctctccgttctcttccctgcta

SEQ ID NO: 6999 - DNA, 259 bp, Gossypium hirsutum
  Clone ID: LIB3120-015-Q1-K1-B8
cggacgcgtgggcggacgcgtgggctctagttcaaattttggaaaacaacgaaatctagggttagtacaattccatcatagtttaagaacattgggaaatggaataaagaggtgtggatttaggagtatcagtttttgtagtactgatagaacgaacctaacaaaaagatcatgtctcttgagctgcaaatgccaaagggctgatagggttagtggattaaccgcagatgatggaagacccgcatcactttctataaat

SEQ ID NO: 7000 - DNA, 309 bp, Gossypium hirsutum
  Clone ID: LIB3120-015-Q1-K1-B9
gcgcttgctcctgttgttattggtgtatccatggcatcactgactgagctgtcattcaattgggcgggtttgattaacgcaatgatttccaacatctccttcacttacaggagtatctattccaagaaagccatgacggatatggacagtacaaatgtctatgcttatatttccatcattgctctcttcgtctgtattcccccagccctcatttttgagggtcctcaattgttgaagcatggcttcaatgatgctattgctaaagtgggtatgactaagttcatctcacatctttttctgggtgggaat

SEQ ID NO: 7001 - DNA, 335 bp, Gossypium hirsutum
  Clone ID: LIB3120-015-Q1-K1-C1
cccacgcgtccgagaaaagcagtttccgaatcttttacgactcgtaaaatagttgaattgggtcatggcttccgccgttgcttccgttgcgaagaagaaaactgctggctctaagaagtctaaatcagctccttcacatcctccatttcttgagatgatttcagatgcaatcgtttcgttgaaagagaggacagggtcgagccaatatgcgatcgcgaaattcatcgaagagaagtataagcaattaccggcgaatttccgcaaagtcttacttgttcagacgaagaagtttgttgcttctggaaagcttgtcaaagtaaaagcctcttttaagc

SEQ ID NO: 7002 - DNA, 293 bp, Gossypium hirsutum
  unsure (1)..(293): unsure at all n locations; Clone ID: LIB3120-015-Q1-K1-C10
cacgcgtncggggatcggtattgtttgcgctagcccgaaagctctcgaggcgaccaaaactgcgaaatcggttcgggttttcttcgattggaacgattaccttaagttttacaaactaggaacattttggccatacactccttcaattcaactcttgtatggactaagagcagcattggaccttatttttgaggaaggacttgataatatcattgaaaggcatagtcgcttgggcaaagcaacaaggcttgcggtggaagcatggngctngaagaattcacacaaaaggagga

SEQ ID NO: 7003 - DNA, 355 bp, Gossypium hirsutum
  Clone ID: LIB3120-015-Q1-K1-C11
gtttaagggatttttttcattcgtttcttctcacgctcgattaccttacaaaaagagaaaatgaccaagtgttacccaactgtgagcgaggaataccagaagtcagttgaaaaggccaagaggaagctcagaggtctcatcgctgagaagaactgtgctccactcatgctccgtttagcgtggcactcagctggaacttttgatgttaagaccaagaccggaggtccattcggaaccatgaagcatcctgctgagctcgcacatgctgctaacaacggcctagatatcgccgtcagacttctcgagccgatcaaggagcagttccctaacctcacctacgctgacttctatcagc

SEQ ID NO: 7004 - DNA, 423 bp, Gossypium hirsutum
  Clone ID: LIB3120-015-Q1-K1-C12
agacattatacaaccctaacttctacattaggcaagaagctcctaaggtttgagagagatggcttcaaggagatcggcatcggttgccctcttttttgcactcaacattctcttcttttcacttgtcagtgctaattgttcttgcccttcccccaagccaaaaccaaaccccactccctccccaactcctgctgcggaaggaaagtgccccataaatacccttaaactacgtgtatgtgctgaggtgcttggtttagtcaatgtaactgttgggtcacccccagttcaaccttgctgcacccttatcaaaggccttgctgatcttgaagctgctgtttgcctttgcacagcgatcaaaggcaacattttgggtatcaatcttaatatcccaggttccctcagcttgcttctaaatgtctgctc

SEQ ID NO: 7005 - DNA, 255 bp, Gossypium hirsutum
  Clone ID: LIB3120-015-Q1-K1-C2
tcggccgattactaccttatcatctggcccaatatcaacaacggagtctattgagccacctatgcgggaagttgaggctgacgtcggcataaagagattcgatcgttgctcacaggggtatacagggatgcctgtatgtgatttggataagagggtgccacatggcaagaaagtcttaggacttgatctagtggtgcggcgggataagaacgagaattgaatggaagggtttgatgatacttgatctcatagatt

SEQ ID NO: 7006 - DNA, 417 bp, Gossypium hirsutum
  unsure (1)..(417): unsure at all n locations; Clone ID: LIB3120-015-Q1-K1-C3
ggttacttctctctccaccattatttccaatccttttcactttatctcctccgctcctctctcggtctcgctttccattgttggacgtagccaaggtctgttctttgctctttataatgttctgtccgattatagtttcctcttaaaaccttagattaccttgcgatagcaaaaattatctgtaaggaaaaaatggagataactaatatcactgaatatgaggccattgcaaaagaaaagttacccaagatggtttatgactactatgcatcangtgcagaggaccagtggactctcaaggagaatcgaaatgcattttctaggattttgtttcgaccccgcattcttattgatgttagcaagattgacatgaccaccactgtcctgggattcaagatttcaatgcctatcatgatt

SEQ ID NO: 7007 - DNA, 367 bp, Gossypium hirsutum
  Clone ID: LIB3120-015-Q1-K1-C4
gtccgcttgatttccatcagacggtgataaccatgccgatccgaaacatagccgtgggccgacccgaagaggcgactcaaccggacgcactcaaagcagctttggctgagttcatctccacactcatcttcgttttcgccgggtcaggctccggcatggcctttaacaagttgaccgacaacggagccaccactccggccggtcttgttgccgcttctatagctcacggcttaagacttttcgtcgctgtatccgtcggcgctaacatctccggcggtcacgtcaatcccgccgtcactttcggcgctttcgtcggcgggaacatcagtcttttacgcggcatcctctattggatcgctcaactact

SEQ ID NO: 7008 - DNA, 323 bp, Gossypium hirsutum
  Clone ID: LIB3120-015-Q1-K1-C6
cccacgcgtccgagctcgaagtcattcactgcagatgggccatgttgggagctcttgggggggttttccctgagctgttggctaggaacggtgtcaagttcggtgaagctgtatggttcaaggccgggtctcaaatcttcagtgagggtggacttgactacttgggtaacccaagcttgatccatgctcaaagcattttggccatctgggcttgccaagttatcttgatgggagccgtcgagggctaccgtattgccggtggaccactccgtgaagtgactgacccattgtacccaagtggcagctttgacccattgggtctt

SEQ ID NO: 7009 - DNA, 275 bp, Gossypium hirsutum
  Clone ID: LIB3120-015-Q1-K1-C7
ggctctccaagcagcttcattgctcccacccaccatctccattcacaaagaggccaaatgcaatgcttgtcttaaagagacaactctgtttggtgttccattttcaacccatttcagctttcctcttcatttaactcaggaactcaggaaaaagggagtagctgccggaattgttcgagcacaaacagctgctacaacaccggcagtcgatcgggctgctccacaagggaagaagaccttgagaaagggtactgtgataataaccggtgcgtcgt

SEQ ID NO: 7010 - DNA, 392 bp, Gossypium hirsutum
  Clone ID: LIB3120-015-Q1-K1-C8
cggacgcgtgggcggacgcgtgggcggagcgtgggcgatgatcaacgaggactgtttcgagagggagttcactacaccaaaagccttcccttatggctacaactacaactgtaactacaaccctcactgtcttagtcacagcgtatcatcttcttctctggatgttggggtagttccagatggcggtagtacgattacggatgtatcagtcccgtgcgcgaaagtgacggagacgacttatcagactgtgcaactctcgttggcggagagaaaagcgagggtgctgaagtacagagagaagagaaagaacaaaaaattcgagaaaacgatacgttacgcttctaagaaagcttacgcggaagtgcggccgaggattaaaagaagatttgcaa

SEQ ID NO: 7011 - DNA, 390 bp, Gossypium hirsutum
  Clone ID: LIB3120-015-Q1-K1-C9
ggaagacgaggcggacgaagtatcttttactctctacctaagcttatttgtgtgcctatgcaaaggcacatgatggttaaaacggccccatggaagggttcccggtcacacctaacatccgggaagtgaggcctgagtccggttttgagaatttcgggttttgcactgacccctgtcgtgtcccgggcggtgaacccaactcgggaataagaagagtgagtttgaaggctgagattgacacttcacctcctttcggatcggttaaggaagctgtgacccggtttggtggcaacggacattgcgtgccattgaacaagtttggagaatatcatggaattgaagagtttgatttaaagaaagtggaggaacaagcagcggaattggagaaag

SEQ ID NO: 7012 - DNA, 380 bp, Gossypium hirsutum
  Clone ID: LIB3120-015-Q1-K1-D1
gcgaaaatctcgaagcttccttttccgttttagatctcaaaattcaaaaagctctcttttcatctcatggctgctactatcgtctccgtcaaagctaggcagatcttcgacagccgtggaaatccaacggttgaggttgatgtggaaacatcgaacggtataaaggctagggccgcagttcctagcggtgcatccactggaatttacgaggctcttgagttgagagatggaggttccgattacctcggtaaaggtgtatcgaaggctgttgctaatgttaacacaatcatcggccctgcattgattggaaaggacccaaccgagcagactgcaattgacaatttcatggttcaacaactggatggaacccaaaatgagtg

SEQ ID NO: 7013 - DNA, 280 bp, Gossypium hirsutum
  Clone ID: LIB3120-015-Q1-K1-D10
cccacgcgtaccaaacatacactactattactcactactagcaatggcttcctcaatgagcgtatcagcggccattgtcactgcctttaacgctcacgctaaacatggaacggtcctttcaccggtctcaagtatgcctctgatttcccagccaccacgaaagccaacaacaacattacttttttcgcaagcaatgtcggtagattactatgcatgcaggtgtggtctcctactgataagaaaaaggttgagactctctcatacctacccgatcttacac

SEQ ID NO: 7014 - DNA, 349 bp, Gossypium hirsutum
  unsure (1)..(349): unsure at all n locations; Clone ID: LIB3120-015-Q1-K1-D11
attcattgaactagtttgtttctttattgtcagacatttctcatttttagagaagacatgggagacaagtcatacgaggaagccattgaagctctcaagaaactgcttagtgagaaaggagaattgaaagctgtagcagccgcaaaggtagatcaagtgacagctgagttaaagacaacatctgatgattctgtggagaggttgaaacaaggattcgtttacttcaagtcacaaaaatatgagaagaatcctgctntgtatgctgagcttgccaagggccaaagccccaagtatatgattgttgcctgctccgactccagggtatgcccatctcatgttctggacatgc

SEQ ID NO: 7015 - DNA, 301 bp, Gossypium hirsutum
  Clone ID: LIB3120-015-Q1-K1-D12
gccgataatggttgcagcagttgcagcaacagcatcatctcaacttctggtatcaagttcccgctctttggggcggatgttaccatttcagctatgcgtatttgaattcaaggccctcgtgttatgccccagcaatggcaatggcattaacaacagtatcaagagaaggcatgttatgtgcctggctgtggggacagcacccgacgcagaaaccaagaaaagtgggttcgaaatacatacactaacagggtggctgttgaaacaagaacaggcgggtactattgatgctgagctcactatt

SEQ ID NO: 7016 - DNA, 383 bp, Gossypium hirsutum
  Clone ID: LIB3120-015-Q1-K1-D2
taatcactgattcttttgatctgccattttgaacttcccccctttcttccatctccttcctgctttagtctagttctctcttgctgtcgcttttcctcttgtttttggcatacatgggaacgctttcaatcaggttgcctttctacatgcaatcgctttggcagcgaaggcggaaagtactctgtggtggatctcagtgcatgaaaggagaaggagcccttcgctatttttgacaactacctcgaaagccaattgacgattacgctcattatatgctccattgaagattattttcactatctgatcagatgggggttttcattttttaatctccttaaaaactctggaagtactgttctcaaaaccattcacttcttttaaat

SEQ ID NO: 7017 - DNA, 312 bp, Gossypium hirsutum
  Clone ID: LIB3120-015-Q1-K1-D3
gcacgaatcgccttttttcgcttccatgattccttcagcttggggtgcgtcaaggcgtaccttgcctcacttatctcaactttggagattgttttcgccagccttggctctgccatttcttacaacacgttgacaactgatgcagacctagatcccgacgggctagtcaccattgctgtttgccacagattttctctctttgttgcacttgatataggtgccaacatatcatgtggccatgtctaccctgcactaactatttgagtagctcttggtggcaaataaccatactcactggcattttttactgga

SEQ ID NO: 7018 - DNA, 331 bp, Gossypium hirsutum
  Clone ID: LIB3120-015-Q1-K1-D4
gaaatataccagaaaatcaaaaagaagaagaaaagagatccccaagatgtctcttacaatgccaactaatctgtcaaaatcaattttgaagccaaagctggagacccaagtgatccccaaggcttcatccagatcattgattgtatgctcctccagcaatccttcctccgacaaatcggcttcaccactccaggccttctcagcggctctggctctttcttccatccttctttcagctccactccctgctgttgccgacattgcggggctcactccttgcaaagagtccaagcaattcgccaagcgcgagaagcagcagatcaagaagctg

SEQ ID NO: 7019 - DNA, 372 bp, Gossypium hirsutum
  Clone ID: LIB3120-015-Q1-K1-D5
gaaaccctcaaaattccacttaaaaaatggcctccacagcttccctctccaccgccgtagcgcccacctctttcctccgcggccacccggccccgaaaaccctaagctcccttcctttcaaccaatctcttttcgggctaaaaccccaacgaaatggccgtctcaccatggctgcatacaaagtgacactgttaacacccgaaggaccccaagaattcgtgtgccccgacgacgtttacatcgttgaccaagctgaggaagaaggcattgatcttccgttctcgtgtagggctgggtcttgttcttcgtgtgccggaatgattaagcaaggctccgtccatcaatccgacggtaatttccttgatgatgacc

SEQ ID NO: 7020 - DNA, 431 bp, Gossypium hirsutum
  Clone ID: LIB3120-015-Q1-K1-D6
ggccccgaaaaccctaagctcccttcctttcaaccaatctcttttcgggctaaaaccccagcgaaatggccgtctcaccatggctgcatacaaagtgacactgttaacacccgaaggaccccaagaattcgtgtgccccgacgacgtttacatcgttgaccaagctgaggaagaaggcattgatcttccgttctcgtgtagggctgggtcttgttcttcgtgtgccggaatgattaagcaaggctccgtcgatcaatccgacggtaatttccttgatgatgaccagattgctgcaggttttgtcctcacttctgttgcttaccctcagagtgatgttgttattgagacccacaaggaggaacagcttaccgcttaattatatatgatactatataatataatcatcaactagaccaagatttaatcatctt

SEQ ID NO: 7021 - DNA, 278 bp, Gossypium hirsutum
  Clone ID: LIB3120-015-Q1-K1-D7
cccacgcgtacgggcaacttcattgaccctgaatggctcgatggatcgctccctggagacggcggatttgacccactaggccttggaaaagacccagcattcctcaaatggtaccgagaagctgagctgatccatggacgttgggccatggctgctgtcatcggcatcttcgtcggccaagcttggagtggcattccatggttcgaggcaggagctgacccacgtgcgatagctccattctctttcggctcactccttggtactcaggtcatccttat

SEQ ID NO: 7022 - DNA, 283 bp, Gossypium hirsutum
  Clone ID: LIB3120-015-Q1-K1-D8
gatttttgaagatggcccgtaccaagcagacagcccgtaagtcgactggtgggaaggctcgaaggaagcaacttgctaccaaggctgcccgtaaatctgccccaaccaccggtggtgtgaagaagcctcatcgctaccgtcctggaactgttgctcttcgtgaaattcgaaagtaccaaaagagtactgagcttcttatcaggaaattgcctttccagaggcttgttcgtgaaattgcccaggacttcaagactgatttgcgtttccagagccatgctgttct

SEQ ID NO: 7023 - DNA, 366 bp, Gossypium hirsutum
  Clone ID: LIB3120-015-Q1-K1-D9
accacgcggcgaacaaataactgcttacaatggcctctacaccatggctctttctttcccatcattcgggcggaaggcagtgaagttctccccttccacccctgaaatacagggaactggccgtgttttcatgaggaaaaccaccaagcctgttccttctggtagcccatggtacggtcctgaccgagttttgtacttgggtccacttttcggtgagccaccatcttacttgaccggtgagttccctggtgactatggttgggacactgctggactctcagctgatcccgagacctttgctatgaaccgtgagctcgaagtcattcactgcagatgggccatgttgggagctcttgggtgtgtttt

SEQ ID NO: 7024 - DNA, 245 bp, Gossypium hirsutum
  Clone ID: LIB3120-015-Q1-K1-E1
cccacgcgtccgtgtctttaaacttttgtaaacttagccatttcccttcatcttctccactgctaaccagcgaaaattctaatactcgataatggatgggaatgattctgtagattcaaaacaggacactacggatatggcacttttcgtccagaatttacttcaacagatgcaatcaaggttccaaacaatgtctgattccatcatcacgaacatcgatgagatgggcagcaggatagatgagc

SEQ ID NO: 7025 - DNA, 392 bp, Gossypium hirsutum
  Clone ID: LIB3120-015-Q1-K1-E10
agtgcaggcaccatggcagcttcctcagctttgttcacccttatcttctccaccgtccaaaagaagaatggcattgttaccccctccaacatctcattccacggccttagacccctaatcaagggcaaatcttcatccaacgccatctccttctcaagaaactcaactgctagtgccaggcttgcaatcaaagcagagctgagcgcccaagttgtgataagcgtcagcactgctctctcccttatcttgggtagatttgagttcttcaacttccaaagagagaacgttgtcaagcaagtgcctgagcaaaatgggttgacccactctgaggctggggacgcacgatccaaggagtatgttagccttctcaagccaacgaccctgtgggattc

SEQ ID NO: 7026 - DNA, 58 bp, Gossypium hirsutum
  Clone ID: LIB3120-015-Q1-K1-E12
cacacgctttcaataattcttaccctccttgttccctgtttttatccctctctatctt

SEQ ID NO: 7027 - DNA, 264 bp, Gossypium hirsutum
  Clone ID: LIB3120-015-Q1-K1-E2
cccacgcgtccgttgatagacagattatgtaagccaaaacgatgaaagcatatccctcactggggaaaatcgcgcctgcgctctacaatccaatgcatccctatagagctatatatatgcacattatcaccaaccgcaccttattactcataatcgatgacaaagagttgaacgtcctgaatggttctcatagcggtagaattctgactggaactgacggacatgatgtgaccataacaacatataatccctttaaaccgattg

SEQ ID NO: 7028 - DNA, 406 bp, Gossypium hirsutum
  unsure (1)..(406): unsure at all n locations; Clone ID: LIB3120-015-Q1-K1-E4
cccacgcgtncgatcccttcccaactccatatttggtgtaaaccatccttgcacagcacaggcctctgcaagagcatcacttcaaaacaacaaactccatctttcaggctaatggaattcaaatacagagctgttgatgaacggccgccgaaggatttccctccaccctcctcaactttcaatcctttaccgcctcaaggatttctaccccaccctgtcaacctggaattggggaaggtccaactccgagaagcgatcatcgcctcggatatcgctcgtcggagagccttataagctcaagtcagaagggagctagaaacgggcttacctttagaccaaaggctcacattgcacctncactctcactctaccattcctttcatgcatcaccttaataactataatc

SEQ ID NO: 7029 - DNA, 207 bp, Gossypium hirsutum
  Clone ID: LIB3120-015-Q1-K1-E5
atccatggctacgttatctcctcctcctctacctacatctttgtctgtcagaccacactggagcccacaaatcaactctttctctccctttcaagagaccctcttttctactatccactattcccaagtctttaccagacaatggagttggggtgtcagcttctgttgctgctgtcgaagacccagcatccaaccagattgaaaact

SEQ ID NO: 7030 - DNA, 269 bp, Gossypium hirsutum
  Clone ID: LIB3120-015-Q1-K1-E6
cccacgcgtccgacaaaccgaccatggcttctataaaacccagtttttattttgaacccagtaatggagtcgacaccataatggctttaatcacatcagcattgttaaagcccaactccttacctttttcacctcttcaaagagtaacaccaacagccaaaactagacgtttctcttgcaaagtcctaaactctggccatccagactcggaattaaatcaaatacagagaaagcagagtcctttggattcaagctttgtaactcaatta

SEQ ID NO: 7031 - DNA, 258 bp, Gossypium hirsutum
  Clone ID: LIB3120-015-Q1-K1-E7
cacaatcaaagaggctttagttcagaagtttgttgaggacttgagacaggtgaaaggaatggctgcaacttacaggatgacaaacaaacctcttcctgtcaggcattcgccttatgtagctggggtattgcgcccattgaagactttcttggatggtgaacaagctacaaagtatttgaccaacgatgcgaggaatagtctactgctaggtgctgcaacagacataactattcgctattatgaattatctgctgacct

SEQ ID NO: 7032 - DNA, 366 bp, Gossypium hirsutum
  Clone ID: LIB3120-015-Q1-K1-E8
caaaatcaactgcttcacaatggcctctacaaccatggctctttcttccgcatcattcgcgggtaaggcagtgaagttctccccttccacccctgaaatccagggaactggccgcgtttccatgaggaaaaccaccaagcctgttccttctggtagcccatggtacggtcctgaccgagttttgtacttgggtccactttccggtgagccaccatcttacttgaccggtgagttccctggtgactatggttgggacactgctggactctcagctgatcccgagacctttgctaggaaccgtgagctcgaagtcattcactgcagatgggccatgttgggagctcttgggtgtgttttccctgagct

SEQ ID NO: 7033 - DNA, 347 bp, Gossypium hirsutum
  Clone ID: LIB3120-015-Q1-K1-E9
ctctctcatttaactcttattatattgttgtagtgatattagtagccttttttctgttgcggtgtacattttgttactgatttttgcagccaccgcctgaaaaaggaacagcaatggcgtacgacaggctacgaccatctgaacccggcagctctggagttactcagcaacaaaatcatgaagaacccaaagccaaaaacaacaagagaaagatcgttattctttcggttattgcattgacgatgatcgttgcctcggctgtttgtgccggactcgtgattggtctccgtgaagccggtgctgatcccgtcggtacccaagttcgacgtaagccgacacaagctatt

SEQ ID NO: 7034 - DNA, 268 bp, Gossypium hirsutum
  Clone ID: LIB3120-015-Q1-K1-F1
agcatacactactagtacccactactagcagtggcttcctcaatgatctcatcggctaccagtgccactgcctgtccggcccaggctaacatggtcgctcctttcaccggcctcaagtctgcctgtgctttcccagtcatcaagaaggccaacagcgacattacttctctagcaagcaatggccgcagagtgcaatgcatgcacgtgtggcctcctactggaaagaagaagttcgagactctcttatacctccccgatcttacacccg

SEQ ID NO: 7035 - DNA, 338 bp, Gossypium hirsutum
  unsure (1)..(338): unsure at all n locations; Clone ID: LIB3120-015-Q1-K1-F10
ctctagagtaaatttcttttgcaatcctttgtagagctccgggatccattgtcaccatggggggctcaaatctgacaatgtgggtgtactcaaaaccctctctttctgacacttcttcactctctttgcgttctttcatcagcccttttcagctcccatctcagagctcaacccccggtaacccttacaggtcctcatctgtaaccccagttcactgtggtcttcgtgagcttagagaccgtattgattcagtaaagaacacgcagaagatcactgaagccatgaaacttgtggctgctgctaaagntatgagagcacaataagctgttgtcaatggc

SEQ ID NO: 7036 - DNA, 355 bp, Gossypium hirsutum
  Clone ID: LIB3120-015-Q1-K1-F11
tcgctttgtgatgctgacgttgctctcatcattttctcggcaactgggaaactatttgaattcgctagctggcagtatgaaagatattttgggaagatataatttgcactccaacaatatcaacaaattggaccaaccttctcttgatctccagctggagaacaataacaacatacgattgaacaaggaaatagttgataagacccgccaattaaggcagatgagaggggaagatcttcaaggactgaacgttgaggaattgcagcaactagaggggatgcttgaatctggacttaaatgcgttttggaaaccaagagcaatcggattatgaacgacatctcttcacttgaaaat

SEQ ID NO: 7037 - DNA, 432 bp, Gossypium hirsutum
  unsure (1)..(432): unsure at all n locations; Clone ID: LIB3120-015-Q1-K1-F12
cgcgtgcgattcagattanggtttttccgcagcacttctatttgatgattaattagggttttagagcgggtgcttagggttttgagattggagaggggagcccaatgctgaatttggggattggttgtgttgtttgtccccattgtggagctcatgatgacacccaaatagggttggatcgattgtgcttccgggcattaacccttattgccattggtgtctaagaattactagtttctttgctgctatgcggcatagcttagcatcaaacactacattacgctggttcttaaggacgtgggttgatctggctctctctttagctgctttcgttgtccatcgggattactgctgtgtgaaagataaccggcttcgtctcctctctgttagacctctgttttggaaaaaaaaattaagtgcattcttagcgat

SEQ ID NO: 7038 - DNA, 327 bp, Gossypium hirsutum
  unsure (1)..(327): unsure at all n locations; Clone ID: LIB3120-015-Q1-K1-F2
cccacgcgtncggagacacttatcttgcgtggtctcttaaacggagtaaagcagtgaacaggcgtaaaacaggggtgggggtgatcggaaaggggcacatgaatggtgttatatatgcgttagtgtcggaccaagggaacctacggttcatagaccttgcaaggaagactccatctgaagctgaatctaatggctgggttcaacgtcttctcaaaagcttggctagagacactttgattggcatcctattatgggcattatatgaacagattaaatcagctggtatattattatagtataatgtgattaaagaaatcatttgtgaat

SEQ ID NO: 7039 - DNA, 364 bp, Gossypium hirsutum
  Clone ID: LIB3120-015-Q1-K1-F4
agagaatatcagtgaagttggacatctataggaaattctcaaatgcattagctgtggcagtgattgcttctgttgcatggataacttatgaggttgttttgtctagatttcaatttctttcttggttggaattttcaagaatggtggatctgattcgttcggcattacagatatacttcaaagcaactgatccattcaatgagaggtggcaaagtgcttgaatcatcacagctttttgggacatcctttcgttggccctactctgggttattggctacctttggcccccttttaaaacctcccaccgggccgccttattcctttaaaaagtcctttcaagccactttccaaccttacccttaaa

SEQ ID NO: 7040 - DNA, 378 bp, Gossypium hirsutum
  Clone ID: LIB3120-015-Q1-K1-F5
aagtattttggggaatgcaaaattccatggtttctaagttggacaaagtccttgtggacagtgatgcagcatttgaagtcgttatttcatcttgtggtgagcaagggcatactccagcaataatgttgagtgcaggtttcaagcctcagacagaacctcatttacgaggaatgttgacttgtgtgagagcatctcaactttggggccttagggaaaaatctaggatttttattcattcaggcagatggttaatgggcgttttggatgaactaagtgtacttgaacaaagtcagtgctttatccaagtgtcaaatccatctctacaaaactgcttcctcaaacatggttctaggtttggtgaaacaaagaaaaattttg

SEQ ID NO: 7041 - DNA, 287 bp, Gossypium hirsutum
  Clone ID: LIB3120-015-Q1-K1-F6
cccacgcgtccgatctgatccaaaaatggcttcctttgcttctcaaacgttcctcatcaggttcaccctcttctcacctttcttcattacaatcaatggagaattctcgattcaatccattgtaacatccacaaaacgcatggagaaaatgacccatctccatttctatttccatgacactataagtggcaaacacccaacagccatgcaaatcatcaagccacataacacgtcagcacgtgcgttatttggtatcactttcatggcagatgatccattgactgaaa

SEQ ID NO: 7042 - DNA, 254 bp, Gossypium hirsutum
  Clone ID: LIB3120-015-Q1-K1-F7
cccacgcgtccgctgctgctctcgttttctcctgtatgggagcggcgtacggaacggccaggagcggtgtcggagtggcgtcgatgggagtgatgaggccagagctggtaatgaaatcgatcgtccccgttgttatggctggtgttttaggtatttatgggttgattattgcggttattataagcaccgggattaacccaaaggccaaatcttactaccttttcgatggttatgctcatctttcctctggtctc

SEQ ID NO: 7043 - DNA, 391 bp, Gossypium hirsutum
  Clone ID: LIB3120-015-Q1-K1-F8
cccacgcgtccggcaatccatatatggagaggaatatggaatttttgattgaatgcatggatgatttgtcagtggaacagcagaagttccaattttactacaggagcctgtcacgtcaacaagcccagcaacaggcatggcttcagaaaagaagggcagataacatgcaacgaaaagctgctggggaggatcctttgcctgaggaggacccttcaaatcccatcttcaagccaatccctgagccatcaccgttggagagcttcctcataacaaatcaaatcgcaaattactgcaaccaaatcaacggggtttctgggcagagcttcaacagattgtatttaatgaaatcggtgcacgataactgaaacttgcaatgtcgtctgcaattttt

SEQ ID NO: 7044 - DNA, 238 bp, Gossypium hirsutum
  Clone ID: LIB3120-015-Q1-K1-F9
cgtgcgtcaagtgcagtgcattaatttcattgtctacaagcctccaggcttctaagctttggataaactgtgtctctccatttgtttgaatttgtactcagaaaaaccatgttctttacttttgcttttctctttctttgagttattggcctttgcttctcgatttctgggttttaatcctttttggattttcattggaagaaaggctgagaactaatgaataaaagttggttttctt

SEQ ID NO: 7045 - DNA, 285 bp, Gossypium hirsutum
  unsure (1)..(285): unsure at all n locations; Clone ID: LIB3120-015-Q1-K1-G1
cccacgcgtncgctctaattccctgtcaaagacccagcagcaatgaaacaagctcttaatagatgagttgagagttgagacccatcttcaaaatcaaactctaacactgaaactttgtcaggcggttctaattggaaccaaaaacaatgtcttgtacctcagtttcttcttttactgcttctctctttgtcccttcaaaaagttcatctttttccaatcataagcgcagattcatccaatgttctcttggggctgtagtagaaccaaaagctttagcagaacccc

SEQ ID NO: 7046 - DNA, 386 bp, Gossypium hirsutum
  Clone ID: LIB3120-015-Q1-K1-G10
gccaaagatgccattaccgaggttgtgaggtccggggatcttatttcttacactgctgaagaaggggtggggattcttggtgaagggaaattcttggtatctgatagttttcctggaaatcagagaaccaaatattgcctcacgtccaagattccgcttggagtgattctggccattccaccattcaattatccagttaacctggctgtttcaaaaatcgcaccggctttaattgctggaaacttccttgtactcaagccaccgacacagggtgctgtttctgctcttcatatggtacactgctttcatttggctggttttcccaaaaggctaattagctgtgtgacagggaaaggctccgagatcggggactttctcaccatgca

SEQ ID NO: 7047 - DNA, 298 bp, Gossypium hirsutum
  unsure (1)..(298): unsure at all n locations; Clone ID: LIB3120-015-Q1-K1-G11
cccacgcgtncgcccacgcgtncgagctggatgagaagaaactctcatgtccagttctgtagtagagatggaattcataaacaacaaccatcaactataaccccaaaagaaaccgatttcgtaaacaacatagaggaagaatgaaggggatatcttatcgaggtaatcggatttgtttcggtagatatgctcttcaagcacttgaacccgcttggattacatctagacaaatagaagcggngcgccgcgcaatgacacgaaatgtacgccgtggtggaaaaatatgggtacgtatatt

SEQ ID NO: 7048 - DNA, 454 bp, Gossypium hirsutum
  Clone ID: LIB3120-015-Q1-K1-G12
ctggactctagactatatatagtttagataacccgcgaaaattttcgacatatttgattgcgatcttgagatagacagggcgctccttcgtctcaaaatctgaatagaacaatctttattatttgaagcggttctttcgggcagttatcaaaagagggcaattgcttcgaatttgatcaattgagatatatggaaacaaaaacaatatcaatataacaataatatatatatttcattcgaattcaaagtggattcttattttctatattctttattctttttagattcaattagattcaagggctaagcactgaatcaaaaaaaaaaaaaaaaacagagaatagattcatgggcccctactttataatataatgaaaggcatgcttgatagaaagattacatcacataaagtcaacgaatgaggtgggttcattaacaactcacagatgaaaaa

SEQ ID NO: 7049 - DNA, 284 bp, Gossypium hirsutum
  Clone ID: LIB3120-015-Q1-K1-G2
aacaaactcaactgcttcacaatggcctttacaaccatggctctttcttccccatcattcggcgggaaggcagtgaagttctccccttccacccctgaaatccatggaactggccgcgtttccatgaggaaaaccaccaagcctgttccttctggtagcccatggtacggacctgaccgagttttgtacttgggttcactttccggtgagccaccatcttacttgaccggtgagttccctggtgactatggttgggacactgctggactctcatatgatcccga

SEQ ID NO: 7050 - DNA, 306 bp, Gossypium hirsutum
  Clone ID: LIB3120-015-Q1-K1-G4
agcgagcattcaataatatacagtgtctatgccccattcccaatgcttcatgtaaatatgggatgccttaggtgttatgtcccgctcacaaagaataattgctcaacttgaacatcttcttgtcgaactaacaatactcaaaaacaagaaatttgcgaccactataacccatcaaatctgcaaaccctggaatgtgaatcacttcccatggtccaaaaaggatataaaaattccccaaaaaaaaatttggcgttcctttttaattcccgaaaaataagaaatttcatccgaattttgttccttaaa

SEQ ID NO: 7051 - DNA, 243 bp, Gossypium hirsutum
  Clone ID: LIB3120-015-Q1-K1-G5
ggcgggatcaaatctgtgtgttagagacaatggacatgttttgttgggggcggagctgcggacattaatgctgaccttgtcgatgatgaaataaaacacggacctcgatgatggacatgggacactaccacaccaagaatgctctactttgcttatgcctgctttggcgattgcgtatgtgaggcgactcgcggtgcatttattagtatcatgaatgtaagcagagaggattgggtacttaga

SEQ ID NO: 7052 - DNA, 186 bp, Gossypium hirsutum
  Clone ID: LIB3120-015-Q1-K1-G6
cccacgcgtccggcgagttatccgcatgtccaggggacactttctggacttctgaacgccatcgacggcctattgtcgtgctgcggagacgagaggatcattgttttcaccaccaactacaaggataaaattgatcctgcgctgttgcgagccggtcgcatggacaagcacatatgcttgtcttac

SEQ ID NO: 7053 - DNA, 314 bp, Gossypium hirsutum
  unsure (1)..(314): unsure at all n locations; Clone ID: LIB3120-015-Q1-K1-G7
cacacattcccccaaatcaaccaaattcactcgttccatatctccaatctatctctctgtggtctttcgttttggtatcttcacttcctgcatcaaacatcttccgctgtctggcataactgaatccttgccgggaaaaatgatataccggcggcaaccgggtgcagaggacctggtctcctctgacaatcccaatgcttggatttttgatgattatgggttgctagaagacattcctgtgcctggtggggatcttccctcacttgacccttcagacccaatctggtcatntcctttccttacttgctctactg

SEQ ID NO: 7054 - DNA, 211 bp, Gossypium hirsutum
  Clone ID: LIB3120-015-Q1-K1-G8
atcagaatcaatggaacaatcaaattgttagtggttcaggaaaaaaatgaagtaaatggggattttgcaagcgtcccaagtgccttttgcatcgacttgttcatcttcgtcttcttgtccccctgctgcacctaaaaccttatccgcatgcaaatcattggctgtgaatgtcaagttgagcaaagcatgcagttcgacgagtctgcgactg

SEQ ID NO: 7055 - DNA, 313 bp, Gossypium hirsutum
  Clone ID: LIB3120-015-Q1-K1-G9
ggctcgccctccactactgctggaactagaaagttgatcgttgtggcagccgccgcacctgaaaagtctgggatccctgctgttagaggtggtggcaacttcattgaccctgaatggctcgatggatcgctccctggagactacggatttgacccactaggtcttggaaaagacccagcattcctcaaatggtaccgagaagctgagctgatccatggacgttgggccatggctgctgtcgtctgcatcttcgtcggccaagcttggagtggcattccatggttcgaggcaggagctgacccacgtgcgatag

SEQ ID NO: 7056 - DNA, 85 bp, Gossypium hirsutum
  Clone ID: LIB3120-015-Q1-K1-H1
ctcacgggagcacacccttgctatgtctgtgtttgtgcggtccggtggactattaacacaggctttttggatgggactgatggcc

SEQ ID NO: 7057 - DNA, 400 bp, Gossypium hirsutum
  Clone ID: LIB3120-015-Q1-K1-H10
cttcggtctccggcttctgcctctcttccaataccacctctccttctaactcactccgggggcccacattgcggcggccctctatcatcgccaacctcaactcttccacttctcctcctacactcatccgaaatcaaccagttttcgcagcacctactcctttgctcactccttccaattggaaagaaaccatgggagacgagtcatacgaggaagccattgaagctctcaagaaactgctcaatgagaaaggagaattgaagagtgcagcgacggcaaaggtagagcacgtgacagctgagttgaagactgctgcttcctccgatgagtctgttgaccgcttgaaacaaggcttcatttacttcaagactgaaaaatacgaaaagaatcctgctctgta

SEQ ID NO: 7058 - DNA, 448 bp, Gossypium hirsutum
  unsure (1)..(448): unsure at all n locations; Clone ID: LIB3120-015-Q1-K1-H11
aaatggcttctgccaccacttccaccactttttccctcctcaaaaccaccgcctncaccaggggttnctgcgcctcccgctcttctgcatccctcatacgccttccctccactcgccgccacctcaaatcctcttctctcatccacagcctaggcttctcctccgctgcttctggggactctctgctttccctccatgcctcctccaaagttcgatctttcaagggaaaagggtcaagaggggttgtttcaatggccaagaagagtgttggggacttgactgccgctgatttgaaagggaagaaagtgtttgtgagggctgacttgaatgttccattggatgatagccagaacatcactgatgacaccaagattcgtgctgctattccaccatcaagcatttgattcagaatggagctaaagtcattctctctagccacttggggcgg

SEQ ID NO: 7059 - DNA, 455 bp, Gossypium hirsutum
  Clone ID: LIB3120-015-Q1-K1-H12
cggacgcgtgggcggacgcgtgggaaaaaattcacctcatgctctcattgatttgcaacaggtttacatgacatcaacagagaaaacttataccacaaactcccatcacccgagatcatctttccccttcagaatggcggctgcaaccatggctctctcttccccatctttcgccggaaaggccgtcaagctctctccttccgcccctaaaatccaaggcaatggccgtgtttccatgaggaaaaccgctaccaaggctgctccctctggaagtccatggtacggtcctgaccgagtcttgtacttgggtccactatctggtgagcctccatcttacttgaccggagaattccctggtgactacggttgggacactgctggactctcggcggacccagagacatttgccaggaaccgtgagctcgaagtcatccactgtaggtgggctatgttgg

SEQ ID NO: 7060 - DNA, 307 bp, Gossypium hirsutum
  unsure (1)..(307): unsure at all n locations; Clone ID: LIB3120-015-Q1-K1-H2
cccacgcgtncgattctctctagccacttggggcggccaaagggtgttactccaaaattcagcttggctcctgttgtacccaggctttctgaattacttggcattcaggttgtcaaggctgatgactgcattggtccagaagtagaaaagttagttgctgcacttcctgaaggtggtgttcttcttcttgaaaatgttagattttacaaggaagaggaaaagaatgaacctgaatttgcaaagaagcttgcttcgttagctgatctctttgtcaatgatgcatttgggactgcacatcgagcacatg

SEQ ID NO: 7061 - DNA, 210 bp, Gossypium hirsutum
  unsure (1)..(210): unsure at all n locations; Clone ID: LIB3120-015-Q1-K1-H4
gtcgagctggtagaactgggccaggcacatgttataggttgtatacagagagtgcatactggaatgagatggggccagctcctgtgcccgagatacaaaggaccaaccttggcaatgtggtgttgctgctcaagtctcttaaaatagagaacttgctagattntgatttcatggatccaccaccacaggaaaatatccttaattctatgt

SEQ ID NO: 7062 - DNA, 381 bp, Gossypium hirsutum
  Clone ID: LIB3120-015-Q1-K1-H5
ctgcactccattatgctgcagcatattgtgaccccaaagttgtctctgaggtacttggccggcgtctggctgatgtcaatctgcggaattctcgtggttacacacttcttcacatagctgcaatgcgaaaagaaccatcggtgataatggcacttctagcaaaaggggcatctgcttcaacactaacattggatggacaaagtgctgttaacatctgccggaggttgacaagaccaaaggattatcatgccaagacagagcaagggaaggaaacgaataaagaccggatatgcattgatattttaaagaaggaaatgaagagaaatccaatggctggagatgtttcttgtgcttcccatgcattgtctgatgatctgcata

SEQ ID NO: 7063 - DNA, 207 bp, Gossypium hirsutum
  Clone ID: LIB3120-015-Q1-K1-H6
gaaatgtatcagcgagggaagatcaaatcagacggtggctgctgattgagatggaaccctgcttgtgtcacgtagtgctttcccttactacatgcttattgccctcgaagctggcagcctgttaagagcactgcttctcttactatccgttccagtcgtgtattttacctaccttgttcatctctgaatctttcgccataaatacct

SEQ ID NO: 7064 - DNA, 178 bp, Gossypium hirsutum
  unsure (1)..(178): unsure at all n locations; Clone ID: LIB3120-015-Q1-K1-H8
atttttctttcttttgttccttctttttgcagaaagaatcctgctctgtgtggtgagctggccaagggtcaaagccctaagtatatgattgttgcctgctcggactctatggtctgcccatctcatgtgctggacatgcnaacctggtgaagctttttgtgggcccgtaaatgtttgc

SEQ ID NO: 7065 - DNA, 350 bp, Gossypium hirsutum
  unsure (1)..(350): unsure at all n locations; Clone ID: LIB3120-015-Q1-K1-H9
ttgggttgcaatggcacaagcaatggcatcgatgactggtttacgtggctcttcacaagcggtgttggaaggtagtctccaactcancggccaaacccggttgaacgttgctagcaccaacagggtggctgtggctagacctggttttaccgttagagctcaacaggtccctgccgagcctgaaactggacgcaaagctgtgctgggtcttgttgctgctggtttggctactggctcctttgttcaagctgtgcttgctgatgcacgaagcatcaaggttggcccgccttcaccaccctttcgtggattgcccggaactttgaattcgatgagccaagagaccttgatct

SEQ ID NO: 7066 - DNA, 217 bp, Gossypium hirsutum
  Clone ID: LIB3120-016-Q1-K1-A1
cccacgcgtccgaaacccattaatggcttcttctctcagtctttcaagccacacaggggctgcattattcccttctcacacttcaaagccccaattgtcactttctaaatccatcccaattcttaccaagtcatcacagtctcaatttcacggccttaaattctctcactcttcttctctttcaatccctcgtttttccacttttaaaacctcgatt

SEQ ID NO: 7067 - DNA, 434 bp, Gossypium hirsutum
  Clone ID: LIB3120-016-Q1-K1-A10
cccacgcgtccgcagagatctcagaactcattccacctcaccaccatttcatcattcaaagtgcaccttccaaagctaagggtctctgagccttgttgtcatccaatcaattccaacaaaaatcctccattgttgatggttcaagcctttccatcatacatttgacacccatctctttgcataaaaattatgcaaatgaggaccctcaatgcagcaactccaagtttgacacctctctcggttctttctgagacaagaaccgaggccagaaaagcaccattgctccccattgcttcaccactcaaactacccaactccccagcttttattaagacccaaccagctttgcaccagtgtttgtcaagaaccttgcatggtggcttactgcttctgtcatcacttctccccaatggtttcgctaaagccttgtcata

SEQ ID NO: 7068 - DNA, 228 bp, Gossypium hirsutum
  Clone ID: LIB3120-016-Q1-K1-A11
gattttcgtacggttttccaccttccctcatctccctcccttccttccttccaattcttagaggttgctttttccttccaattcttcttctttcttttttcttttgggaataattcgaaaattgattccatttttccatgatttcaaggtattgttgaggctgcatatttgaatagcacttatgaaaaatattaagccgaacatgagcacaatagaagtgagggggcc

SEQ ID NO: 7069 - DNA, 418 bp, Gossypium hirsutum
  Clone ID: LIB3120-016-Q1-K1-A12
gcaggacctgaatagggctgcactctctcgccccttggacgagactcagcaaagctggctgcgtggggcccggggagcaaaagaagaagaataagtacgtccatctcggatgtatcattgtgagccgcaagatctttgtatggaccttggggaccctgctcgtctccgccctcctggccggactcatcaccctcatcggcaagactgtcccacgttatgaccaccgccactcttcgaccgataactacactttggctcttcacaaggcgctcatgttctttaatgctcaacgttctggaaagctgcccaagcatattaatgtgtcgtggagagggaactctggcctccaagatggcaaatcccatcccttcgttttgatgaaagatctggtcgggggaatattccatggctgagatgc

SEQ ID NO: 7070 - DNA, 375 bp, Gossypium hirsutum
  unsure (1)..(375): unsure at all n locations; Clone ID: LIB3120-016-Q1-K1-A3
cggacgcgtccgcccacgcgtccgcccacgcgtccgcccacgcgtccggcttcagggaattataaaagcatggtattctatcttgaagcttgtgagtcaggtagtatctttgagggtcttcttcctcaggggttgaatatctatgcaaccacagcatcaaatgcggaagagagtagctggggaacctattgtcccggagagtacccaagtcctcccccagaatatgaaacctgcttgggagacttgtacagcgtcgcttggatggaggacagtgacatgcataatctgcggacagagactnttgcaccagcatatgaacttgtgaaaagaggactatcaatggtcatcttgatatggctctcatgtcatgcatat

SEQ ID NO: 7071 - DNA, 372 bp, Gossypium hirsutum
  unsure (1)..(372): unsure at all n locations; Clone ID: LIB3120-016-Q1-K1-A5
gggtacggttcagataaattctgcaccagctcgtggaccagatcatttcccatttcagggggggaaagacagtggaataggatcacagggggttaccaacagcattaacatgatgacaaagatcaagagcacagttatcaacttaccaaccccgtcttacaccatgggttaggcatttcataaatatcagaataacaaccagggttatcttagttaagatagtatttgtgttttagagcttatttccatatgatgtttagtgaaaaaggataaaaaatggagacaagcaaataatgaagaccagtacatatgcataatatattggctctgntatcgaatggatcaaaagttcttcgagtgatggttttgagg

SEQ ID NO: 7072 - DNA, 283 bp, Gossypium hirsutum
  Clone ID: LIB3120-016-Q1-K1-A7
aacaaaatcaactgcttcacaatggcctctacaaccatggctctttcttccccatcattcgccggtaaggcagtgaagttctccccttccacccctgaaatccagggaactggccgtgtttccatgaggaaaaccaccaagcctgttccttctggtagcccatggtacggtcctgaccgagttttgtacttgggtccactttccggtgagccaccatcttactggaccggggagttccctggtgactatggttgggacactgctggactctcagctgatcccg

SEQ ID NO: 7073 - DNA, 263 bp, Gossypium hirsutum
  Clone ID: LIB3120-016-Q1-K1-A9
cgactctggcaagtcgaccactactggtcatttgatctacaagctaggtggtattgacaagcgtgtgattgagaggttcgagaaggaggctgctgaaatgaacaaaaggtcattcaagtatgcttgggtgcttgacaagcttaaggctgagcgtgaacgtggtatcaccattgatattgccctgtggaagtttgagaccaccaaatactattgcaccgttattgatgcacctggacaccgtgactttatcaaaaacatgatta

SEQ ID NO: 7074 - DNA, 136 bp, Gossypium hirsutum
  Clone ID: LIB3120-016-Q1-K1-B1
gacacacttacaatatctactgctcgtaccactgagtcctctgtcacctcagcggcggtgggggcgaatctaagcttccctatctgtttatcttacacacttcacgcaaacgttatcgttgaccacttagctccat

SEQ ID NO: 7075 - DNA, 182 bp, Gossypium hirsutum
  Clone ID: LIB3120-016-Q1-K1-B10
cttaaaacaacattagtacccgcctatgtctgtatctcacatttctactatcccacttctggaccgatgattcaatatctacatattcattcactacctatttaaacaaaactaattacatgcatacccactattttaaacattcatttctaaacacaaaaccacactacttaactcttatt

SEQ ID NO: 7076 - DNA, 251 bp, Gossypium hirsutum
  Clone ID: LIB3120-016-Q1-K1-B11
cctcgacttattctaatcctttcttgtaatttatataagaagaaacatggcttgttcaactcggtgaaccctttttatacgtgggtccacttactctaaagctacgcactcttgccatctcaaagtcccgttcatgcaatggcctctgcgaacgataactaacactaagctgactcaccgaagcatcgtgctgctggccacggacacacacctgataatggtgaaactgaggaccctaatgttcaacttaa

SEQ ID NO: 7077 - DNA, 320 bp, Gossypium hirsutum
  Clone ID: LIB3120-016-Q1-K1-B12
cgaagtgtcatttgaaaatcactcgtcctggtatcaacggtacagcgtttcgattttcatagagaaacctcgaaacttctacgtagtgagaggaaagtttgagtacgtgcgatggctcgctcgtggagagcaagcggctttttggtggttctagctatagtcttgtccggatgcttctttgcaatcgcaattgccaaggaggaagccgcgaaattgggaacagtcatcggaattgatcttggtacaacctattcttgtgttggggtatacaaaaacggtcatgttgaaattatagccaatgaccaaagtaaccgtattac

SEQ ID NO: 7078 - DNA, 440 bp, Gossypium hirsutum
  unsure (1)..(440): unsure at all n locations; Clone ID: LIB3120-016-Q1-K1-B3
cccacgcgtccgtgcaactatgctatctcaggcactggatcatctgagcttaatgccaaacttgcttcagcgccatcagttgcttccccagttatgtgcggtggtcgcaagttgcctgtgatcagagcccagcaggctaaattttctgattccaaaggatcaggtgccagtgaaggaagaagagctgctgtgctctacttggcagctggccttttcaccacagctgttgcttcttctgcanatgctggngtcattgacgagtcccttgaaaggagcaaagctaacagggatttgaatgacagaaaaaggtggcaacaagtggaaccaaccttttcagaacatacactggtcaatttggcacttgcaaggtccctgagaacttcactggctggcaagatcttgcgaagcaaaagaaagtaccattcatctctgatgatttg

SEQ ID NO: 7079 - DNA, 188 bp, Gossypium hirsutum
  Clone ID: LIB3120-016-Q1-K1-B5
cccacgcgtccgggaaattcttgttttttaggaatattggtaacaatatccctgtgtcttgagttgtttggtgttggtgttcatggtcttggtgtgaattggggtaccatggcatacataaactttccccaaaaaccaggggttaaaatgttaaagaacattggattaaaaaaggttaacctttttga

SEQ ID NO: 7080 - DNA, 425 bp, Gossypium hirsutum
  Clone ID: LIB3120-016-Q1-K1-B7
tttctctttttgttgcctttttacctgaaaatatactccaattttacgataatcaggttgggtatactctgaagaagcctatctcccgggattgttgctataatttacaaaagaaaaataacaatatctggttaatttcgtcaggggctaagcttatttgcttccataaattgttctatttagttcttctttcaatttattggctctgggaattcttggttcttgttcgatcgattattttcaacttgatcgaggatggcttgcatggcctctcgcactggaatgcacttgcagagatacgaatacctaatgccgcgccaacattgtgggggccttccctatagaaacaaatctagcagtgatggaaccatgactgatgacttggaggtacttgggatctcctcacagaaatgtgaaaaaatgat

SEQ ID NO: 7081 - DNA, 385 bp, Gossypium hirsutum
  Clone ID: LIB3120-016-Q1-K1-B9
gcgcttaaaacaacatatgtgcccgtcgaggtctctaacgcatatttctactagcccacggctgggccttgttgcaaggttgacatgttcggccactaccaccacaaccaagcctaagtccagtcagaaccagttggttatcgagccacggcttgagacaaaaccggactctatcactcccattatccctagtgttggccctcccttgtccaatgatccaagtttacaatcaacatggtcccaccgagcatgggtgggcagtggttggaccaacgctttttttttcctaacccaaaatggaacgggtgccgcttatacacatatttgggttgaacctaataatagaagcttttgtgggtattgtttaacttaccctttgtctggg

SEQ ID NO: 7082 - DNA, 286 bp, Gossypium hirsutum
  Clone ID: LIB3120-016-Q1-K1-C1
acgatactcaacggtgttttgtgattaaaaaaactaccaagattgtggcaaaacaagatggcttccctgcatgaaccatggctagtggagaacgggttgaaggggtctagcaaggagattcgccatggcaggactgcacacaacatgtcgtcttcgtcgttgcggaaaaaatcggacctgacgcttgtttccaaggttcggtatgcaatgcttaggcagttcctcgccaatcttcaagaggtcatattagggaccaaggctctcgttctctttccagctatttcat

SEQ ID NO: 7083 - DNA, 378 bp, Gossypium hirsutum
  Clone ID: LIB3120-016-Q1-K1-C10
atttttcattgccaatcagtcccttattaataagtagagtatttccataactggtttaattgccgtcatgcactgtgctccatagtcttggaacccaaggacagaagactcttttagcatttcaccgcaaagatggagataacaaatgtgagcgagtatcaagaaattgcgaagcaaaagttgccaaagatggtgtatgactactacgcatctggtgctgaggaccaatggacattgcatgaaaatagatttgctttcaacaagatactgtttcggcctcgtattttcattggtggtaaccagatagacatgaccaccaccggggtggggttcaagaatataatgcctatcatgattggcccaactggcatgccaaaa

SEQ ID NO: 7084 - DNA, 374 bp, Gossypium hirsutum
  Clone ID: LIB3120-016-Q1-K1-C11
cccacgcgtccgtgtttacaggatgttcatttcctcctgcaagaggctgagaatcatgaaaggaggagaagctagagggttgggctgtgtatgagccaccaaattatttaacaagaaagaaagttttctttggctttggataatccaaattctgcaaggaagatcaatttggtcttcctggaaagtgagggggctatttgctagagcaaaatttctcaaagatttgacgacatggctggcctttttagcctcctctatgcatgtcaaatatctatacttgttttatagcacaaaaccaaaaaggcacgatattaaagaatagttaagatccaatccaattgtacaaaacgacatacactattgctttatcattt

SEQ ID NO: 7085 - DNA, 217 bp, Gossypium hirsutum
  Clone ID: LIB3120-016-Q1-K1-C12
agaacacacaacaatggccgccaacacactaatgagctgtggcatagccaccacatttcctgcagttctttcctcatcaaagtccaagttcagtggcgccgccgtatcgttgcctagtgctgttggtaccaatgttggccaccgtgttagcatgtcagctgactggatgcctggtcaacctagaccaccttaccttgatgggtcagcaccaggtgac

SEQ ID NO: 7086 - DNA, 140 bp, Gossypium hirsutum
  Clone ID: LIB3120-016-Q1-K1-C3
gccacgcgtccgaaatgttatgcttgctttagagaggcatctttttttggtgtatgcattaggaaggtcattgtaccctttacctcttcattgaactcaggaacttaggaataagggagttgctatcggaatgttcgagc

SEQ ID NO: 7087 - DNA, 257 bp, Gossypium hirsutum
  Clone ID: LIB3120-016-Q1-K1-C7
attacacttccggaaaaaaatcatggccaccgtcacgacgcaagcctctgccgctgttttgcggccatgtgcatcgaaaacacggttccttactggttcttccggtaagttaaaccgagacgtttcatttaaaccagtggcttctacatcgactagctcattcaaagttgaagcaaagaaaggggagtggttacctggtcttccttcaccagcttacctcaatggcagtcttccaggtgataatggctttgatcctc

SEQ ID NO: 7088 - DNA, 310 bp, Gossypium hirsutum
  Clone ID: LIB3120-016-Q1-K1-C9
cggacgcgtgggctcttttgtataactgtagcatatagtactagtaagcagtaatagcaaggggctcctccatgatctcatcggcaaccattgccaccgtgaactgctcctccccggcacaggccaacatggtggcccccttcaccggcctcaagtctgcctctgctttcccagtcactaggaaggccaacaacgacatcacttctcttgcaagcaatggtgggagagtgcaatgcatgcacgtgtggcctcctcttgggaagaagaagttcgagacactctcatacctcccccatcttacacccgtaca

SEQ ID NO: 7089 - DNA, 160 bp, Gossypium hirsutum
  Clone ID: LIB3120-016-Q1-K1-D1
gaaagatctgatgatcttttagaacaaaatattgaatcacttggacacaaccaacctatagagcagtgttttgtttacactcccaaaacccattttcaaataggcttttatggactcctttaccctcacttattattaattcctaatttttttcaacaaa

SEQ ID NO: 7090 - DNA, 295 bp, Gossypium hirsutum
  Clone ID: LIB3120-016-Q1-K1-D10
gtccgtctctctgttttactccacaaccactatcactaccattatggcttcggctactgtgggtgtagccaaacccaaccttcagattcaggcaaaaggaaagggtgttggttttgcagatttctcaagcctacacaactcctctactagccttccctttgccaggaaaacctctgatgacttccattcactcgttgcttttcagacatctgctctaggaagcaataatggcgggtacaggaaagggatggcagaagcaaagctaaaggtggctataaatggggttggtaggatt

SEQ ID NO: 7091 - DNA, 185 bp, Gossypium hirsutum
  Clone ID: LIB3120-016-Q1-K1-D11
cccacgcgttcgagaggcatggctatttcagactacatttaccatattacccctatcacatggggttatttactcctactcctactactatgctacaccataaccaccaccaccaccaccaccacctatgctataaacataacctacatgctctccttcttccaaaaccataccttcttatcctc

SEQ ID NO: 7092 - DNA, 238 bp, Gossypium hirsutum
  unsure (1)..(238): unsure at all n locations; Clone ID: LIB3120-016-Q1-K1-D3
ttgaccggtggacccacgcgtaattanaggatgatattagtgcacctgtatatactctttcctacccacgaactacaatgtacgctgggggaccatgtggaagctgcctatgttctggtgcaccgactcagctcacgttttgaaggagcttgaggaatgcaagaaggaataccccaatgcattcattaaaatcattggcttcgacaacgggcctcaacgtcagtgcattagtttcatt

SEQ ID NO: 7093 - DNA, 434 bp, Gossypium hirsutum
  Clone ID: LIB3120-016-Q1-K1-D7
ggcaggtgaataaaggtacagttcctccagcatttactttgaaagatcaagatgggaaaagtgtaagcctttcaaagtttaaagggaagcctgttgtggtttatttttaccctgctgatgaaacccctggttgcaccaaacaggcatgtgcttttagagtcttatgagaagtttaagaaagctggagctgaagttattgggattagtgttgatagtgcagaatctcacaaggtaaaatttctatgattttgagttgaaaatgtatatggttgtgtttcaaattttcgcgggaaaataaattggtgattaattggtaaaacaaccatggacatggtctttggggtaattgaattgagtgttacattgtattttattttttgtacttaaaaaatgataaattaattgttttattatatatcaaaaaataaattgat

SEQ ID NO: 7094 - DNA, 339 bp, Gossypium hirsutum
  Clone ID: LIB3120-016-Q1-K1-E10
atttttatatatattattcatagcccctagaaattatataaattgcctttgcctctttgagtaggaaactactaattgccctgattctttattattaacaatttctactttttgagtattgattttctctctttttctttaaaccatctgccaaattttattttcccgaccagggcctaaaagaaatggacaaacgtgaccggaagcaagcgaagactggtagttgctgttctgaaggtatgttatgtcctgaattcctttttgtttcctctttggttgctttggaattttcgtcttgtttttccaacttccatttttggactttctggtttgggttta

SEQ ID NO: 7095 - DNA, 391 bp, Gossypium hirsutum
  Clone ID: LIB3120-016-Q1-K1-E11
cccacgcgttcgcaaaaggaccaaggcactgttggtaaagcttttaacaaacccctctttgggtgggtgtttaaacaaggaaactcaccgaagtgaaagggttcaaaacaaaaggaaaagaagagagaaagcaacttttttttttccttcttgtgcgtgtggggaacttatttttgaaggatcagaagcatatgaaattgaactaaatttttgttggttttttttttttgcaacaaatgatggcaggaaaccctaactggtggagcatgcatttgcattcaccttttaaacaccctttaactttgttaaccaaaacattcccattcctctttcgttaataagttgttgaatattcaactacttttttgcctgataaccaaaaactttctta

SEQ ID NO: 7096 - DNA, 398 bp, Gossypium hirsutum
  Clone ID: LIB3120-016-Q1-K1-E12
agagtttgaaataatgtctgggtttttctttacattgctgctttgtttcatcatttttaatgtggactcagagggtagccatggatatcagcaacagcaatctgctgttgttgttggaactgtgtactgtgatacatgtttccagtctgacctctcaaggccaacccatttcatttcaggtgcaactgttgaagtggaatgcaaagatcggaagagctcaagggcaagctttatgcaacaagtgaaaaccaataggcatggggaattcaaagttcatttggccttttcaaggaaccaaactttgaagaaaatcgaagggtggggaagttaaccgattaaaaagcaggaacccttttggggcaggggcctatttggtactttctttttactccatttta

SEQ ID NO: 7097 - DNA, 502 bp, Gossypium hirsutum
  unsure (1)..(502): unsure at all n locations; Clone ID: LIB3120-016-Q1-K1-E5
cgnntccgcccacgccgnntccggctgacgttcnaatatcaacgtnntaatcttcgttctttggctgcgatctggtatcagagcgatggctnnntttaataagactgaccnnngacggcggtgccaacaaccatccggctttggtactcgttgcacgcactcttctagcattcacggattgtgcgcccttttcgtcgcttgtatccccgtcggcgcctaaccatctccggtggccgactgtcaatcccgcccgttaccattcggtgcctttcnngttggcgggaaccattacatcttttaccgtggtatccctttattaggattggctcgaactccttggctcaacccgtcgctttgcgctgttacttaaaggttcgacaactagtgggcctggggagtaccaaggctttcgggactaatcatccggcggggggagcattataacgcgttccttttcgaaatcgtgatgactttcggactggtctacaccgtctacgccaca

SEQ ID NO: 7098 - DNA, 387 bp, Gossypium hirsutum
  Clone ID: LIB3120-016-Q1-K1-E9
ccgagcgacccacaccgtacacccacacgttcacccacacgttctctctttctttctatatttagctataacatacactgctgattcccactactatcaatgactccctcaatcatctcatctgctaccattaccactgcctctccatcacacactaacatttttgctcctttcatccatctcaaatcttccttttctttttcactcaccatgaatgccttcaaccacattacttctttcttaaactatatccgtttatttcaatgcatgcccttatttccctctacttttaagaaaaattttgatactctctcataccttccccatcttacacccatacacttttctatatatatatatacctttttttcttcaaaatttatttct

SEQ ID NO: 7099 - DNA, 223 bp, Gossypium hirsutum
  Clone ID: LIB3120-016-Q1-K1-F10
cccactcgttccggaaatggttgacttacaatattttggacgaccaacaggacattactcgagggaaacgaatggtggattccttcttccaagctcccatgaatgatataactcactattctgacataagtttctatgaataccgcaaccaaagctttataacgtacaacttggacatcaacatgaatggtttgtacattgctccggcattcatagacaagct

SEQ ID NO: 7100 - DNA, 356 bp, Gossypium hirsutum
  Clone ID: LIB3120-016-Q1-K1-F11
catttctctctataaacttgtacggccaaagattccttcccagcaaaaaatcggaaagaaagagggaacatggggatgccgcctgccacgtgcgcctccgcctcttcctcctccatcgtcaactcttctccgatcggtggcgctggcggaggaggtggagagatcatgctttttggagtcagagtggtggttgattccatgaggaaaagcgtgagtatgaacaacctttctcaatacgaacaacctcatgagtcgaacaagcataacaacaagagcaacaaagatcaaggcgatgataacctcaccgctggttacgcctccgccgacgatgccgttcctcactcctctggaaatcg

SEQ ID NO: 7101 - DNA, 233 bp, Gossypium hirsutum
  Clone ID: LIB3120-016-Q1-K1-F12
cggacgcgtgtgcggactcgtgggcggacgcgtgggaaggaagtcgttaggaattacttcaatagttccggtttccaaaggtggaagaagatttatggagagaccgatgatgtgaataaagtccagcttgatattaggttagggcattccaaaaccgctgaaaatgtgatgaaaatgttgaccgatgatggctcactgaatggcgtcactgtttgcgatgctggctgtggcac

SEQ ID NO: 7102 - DNA, 410 bp, Gossypium hirsutum
  Clone ID: LIB3120-016-Q1-K1-F9
aacattggtgggttttggttgttttagtcactacttggggtacaggggacaagttaccgcggcgggaattatttagaatttgttgtattctacagcaattgagacgacactatggtcgatcgagtggggcattgcggagctggtgaaccaccctgaaatccagaagaagctgcggcatgaacttgacactgttctaggacctggtaaccagatcactgaacctgacacccacaaacttccctaccttcaggctgtgatcaaggagactttgaggttacgaatggcaattcctctactcgtgccccacatgaacctgcatgatgcgaaattgggtggctatgatatccctgctgagagcaaaatcttgggtaatgcatgggggcttgccaacaaccctgcttactggaaaa

SEQ ID NO: 7103 - DNA, 232 bp, Gossypium hirsutum
  Clone ID: LIB3120-016-Q1-K1-G10
tccgtgaataaacataacgagcattcgatcatatgagatgaaagatggtcccttcaacaagcatgtgtgataagaggtgagagaagaatgcttagacaacgaagatgaatacttcatatgaagctttagatgagagccttttaatatgaccctttgggatgctttatcctcgtcttcctccatattctttctccttcaacattggagcttttggctgaagtggccgtactcg

SEQ ID NO: 7104 - DNA, 422 bp, Gossypium hirsutum
  Clone ID: LIB3120-016-Q1-K1-G11
ctttgccttcacaacttacaactcagcctctcctctctctttctctcttcgcctccaaatggctggtgccaccacttccaccactctttccctcctcaaaaccaccgcctccaccacctcttcctccgcctcccgctcttctgcatccctcatccgccttccttccacgcgccgccacctcaagtcctctcctctcatccacagcctaagcttctcctccgctgcttctggggactctctgctttccctccatgtctcctccaaagttccatctttcaagggaaaaaggtcaagaggggttgcttcaatggccaagaagagtgttggggacttgactgccgctgatttgaaaaggaaaaaaatgtttgtgagggctgacttgaatgttccattggatgatagccaaaacatcactgatgaca

SEQ ID NO: 7105 - DNA, 196 bp, Gossypium hirsutum
  Clone ID: LIB3120-016-Q1-K1-G12
atttaacacacatcaatggccgccaacacacttttgttctgtggcataaccaccacatttgggtgggttctttgctcatcaaagtccaagttcagtggcgccgccgcatcattgcctattgctgttggtaccaatgttggccaccgcgttagcatgtcatatgtctggatgcctggtcaacctagaccaccttacc

SEQ ID NO: 7106 - DNA, 336 bp, Gossypium hirsutum
  Clone ID: LIB3120-016-Q1-K1-G9
cccacgcgtccgaccacgcgtccgagaaaatggaagtgtcatctttacgccattggaaggcgagtggcaatcctgcttattacccttcaatccactactatcatggacgcgagcttaattgatgcaccattttacaaccaaacaaacattgaatgcattaaatcttcatgcatctccacaacttattccagactgtgctattgctcactctcaatctacgcaaacaaaatcgacaccagccccagattgttagcggatactgccctcaatgttacctctcaggccagccaaataacctcaaggctgatggtgaagatctctagaatccaccgtttg

SEQ ID NO: 7107 - DNA, 243 bp, Gossypium hirsutum
  Clone ID: LIB3120-016-Q1-K1-H10
catggcttcccttactgcacaccttctttcgccattgcttttacaagatagaaagacggttttcaggacttatccaaaactcccagtttcttataccggagggaggcaaaactgtgctgtttgtgtgaaggctaccggtgatagctcagagtcttctacctcacttagtattgtcaagtctgagcgacatgtttgggataaatctgatgaagatagggtaggtctcattggtctgtgatttgc

SEQ ID NO: 7108 - DNA, 267 bp, Gossypium hirsutum
  Clone ID: LIB3120-016-Q1-K1-H11
gcgccaggatgagcatgaagaaattctaaagaacatataagatgccaattctggacttgtatgggaggagtacaaatccatgacgttcactcgctacgtgattaatgaaacacttacgttagaaaaagttcttcctgggatgctgaagaaagttatagctgacattcacgtctattgatatacaataccaaaagggtggatcctattgcttatgcccacagcacttcatttaaaccctaatatatatgaatatcctcttaccttcaa

SEQ ID NO: 7109 - DNA, 273 bp, Gossypium hirsutum
  Clone ID: LIB3120-016-Q1-K1-H12
cagacagttgatctcattgagacttttatgaattatcaggagaatattaagaggtgtgtatgcaggatctatgattcgaggtctaatcaaagtgtcttggctcttaaggctttgaagctatctgattcttttatggaactttaccgagctaatagctttactggagaaaagttgagggagaaaaacttgtcatggatggatattttcgaggaaattcctatcaaagtttcaaattctgcccttatcagtgcctttatgactgacctggattct

SEQ ID NO: 7110 - DNA, 409 bp, Gossypium hirsutum
  Clone ID: LIB3120-016-Q1-K1-H9
gcgcccacgcgtacgcccacgcgttcggcgtgtctctttcttcacctttcctctctcaattaagctctgttctctaatcctcgccttcaagctctgacattctttcattcctttgcccttttccccaacttttgtttttcttgctacataaaaggctttggcacatgtattccatgccttttgtacaaagcctacccctatcctccctactgctgcagctgcatttccttatcccatgactacctctattggcatgcccaccacagcgttgactttagtattgcaagcaaaaagaaaaacaaacgttatgttcacacaatggtttgctgcaaaaaaagagcttattgaagacgattatggacgagatgatgttaaaatggaaaaaatggaggagtctagggaaacatta

SEQ ID NO: 7111 - DNA, 455 bp, Gossypium hirsutum
  Clone ID: LIB3120-017-Q1-K1-A1
cttcactttgacaacaatactcactttctcttacagagattgagagaaaatcacaaacacacatttatatagcacagtgatcatcatggctcttcacttgtcttgggttttcgtttttggtattctaggcaacgctgtttcattcatggtttccttggctccactgccaacattttaccaaatattcaagaagaaaacatcggaaggtttccagtcgattccctacgtggtttcgctcttcagtgcgatgctttggatttactatgcactgcttaagaaagatgccattttcctcattaccatcaacactttctgcgttttcattcaaactttttacattgttacttacttttactacggcccaaagaaagaaaagatcgtcacggtgaaacttatgcttctcttcaacagtttcgggttcggagttatctttctcgcaacttactttctaaaaa

SEQ ID NO: 7112 - DNA, 307 bp, Gossypium hirsutum
  unsure (1)..(307): unsure at all n locations; Clone ID: LIB3120-017-Q1-K1-A10
cgtncgnccacgcgtncggggcaatcgatgattcagngattactaaggggaaagatgatcacatatatctggttgtgaatgcaagctgcaaggataaggatctggctcacattgaagagcatatgaaagcattcaaggccaaaggtggtgatgtctcgtggcacatccatgatgagagatctcttctagctcttcagggtcctcttgctgccccagttcttcaacatctgacaaaggatgatttgagtaagatatatttttgggaattcctaatattggatatcaaccgggcaacatgtttttttac

SEQ ID NO: 7113 - DNA, 308 bp, Gossypium hirsutum
  unsure (1)..(308): unsure at all n locations; Clone ID: LIB3120-017-Q1-K1-A11
cccacgcgtncgnccacgcgtccggaaagtgagcgctaggttcaacaacaacggcaaggctgcagtgggaagtttcatgattgtggctgccaaagaaatcgacgaagacacagaccgaccaggaccgatggaagggtcttgcttatgatatctccgatgaccaacaagacattaccagagggaaaggtatggtcgactcattgttccaagctcccatgaacgatggtactcactatgctgtcatgagctcctatgagtacattagccaaggccttcgcacatacgacttggacaacaacatggatgga

SEQ ID NO: 7114 - DNA, 394 bp, Gossypium hirsutum
  Clone ID: LIB3120-017-Q1-K1-A2
cccacgcgtccggcctttgaattgaaaccctcaaaattccactaaaaaatggcctccacagcgtccctctcgaccgccgtagccaccacctctttcctccgcggccatccggcgccgaaaaccctaaactcccttcctttcaaccaatctcttttcgggctaaaaccccaacgaaatggccgtctcaccatggcagcatacaaggtgacactgttaacacccgaaggaccccaagaattcgtgtgccccgacgacgtatacatcgttgaccaagctgaggaagaaggcattgatcttccgttctcgtgtagggctgcgtctcgttcttcgtgggccggagtgattaagcaagggctccgtcgatcaatccgacggtaatttccttgatgatgac

SEQ ID NO: 7115 - DNA, 433 bp, Gossypium hirsutum
  Clone ID: LIB3120-017-Q1-K1-A3
ccggtgcggaattacggcggtccgtggaaacttgttcaaaattatgtgcctacttttcaaaacttacattataggagattgtcttgtgataactggtgtccgcattgtggccaggggtgtgaatcttctactcatgctgttcgggattgattgtttgatgcacaagcttggtccaagttagacgtccagcggccgaggtcaatgataaattctaatgagtggctgagttggctgttagagaattctgataagaacaggaaagggtaattgttgctactatctgggtgatctggttctctcgaaataaatttatacatgaaagaaacgtgcaaagcttggaggaaattgttaccttcattaagagttttgggttggaatatcgtagcaatgctaagaatttgaagcatccccaactgacatccatggtaaaatg

SEQ ID NO: 7116 - DNA, 350 bp, Gossypium hirsutum
  unsure (1)..(350): unsure at all n locations; Clone ID: LIB3120-017-Q1-K1-A4
aaaactcaaaagagtctgtcatttcccttacttcctcaaaccagaagccatggccagcatgagaatggcttggtcaaagcctgtaatctccattgctgcttcatcatccttcttttccaaacccaaactcaaacaaatcccacaactttccctcccaaaactccccactccaaagttcttgaaaacccaacaaatcccctcactctcgtccaccactctcaaatctatctccctcttcacagtcaccactttatcctttgccccaccttctgttgctgcagaaatagaaaaggccgctcttttcgatttcaacttaacccttcncatcatgatggtccagttcttgttcc

SEQ ID NO: 7117 - DNA, 348 bp, Gossypium hirsutum
  Clone ID: LIB3120-017-Q1-K1-A5
gaaaaatggcttctgcttccgttactcttctaaagtcttaacctattatggacacgaccgggtggagaaagggccaaaacctacgacacccttgggtttgtgatgtacggtcacaccctacatcggtcgcctttgccgtgcgtgctagttcatatgacgatgagcttgttaagaccgtgaaaactgttgcatgtccacttagtggtattctggccatggatgaataaaatgctacaagagggaaacgggttgccttgattggtcttgagaataccgtagcaaaacagaaagcttaccgtacccttatcgtgtctgcccttggcatgagtgactacatctcatgagcta

SEQ ID NO: 7118 - DNA, 426 bp, Gossypium hirsutum
  Clone ID: LIB3120-017-Q1-K1-A6
gccagccctcgtttccctcattttcctcttcattttctcgggaaaaaagaagcatgggaaaaggtcctggtctctactccgatatcggcaaaaaggctagagatcttctttacaaggattaccaggttgaccacaagttcactgtcactacttacacttccaatggagtcgcaatcacatcaaccgggactaagaaaggtgatttgcttttggctgatgtaaatactcagctcaagaacaagaacatcacaactgatgtgaaagtcgactccacatcgaatcttttcaccactgtcactattgatgaacctgcaccaggattgaagaccattctttagtttcgttgttcctgatcaaaagtctggcatggtggaactgcaataccggcatgaatatgctggcataagcactggcattggattgact

SEQ ID NO: 7119 - DNA, 444 bp, Gossypium hirsutum
  Clone ID: LIB3120-017-Q1-K1-A7
cggacgcgtgggtttggctagggcttcatatacccatcatcgttgccgtgcgaccaccgcgccaccaccgtattcggtggccagcgatgcgccaaaatgggcccttagcctcatcttgaaacaccctagagaaaccagccctcaaaacccgaaaaaaaagagttgaatagaaatggttctcaaccccttcgggttcgattttgacaatggaggaggaccctccggcactgcaaccgtgggaaaccagtgttgcgacgcgtgggaggggcaatgttcaggggcgtggtggctgaggggaggccaaaagtcgagggggagtggcggctgaactttggtggctagggttagggtgactgctgaaaaaaattaaagatagttggctagggtttagtttatttcgggcctggtaattgcgtttgagtttgggtctgattttgtaatgga

SEQ ID NO: 7120 - DNA, 359 bp, Gossypium hirsutum
  Clone ID: LIB3120-017-Q1-K1-B1
cccacgcgtccgaaaatcaactgcttcacaatggcctctacaaccatggctctttcttcccgatcattcgccggtaaggcagtgaagttctccccttccacccctgaaatccagggaactggccgtgtttccatgaggaaaaccaccaagcctgttccttctggtagcccatggtacggtcctgaccgagttttgtacttgggtccactttccggtgagccaccatcttacttgaccggtgagttccctggtgactatggttgggacactgctggactctcagctgatcccgagacctttgctaggaaccgtgagctcgaagtcattcactgcagatgggccatcgtgggagctcttgg

SEQ ID NO: 7121 - DNA, 228 bp, Gossypium hirsutum
  unsure (1)..(228): unsure at all n locations; Clone ID: LIB3120-017-Q1-K1-B10
cccacgcgtncggagacattttaatttctcataagctaatcagactatgtcggagctcgagagcatgacatcattgggacgtacaaagcaaacagctaggaagtggaccggtggtaaagctccaaggaagcaattaggcacgaatgccgcccgcatgaatgctcctgtgatcggcggagtgataaaaactcacacgattcacgtcacgaaccttgcatttgagagaga

SEQ ID NO: 7122 - DNA, 392 bp, Gossypium hirsutum
  unsure (1)..(392): unsure at all n locations; Clone ID: LIB3120-017-Q1-K1-B11
ggaaggttcaaggccactgatgcaagccgacttcgtgctgaatacaaccgacttgtagagggcttggcattgagaggaaacctacctatcactgacaactggctttcaaatcctgcactgcctgatgatattctaaaggaagctgtgcctggaaatatccgtcgagctgagcactttttgcatgtcctacgtagattagttcagtatctaaggggccgactagacaccgagaatgttgagaaagaaagcccagttagctttgttgcatctatcaatagtcatgccggaattgaccagaaaacattgaagntctgntatgaccgtctgcattcactcatgttgactctagaaattactgacacagatgaggtcttacacatncaaacaatatg

SEQ ID NO: 7123 - DNA, 314 bp, Gossypium hirsutum
  Clone ID: LIB3120-017-Q1-K1-B12
tcgatatcggcaagagagccaaacatctcttgaccaaagattatacgtcccagcggacggggacggcttccacttatactggcgctggagtggtcatcacatcaacttctctaaagaaaggaggactttctactggggatgttgctgccctatacacgtacaagaacactcaccttgatgtcaaagtcgataccgactctaatatctcgacgaccatgacattcactgatattcttccctccactaagactattgcgtcatctaacgcgcctgattataacgctggccagctggacgttcagcattttcatcac

SEQ ID NO: 7124 - DNA, 340 bp, Gossypium hirsutum
  Clone ID: LIB3120-017-Q1-K1-B2
cccacgcgtccgatcataataaattgcaaaatttaagtctttccccaaactgaaaattgaagcttgagaaaccaggaatggaatcagaactgactgtaataaagttaaagccaatagaagcaaccccagaaagcttcaaagaattcggacaagtcattgaagcatccccagacggagcagaattcggtccgactgatgctcagctagacctttccaaaggaattcccaggttttacatcatgaaccttcagaaccggccgctcaagttttcaacgattacgcatcatgccagtgtgacacaatgccttggatctatagggggtcatgtttggtatctcgg

SEQ ID NO: 7125 - DNA, 291 bp, Gossypium hirsutum
  unsure (1)..(291): unsure at all n locations; Clone ID: LIB3120-017-Q1-K1-B3
tcgcccacgcgtncgnccacgcgtncgacggctttggtctccggcttctgcctcacttncaactgcacctctccgtgtaactcactccggcaacccacatttgcggggccgtctatcgtagacaacctcaactctttcactttttcttctaaccttatttgaaaataaacccgttttcgaagaactacttctttgctgacttctttcaattggaaagaaaacatgggagacccatcataccaggaagccattgaagctctcaagaaactgctcaatgagaaagggaaattg

SEQ ID NO: 7126 - DNA, 436 bp, Gossypium hirsutum
  Clone ID: LIB3120-017-Q1-K1-B4
cccacgcgtccggtcagcaattaataaccaggttgttcccaaaaaccagttttctggttttggtccccaacggatccaaggagcgcagcatacgggaatgcatccacagcaaatgccagctaaccagatggcttccatgcatcctcaacaaatgtacgggaaccaaatgggagcatatggctatggagagttgcagcatatacatcagaaaatggatgggctatccatcagagatgataatagcctgagaaactcttactaccaggttcccactgtatcttatgttccacctgggaaggcttcgaaagcagaggataagctgcttggggaccttcttgacatggcaagaattaaatcaataaacaccaccccaaaaacctgggtagcttgtggaacctggggttggttttttttttttcctttaagcttttaattt

SEQ ID NO: 7127 - DNA, 405 bp, Gossypium hirsutum
  Clone ID: LIB3120-017-Q1-K1-B5
aaagatggcaagggaattggcattgaaagaggggcttatggttggaatatcatcgggggccaacactgttgcagcactcagacttgcaagaatgcctgagaacaaaggcaaattgattgtgactgttcatccacgttttggagagcgttacttgtcatcggtcctgttccaagaactaaggaatgaagctgaaaacatgcagccagttgcagtcgactaaatgccttttcaggggacatgttaggaagctccctcgggaaacaaaagccctgtctgttaataccaaatgtttccaccgaaacattggtatccattgttattatgaatccgctgtgcacccattcgttttagtttcaatgtttaactctgtctgaaatgaaatcagtaataattggaatttgcatt

SEQ ID NO: 7128 - DNA, 390 bp, Gossypium hirsutum
  Clone ID: LIB3120-017-Q1-K1-B6
cccacgcgtccgcccacgcgtccggagaacatctcaagcaactcctcaactctcagttctgccatcctattctggttcgcctaggatggcatgatgctggtacctacaacaagaacattgaggaatggccacaaaggggtggagcgaatggaagtcttaggtttgaagtagagctaaaacatgccgccaatgctggcctagtgaatgcattgagtcttattcagcctatcaaggacaagtactctgatgtaacttttgctgactcgttccagttggctagtgctactgctattgaggaggctggaggacccaaaattcccatgaaatatgtgaaggggtgatgtctccggtcctaatgagtgtcctgaggagggcaggctacctgatgct

SEQ ID NO: 7129 - DNA, 436 bp, Gossypium hirsutum
  unsure (1)..(436): unsure at all n locations; Clone ID: LIB3120-017-Q1-K1-B7
gcaaaaggagtgtctcttttgttacccactgatgtggttatcgccgacaaggttgcccctgaggcaaacagcaagatcgtgccagcatctgctatccctgatggctggatgggattggatattggacctgattctgtcaagacattcaatgaagctttggatactacccaaaccatcatctggaatggaccaatgggagcgtttgaatttgagaaatttgcagttggaactgaggctattgcaaagaagctagctgaacttagtggcaagggagtgacaacaatcattggaggtggagactctcctgctgctgtataaaacgttggagttgctgatgtcatgagccacatatcaactggtggtggtgccagtttagaatcgttggaagggaaggagcttncacgtgtgattgccctgtatgaggccgttccggctg

SEQ ID NO: 7130 - DNA, 365 bp, Gossypium hirsutum
  Clone ID: LIB3120-017-Q1-K1-B8
caaagccctaagtatatgattgttgcctgctcggactctagtgtctgcccatctcatgtgctggacatgcaacctggtgaagcttttgtggtccgtaatgttgctaacatggtgccaccatatgaccagattaaatatgctggcattgcatctgctattgaatatgcagttttgcatctcaaggtacaagaaattgtggtgattggacacagtgcctgtggtggaatcaaggggcttatgtctttcccatttgatggaaacaactcaactgatttcatagaggattgcgttaagattggaatccctgctaagaccaaggtgctagctgaacatggtggtgagcctttgggagtccaatgtacaca

SEQ ID NO: 7131 - DNA, 420 bp, Gossypium hirsutum
  unsure (1)..(420): unsure at all n locations; Clone ID: LIB3120-017-Q1-K1-B9
cccacgcgtncgcccacgcgtncgcggacgcgtggggttccgtcggtggcgggtcatttgagcggcggaatgtcactggacttgccggcgaaaaattatttgataccggtggactcatcgggaacgtattgcttggcgtttgcccccacgacgtcgtctttgtctataattgggaacgtacaacagcaagggacacgtgtgagcttcgatttggctaataataaggtcgggttctctcctcataaatgttaagacagtaaataaatagcttattggtgataatttactaatttacctatccatttcttctctggtaaaagaaagtgaagaatataccgaagtttgcttggttgtaatatggatgggaaatttatatttaagggtaaattttaccatttaggccgacctttttacattggg

SEQ ID NO: 7132 - DNA, 269 bp, Gossypium hirsutum
  unsure (1)..(269): unsure at all n locations; Clone ID: LIB3120-017-Q1-K1-C10
cacactcttacacccacacgtgctatctaattatctatggctctatactcaacggtctaaagccttcattagaagagcttatgcaactgtcggtgntctctgtctattgctcagcacgaaacactaacagacagatcaacgagcaccaacgccttggcatgaccaccacagagacgagacgactctgcgtctctgcctaagcctatcctaacctttagactgtcaaccaacagtgataagactgaaatgtatgattcaaaaactggcgc

SEQ ID NO: 7133 - DNA, 414 bp, Gossypium hirsutum
  Clone ID: LIB3120-017-Q1-K1-C12
tcattgttgataatttgaaactgagacgaagacttcaatggcgcttccagtcggcgataccgcgtatctcaaggacatcgataaagctcgtcgagacgttcgcgctctcatcgccttgaagaattgcgctcctatcatgcttcgcttagcgtggcacgatgctgggacgcatgacgtgagcactaaaaccggaggtccaaatggctctataaggaatgaagaagagttcactcatggcgccaatagcggcttgaaaatcgctattgactctcgtgaggaagtgaaggctaaacatcctaaaattacgtatgcagacctataccagcttgctcgtgttgttgctggtgaagtaactggacgtcctaccattgactttgtacctggaagaaaagattcaaacatttgccccaggga

SEQ ID NO: 7134 - DNA, 341 bp, Gossypium hirsutum
  Clone ID: LIB3120-017-Q1-K1-C2
ctaagttcaaatgcggtggtgtttgtttgggagttgggtttcaacatactttaggagatggcacatcggctattcatttcatcaatagttgggcagaaaccgcccgaggcgtcccgcctgccattgcaccattcatcgatcgaactcttcttcgtgctcgagtcccaccaatgcctaaattccaccatcttgaatatgagccttatactccgttgaaggctgttgaatctgatcttaagccatgcactgtctccacatttaagcttacagttgatcaattgaatgccctgaaagccaaagctgctgcaaacagtagtggtacatagtacagtagttacaac

SEQ ID NO: 7135 - DNA, 296 bp, Gossypium hirsutum
  Clone ID: LIB3120-017-Q1-K1-C3
gccttggtatggtattgagcaagagtacactcttcttcaaaaggatactacgtggcctcttggatggcccgttggaggattccctggaccacatggtccgtactactgtggtgaaggtgctgacaagtcctttggtaaggacatcgtggactcccactacaaggcttggctttatgctggcgtgaacatcagaggaatcaacggtgaatttatgcctgagcaatggagaattccaagttgatccatctgttggaacatctgcaggtgatcaaatatggattgcacgatacatacta

SEQ ID NO: 7136 - DNA, 299 bp, Gossypium hirsutum
  Clone ID: LIB3120-017-Q1-K1-C4
cggctactgaatcaccaaacgagttaaggaaaagagagacgagtttcaccgaaccatggggtccatccccaatcctggcgagttgaccgagttaacccatccgagtttcgatgagttccagcgtcaaacgtctctgatgaccagctgtactctcctctggaaagaactgtcggatcacataaattcacttgagcagaacctgatgaagcagtcggagaccttgaaacgcataatcgaggcactggactcggagaccaaggcttcactcgactcactcaagaagcgggaactcagtatcg

SEQ ID NO: 7137 - DNA, 386 bp, Gossypium hirsutum
  Clone ID: LIB3120-017-Q1-K1-C5
gagcctacccacgtactacgatggacgctactggaccatgtggaagctggctatgttcgggggcaccgactcggctcacgtattgaaggagcttgaggaatgcaagaaggaataccccaatgcattcattagaatcattggcttcgacaacgtgcgtcaagtgcagtgcattagtttcattgcctacaagcctccaggcttctaagctttttataaactttgtctctccattcgtttgaatttgtactcagaaaaaccatgttctttactttcgcttttctctttctttgagttattggcctttgcttctcgatttctgggttttaatcctttttggattttcattggaagaaaggctgagaactaatgaataaaagttgcgcttt

SEQ ID NO: 7138 - DNA, 341 bp, Gossypium hirsutum
  Clone ID: LIB3120-017-Q1-K1-C6
atcatcatggattccaatccccaatcttgtgaaaaccctgaaatcaaatcagccgaggtgcaaacccaaaaccaaaatcaagtttctcaatccccatttgctactgcatctctttctttatcttccttgcccccaaccctacctactcagttcttcatccaacccaaaatcttatctttattctctgctcaatgtccctccaaagttaaagttccaactcaagcttcctctctttctcatctctccctttcttcaacttccccttccccttccaaactttccttcaaatccacctttgccaataaccctttccagtcccctctctccttaggtccgggccg

SEQ ID NO: 7139 - DNA, 437 bp, Gossypium hirsutum
  Clone ID: LIB3120-017-Q1-K1-C7
cactcaccattgttccaagtttgttgtaaaccaagctagaaccagcagccggcatggccgggttagcagcctccaccgctgccgcctcccttggcgtctctgaaatgctcggtaaccctctgaatttcagtggtggagctaggtcatcggctccaacaccatccaactcatccattttcaagaccgttgctcttttctccaagaagaaggccgctcctccaaagcccaaggctgctgctgtcgccccggccgatgaagagctggctaagtggtaccgtccggacagaaggatcttcttgcctgaaggtctgttagacacatcggacatcccagagtacttgaacggagaagttcccggagactatggataccatccgcttggtctgagcaagaagccaaaagactttgcaaaatatcaagcatatgagttgatacac

SEQ ID NO: 7140 - DNA, 320 bp, Gossypium hirsutum
  Clone ID: LIB3120-017-Q1-K1-C8
caaaatcaactgcttcacaatggcctctacaaccatggctctttcttcccgatcattcgccggtaaggcagtgaagttctccccttccacccctgaaatccagggaactggccgcgcttccatgaggaaaaccaccaagcctgttccttctggtagcccatggtacggtcctgaccgagttttgtacttgggtccactttccggtgagccaccatcttacttgaccggtgagttccctggtgactatggttgggacactgctggactctcagctgatcccgagacctttgctaggaaccgtgagctcgaagtcattcact

SEQ ID NO: 7141 - DNA, 362 bp, Gossypium hirsutum
  unsure (1)..(362): unsure at all n locations; Clone ID: LIB3120-017-Q1-K1-D1
cccacgcgtccgctctcttcaaaaaagctttccccagagagtggaaaggaacaaaaaatcttgtactcaaagaaaaggaaagagagaaagatcttccttagcgaaactatttgcaggaaaatcacatagaaaaacgatgagttattacaaccaacaacagcctccagttggtgttcctgctcctcaaggttatccaccggaaggatatccgaaggatgcttatccaccaccgggatatcctccacaaggatatcctcaaggttatcctcctcaaggatatgctcctccttacgcccctcaatatcctgctcagncgtcctcctaagaaacagcaaagaactggttcctaaaaaggctggttg

SEQ ID NO: 7142 - DNA, 265 bp, Gossypium hirsutum
  unsure (1)..(265): unsure at all n locations; Clone ID: LIB3120-017-Q1-K1-D11
natatatattactaacaattgagcaaaaatctgttattttctctctcaacaggcaatggaggcgttctttgaatcttcatcgacaaccaactggacataccatacactaaagaattttcgttacacttcttccgtcaatcaatctcatctcaaaagggcacatacgaccttatgttgagccctgggtgcctatgcttttggagcttatcttcatatcttatggaacattggggggtacctcacatcattggcatgcttccgaacc

SEQ ID NO: 7143 - DNA, 336 bp, Gossypium hirsutum
  unsure (1)..(336): unsure at all n locations; Clone ID: LIB3120-017-Q1-K1-D12
cccacgcgtncggcggctcaggctcagcttaatggaacagtgcattgtgattaccctcggtggattgaggtcctctgccatgatatcaatgtccacattccacatcatgtatcttcaaggataccaagttataatctacgagcagcacataagtctattcaagagaactggggaccgtatctgaacgaggctacatggaattggcgtctgatgaagacgataatgacagtgtgccatgtttacgacagggagcaaaattacatcggctttgatgaacttgcacctaatgaagcttctccaatcacattcctgaaaagagtaatgcctgattatgct

SEQ ID NO: 7144 - DNA, 308 bp, Gossypium hirsutum
  Clone ID: LIB3120-017-Q1-K1-D2
cccacgcgtccggtatattctaaaaagctttgcccagagagaggaactgaacaaaaaacttgatactcaaagagaattgagagaaagaaagagcctacttatggaaacaattttcatgaaaagcacatagaaaaacgatgagttattacaaccaacaacagactacagttggtgttactgctcctcaagggtatccaccgtaaggatatccgaaggatgcttatccaccaccgggatatcctgcacaaggatatcctaaaagttatcctcctgaaggatatgcttctccttacgcgactcaatatact

SEQ ID NO: 7145 - DNA, 215 bp, Gossypium hirsutum
  Clone ID: LIB3120-017-Q1-K1-D3
gtaaggtgtagcaatccatttttagtgaactcagaatcggacgtactggaccacagattcgaggtacaaaggcgtattttactattagtatcaattcctatggaatactagtaagtgcatataataatgtcaataagaaattttatcggttgcatgcttaatttagtaaacaggactaaatagtaaagagtgcgaaagttgagttctataagtta

SEQ ID NO: 7146 - DNA, 358 bp, Gossypium hirsutum
  Clone ID: LIB3120-017-Q1-K1-D4
cttcgtttcaatcgctgcgtttacatttcaatttattatcctctttctttccttgtattctagtttaataagaaaatccaaattcaacaacaaaagcaaaactcaaatttgttgagcaaaaaaaaaacagatatcattttgtttgctcttttcctatttttggacttttctgtgtattcacagcttgagaagaaagaattggggcatctctctctctttagttagattttattaatggagaaagaagagaagaagaagaagatggaggtagattcagctccagcagcagctttggaagggttttcaccagtctctacaactaggatcttctgaattccaggaaaagatctgaatgttt

SEQ ID NO: 7147 - DNA, 444 bp, Gossypium hirsutum
  Clone ID: LIB3120-017-Q1-K1-D5
cccacgcgtccgctttcacaccacattcttcagtgcaggcaccatggcagcttcctcagctttgttcacccctatcttctccaccgtccaaaagaagaatggcattgtcacccccttcagcatctcattccacggccttagacccctaagcaagagcaaatcttcatccaacgccatctccttctcaagaaactcagctgctagtgctaggcttgcaatcaaagcagagctgagcacccaagttgtgataagcgtcagcactgctctctcccttttcttgggtagatttgtgttcttcaacttccaaagagagaacgttgccaagcaagtgcctgagcaaaatgggttgacccactttgaggctggggacacacgagccaaggagtatgttagccttctcaagtccaacgaccctgtgggattcaacatcgttgatgttcttgc

SEQ ID NO: 7148 - DNA, 290 bp, Gossypium hirsutum
  Clone ID: LIB3120-017-Q1-K1-D6
gctcgtttcgccaaatggcgtactgttgtgagcattccaaatggtccatctgccttggcagtgaaagaagcagcttggggacttgctcgctatgccgacatttctcaagacagtggactggtcccgattgtggagccggaaatcttgcttgatggtgaccatggaatcgataggactttcgaagtaacgcacaaagcttgggctgatgttttcttctaccttgctgagaacaactgcatgtttgagggcatccttctcaagcccagcatggtcactcctggtgctgaatg

SEQ ID NO: 7149 - DNA, 412 bp, Gossypium hirsutum
  Clone ID: LIB3120-017-Q1-K1-D7
caatcttgtaacggtctttgcctgatatcatatcaagaacgaatgtcaaagggcgctgggggttttgtcggagtatttgcttatatgcgactgaactttctctacgctccaccatcatcacaaaccgccatgggtctactatccctatcatcttctgtaaccccttacttcccctctcttcatctcaaacctaaacataaactctctcttactttcccaaacccttcctttgcgtgctcctcacccacatacaaacccctctcctcatgtctcaaactgaaacctactgtgaattccctcaacttatgatcccctcagagccccgtcaccgccatgcgaggggccgaggccgacgctgtggcgttgttgctcagggagcgaatcgtctttctaggtaacaacattgatgact

SEQ ID NO: 7150 - DNA, 238 bp, Gossypium hirsutum
  Clone ID: LIB3120-017-Q1-K1-D8
ctaacatataactttcctgtgccgaaaaatttttacactccaaacacatgacacaaccgaggtaaactatgacatttccaacactacattcttcaccttccacttcatacatccatctctcttccactgctttaattaaaacccatgcctaccgactacacaacccacagttgaggaacatatgattaatccaatcatttgcaaggcatggagaatggaacaggagccgttgcttcaa

SEQ ID NO: 7151 - DNA, 359 bp, Gossypium hirsutum
  unsure (1)..(359): unsure at all n locations; Clone ID: LIB3120-017-Q1-K1-D9
aaatacaaatacccattttcaccaccatcaaaccacatcccacagacatgggtgcccacgaggaagaagccggaggtgaagagtacttgtttaagatcgtgctgatcggtgactcagctgtgggaaaatcgaaccttttgtcacgttttgctaggaacgagttcgacaataactcaaaggcaactattggagtagagttccaaacgcaatgcgtggaaattgatgggaaagaagttaaagcacacatctgggacactgctggtcaagaaaggcttcgagctgttacttctgcttactatagaggagcttgtggngctcttattgcttatgatattactaggaggagtagctttgacagc

SEQ ID NO: 7152 - DNA, 308 bp, Gossypium hirsutum
  Clone ID: LIB3120-017-Q1-K1-E1
accaccaccatagtccaacattttcataacaatggctgccatcacaaacgccgctgctacagcctccttcatggggacactcttgcccgacgtctacacaagttcagggagattcgtcgccaggtttggctttggcggcaaaaaagcagctcccaagaaagtctcgaaacgaaccccagaccgccctctatggtacccaggagcagtggcgcctgattggctcgatggaagtttggtgggtgattacgagttcgacccgttcgggttagggaaaccggcggagtacttgcaatatgacatggattctt

SEQ ID NO: 7153 - DNA, 312 bp, Gossypium hirsutum
  Clone ID: LIB3120-017-Q1-K1-E10
caaaatctcaaacccagatttggtctctctctctctctctctctatttccaagcaattaattcctccattggaggagcttaaggcttgttggtgttctggtctttgctttgtctgaaaaataaacagaattataaacgaacaccaacgccatgggaagatttgaagagagaggattcgattcagtggtttgccctaagcctatccgaacctttagatggtctaccaactgttatcagactgagatggctgattcaaaaactggtgcagagcttcttgatataatcctccccgagggagggtatggggccgag

SEQ ID NO: 7154 - DNA, 152 bp, Gossypium hirsutum
  unsure (1)..(152): unsure at all n locations; Clone ID: LIB3120-017-Q1-K1-E11
gaaaaccaatcctttgtaagaagagcacttccaagtttctccttngaaagcagggtataatgctacttggatacaacttatccaatggaaaggaaagtatagaactcgtatccatcatcactgaccttatatctcttagaactagaaggaat

SEQ ID NO: 7155 - DNA, 293 bp, Gossypium hirsutum
  unsure (1)..(293): unsure at all n locations; Clone ID: LIB3120-017-Q1-K1-E12
ncacaaactcccatcacccgagatcatctttccccttcaaaatggcggctgcggccatggggctctcttccccatctttcgccggaaaggccgtcaagctctctccttccgcccctaaaatccaaggcaatggccgcgcttccatgaggaaaaccgctaccaaggctgctccctttggaagtccatggtacggtcctgaccgcgtcttgtacttgggtccactatctggtgagcctccatcttacttgaccggagaattacctggtgactacggctgggacactgctggactc

SEQ ID NO: 7156 - DNA, 359 bp, Gossypium hirsutum
  Clone ID: LIB3120-017-Q1-K1-E2
cccacgcgtccggtgagactcttttgtatacctgtagcatatagtaatagtaagcagtaagagcaatggcctcctccatgatctcatcggcaaccattgccaccgtgaaccgctcctccccggcacaggccaacatggtggcccccttcaccggcctcaaatctgcctctgctttcccagtcaccaggaaggccaacaacgacatcacttctcttgcaagcaacggtgggagagtgcaatgcatgcacgtgtggccgcctcttgggaagaagaagttcgagactctctcatacctgcccgatcttactcccgtacagttggctaaagaagtagattaccttcttcgctctaaatggatt

SEQ ID NO: 7157 - DNA, 327 bp, Gossypium hirsutum
  Clone ID: LIB3120-017-Q1-K1-E3
gtctgaaatcttggattactaattggtgggatactaggcaatccgaaacttttttgaatgaggttcaagaagagagtattctagaacaattcatagaagtagaggaactcttcctgttggacgaaatgataaaagaatacccggaaacacatctacaaaagcttcgcataggaatccaaaaagaaacgatccacttcatcaagctgcacaatgaggatcatatccatacgattttgcacttctcgaccaatctaatctgtttcgttattataagagcgtattctatcttggggaatgaaaaacttcttattttaactcttggggtta

SEQ ID NO: 7158 - DNA, 323 bp, Gossypium hirsutum
  unsure (1)..(323): unsure at all n locations; Clone ID: LIB3120-017-Q1-K1-E4
gttctttttcatcgttatttcaattcagcttccctcttcttctctatcaagtattattcacgtctttctatgtataaaactgcgttagcttttgagtttgtcgaaattgtggggtgctgggaattttgctttcttcttggatgaacagagatggctgtggaattgatgatggggtacgatggtggtaatagctttgtnaggaaaatagatgaaactgccttgcatgaagcttaaactgctgggattcaaggtgctgaagaattgattaggatgatgtgcaatagtcaacagctttaccatcaagatgcctcttctaaaacttc

SEQ ID NO: 7159 - DNA, 442 bp, Gossypium hirsutum
  Clone ID: LIB3120-017-Q1-K1-E5
cagtgagactcttttgtataactgtagcatatcgtactagtaagcagtaagggcaatggggggctccatcatctcatcggcaaccattgccaccgtgaactgctcctccccggcacaggccaacatggtggcccccttcaccggcctcaagtctgcctctgctttcccagtcactaggaaggccaacaacgacatcacttctcttgcaagcaatggtgggagagtgcaatgcatgcacgcgtggcctcctcttgggaagaagaagttcgagacactctcatacctcccccatcttacacccgtacagttggttaaggaagtagattaccttcttcgctctaaatggattccttgcttggaattcgaattagaggagggattcgtgcaccgtaagtactcgagcttacccacgtactacgatggacgctactggaccatgtgg

SEQ ID NO: 7160 - DNA, 327 bp, Gossypium hirsutum
  Clone ID: LIB3120-017-Q1-K1-E6
ttggcttctaaaagcagtagtcctatgtggtatgctattaggcgtgcatccgctcatataggcatgctatcaagctactctccgcttgtgaaatatacacctcaatggaaatggctcgaggaagaattaaacagggttgacaggaagaagaccccatggctcattgttcttgtgcatgttccgatctacaacagtaacgaagcacatttcatggaaggtgaaagtatgcgagcagcgttcgaagaatggttcatccatcacaaagttgatgtaatctttgctggtcatgtccatgcttatgaaagatcctatcgaatctcaaatata

SEQ ID NO: 7161 - DNA, 440 bp, Gossypium hirsutum
  Clone ID: LIB3120-017-Q1-K1-E7
ctgccttgtgtgaagcaggagttatctatgttatgacccatgattccattggtcttggggaagatggaccaacccaccagccaattgaacacttggcaagcttccgtgcaatgcctaatgttttgatgcttcgtccagctgatggaaatgaaacagctggtgcatataaggttgctgttctgaacaggaagagaccttctattcttgccctctctaggcaaaagctgccccaacttcctggaacttccattgagggagttgaaaaaggtggctacattgtttcagacaattcgtctggcaacaatcccaatgtaattctgattggaactggttctgagttggagattgctgctaaagctgcagatgaactaaggaaggaaggcaagaccgttagcggcgtctcctttgcttcttgggagctctttgatgagcaatcagat

SEQ ID NO: 7162 - DNA, 439 bp, Gossypium hirsutum
  Clone ID: LIB3120-017-Q1-K1-E8
ttttgcacttaaatctcttttgatggcagatgctattcgattattatcatggccgtcgtcgtctttaattcattcgctgcgcttctcttcgccttcactgctcaccactttccacttcgcttcgaattatccactatcgtctcttggaccaaccaatcagaattcggataagattttttcttattcttcttctattggtcttgctccgcttgctctgattcccagaaaaccatcgctctctttcaaggtgcatgcaacagtcgaagaaactgagcagccaaaatggtgggaaaggaatgcgggaccaaatatgattgatattcattctacaaaagaatttatcagtgccttaagtgaagctggggatagattagttattggaaattttatggaacttgggtgcttcctgcagagcattatttcccaagctctgcagaac

SEQ ID NO: 7163 - DNA, 364 bp, Gossypium hirsutum
  Clone ID: LIB3120-017-Q1-K1-E9
ccacgcgttcgcccacgcgtccgcaacgacatcacttctcttgcaagcaacggtgggagagtgcaatgcatgcacgtgtggccgcctcttgggaagaagaagttcgagactctctcatacctgccccatcttactcccgtacagttggctaaggaagtagattaccttcttcgctctaaatggattccttgcttggaattcgaattagaggagggattcgtgcaccgtaagtactcgagcttacccacgtactacgatggacgctactggaccatgtggaaactgcccatgttcgggtgcaccgactcggctcaagtgttgaaggagcttgaggaatgcaagaaagaatacccccatgcattca

SEQ ID NO: 7164 - DNA, 433 bp, Gossypium hirsutum
  unsure (1)..(433): unsure at all n locations; Clone ID: LIB3120-017-Q1-K1-F1
ccaagatgcacacagagatgctcagctacagcatacaagaaaccatgcatgttcttctgccggaagtgttgtgccaagtgcttgtgtgtgcctccaggcacttacggcaacaaacaatcttgcccttgctacaataattggaagaccaagagaggaggccccaaatgcccttagatccctaactatatctatgttgttctctagttaaagtgcttaattatccaattataggccatcgatcttcttcttttttccctaaatgatggtaaattgtactagtatttncttttaaaaggaagtatgtgctttgcatttaaaaacttggctttttgggtaaaggtatctaaaaagaatggaaagtggtatgggttaccttttttgtaaacgcaactaatatgaaaaatgaattagtaaaaatacattttctctattt

SEQ ID NO: 7165 - DNA, 440 bp, Gossypium hirsutum
  unsure (1)..(440): unsure at all n locations; Clone ID: LIB3120-017-Q1-K1-F10
cccagcgtncggcggnagatagtaagcaaagaagataatttctatttcaaaccactcatgcgttttaaccgctaaaacaccaaaaaccaggggaagaagaagtaggaaatgcccaccttgaatttatacaccaacgtacctgtggacgccgtgaccacctctgacattcttaaggacgccaccaaagctgttgtcaaaatcatcggcaaacctgaatcttacgtgatgattttggttaatggcggagttcccatggcatttgctgggacggaggcccctgctgcttatggagaattgatttctattgggggccttggaccttctgttaatgccaaattgagttcaactgtcgctgatattcttcataccaagctctcaattgatagctcccgcttctacatcaaattctatgatgttcagcggccattctttggatttaa

SEQ ID NO: 7166 - DNA, 78 bp, Gossypium hirsutum
  unsure (1)..(78): unsure at all n locations; Clone ID: LIB3120-017-Q1-K1-F11
cccacacgtncgcccacgcgtncgagataataagcatttatctaggagattgaggtatactgttatttaagctcctna

SEQ ID NO: 7167 - DNA, 307 bp, Gossypium hirsutum
  unsure (1)..(307): unsure at all n locations; Clone ID: LIB3120-017-Q1-K1-F12
nccacgcgtncgatggccgncaacacactaatgagctgtggcatatccaccacacttcctgggcttctttcctcatcaaagtccaccttcagtggcgccgccgtatcgttgcctagtgctgttggtaccaacgttggccaccgcgttagcatgtcagctgactggatgcctggtcaacctagaccaccttaccttgatgggtcagcaccaggtgactttgggtttgacccactaagactaggtgaggtccctgagaaccttgagaggtacaaagaatctgacttgattcactgcagatgggctatgc

SEQ ID NO: 7168 - DNA, 384 bp, Gossypium hirsutum
  Clone ID: LIB3120-017-Q1-K1-F2
aggattttcaatccattgatctttgatttccatttagaggttaattgggtcatatcttatgttggagaagggcgttcgtatttaggttctggtaagaggaaaagccatgagggtatgataaagcttggtttcagcctagtaaaagggaaagctaatcatcctatggaggattatcatgtcggtaagttcatgcagattctatagcatgagttagggcttttttctatctacgatggtcatttggtagatattatatcatcttacctaaagaagcactcgcttgccaatatcctaaagaaagtgggatgtgccatatcattttcgaatggcttgcttttattatttttaaaacatcatatgcttacattttctcacttattattg

SEQ ID NO: 7169 - DNA, 323 bp, Gossypium hirsutum
  Clone ID: LIB3120-017-Q1-K1-F3
gcgagacaaaaatggcgacttcagccatgtcggaaaaacgggtcgtcctgctctgcggcgactatgccgaggactatgaggttatggtccctttccaggctctgttggcttatggtatatcagtggacgctgctcgtcccggcaagaaggccggcgaaacttgccgcaccgctattcatcaactttccggccatcagacctataccgagatccgtggtcacaatttcacactaaatgcatcatttgaagatatagaccatactaaatatgatgcgttagttatagccggaggacgagctcctgaatatcttgctatggatgca

SEQ ID NO: 7170 - DNA, 438 bp, Gossypium hirsutum
  unsure (1)..(438): unsure at all n locations; Clone ID: LIB3120-017-Q1-K1-F4
cccacgcgtncgcaaacatcaaagtgtaaagcatttgagcattaaaatcatacatgacatagctttttacatgtcatcttcaacatcttcactgcaatggcaaccatgctctcactctctccaaatcctcccatcacaactttaccctctcttcgttccagtttcaagggaaatctgaagaatttaaaaccaaacccttttcacattattcgtatcaggaccaagcagcaaggggtagaggcacgaaaggggacaccgtctttagtggttgtgaaccaagcagcaacaacccaagtgtcggttacagcttctaatatgacgcttcggttggacaaccttggacctcagcctgggtcaaagaaagaaaaggaagagaaaggggagaggaatatcggctggacaaagtgggagctgtgggcttggaatgaggggtcaaaa

SEQ ID NO: 7171 - DNA, 440 bp, Gossypium hirsutum
  Clone ID: LIB3120-017-Q1-K1-F5
catcaagcaaaatcttatagccgctccttttcgcgctttctctctctctctgaaagtttcagctttagagcctctggcttcctcttctccttctttttgcttaccagataatgtaaaagaatataacaagcttttcccatttataagcccaaaaggagcctttctttcttgaccttgaaaaagaatgactttgagtaggttctggcgttggcttcttatccacattgctttgtttttaagctcgcgttatgctgaggatccactcgctttctatgctctcgaggacacttacatcactgcttctcctttgcgtgatccccaacaggttattgctatagataacacgttccctggccctactatcaacttaactaccaacaacaatcgctgcgttaatgttggaaacaaattggacgaaagattacttatgcattggtctg

SEQ ID NO: 7172 - DNA, 444 bp, Gossypium hirsutum
  Clone ID: LIB3120-017-Q1-K1-F6
gctgctcttaccggttctctatattatgtggctgcctctccgaaagatcctacttacgtaggtgcaccagttcaacgatccggttctgctcgtgaagatctgaaaaagctattcgcagcctggtatgagaggagacaaatgaaaaagatctactctccccttttggaaggaatattggccctttaccttggatttgaatggatcgagacaaacaacattcttgcacctattataacacatggtatatactccgccgttattctgggacatggtctttggaagatacatgaccaccggagaaggctacgccagaggattcaacagcttaaatcagaaggaaagaactcaaccaaactatgaagaagctgctgacgcgtaaaaaaaaatcaaggcatggaggaattttgtatatcgcacacgagtctagtgaaaagtagaaataat

SEQ ID NO: 7173 - DNA, 290 bp, Gossypium hirsutum
  Clone ID: LIB3120-017-Q1-K1-F7
cccacgcgtccgcccacgcgttcgtttacttgttctagttttgataaggtatactgtatttgcgttgccaagttaataggaatatgaaccagaataagttggtcgattattctgttaccataatttcgtatgttgaactctttgaggctatatataatgcaggaatgaactagaataaattgattgatcagtctgccaagcgtttaaattaccaaataaaagaaaaaaaaaaaaaaaaaaaaaaaaaaataaaacaatattaaaatacaatgtttttttgaagatacaag

SEQ ID NO: 7174 - DNA, 383 bp, Gossypium hirsutum
  Clone ID: LIB3120-017-Q1-K1-F8
gaaggacgttgctgaattcattgagaggcgtgatgcgtatcctagtgacgcagagctcatgtttctcactgacggtgccagcaaacgtgtgatgcacatcttgaattgtcttatccgtggtcaaggggatggcgccttggttcctgtatcacagtatccactttactcagatacaatatccgtcttcggcgattcactcgttccttactacctacaagagactgcaaactgtgggctgtacgtaaacaatcttcaggaatcaggtgcacacgctcgatcaaacgaataactgctagaagaatagtcattattaaccctgggaaccctactggtcacggaatcagtgaacctaattttaaaaaaatcttgaacttctgttacca

SEQ ID NO: 7175 - DNA, 349 bp, Gossypium hirsutum
  Clone ID: LIB3120-017-Q1-K1-F9
gaaaggaaaaataatcccatcatcatcaacaacagcaatgcttcacattttcgggcttttgtgccttatcttctcttccaccaatgtcctcgcccaagacttttgtgttgcgaacacggcttcgggcattgttaccccatcaggttacccttgcataatggaagcaaatgtaacctccgacgacttcgctttttcgggtctcggtctcccacgtaatacgtcgaacatcataagtgcagctgtgacaccagcattcgttggtcaatacccagccgtcaacggactatgcctgttcgccgcacggctggactttgcttctggtggtgtaatcccaatgcacactcaccct

SEQ ID NO: 7176 - DNA, 369 bp, Gossypium hirsutum
  Clone ID: LIB3120-017-Q1-K1-G1
cccacgcgtccggtttgaaataatgtctgggtttttctttacattgctgctttgtttcatgagttttaattgttactcagagggtagccatggatatcagcaacagcaatctgctgttgttgttggaactgtgtactgtgatacatgtttccagtctgacctctcaaggccaacccatttcatttcaggtgcaactgttgaagtggaatgcaaagatcggaagagctcaagggcaagctttaggcaacaagtgaaaaccaataggcatggggaattcaaggttcatttgcctctttcagtgagcaaacatgtgaagaaaatcgagggatgtgaagttaaactgattaaaagcagtgagccatatcgtgc

SEQ ID NO: 7177 - DNA, 408 bp, Gossypium hirsutum
  unsure (1)..(408): unsure at all n locations; Clone ID: LIB3120-017-Q1-K1-G10
ntncggaaaatcaccattacaagtcccaaagaagacccccgctaattctaaaagaaagaaccagagggttctttctctttagtttacgtttattgtccttttggaatttttgatactaaaaaaaggaagcaacgaagaagggaaatggagggcaaagaagaggatgttagattgggagccaacaagttcacagagaggcaaccaattgggaccgcggctcagagtcaagatgacgggaaagactacactgaaccaccaccggctccatttttcgagcctggcgagttaacctcatggtctttttatagggctgggattgccgagtttgtggcgactttccttttcttgtatatcactattttgactgttatgggagtcgtaaggaaaaaataagtgcccaactgttgg

SEQ ID NO: 7178 - DNA, 350 bp, Gossypium hirsutum
  unsure (1)..(350): unsure at all n locations; Clone ID: LIB3120-017-Q1-K1-G11
cccacgcgtccggtcgttgcgctaaaacacaaacatggagcttgtgcagctctggtaaatccttcatcagcagaacctcttgtctggccagcaactttaaagttcattaccgagcttaatgaagaggcaaaatcactattagaacaggccttaatggaggcaaaccgggaaagggaaaagaacatcttaaagggaacagcttactcacttncatcaccctcacattctgactcagggttagatgacagcgcttctgaggctagcgatactgaagtatgctgtatatgctttgagcagctctgcactattgaagttcaagactgtggccaccagatgtgtgcacaatgcac

SEQ ID NO: 7179 - DNA, 348 bp, Gossypium hirsutum
  Clone ID: LIB3120-017-Q1-K1-G12
cggacgcgtgggcggacgcgtgggttccggtgagccaccatcttacttgagcggtgagttgcctggtgactatggttgggacactgctggactctcagctgatcccgagacctttgctaggaaccgtgagctcgaagtcattcactgcagatgggccatgttgggagctcttgggtgatttccctgagctgttggctaggaacggcgtcaagttcggtgaagctgtatggttcaaggacgcggctcaaatcttcagtgagggtggacttgactacttgggtaaaccaagcttgatccatgctcaaagcattttggccatctgggcttgccaagttatcttgatgggag

SEQ ID NO: 7180 - DNA, 409 bp, Gossypium hirsutum
  Clone ID: LIB3120-017-Q1-K1-G2
cttctattctactaccacttccacacaacaacagcaatggcaattagaaaaccatccaaacggcctcaaaccgcagttctgaagcaaatcctgaagaaatgttcaagcttaggcaggaaacatggatatgacgaagatgggctcccacttgacgtaccaaaaggtcactttgccgtttacgttggtgaaaacagaaacagatacatcgtccctatctcattcttgacccaccctgagttccaatgtttgcttcgacgagcggaggaagagtttgggtttaaccatgatatgggccttaccatcccttgtgaagaagctgcttttcgctctcttgcatctatgcttaaatgaaaatgggaaaaaagaatttattgaggtgcgaaatgaagggggtcttgcctttcatttt

SEQ ID NO: 7181 - DNA, 295 bp, Gossypium hirsutum
  Clone ID: LIB3120-017-Q1-K1-G3
cccacgcgtccgatcgagtaacgaaccaagccaacctaaagccttaggcaccatggcaacctgtgctattcggcaatgtgatatcgttggccagaccgctttgaagcagttccatgagctcttacgcaaagacggagctttcgatagcgggcgcgttaccatgcgcagaactgcgaaacgtgcccgtaccagcatttggtaccgtcctgaccggccaacgttcttgggtccattctcataccaaatgccatgatacctgacaggtgacattcgtggtgactatgggtgggacact

SEQ ID NO: 7182 - DNA, 152 bp, Gossypium hirsutum
  Clone ID: LIB3120-017-Q1-K1-G4
gatatattcagcaagccttgcacaatggccaccatcacctctgacgctgtcgctataccaggtttcaccgggcttaaagacggtgcaaccgcagctaacgttagcgccacagccaaagttgcagactatccagtcccaaggggcagcatcaa

SEQ ID NO: 7183 - DNA, 390 bp, Gossypium hirsutum
  Clone ID: LIB3120-017-Q1-K1-G5
gccacgcgtcctctcacaccatccgtgatgtccaccaaataccgtctatatagaatgcatgagggatactataacttatgttccaatactatcgtacctgcataacacatatgtataacatgcacaatcaattatacaacatcaatatagttacaaagtatatgcaaatgattgaggctgccaaagaaatcgacgaagacacacagaccgaccaggaccgatggaagggtcttgcttatgatatctccgatgaccaacaagacattaccagatggaaaggtgtgggcgactcattgatgcaagctcccatgaacgatggtactcactatgctgtcatgatctcctatgaccacattagccaaggccttggcacattctacttggacaaca

SEQ ID NO: 7184 - DNA, 124 bp, Gossypium hirsutum
  Clone ID: LIB3120-017-Q1-K1-G6
atatttagctatagcatacactactagtacccactactagcaatggcttggtcaatgatctgatcggctaccattgccctgcctctccggacaggtaaatggcgtctttaccgctaattgcttg

SEQ ID NO: 7185 - DNA, 439 bp, Gossypium hirsutum
  Clone ID: LIB3120-017-Q1-K1-G8
ccgacatcatctttccccttcagaatggcggctgcaaccatggctctctgttccccatcgtgcgccggaaaggccgtcaagctctctccttccgcccctaaaatccaaggcaatggccgcgtttccatgaggaaaaccgctaccaaggctgctccctctggaagtccatggtacggtcctgaccgagtctcgtacttgcgtccactatctggtgagcctccatcttacttgccggagaattccctggtgactacggttgggacactgctggactctcggcggacccagagacatttgccaggaaccgtgagctcgaagtcatccactgtacgtgggctatgttgcgtgctcttgcgcggttttccctgagcttttggctaggaatggagtcaaattccgtgaggctgcgtggttcaaggccgcatctcacatcttcagc

SEQ ID NO: 7186 - DNA, 337 bp, Gossypium hirsutum
  Clone ID: LIB3120-017-Q1-K1-G9
cccacgcgttcgggcaaaaccagtttccattgaagcgtggaacccaaatggtgaatacagaggtattagcaccaaacctatgcctggaactacatggatcaacctcttaatcgagcaagattgccgtgtagaaatatgtactgagaagaaaacgattttgtccgttgaggatatcatttctttgattgacaataaatgacatggggtgattgcacagttgactgaagactggggggagactctatttgcacctttaagcatcgcaggaggaaaagcatttagccacatggctcttgactacaacaatctggatgatcatgctgacaacatgtatggt

SEQ ID NO: 7187 - DNA, 341 bp, Gossypium hirsutum
  Clone ID: LIB3120-017-Q1-K1-H1
ctttcttacaattttaccattttcttatcttcttcttcttcttcttgagacttgcctagaagatcactgagaaacaaatacagatagaaaaaatggcggcctcaataagtggaattggaattgggttaggtctttcttgttcttccaacctttctaaatcacttcattcttcacaatcctctggttttcgtgttaagatgactgtttctgttgaagataaaaagaagaattatacccttcaaaaatctgaagaagctttcaatgctgccaagaatttgatgcctggaggtgtaaattctcctgtccgtgcctttaaaaatccgttggtggacaaaccgatt

SEQ ID NO: 7188 - DNA, 248 bp, Gossypium hirsutum
  unsure (1)..(248): unsure at all n locations; Clone ID: LIB3120-017-Q1-K1-H11
gctnngacgcctgcntcgactctggatatattcatcaagccttgcacaatgtccaggatcaccggtgccgctgtcactatcccatctttcaccggccttaaagccggtgcaaccgcagctaaagttagcgccacagacaacgatgcagcctctccagtcccaaggggcagcataaaggcctccctcaaagacgttggtgttgctgatggggcaactgctgcaagcgtaatccttgccagcaatgccat

SEQ ID NO: 7189 - DNA, 359 bp, Gossypium hirsutum
  Clone ID: LIB3120-017-Q1-K1-H12
caaaatctcaaacccagattgttctctctctctctctctctctatttccaatcaattaatgcctccattggaggagcttagggcttgttggtgttctggtctttgctttgtctgaaaaataaacagaattataaacgaacaccaacgccatgggaagatttgaagagagaggattcgattcagtggtttgccctaagcctatccgaacctttagatggtctaccaactgttatcagactgagatggctgattcaaaaactggtgcagagcttcttgatataatcctccccgagggagggtatggggccgagaatcccaccaaccaaatggcttcatcaccaccgtatttctgtggatca

SEQ ID NO: 7190 - DNA, 333 bp, Gossypium hirsutum
  Clone ID: LIB3120-017-Q1-K1-H2
gctcatgccaaaggttcgaaggtttgagagcttgactcagctggagccagtggacttggagaaacgaattgcaatggcagagcttgaagatgaatcatcactcctccgctcagtctctgtcaacaacaatggcatgtctgaagagaaactgcttaagttactgaaagcgaaattcccatcagagattttcaagtttagggctgataatctattgttagatttcttttgggagacttcatggtggaagataaaggcgaacgacatgacatggggtttgaagattttggggtcaaatctttgaaggtggtagaagaatgggttaaatgggaattc

SEQ ID NO: 7191 - DNA, 436 bp, Gossypium hirsutum
  Clone ID: LIB3120-017-Q1-K1-H3
cgtccggcgatgccaaaggttcgaaggtttgagagcttgactcagctggagccagtggacttggagaaacgaattagaatggcagagcttgaagatgaatcatcactcctccgctcagtctctgtcaacaacaatggcatgtctgaagagaaactgcttaagttactgaaagcgaaattcccatcagagattttcaagtttagggctgataatctattgttagatttcttttgggagacattcatggtggaagataaaggcgaacgacatgacatggcgtttgaagattttggggtcaaatctttgaaggtggtagaagattgcgttaatgggaattctcaggaatttttctaggatgggagctgcatgatagcagaaaagcatccctgaaagatatggaaagaaatgaaaactggagaaacttcaatgaagaaaa

SEQ ID NO: 7192 - DNA, 428 bp, Gossypium hirsutum
  Clone ID: LIB3120-017-Q1-K1-H5
gcaatggagagcaacccgtttactggaaaagagcatcaagtatggatgaggtgcttcgggaggcagatgtgataagtcttcacccggtcttggataaaaccacctatcatctgatcaacaaagaaagccttgcaacaatgaagaaggaagcaatacttgtaaactgtagcaggggcccggtgattgatgaagtagctcttgttgagcatctgaagcaaaatcctatgttccgagttggtcttgatgtctttgaggatgaacctttcatgaaacctgggcttgctgagatgaagaatgctgtcatcgtaccacacattgcttctgcttccaagtggactcgtgagggaatggcaacgttagctgctctaaacgtcttgggcaacatcaaaggatatccaatttggggtgattcaaatcgcgtcgaacca

SEQ ID NO: 7193 - DNA, 450 bp, Gossypium hirsutum
  Clone ID: LIB3120-017-Q1-K1-H6
cgatttttgtattaagagtcgccctttggtgtttttctaattcaatcagtgaggtgaagaaaaatgtcttgctgtggtggaaactgcggttgcggctccggttgcaagtgcggcggcggcggcggctgcggctgcggcggttgcaagatgtaccctgagatgaactttgctgagcaaaccacaactgagacacttgttcttggcgtggcaccccggaaagtgaactttgatggaagctgaaatggaaactggggctgaaaatggctgcaaatgtggagataactgcacttgcaacccttgcaattgtaaatgaggggaaaaaaaaaaccgaagcatattatggaagctgatctaaataatatatgatgtatttgggtttttattattagaataaagcagccatggttcattaggtgttttgcttcttgtatccatggttgcttggtatgt

SEQ ID NO: 7194 - DNA, 373 bp, Gossypium hirsutum
  Clone ID: LIB3120-017-Q1-K1-H7
atcggtttaaggtttcgctacaaaacaggaatcgtttcatctccgattcaattactttccgtgtacgtaacgtcctcgttttgaggaaccacgagagattcaatctgtatggaggaggtagattaaggttcaaagaaagcaaaattttggctaattgtacagataacaacgattcgaacgatagttccagtgacaaaaatgaaagcgaaggcgggcaaggagtgaagcagaaacaaaacacgacaaattctggcagttctaccaatcagagacgagaaaagagcgggaaaagcgagctttggtggtccaaaggaaagaaatggcagtggcaaccgataattcaagctcaagaaattggcgttttgcttttaca

SEQ ID NO: 7195 - DNA, 431 bp, Gossypium hirsutum
  Clone ID: LIB3120-017-Q1-K1-H8
ggaaaggctccgtattccagtgttataacgcatggatttgtattggatgagaagggtttagagatgagcaaatctttggggaatgttgtacatcctcataccattattgagggagggaagaaccagaaggaagcacctggctatggagctgatatcatgagactctgggtttctagtgtagattatactggtgatgtgatgattggggccacagatcctccgtcaaatatctgatgtatataggaagctgagaggaacattgagatatctccttgggaatctgcatgactggaaggttgaaaatgctgtctcttaccaggaactgcccatgattgatcggcatgcactgtttcagcttgaaaatgttgtaaagaatataagggagggttatgaaaattatcagcttttcaaaatattccacatcatacaac

SEQ ID NO: 7196 - DNA, 356 bp, Gossypium hirsutum
  Clone ID: LIB3120-017-Q1-K1-H9
gtgaatttgggcggtccacagagagccatgcccatggatccctcaatttatggacagggaggcatgcagtcaaaacctggaataggaaatacagatttgatgaactggagacagcattgatggagatggttaagcaggacaatcgacaccaattatgtgctaggatcttaatgtgatttgagcaacatcaaaaggaaacagaagatgcttgtagatttgccgaacaaaatgcagctgcacagagatattctgttgaagtgcttcaggcttgattggggcatgtttatgtattctatatatcaacttctatagcagaagcttaagtcttttgtttgagcacgaacacatgccctatg

SEQ ID NO: 7197 - DNA, 384 bp, Gossypium hirsutum
  Clone ID: LIB3120-018-Q1-K1-A1
cccacgcgtccgtaataagcaaggcaatggtttcactatgcttgaattcattgccacttccaccttcttcatgcccccaaaaacttactgaaacttcctcttcttttagtaatggtagtataggaacagccttgaaacccattgtcgtcaatggaaatcctcccacttttgtttctgctcctggtcgccgtatagttgcagttggagatctacatggagaccttgatcaagcaagatatgcgcttgaaatggctggtgtcttgagttcggatggtcaagacctatggactggagaagatgcggtacttgttcagctaggagatgtgcttgatcgaggagatgatgaaatagctatcttatccttgttgcgatcattagatatac

SEQ ID NO: 7198 - DNA, 432 bp, Gossypium hirsutum
  Clone ID: LIB3120-018-Q1-K1-A10
cccacgcgtccgcccacgcgtccgcttacaaaagtggttgtgaaagactctttgatcctaaaggtaaaaacccttgctccatccctttcccttggtacttatgaactgccccatatgaaactactttttaactttgccttacagggcccttgcccaaactgtggtactgagaacgtctccttctttggcaccatactatcaatttccagtggtggaaccaccaacacccttaaatgttcaaagtaagtccaccattaaccataatctttgtcttttcacccttcacattgctgcaaaatttttaagttcccaactcttcttttcacttcagttgtgaaaccacgttggagtataatgcgaaaacgaggttgattacattgccagaaggaagccaagcttaattgcaggagaaagtacatccagagatcaaca

SEQ ID NO: 7199 - DNA, 259 bp, Gossypium hirsutum
  Clone ID: LIB3120-018-Q1-K1-A11
caaaatcaactgcttcacaatggcctctacaaccatggctctttcttccccatcattcgccggtaaggcagtgaagttctccccttccacccctgaaatccagggaactggccgcgtttccatgaggaaaaccaccaagcctgttccttctggtagcccatggtacggtcctgaccgagttttgtacttgggtccactttccggcgagccaccatcttacttgaccggtgagttccctggtgactatggttgggacact

SEQ ID NO: 7200 - DNA, 432 bp, Gossypium hirsutum
  Clone ID: LIB3120-018-Q1-K1-A12
caagcttttcattacagactctttcaagaatttcctgaaagaaaagaagagaaagaagaagaggatgttgctggggaagaggccaaggccacctatgaaaagaaccacaagcatgacagagatcacttttgatctaaacaccaccaccaccaccaacgccgaacctccaccctctgatccacataacccttttaacaactaccccaaacaggcttcccctttcggtggcgcagcaccttctgtagctgttgctggcggtggtgttggacttgaagggttggatcaacggttgttggcgacggtgtcacctagagttcatagaaggcattcagctgattttatggaaacacctcatttcttaagggcttgcggtctttgtagacgtcgccttgttcctggccgtgacatctacatgtataggggtgatacagc

SEQ ID NO: 7201 - DNA, 341 bp, Gossypium hirsutum
  Clone ID: LIB3120-018-Q1-K1-A2
gattaatctaaaacctctgtcatctgtccgtctctctgttttactccacaaccactatcacgaccattatggcttcggctactgtttctgtagccaaacccaaccttcagattcaggcaaaaggaaagggcgttggttttgcagatttctcaggcctacacaactcctctactagccttccctttgccaggaaaacctctgatgacttccattcactcgttgcttttcagacatctgctctaggaagcaataatggcgggtacaggaaagggatggcagaggcatagctaaaggtggctataaatggttttggtaggattgcagggatttcttaagatgct

SEQ ID NO: 7202 - DNA, 420 bp, Gossypium hirsutum
  unsure (1)..(420): unsure at all n locations; Clone ID: LIB3120-018-Q1-K1-A3
accgtccgtcttgaccagatcaatgagcccaagaggccttcagacaagccacttcggctcccacttcaggatgtctacaagattggtggcggtggaactgtacctgttggtcgtgttgagactggtgtccttaagcctggtatggttgtgacctttggcccctctggtctgaccactgaagttaagtctgttgagatgcaccatgaagccctctctgaggctctccccggtgacaatgttggattcaacgtcaagaacgttgctgttaaggatctcaaggatggtttcgttgcttcaaactcttaaggatgatcctgcaaaggaggctgccagcttcacctctcaggtcatcatcatgaaccaccctgngcagattggaaacggatatgccccagtccttgattgccatacctnccacat

SEQ ID NO: 7203 - DNA, 162 bp, Gossypium hirsutum
  Clone ID: LIB3120-018-Q1-K1-A4
gaaaaactgcttatttgcattgggtttcgagaagatttaattttaagtcctctaaacactggggcccaaatgagaaaaccccaggggtctcctaccaacagtttttgacaatcaaagctttctttgccaatgccatagccaagaactcaaaaataacattcc

SEQ ID NO: 7204 - DNA, 412 bp, Gossypium hirsutum
  Clone ID: LIB3120-018-Q1-K1-A5
attcatcatcttccatctcgaaagacccttccatttgcctgctatggccgttctcctcaaggcgctgtccgttaaatccacttctctttcttctttattttcattcctaaaaaccattttcttgaacttttcaagggccttttatgtctgcttcaaacaaagactttcttgtacacccggggcccttcggttcaacccctcttcttctcttcgggtcgtaaaggtgggtccttttgcttctaatggtggtgaaactgaaaccgctgagacccaagaagaagttgaagaacctcaaattgaggactcttcacatggtgctgtcaatgttgaagaggacaccactggagatgagagtgacgattttgaggacacaccatctccaactatcgtgtcattgctccaaacatacaaa

SEQ ID NO: 7205 - DNA, 337 bp, Gossypium hirsutum
  Clone ID: LIB3120-018-Q1-K1-A6
ccctttttcttttttctcctccaataatgatcattcttccaatcatatacgaataaataattattcttttattatttaattgctatatatactacttagaattctatactttctagtttgtagtgccgttatcgaatttgcttcgaagcttgtacattttcgtacaaaagagattggattttttactgttggttgatgtttcttgacccttataggccttagctcagccttttctgatatcaattcaacccccaaatttattttgcttttctgggaacaggttttaagagcttgcaaaagtgaagtaaagatattagagaaatgagtcaacctaaaa

SEQ ID NO: 7206 - DNA, 409 bp, Gossypium hirsutum
  Clone ID: LIB3120-018-Q1-K1-A8
cgatacatgtatgggtgtagtgcccctgtcgcattattgatgggactaggaatgtggagtctcccaccatcaccacgttggttaattctcagagcggttcaaggtaaagggtctttacaagaactcaaagagaaggccatccttgccctaagcaaacttcggggtcgggctccgggtgatgcagcatctgagaaacaaatagaagataccctaatctcagtgaagtctgcctatatggaacaggaatctgaaggaaatatcttggaggtatttcagggaccaagtttgaaagccttcataattggtggaggtttagtcctttttcaacagataactggccaacccagtgttctgtattatgctggtccaattctacagagtgctggattctctgcagctgctgatgcta

SEQ ID NO: 7207 - DNA, 438 bp, Gossypium hirsutum
  Clone ID: LIB3120-018-Q1-K1-A9
cccacgcgtccgctcagaacagctcaaaaaagcttccaacattttgaagaaacaaagaatcagaacatgtcgaaggaagtgagtgaagaaggggtgagccgaaaggactatgtggatcctccaccggcaccgctcatcgacgtggctgacatcaagctttggtctttttacagagctctcaccaccgaattcatcgctactctcctcttcctatacgtcaccatagccaccgtcatcggccacaagaaacaacacgatgcatgcgatggtgttggtcttttgggcattgcttgggcttttgggggcatgattttcattcttgtttactgcaccgccggtatctcaggtggtcacattaacccggcggtgacatttgggttggttttggctaagaaggtgtccttaataagggcggtggcttacatggtagctcaatgg

SEQ ID NO: 7208 - DNA, 444 bp, Gossypium hirsutum
  Clone ID: LIB3120-018-Q1-K1-B1
aattgagctccatttccctagtaaacagagttctttttttcacagcaatggcagccatgaactccagtgttttggcatgcaacgatgctatctcaggcactggatcatctgagcttaatgccaagcttgcttcagcaccatcagttgcttccccagttatgtgcggtggtcacaagttgcctgtgatcagagcccagcaggctaaattttctgattccaaaggatcaggtgccagtgaaggaagaagagctgctatgctctacttggcagctggccttttcaccacagctgttgcttcttctgcaaatgctggggtcattgacgagtaccttgaaaagagcaaagctaacaaggaattgaatgacaagaagaggttggcaacaagtggagcaaacttttccagagcatacactgttcaatttggcacttgcaaagttcctgaga

SEQ ID NO: 7209 - DNA, 431 bp, Gossypium hirsutum
  Clone ID: LIB3120-018-Q1-K1-B10
gtaaggcctgtctctggcctagtggctgcagattacttcgctcctggatattttgtgtggggagttctgattgctaacttggctcggattggatatgaggataaaaccatgtacatggctgcttacgattggagactctcatttcaaaacaccgaggtacgtgatcaaacactgagccgtattaagagtaatattgaactgttggttgctacaaatggagggagaaaagttgtagtcattccacattcgatgggagttctgtatttcctacactttatgaagtgggttgaagcacctgctccgatgggtggtggtggtgggccagattggtgttctaagcatattaaagcccgtgttaacattggtgggccatttctcggcgttccgaaagctattgctgggcttttctcggctgaagcaaaggatattgc

SEQ ID NO: 7210 - DNA, 429 bp, Gossypium hirsutum
  Clone ID: LIB3120-018-Q1-K1-B11
cccacgcgtccggccagtcatgaacccagcattctcaggttcttccatggaacagatgaacgcaatttgctggagcagggtcccatgcccaaagtggccagttatctggaaatggagctaactttaacattcagcaacaaagttcatctaatctgccgagtgagaagaatgttgctattcctcctgtcgtgaagtttcaggcatctaaagacaccgagcaacgaagatgtacagcaagcagtccaggtgagagagcagagaaagacgggacctgtaatactgctgaaggaaaaaatacacctcttatccttatagctccagcctatccacagggagcctcgaagcctaacgaaactgaccagaggacaagggtgatacgagttgtgcctcataatcctagatcagccaccgaatcagcagcacgtattt

SEQ ID NO: 7211 - DNA, 437 bp, Gossypium hirsutum
  Clone ID: LIB3120-018-Q1-K1-B12
cccacgcgtccgcccacgcgtccgcccacgcgtccggcctttgaattgaaaccctcaagatggcactaaaaaatggcctccacagcttccctctccaccgccgtagccaccacctctttcctccgcggccatccggcgccgaaaaccctaaactcccttcctttcaaccaatctcttttcgggctaaaaccccaacgaaatggccgtctcaccatggcagcatacaaggtgacactgttaacacccgaaggaccccaagaattcgtgtgccccgacgacgtatacatcgttgaccaagctgaggaagaaggcattgatcttccgttctcgtgtagggctgggtcttgttcttcgtgtgccggagtgattaagcaaggctccgtcgatcaatccgacggtaatttccttgatgatgaccagattgctgcaggttttgg

SEQ ID NO: 7212 - DNA, 269 bp, Gossypium hirsutum
  Clone ID: LIB3120-018-Q1-K1-B2
ctggttttttcttcccttttcttctcagttctcccaccgccgcggccgtcgattttcgccggatctgatccataaccagtgtcagattccgtatcgaaaccgatacggtacccctaactgccgattccgtgtaacggagagatggcggagctggcagttgacaaacattttaagtacatcttatctgttgaaaagaacaaggatagttttgaatcggtggtgatggaccatcttagaatgaatggtgcatatttgggattaaacagcct

SEQ ID NO: 7213 - DNA, 359 bp, Gossypium hirsutum
  Clone ID: LIB3120-018-Q1-K1-B3
cggcgagacgagccgtttatcattacgataggtgtcaagtggaagtgcagtgatgtatgcagctgaggcatcctaacagaccggtaattgacttgaaccaattctgattctctcttgcatactatcaaatggcagctactgcagcaatcaccactctcccccagttcagtgggttaagacccaaagtttctactgctccagttaggagcctggcagcagttcaaccaatgaggcgcaaggggaagggtgctctcggtgctcgatgtgatttcatcggatcccccacaaatttgataatggtgactacaacaaccctgatgctgtttgctgggaggtttgggttggctccatcagcaaac

SEQ ID NO: 7214 - DNA, 444 bp, Gossypium hirsutum
  Clone ID: LIB3120-018-Q1-K1-B4
cccacgcgtccgcccacgcgtccgagaacatagcttgaaacttcccatctctcacttcttcagaaactaagagtcgaaaacgatggcgtatgctgctatgaaaccgaccaagcctggtttggaggaatcccaagagcaggttcacaaaatcaggatcactctctcctccaagaatgtgaaaaacctcgagaaagtttgtgctgacttggtccgtggtgccaaggataagagactgagggttaagggaccagtgagaatgcccaccaaggttcttcacatcaccacaaggaagtctccctgcggtgaaggtatttaattaacctggctggtgggggattttggaccctacctttatggaaaccttggttcttattttggaagcattccttgggaacctattatggttatgaatcccctggtttatactggaaatctgaattattc

SEQ ID NO: 7215 - DNA, 355 bp, Gossypium hirsutum
  Clone ID: LIB3120-018-Q1-K1-B5
cccacgcgtccggttttgatggggaaggaacagagcttagatgagacttcaaactccattggtaattctggaagtgaaagaacgcctcttttgaacaaggaggcaagtaagcaaacaaatgggcaacaagcagctgaaagtcctctgtcagaccttgagcaaggcaatgcagaagaggcagtcaatgttggattttggagagtatttgcactggcaaagccagatgcttggaagatatttgttgccacctttgcattattgatagcatccactacaaatctcttgattcctaaatatggtggaatgatcatagacattgtttcaagagatataaggacacctgaacagcaatcag

SEQ ID NO: 7216 - DNA, 415 bp, Gossypium hirsutum
  Clone ID: LIB3120-018-Q1-K1-B6
cggacgcgtgggtttcaagctcaagggttaaagcctaaaccctcctctcatttcttattcaatccacactctaacactgttgctgcttcatcatctaaagctttcaccacttttgcactcttcaaaccaaagaccaaagcagctcctaagaaggctgcacctaaaccaaagccaaaggttgaagatggaatctttggcacctctggagggattggttttaccaagcaaaatgagctctttgttggacgtgttgccatgattggctttgctgcatccttattaggtgaagcaataacagggaaaggaattctagcacagttgaacttagagacaggaattccaatttatgaagctgaaccccttcttctcttcttcattcttttcaccctcctcggagcaatcggagctttgggcg

SEQ ID NO: 7217 - DNA, 178 bp, Gossypium hirsutum
  Clone ID: LIB3120-018-Q1-K1-B7
gtcgaacaaagatgtcacaaaggctctccctagagcgggacagataaagaacgcaaagaggcgatatgacgggaacaccttggactactgggagaaaaacaacacactgaacagatcaggatggcacgaaagctggagcacgctaggtgattgatccgaaagattaagaagaagaaac

SEQ ID NO: 7218 - DNA, 267 bp, Gossypium hirsutum
  Clone ID: LIB3120-018-Q1-K1-B8
gctgattacaccctcaagctcctccacaggagaatccccccagctgtccctggaatcatgttcttgtctggcggacaatccgaggttgaagcaaccctcaacttgaacgcaatgaaccaatctccaaacccatggcacgtctcgttctcgtatgccagagctctccagaacacttgcttgaagacatggggaggcagacctgagaacgttaaggctgctcaggattcacttcttgtccgtgctaaggccaactcacttgctcagctc

SEQ ID NO: 7219 - DNA, 436 bp, Gossypium hirsutum
  Clone ID: LIB3120-018-Q1-K1-B9
ctcaagcttgctttccaagttatctgatatcttccttttcttcccttttgaagcataggtgcaccaaaaacaacaatggctatccgcctgcctcgtatggttagttctaagaaggttcccaagggatactttgcagtttatgttggagaaagccagaagaggttcgtgataccggtatcattcttgaaccatccttcatttcaagatttgctagggaagtcagaagaagagtttggatatagtcatcctaccgggggtctcacaattccatgcaacgaagacacctttctcgaagttacctctcgcatgtattgatcgtgagatgattaacacaaaccagtcaatacaattttgtaaagcaaagatcactaatacatgtaaacacttttttctccatccattgtcttggggagctgatatataagtcaccccaagt

SEQ ID NO: 7220 - DNA, 365 bp, Gossypium hirsutum
  Clone ID: LIB3120-018-Q1-K1-C10
cccacgcgtccggtatatttgtgcattgttggagtgtgggtttcttcctctctgtaaggggtgcttgagagaaagaggaagggtaaaaaactcggggttttatgagttttttgagtgatgaaggggagaaagacatagcttcatttaagtgggtttctcttgctaaaagcttttaagcgctgttttgttgttgggggttgggagctaaatggacactaaaggaagactcgttgctggttctcacaaccggaatgagtttgttctcatcaatgccgatgaggttgcaagaatgacatcttgtaaaaaattaaatgggcaaatttgccaaatccggggggatgaaatagagatatcctgtgatgggg

SEQ ID NO: 7221 - DNA, 414 bp, Gossypium hirsutum
  Clone ID: LIB3120-018-Q1-K1-C11
agcaacattcgccattaattctccatatttcattgcaaagaacatcaccttcaagaacagaagcgaccattaccgccgtcaggtgcattatgaaagcaagcagtggcactgaggatatcagcagatgcagcagcctttatcggttgcaagtttattggagcacaagatactctttacgatcacattggcaggcactacttcaaacgctgctacatccaaagttcagtagatttcatattcggaaatgggctttgcctctataaacactgccacttgcatgccgtaaccaacagctatggagccttgacaagccaaaaaaaggaaagcatgcttgaggaaacaggcttctccttctgtaaatgcaagggcacggggtcgggcgccctctaccttggtcgggcttggggcgttttc

SEQ ID NO: 7222 - DNA, 437 bp, Gossypium hirsutum
  Clone ID: LIB3120-018-Q1-K1-C12
cacggctttggtctccggcttctgcctcacttccaactccacctctccttctaactcactgcggcaacccacattgcggcggccgtctatcgtcgccaacctcaactcttccacttctcctcctactctcattcgaaatcaacccgttttcgcagcacctactcctttgctcactccttccaattggaaagaaaacatgggagaccagtcatacgaggaagccattgaagctctcaagaaactgctcaatgagaaaggagaactgaagagtgcagcgacggcaaaggtagagcaagtgacagctgagttgaagactgctgcttcttccgatgagtctgttgaccgcttgaaacaaggcttcatttacttcaagactgaaaaatacgaaaagaatcctgctctgtatggtgagcttgccaagggtcaaagcccaacgt

SEQ ID NO: 7223 - DNA, 378 bp, Gossypium hirsutum
  Clone ID: LIB3120-018-Q1-K1-C2
caccgccttctcctcgatacgcaaccgaacgcatcgccatcgctaccgaatggaagcaggacgcgcaatgctttcgccaatgaagccaactttgacaccaacatggtgatcatcctagcagctttgcttgtgcattgatatgtgctctaggactaaactccattatgcgttgtgcttttcgttgcggcagaaggtttggtttggacgccacggaagagaccgcggcgcgtttggctgccgcgacgggcctgaagaagagcgcgttgcgtcggctttcggtggccgtgtatggttcagggaatggatatgaaaggctactgagtggtccaattggcttggaaaattcattgattgtgaaaaaggtaagggtttggcaaa

SEQ ID NO: 7224 - DNA, 309 bp, Gossypium hirsutum
  Clone ID: LIB3120-018-Q1-K1-C3
gaaccagaaaccaaggcaatggcttctcttgcaaccttagctggtgttcaaccaacgaccatcaagggccttggtggcagctctctcaatggaaccaagctcttggtgaagtcaactcgccagagtttcaaacccaaaaactacagggctggtgctgtggtagcaaagtatggtgataagagtatatactttgatttggaggatattggcaacacaactgggcaatgggacttgtatggatccgatgcaccttcaccgtacaacccactccagagcaagttctttgagacatttgcagctccatttacc

SEQ ID NO: 7225 - DNA, 264 bp, Gossypium hirsutum
  Clone ID: LIB3120-018-Q1-K1-C4
aacaacatgaaaacctccctttttttcttgtacttattatctctctcatatttcaatgtaagaaactaaattccctagtcttgtttttgctctatattgtcttttctacattttcatttgatatacttacattctagactttgttgctttaatttatttatttctatttccaggtggtgcaagtatccggtacaggcagaagcgagggtaaggagaacccatttacagccaaagcctcgttgattcgttactggaacaatcaca

SEQ ID NO: 7226 - DNA, 329 bp, Gossypium hirsutum
  unsure (1)..(329): unsure at all n locations; Clone ID: LIB3120-018-Q1-K1-C5
ccaccatcacccccaaaaaacaaagcaaattgtagaagatggcaacacaagcacttgtatcatcgtctcttacctactcagtggagactgcaaggcagattcttggagctaaacgacaaattgggccttcaaggaaaggatcctttgttgttaaggcagcttcgactccacccgttaagcaaggagctgatagacctttatggtttgcatctaaacaaagcctttcatacttggatggcagccttccaggtgattatggatttgaccccttgngactctcagaccctgaaggtccaggagggttcatcgagcctaaatggctaccctac

SEQ ID NO: 7227 - DNA, 428 bp, Gossypium hirsutum
  Clone ID: LIB3120-018-Q1-K1-C6
cctttcctttccttttctctctctctagcaatggaggcgcgattgttatcacgcgcttctgttatcaccggcttacctcagctcaggccgaagctttcgccggggattgtcaacgtttcgtatgcttcggctaagccgatcggagccgtcggtgaaggcgggaacgtcatatggcggaggcaactaaggccctccttgctactcgaatgctcgtcggttagcaagcgagaggttctgaaaccggtttcggctgccgcgtcgtcaccggccgagggaggaagcgattccgccggggaggggaagatcgctccggttggattcttcgagaagtatcctgctcttgttaccggatttttcttcttcatgtggtacttcttgaatgtaatattcaacattctcaacaagaagatctacaattacttccctta

SEQ ID NO: 7228 - DNA, 380 bp, Gossypium hirsutum
  unsure (1)..(380): unsure at all n locations; Clone ID: LIB3120-018-Q1-K1-C7
gcacaagcaatggcatcgatgactggtttacgtggctgttcacaagctgcgttggaagggagtctccaactcagcggccaaactcggttgaacgttgctagcaccaacaggttggctgtggctagacccggttttaccgttagagctcaacaggtccctgccgagcctgaaactggacgcagagctgtgctgggtcttgttgctgctggtttggctactggctcctttgttcaagctgtgcttgctgatgcacgaagcatcaaggttggcccgcctccaccgncctccggtggattgcccggaactttgagttccgatgagccaagaaaccttgatctgccgaccaaagatcggtttttcttccacccattgactccggc

SEQ ID NO: 7229 - DNA, 99 bp, Gossypium hirsutum
  Clone ID: LIB3120-018-Q1-K1-C8
cccacgcgtccgcccacgcgtccggctgatggaacttgccgcttcatttaaatcttctcaaggacgacccgttactagacttttgagtgttgcaagaag

SEQ ID NO: 7230 - DNA, 434 bp, Gossypium hirsutum
  unsure (1)..(434): unsure at all n locations; Clone ID: LIB3120-018-Q1-K1-C9
cccacgcgtccgcgtgtttttcccttcaaagaacaacaacaattccaggcttgtggtgacgagggcagctgacgaggctgctgcaccagcaccagctaccaccactgcaccatcagaaggcggtgaagcccctaaacctaagccaccaccaattggaccaaaaagaggaaccagggttaagattcttagaagagagtcctactggtacaacagctttgggtcagttgttacagtcgaccaggaccctaagactcgctatccagtggtggttcgattcaacaaagttaattacgccaatgtatcaaccaacaactatgccttggatgagattgcagaagttaactgagtcatttaattcttaacattttttcgngcattaatattgtccttcttccctttcatctctagaattaagcttaatatttgtacccccc

SEQ ID NO: 7231 - DNA, 356 bp, Gossypium hirsutum
  Clone ID: LIB3120-018-Q1-K1-D1
cccacgcgtccgaatttgacccaaaatggcctctgtttgtgcttcttcggctattgcagcggttgccatctcatcccccagttggcagaagactggatcagtagtggggacaacaaaggcttctttccttacagggaagaaacttagatctgtgagaaagtacacaaaaccagctgccggaccaacatttccagtgtgcgccgccgccgaccccgacagacccctttggttcccaggcagcactcctcctccatggctggatggcagtctccctggtgactttggtttcgatcctctcggtcttgggtctgaccctgagacattgagatggaacgtacaagcagagctggttcact

SEQ ID NO: 7232 - DNA, 283 bp, Gossypium hirsutum
  Clone ID: LIB3120-018-Q1-K1-D10
ggaaaagtacacaattcatgtgaactattgcttgatatattttccaatggaactgcgggagtgggtgtctataatatctacttccaatgcttatgtcaagagaataaatcaccagaagcattgtctcacttgaagcgcacgatgaaagtttgctttaagccaaacaatgtgtcgtataatactatcttgagtgatttttgtaaagaaaaaaatattaatgaggccatggagctttcggaccatttttagtatgatgtgaactaaccttatgccgtcactttca

SEQ ID NO: 7233 - DNA, 336 bp, Gossypium hirsutum
  Clone ID: LIB3120-018-Q1-K1-D11
gtaaatggttaccactgcttctccaatggcgactcagctgaagagcagctttaggtcgtctgttacaagaggactggtagtccccaggggcatttcgggatccccgtttaaagtatcttccggaaagaccaggaccccttgcttcactgtcaaagctgttcaatccgacaagtcaacatttcaagtaatccaacccatcaacggcgaccccttcattggaagcctggagactccaatcacctcaagccccttaattgcatggtacctttccaacctcccagcctataggacggcagtgaacccacttctgaggggaatcgaagtgggtctggctca

SEQ ID NO: 7234 - DNA, 402 bp, Gossypium hirsutum
  Clone ID: LIB3120-018-Q1-K1-D12
aagaaaacccataaatgaatcttcagattcaaagcataatgaagaagaagaagacgaagatgatgatgatgttgatgcggatggtgatgatgatgttaatggcaaaaacaagaaaaccccatcaaagatcaagaagaaacgtggtgagaaaccaccaaaacaacccaagtggtcatgtatggacacttgctgttggttcattggttgtatatgtataatctggtggctcctcttgttcctttacaatgcaatgccggcttcattcccttaatatgtaacggaagcaataacgggttctttaaccgaaccggcttgtggtaaactcaaaaaagaaagggtggaaactaaacaccccatggtggttgggccttggattgtcacttgtggacttgaactattgga

SEQ ID NO: 7235 - DNA, 297 bp, Gossypium hirsutum
  Clone ID: LIB3120-018-Q1-K1-D2
cccacgcgtccgcgagaaacttcactggaccttaaaaacatctcttatcctcttctgttttgaatatggatagatagatagatagcccaacacactgtaaaagaaaaaagctctcacaggaaacagcgccaatggctacttgtaccaccacaccttcatcatcgttgatgataacatacgccgccgcatctactgtacacgcccaagccctcacttcttccgttctatccttcaagtccaacaagcctaccttttctattaacccacttgctctcaagacttctatagacagaaaat

SEQ ID NO: 7236 - DNA, 369 bp, Gossypium hirsutum
  Clone ID: LIB3120-018-Q1-K1-D3
ctcattgcctttcaataaaaattgcattttgattttgatccaaagcccttttttttctttttttaattttaccttctttttgctactgggcatttgaagtggataatcaatcaatcaaagaaatatcccaaaaccatgtcggcactcttcaatttccgttcattcttaacggtagtgctattgggaatctgcacctgcacttacttgaagatgcaatttccagctatccttgaacagagaactgggttccgtggtttcttttggaaggcagccagaataggtgaacggttaagtccctgggtggctgtaggatgcttcacaatgggtgtctcaataatatttttctgaacaaggagcacaccctctact

SEQ ID NO: 7237 - DNA, 305 bp, Gossypium hirsutum
  unsure (1)..(305): unsure at all n locations; Clone ID: LIB3120-018-Q1-K1-D4
gcgtncgntctattgagttggaattgaaaaaaggttccaagaaatggctaatccgtctctaatttccctttaccaggtccctttcaagccggcctttccaataatctgcaaaacccacgtctccttttctctttaaatccctttctccgtttcaaactcaactcgcggccaactctgtcccatctccgagacctgcctcttttcgattcccagtcttccaaacctcacaagttcagcacccaatttaccacatcctgaggaagtacagttctgagtcaccagcattcaagttggatgtgaacaag

SEQ ID NO: 7238 - DNA, 372 bp, Gossypium hirsutum
  Clone ID: LIB3120-018-Q1-K1-D5
ggggttcaactttttcttttagctttttggtatttccaatcccacgctgctcaaaaacacgctctcctccccctctctcaccctctaatctgatcactgatttcttcgatttcaagttgaagtcaagctgcagctatactgtgatttggttaatatagaattgaaacaatgggggagctgttgggactgctaaaagtggtggttgtgcaaggtaaaaggttggttatccgggattttaagagcagcgatccttatgttatagccaagctcggtgatcaggtagcaaagactaacgttatcaacagttgcctcaatccagtatggaatgaagagctcactttctccctcactgaacctgttggagttcaaaat

SEQ ID NO: 7239 - DNA, 323 bp, Gossypium hirsutum
  unsure (1)..(323): unsure at all n locations; Clone ID: LIB3120-018-Q1-K1-D6
cggacgcgtncgcccacgcgtccgcggacgcgnggggggnaaaaccattcattctttccaggtagtacgtaatattttaacccccaacccccactatctgtccatctttcagtaagagaaaggaaatggagtttagttcagaggctaaccagcgcattgccaggctcgcagcccatctccaacctcagatggaggaaagttctattttgaggcgagctgactgtagagcgaaaggagggtcaccagggttcaaagttgctatcttaggagcagctggaggcatttgccagcctcttgcaatgttaatgaagatgaatcctctc

SEQ ID NO: 7240 - DNA, 363 bp, Gossypium hirsutum
  unsure (1)..(363): unsure at all n locations; Clone ID: LIB3120-018-Q1-K1-D7
cggacgcgtggggccgggtcagcctgaaggggtggattttgatcaatatgcaggctatgtaacagtagatccggtggctgatcgagcattgttctatttttttgtggaatcaccggttaattctccgaataagcctctggttttatggttaaatggaggtccaggatgctcgtctttaggatatggagccatgcaagaacttggacctttcagagttaacagtgacggaaaaacgctttacagaaatgaatatgcatggaacaatgttgcanacgtgatattcctggaatcaccagccggagttggatattcttattccaaaaattcctcagacaatacccaagtaggtgacaagagaacagc

SEQ ID NO: 7241 - DNA, 351 bp, Gossypium hirsutum
  Clone ID: LIB3120-018-Q1-K1-D8
accacttccacacaacaacagcaatggcaattagaaaaccatccaaactgcctcaaaccgcagttctgaagcaaatcctgaagagatgttcaagcttaggcaggaaacatggatatgacgaagatgtgctcccacttgacgtaccaaaaggtcactttgccgtttacgttggtgaaaacagaagcagatacatagtccctatctcattcttgacccaccctgagttccaatgtttgcttcgacgagcggaggaagagtttgggtttaaccatgatatgggccttaccatcccttgtgaagaagttgtttttcgctctctggcatctatgcttagatgaaaaatgggaaaaa

SEQ ID NO: 7242 - DNA, 224 bp, Gossypium hirsutum
  Clone ID: LIB3120-018-Q1-K1-D9
gaacattttcacagcttaaaacacaatatgactaaggatattgagaccacggcggagcaaggcggcggagcggagttctcagcgaaggactaccaggacccaccaccggcaccgttgattgacttggaagaactcaccaaatggtcgctttatagggcggcgatcgctgagttcattgccacccttcttttcttgtatgtcacggtgttgactgtgatcgggta

SEQ ID NO: 7243 - DNA, 316 bp, Gossypium hirsutum
  Clone ID: LIB3120-018-Q1-K1-E1
cccacgcgtccgaaaaccgaagaactaaaagaaaaatggcgtctttggctcaacaattcacaggtctaagatgtccaccactctgctcatctcggttttctgtgaaaccaaagcaaacccagaaagtgggcgcttttgcttctcctatagtttcagccgtcgctgtctcaaatgcacagaccaaagataggcttgaactcaagaagatgttcgaggatgcttacgaacgctgtcgaactgctcctatggaaggcgtggcttttactgttgaggattttcaaaatgctcttgagaaatatgactttgattctgagct

SEQ ID NO: 7244 - DNA, 437 bp, Gossypium hirsutum
  Clone ID: LIB3120-018-Q1-K1-E10
cccacgcgtccggtgagcgctaggttcaacaacaacggcaaggctccagcgggaagtttcaagattgtggctgccaaagaaatcgacgaagacacgcagaccgaccaggaccgatggaagggtcttgcttatgatatctccgatgaccaacaagacattaccagagggaaaggtatggtcgactcattgttctaagctcccatgaacgatggtactcactatgctgtcatgagctcctatgaataccttagccaaggccttcgcacatacgacttggacaacaacatggatggattctacattgccccagctttcatggacaagcttgttgttcacatcaccaagaacttcatgacccttcctaacattaaggttcctcttatcttgggtgtttggggaggcaaaggtcaaggaaaatctttccaatgtgagcttgg

SEQ ID NO: 7245 - DNA, 435 bp, Gossypium hirsutum
  Clone ID: LIB3120-018-Q1-K1-E11
aacttttcctattcccttcctttctccgcaccactctttgcattagattcccatctttaatcgttattttctccagaaactaaatttcttctctcaaatttcccacatttttgttattctgtttttttttttctttaaagtttaaaccttgggtgacgattcactagttgcaaatctattagtatattgggtcagtcccaagcaacaaacacttaccactccctcttgaccgttaatccccccgccatacccccggttcatcacttttaacggagcatcatgaaccaagggggtgtagccaccacaaatggtggctccggaagcggctcagtcggtgttcggatccaacaatcccgaagtctaccggatttcctccaaagcgttaatctcaagtacgtcaaattgggttaccactatctaatttccaatctttta

SEQ ID NO: 7246 - DNA, 350 bp, Gossypium hirsutum
  Clone ID: LIB3120-018-Q1-K1-E12
aactctccctattcccttcctttctccgcaccactctttgcattacattcccatcttgtgagggatattttctccagaaactaaatttcttatctcaaatttcccacatttttgatattctgttcttttttttctctaacgcttaaaccttgcgtgacgactcactagtcgcaaatctatcagtatattgggtcagtcccaagcaacaaacactgaccactccctcttgaccgctaatccccctgccatacccccggttcatcacttttaacggagcatcattaacccatggggtgttgccaccacaaatggtggctcctgaaacggctcattcgatgttcggatccaac

SEQ ID NO: 7247 - DNA, 308 bp, Gossypium hirsutum
  unsure (1)..(308): unsure at all n locations; Clone ID: LIB3120-018-Q1-K1-E2
gcgtccgcccacgcgtccgatttttttttaaatgggaaaatccacttcctgtttcaaactcatcacttgcggcagcgattccgctgaaaaagacgacgccattgatgcccctgagaataagagatcaagtgacaaaaagggatggagttttcggaagagatctgaacggcatcgagtgcttagcaactctgtgatacaagtaactaccactacaggacttaaggaaagtcaagactctgttggctttgagtttcaacagcaagatgtctcggttgcttctgagaaaacctncactgttcagtacactg

SEQ ID NO: 7248 - DNA, 331 bp, Gossypium hirsutum
  Clone ID: LIB3120-018-Q1-K1-E3
atttggattctttggaccagaacctggctaagaatatggctggtgagatcattggaactaggaccgaagttgccgacgtgaaggcgacgccgtttcagccttacagcgaggtttttggtctacagaggtttagggagtgtgaattgatccatggacggtgggccatgttggctacgcttggtgcacttaccgttgaatggctcactggtgttacatggcaagatgctggcaaggttgagttagttgagggttcatcgtatctcggccaggcccttcccttctcgatgacaacattgatttggatagaagtattggtgatcggattcatcga

SEQ ID NO: 7249 - DNA, 398 bp, Gossypium hirsutum
  unsure (1)..(398): unsure at all n locations; Clone ID: LIB3120-018-Q1-K1-E4
acgcgnccggaaagatctgatgatcttttagaaccgtatgttgaatcacttggagacaaccaagcgatagagcaggactttggggagagtcgggtttcgaatttggagataggctttgatggactcctttgggcttaattattaacgattgtgaattgagttcgacaaaaggtcaggggataaaagaaaatcatcactcggaaattatggtcggttttgcgagcagcttcagttcgcctttgccaagtcaaagtttcagagtagcttatgatgctgatttccatggagcccttagcagaataacagagtgccatatctttctttctttaaaccttgaacttggggttatccctttttttaaaaaaaaaaaaaaaaaaaaaaattgggtggaacaagtt

SEQ ID NO: 7250 - DNA, 278 bp, Gossypium hirsutum
  unsure (1)..(278): unsure at all n locations; Clone ID: LIB3120-018-Q1-K1-E5
cggacgcgtggggtgagcttgtgtttgccaagatgggtatcaaccccatcatgatgagtgccggagaactggaaagtggaaacgccggtgaaccagccaagttgatcaggcaaaggtaccgtgaagctgccgacataatcaaaaagggcaaaatgtgcgccctcttcattaacgatctcgatgctggtgccggtcgtatgggaggaaccacccaatacaccgtcaacaaccagatggttaatgctaccctcatgaacatcgncgataaccccaccaac

SEQ ID NO: 7251 - DNA, 186 bp, Gossypium hirsutum
  unsure (1)..(186): unsure at all n locations; Clone ID: LIB3120-018-Q1-K1-E7
gagagccnnagcannaacacnagcaccagcagcaaccagggcacgcgccccaggaaccggggaccaccacgcacacaccaccaaaggccgaacagcaacaaaaccgccgacgccgcgccaggnaagaaacaggaagccgaaccaacacgcggcgcgcaaggcacacaagcaggaagaagacggaag

SEQ ID NO: 7252 - DNA, 430 bp, Gossypium hirsutum
  Clone ID: LIB3120-018-Q1-K1-E8
cgacgacccgaaccaacccggtctcgtgataactgtgaccgaatccattcgcttgtttctggttgcagcctccaatgaccgtcgtctctctgaagaactccgagaactcgctctcactctttcctcagcagccaatgcaccgtacaagcagatccgaagcatatggatggaatcagcttttgacaccaggcccgaattgatttctctcttctccggatctaatttcgttttcaccagtccaaaacccagagagaagagcgaagaattaaaggagagattaaggaagcttaaagaactagcagagaggaaagagtatcaagagcttgttaaagatatcacgccgaagaaggatctcaatgaacctttctctacttataaggatcaaattggctttggtttacatgttgctctgacaatgtttactgggtat

SEQ ID NO: 7253 - DNA, 250 bp, Gossypium hirsutum
  unsure (1)..(250): unsure at all n locations; Clone ID: LIB3120-018-Q1-K1-E9
cccacgcgtccgcccacgcgtccgcccacgcgtncgatatttagctatagcatacactactggtacccactactagcaatggcttcctcaatgatctcatcgggtaccattgccactgcctctcccgcacaggctaacatggtcgctcctttcaccggtctcaagtctgcctctgctttcccagtcaccaggaaagccaacaacgacattacttctctcgcaagcaatggcgggagaatgcaatgcatgc

SEQ ID NO: 7254 - DNA, 258 bp, Gossypium hirsutum
  Clone ID: LIB3120-018-Q1-K1-F1
cataggcttactgccatggagcttctaagagacccttttcttcaaatcgatgattatgggtgagatttgagactaattgagtacgaaagggacagctatgacgctggacctctcatgagacaacctctttatgatgttcatgttagtaacaagagttctttggtcaatggatacagcaattatctcggttatggacatgagagcaatatcggctataactcgcatgaatacgaaacaagtgaattagatctcgaagat

SEQ ID NO: 7255 - DNA, 435 bp, Gossypium hirsutum
  Clone ID: LIB3120-018-Q1-K1-F10
ctttcccattattttcttcaaccatgggagcctctaatagcaagaaaaagaggaagccattgcatgggaggaggaatgtgaaggtattgatgacagacaaaatgaggcttctccaagagggaagagtgggaagatattatgagaaagaagtgatggttaatgcatgcaaagaggctgagtggcttaaagagaggaagaagttaaaggaggaagtgaaggtgttgaggaagttagtggatgagaaagaagagaagataaagaaaatggaagaaggtggttcatcaatggtgatggttcagaaatgtgacaaagggtggccattgcttgggacaaggtacttattggagcaaatgaaagatgaaagggcaaggagggatgaagttgtggagaaatggaaacaactctatcttgccatcaagactgagcttgatgatc

SEQ ID NO: 7256 - DNA, 430 bp, Gossypium hirsutum
  Clone ID: LIB3120-018-Q1-K1-F11
cccacgcgtccgggcagcttgttccctcactctatcgtcctccttgcctcaacctaaacccgcattttttggatcgaaaccctctcatctatccctacacagcacttcgtttgcgctcaaatcccagtgtttcagggtttcctcaagttccgtttccatctctagtcgccccgccgatgatctagttgcatctcttctctccaaggtgatacaaacggatggtggagtttcactcaccacaaaacagcaccaagaggtagctcaagtggctaatgagttgaacaaatattgcgttgatgaaccagtcaaatgccctttaatcttcggagattgggatgtggtttactgctcgaatcccacgtcaccaggaggcggctacagaagtgcattggggcgccttttcttcaagaccaaggacatggttcaggct

SEQ ID NO: 7257 - DNA, 271 bp, Gossypium hirsutum
  Clone ID: LIB3120-018-Q1-K1-F12
cccacgcgtccgaaggaaagtaaagtttctagcagagggtaattacggaattcgtaaggttagaggagctgtccctcatgatctagggacacatgatccttggaatgaaatgaatgcatataatatacatgatacaagcaaatggaaggatctgaattccaagtttgtgcttcaagtgtacagagattttgctgccacaggagatatggcatttggtattgaagtttgccctgctgtacgcactgcaatggaatacatggaacatattgat

SEQ ID NO: 7258 - DNA, 325 bp, Gossypium hirsutum
  unsure (1)..(325): unsure at all n locations; Clone ID: LIB3120-018-Q1-K1-F2
gcgtncgtctagactactctttcgaaccagctccaccatcacccccaaaaaacaaagcaaattgtagaagatggcaacacaagcacttggatcatcgtctcttacctactcagtggagactgcaaggcagattcttggagctaaacgacaaattgggtcttcaaggaaaggatcctttgttgttaaggcagcttcgactccacccgttaagcaaggagctgatagacctttatggtttgcatctaaacaaagcctttcatacttggatggcagccttccaggtgattatggatttgaccccttgggactctcagacccttgaagt

SEQ ID NO: 7259 - DNA, 295 bp, Gossypium hirsutum
  Clone ID: LIB3120-018-Q1-K1-F3
gaaaaaagaaaaagaaaagatcaagtgagaggtggcatcaaccataccatggctggtttgcgaagatctgcagtgtcgtttaggaggcaaggatcttcagggattgtttgggatgacaggtttttgtccgagttaacccaagcaaatcaagaacaacaaggagacaccaagcaagaagaacaagcccaggttgcgcaagacaacaataaccctgaaaaactcgatgctattaaggatgttaagcccacaagaaacctcccacccatcaacaccatcgaaaggagccgatctaatg

SEQ ID NO: 7260 - DNA, 374 bp, Gossypium hirsutum
  unsure (1)..(374): unsure at all n locations; Clone ID: LIB3120-018-Q1-K1-F4
gctcaggaccagaaaagaaatgcnntggaagaaatcatgccggagagggaaccaagctcactgtggaagcagatgttccaaggtgagaggggaaatcnnaatcgacttgcagcttcggtcacgatgatgcagttccgcgatggtttgagcacaatggattgaggaaagaagagtaaanggagaattattcggtctcgtctcatggaagaccatgaggtacctgagtgggtatttgtacttaatgatgataggaagggcaaaatttcagaaagctatgttgaattagggaagcgaaaaagaaaaggtgggaactattatccagatacattaagtgacttacagttcatgagggctgtngaaaatgcagaagacat

SEQ ID NO: 7261 - DNA, 274 bp, Gossypium hirsutum
  Clone ID: LIB3120-018-Q1-K1-F5
cccacgcgtccgcgtaaatggctaccactgcttctccgggggcgactcagctgaagagcaggtttacgtcgtctgttacaagaggactggtagtccccaggggcatttcgggatccccgttcaaagtatcttccggaaagaccaggaccccttgcttcactgtcaaagctgttcaatccgacaagtcaacatttcaagtaatccaacccatcaacggcgaccccttcattggaagcctggagactccaatcacctcaagccccttaattgcatg

SEQ ID NO: 7262 - DNA, 412 bp, Gossypium hirsutum
  Clone ID: LIB3120-018-Q1-K1-F6
cccacgcgtccgagaaaataaaagaacaacttctgggcaaagtaaaaagcttggaactgaggatcaatgaactgcaggctgccaaacttagtagaagtggtaatgatgcacgccatgcagttgaagaaagggatttatgcgagaagttactaaaacagattgaagcgaaggcctctgagttggtagctgagaagaagaaaaaaagagatctccttgatgcttacaaaaggctaaaatctcagtacaactacctctgcagaaagaatggccttactaccgagaacatgtctttttcaaataaactggaagatgaaagtgactcagccaggcatcatgacaaatccaaaccttctcttgatgctgaaaacaggattctgaagactcctattgttgtttttggcacaaaaagcat

SEQ ID NO: 7263 - DNA, 383 bp, Gossypium hirsutum
  unsure (1)..(383): unsure at all n locations; Clone ID: LIB3120-018-Q1-K1-F7
cccacgcgtccgcccacgcgtccggtgcgccagaaggcgaggacgttctcatgaaagatgggttttttgcttcagctaacgtcggcgtcactccgtactaatcatgcagcaattaggcaaagcttgtgattagcagttgatggagagctaagaactgagaaaaactcgctgctcaagtttggctactctgttgttgttattaattattataacccattggctactgctgaaccggtttttatattttcatggttggatatcaagctagtaatatttaagaatgcatgtaattntagtcttagataatatcctgtgtctaccttcttcttggatttgaaaaactaaaacttgctcctttaaataactactattagtttaagctc

SEQ ID NO: 7264 - DNA, 179 bp, Gossypium hirsutum
  Clone ID: LIB3120-018-Q1-K1-F8
cgagagccgaacatcgacgccggaaacgctttctcgacaacgcacgcgcctcggacacgggagggtcatatggataactgttactggtcacccaccactgcaaatgggcacgagtgctgcgcagaggttgtaacgaccgccagcgttgcacctgatgaccacgaacatgttgactacac

SEQ ID NO: 7265 - DNA, 434 bp, Gossypium hirsutum
  Clone ID: LIB3120-018-Q1-K1-F9
cccacgcgtccgcccacgcgtccgtgatttcattctttttcgttcttttttcccctaaattgtattttctcaaaaatgtcgctcctccaatcctccgtctatcctccgtcaacacttcgttcttcgccgtcactgtcatgcacagcggcacacccgatcgcttcctcccatagagttccttccacttcgaattccttcgtcgcgttagaatcgtcatcgttaaagaccgttaactctatttcgagcgctaagaacaacagaaggaaaggcgttgtcggaaaggtgaggtcgagcctggagacagcgggagcaactgtggggcaggtgacggaggttacaaaggacaccttctggcccatcgttaacgccgcgggggataaaacccgcgtcctcgatatgtacactcaatggtgtggtccatgcaaagttatagc

SEQ ID NO: 7266 - DNA, 246 bp, Gossypium hirsutum
  Clone ID: LIB3120-018-Q1-K1-G1
tctttttctttagctgccttgttttcctctttgacaatggaggaacaaatactagcttcttcttcagctgctgctgctgctgctgctgcttctgcttctgcttctgctactcagcacgatctatcggcttcagctgcttctagtggagctcgctacaagctggtggctccggctaagctaccgatctcaaggtcggcttgtattacgatcccgcctgggcttagtccttcttcttttttggagtct

SEQ ID NO: 7267 - DNA, 296 bp, Gossypium hirsutum
  unsure (1)..(296): unsure at all n locations; Clone ID: LIB3120-018-Q1-K1-G10
cccacgcgtccgaaccccaactattgtttatcatggcttcctcaactttctcccctgcagctgcttcgcagctatgctccggcaagagtggcatgttctgcccatcacaagcgtttcttgtgaaaccaacgaggacccatttggtcaaaaacgaaaagggaatgaggatcacatgccaggccactagcatccccgctgatagagtgccagacatgggcaagaggcagctcatgaatctgcttctgttgggagctatttcactcccctcaggtttcatggngggttcttatgcagca

SEQ ID NO: 7268 - DNA, 408 bp, Gossypium hirsutum
  Clone ID: LIB3120-018-Q1-K1-G11
cccacgcgtccgcccacgcgtccgctactctttcgaaccagctccaccatcacccccaaaagacaaagcaaattgtagaagatggcaacacaagcacttgtatcatcgtctcttacctactcagtggagactgcaaggcagattcttggagctaaacgacaaattgggccttcaaggaaaggatcctttgttgttaaggcagcttcgactccacccgttaagcaaggagctgatagacctttatggtttgcatctaaacaaagcctttcatacttggatggcagccttccaggtgattatggatttgaccccttgggactctcagaccctgaaggtccaagaaggttcatcgagcctaaatggctagcctacggtgagatcatcaacgggcgttatgctatgttgggt

SEQ ID NO: 7269 - DNA, 272 bp, Gossypium hirsutum
  Clone ID: LIB3120-018-Q1-K1-G12
atttagctatagcatacactactagtacccactactagcaatggcttcctcaatgatctcaggggctaccattgccactgcctctccggcacaggctaacatggtcgctcctttcaccggcctcaagtctgcctctgctttcccagtcaccaggaaggccaacaacgacattacttctctcgcaagcaatggcggcagagtgcaatgcatgcaggtgtggcctcctactggaaagaagaagttcgagactctctcatccctccccgatccta

SEQ ID NO: 7270 - DNA, 357 bp, Gossypium hirsutum
  unsure (1)..(357): unsure at all n locations; Clone ID: LIB3120-018-Q1-K1-G2
acgcgtncggattattgcgagggaatctccttcaaaaatgagtgcctgccaaccatggtcaactcctacgtggactgctttcctacaggcaattgcttcagcagcaaaagcagatggaactccattgtggatttctgagcaggataaaagaatttttccttccgagtctctggtcacaacacctgaggctgaccggttctgaatctgattatatgcaccatcaaaattaatctttatggattcccactgtggtgcacagcaaaagagtcgactttgatttgggtttaactgctctagcgcccagcacagtcacggaataagtgattcatcgtttcagctccttctccacatcgggga

SEQ ID NO: 7271 - DNA, 292 bp, Gossypium hirsutum
  Clone ID: LIB3120-018-Q1-K1-G3
ggaactttaagctttttcgcattgagaaaccacatcagagggaaaaaaactaatgatttcagggattctctatatatgtctgtggtgacaatgaccactgttggttatggagaccttgtccctcacgatttcctttcacaactggtctgcactggtttcatcaccgtagggatgcttctgtttggaatagtagtgaaactagctgctaaatacttggttttcaagcaacaaaaggtgctgattaatgccctgcacacagctaggaaaatgggtccgatggaagcccttaacg

SEQ ID NO: 7272 - DNA, 316 bp, Gossypium hirsutum
  Clone ID: LIB3120-018-Q1-K1-G4
gcgtccgcccacgcgtccgcccacgcgtccgaaactacacataaaatctgtgcctgcccttttctctgcacacctcgggatatcagtttcgactccactcatcccacgggttgagtaccgagtccatatatcgttaagttcaaggaaggaacttgggcatcatgggtcttaaggcattagactatgagacaatgaatgaaaacgtgaagaaagttcaatatgcagttagaggtgagttgtatcttcgagcttctgagcttcagaaggaagggaagaagattattttcacaaatgttggcaatcctcaagctcttgg

SEQ ID NO: 7273 - DNA, 363 bp, Gossypium hirsutum
  Clone ID: LIB3120-018-Q1-K1-G5
ctcagttttcgttatttttcttctttgttctttacattcttttcgtctacacaacagataggtagtaatggccggtaaaggagaaggtccagctatcggtatcgatctcggtacaacttattcttgcgttggtgtttggcaacatgaccgtgttgaaatcatcgctaacgatcaaggtaacagaacgacgccgtcttatgttggttttactgataccgagcgtttgatcggagatgcagcaaagaaccaggttgcaatgaacccgattaacaccgtcttcgatgctaagaggttgattggtcgtagattcactgattcttcagtgcaaagtgatatcaaattgtggccattcaaggtcatagc

SEQ ID NO: 7274 - DNA, 338 bp, Gossypium hirsutum
  Clone ID: LIB3120-018-Q1-K1-G6
atcggaatcaatggattcggaaggattggacgtttggttgcgagagttgctctccaaagcaatgatattgagctcgttgctgttaacgatcctttcatcaccactgattacatgacctacatgtttaagtacgacagtgttcacggtcaatggaagcaccatgaacttaaggtgaaggactcaaagaccttgctctttggcgaaaggcctgtcactgtttttggcatcagaaaccctgaagaaatcccatggggtgaaaccggcgctgattatgttgttgagtctaccggtgttttcacttgacaagacaaagctgctgctcacttgaaaggtggtgc

SEQ ID NO: 7275 - DNA, 250 bp, Gossypium hirsutum
  Clone ID: LIB3120-018-Q1-K1-G8
aaggtaagaaaaccgcggggctaaaaggctaacccgggaccaatcccccgacccggcgggggcaatggggccaatccatgtcaattccaccatcatgtcgctcgacggtcggcagccgttaaaaaccgaacctgagattaaagacgacggtaagttgcatgttacggttcgaaaatctaatgcttcgaggtctgatattttttcgagaaggccacaaggtttgtcttcaactaccccccggccatcgaat

SEQ ID NO: 7276 - DNA, 435 bp, Gossypium hirsutum
  Clone ID: LIB3120-018-Q1-K1-G9
gccatgcgtttgcctctcaatactccaagggatgggtgttgcccagttcgcctgaatcgacgtctatgtgcgttaaggagcggttgtggttgcaagcaagggtctattcatggaagctttaactgtcaatctcgagtttcatcgccgctgggaaggcgggattatgcggcggtggcaggggaagtggcaagcatgcgagagaatagagaatcatcgtacggtggattcaccaacagaagtctcttgggtccaccggcaagaaagtccattgatgtttctggcttttacccttctcaccaatcactttctcaacacaatttgcaggccagtcaagttcaacaattgaagcaacaacagctaatgaaacaactgaaacatcaacatcagtatcagcagaactacagccatgtgttccaaaataaaggaaggaatagt

SEQ ID NO: 7277 - DNA, 81 bp, Gossypium hirsutum
  unsure (1)..(81): unsure at all n locations; Clone ID: LIB3120-018-Q1-K1-H1
cgacccacgcgtncgggagattactgtacattctccattacatttcctttactaataaactatgttccatagacttggtct

SEQ ID NO: 7278 - DNA, 267 bp, Gossypium hirsutum
  Clone ID: LIB3120-018-Q1-K1-H10
cttccatcaacggttggtgccttacctccttttcttcctccaccaccacctcctctttttgcgctcgtcgacgacctacattgcggccttcggtcgtcgctagccttaactcttctccttctcctccgactcttatccaagaccgcccggttttcgctgcccctgttcctttgctcaccccgagagaagagatgggaaacaagtcctacgacgaatccattgaagctctcaagaaacttctcagtgagaaaggagaactgaaagctg

SEQ ID NO: 7279 - DNA, 429 bp, Gossypium hirsutum
  Clone ID: LIB3120-018-Q1-K1-H11
gagaaaggaaaaataatcccatcatcatcaacaacagcaatgcttcacattttcctccttttctcccttatcttctcttccaccaatgtcctcgcccaggacttttgtgttgcgaacacggcttcgggcattgttaccccatcaggttacccttgcataatggaagcaaatgtaacctccgacgacttcgctttttcgggtctcggtctcccaggtaatacgtcgaacatcataagtgcagctgtgacaccagcattcgttggtcaatacccagccgtcaacggactaagcctgtccgccgcaaggctggacttggctccgggtggtgtaatcccaatgcacactcaccctggtgccaacgagctcctttacgtggtccatggtcacaatacttgtgggttcatttcatcggctaataaagcttacttg

SEQ ID NO: 7280 - DNA, 277 bp, Gossypium hirsutum
  Clone ID: LIB3120-018-Q1-K1-H12
cccacgcgtccgcccacgcgtccggaaggcatgttaggtgcatggctgtggggacagcaccgtaggcagaaaccaagaaaagtgggttcgaaatccaaacactaacaggttggttgttgaagcaagaacaggcgggtactattgatgctgagctcactattgtcctttccagcatttccatggcctgtaagcaaattgcttctttggttcaaagggctagcattttaaacttgactggcgttcaaggagctgtcaacgttcaaggagaggatcaaaa

SEQ ID NO: 7281 - DNA, 318 bp, Gossypium hirsutum
  Clone ID: LIB3120-018-Q1-K1-H2
agcaatcctttgagagctccgggatccattgtcaccatgtcttgctcaaatctgacggtgtgggtgtcctcaaaaccctgtctttctgacacttcttcactctctttccgatctttcatcagcccttttcagctcccatctcagagctcaacccccggtaacccttccaggtcctcatctgtaaccccagttcactgtggtcttcgtgagcttagagaccgtattgattcagtaaagaacacgcagaagatcactgaagccatgaaacttgtggctgctgctaaagttaggagagcacaagaaagctgtgtcaatggc

SEQ ID NO: 7282 - DNA, 283 bp, Gossypium hirsutum
  unsure (1)..(283): unsure at all n locations; Clone ID: LIB3120-018-Q1-K1-H3
gcgtncgctttagagtaaatttctcttgcaatcctttgtagagatccgggatccattgtcaccatgtcgtgctcaaatctgacaatgtgggtgtcctcaaaaccctctctttctgacacttcttcactctctttccgttctttcatcagcccttttcagctcccgtctcagagctcaacccccggtaacccttccaggtcctcatctgtaaccccagttcactgtggtcttcgagagcttagagaccgtattgattcagtaaagaacacgcagaagatcactg

SEQ ID NO: 7283 - DNA, 269 bp, Gossypium hirsutum
  Clone ID: LIB3120-018-Q1-K1-H4
gttccttaaacaggatcctttagggcttttattcatttttgaggcgactctgaagcttttagcgggggctttttcttctctcttcagatccaccgccgctgcctccgcctctctcatcgaggccgcctccgatcggtctgacctatatctctcaccctctgatcgcctcaaggtttccagccttggttttggaggaaatttcaactccttttttggtgcctctgtttcaactagatcttcttcattacagaaatgcaactcaaggagca

SEQ ID NO: 7284 - DNA, 302 bp, Gossypium hirsutum
  Clone ID: LIB3120-018-Q1-K1-H6
gcggagggagaaatgaaggtttagcagattacatccgaaactctactcaaagtaaaacagtctaaataagacttggttcttttctgggaagacattgttcattgtcttaaaatgatgatgtactttgagctcaacgtcggtggggtgattcgatacttatttctttccactataaattgatcagcgcaacagattcaggttggaagattcgactatctgaagaatgtaactgtggtgataacagagagcatgcctttcaattcatagacatgcactgcatctgactgttcgggggacatata

SEQ ID NO: 7285 - DNA, 314 bp, Gossypium hirsutum
  Clone ID: LIB3120-018-Q1-K1-H7
gcggtggtcgcaagttgcctgtgatcagagcccagcaggctaaattttctgattccaaaggatcaggtgccagtgaaggaagaagagctgctgtgctctacttggcagctggccttttcaccacagctgttgcttcttctgcaaatgctggggtcattgacgagtaccttgaaaagagcaaagctaacaaggaattgaatgacaagaagaggttggcaacaagtggagcaaacttttccagagcatacactgttcaatttggcacttgcaagttccctgagaacttcactggctgccaggatcttgcaaagcaa

SEQ ID NO: 7286 - DNA, 331 bp, Gossypium hirsutum
  Clone ID: LIB3120-018-Q1-K1-H8
cccacgcgtacgctttgatactggaaggcttaaagaagctttgagcaagattcttgtcccagtttaccctgttgctggaaggttggggtatgatgaaaatggaagacttgagataatatgcaacggtgaaggagttttattcgttgaagctgaaactactgcagtcatggaacatttgattggtgcttttgccgagaaccatcaagtgttacgtttagtccctaaagtcgactattctgaaggaatatcttcctatccacttattttattgcaggtaactaagttcaaatgcggtggagtttgtcttggagtatggattcaacatacttta

SEQ ID NO: 7287 - DNA, 345 bp, Gossypium hirsutum
  Clone ID: LIB3120-018-Q1-K1-H9
tcggctatagcatacactactaggacccactactagcaatggcttcctcaatgatctcatggggggcgcattgccactgcctctccggcacaagctaacatggtcgctcctttcaccggtctcaagtctgcctctgctttcccagtcaccaggaaggccaacaacgacattacttctttcgcaagcaatggcggtagaatgcaatgcatgcaagtgtggcctcctactgggaaaaaaaagatttgagactcttttcatacctcccccaatcttacaccccgggccagttggcttaaggaagtaaattacccttcttctgctcaaaaatggggtcccttgccttgg

SEQ ID NO: 7288 - DNA, 448 bp, Gossypium hirsutum
  Clone ID: LIB3120-018-Q1-K2-A1
cccacgcgtccgtaataagcaaggcaatggtttcactatgcttgaattcattgccacttcgaccttcttcatgcccccaaaaacttactgaaacttcctcttcttttagtaatggtagtataggaacagccttgaaacccattgtcgtcaatggaaatcctcccacttttgtttctgctcctggtcgccgtatagttgcagttggagatctacatggagaccttgatcaagcaagatatgcgcttgaaatggctggtgtcttgagttcggatggtcaagacctatggactggagaagatgcggtacttgttcagctaggagatgtgcttgatcgaggagatgatgaaatagctatcttatccttgttgcgatcattagatatacaagccaaggctaaaggtggagctgttttccaggtcaatggaaatcatgaaactatgaatgtgga

SEQ ID NO: 7289 - DNA, 429 bp, Gossypium hirsutum
  Clone ID: LIB3120-018-Q1-K2-A2
attgaacctaaaacctctgtcatctgtccgtctctctgttttactccacaaccactatcagtaccattatgggttcggctactgtttctgtagccaaacccaaccttcagattcaggcaaaaggaaagggcgttggttttgcagatttctcaggcctacacaactcctctactagccttccctttgccaggaaaacctctgatgacttccattcactcgttgcttttcagacatctgctctacgaagcaataatggcgggtacaggaaagggatggcagacgcaaagctaaaggtggctataaatgggtttggtaggattggcaggaatttcttatgatgctggcatggccgtaaggactccccacttgatgtcattgccatcaatgacactggtggtgttaagcacgcttctcaccttctcaaatatg

SEQ ID NO: 7290 - DNA, 421 bp, Gossypium hirsutum
  Clone ID: LIB3120-018-Q1-K2-A3
cacgcgtgcgtgttgacctaatcaattttccctatatgcttctatacattttacttcacatccaccttcagtacctttacgacattgtttactctttctctatccctccccatccttttgatactggcgtacttaaccctcgtatgttttttacctttctcccctctactctgcccacttactttacttccttttacatgcaccatgaatccctctttcatgctctccccgcttacaatacatgattcatcgctaacaacgttgctcgtaacgatctcaaggatgcatacgctacttcaaactcttaatgatgatcctgctaatgaagctgccagccttacctctcatgtcatcatcatcaaccacccttcgcacattgtatacttatattcaccagcccttgattgccatacctcccaca

SEQ ID NO: 7291 - DNA, 390 bp, Gossypium hirsutum
  Clone ID: LIB3120-018-Q1-K2-A4
cgatacatgtatgggtgtagtgcccctgtctcattattgatgggactaggaatgtggagggtcccaccatcaccacgttggttaattctcagagcggttcaaggtaaagggtctttacaagaactcaaagagaaggccatccttgccctaagcaaacttcggggtcgggctccgggtgatgcagcatctgagaaacaaatagaagataccctaatctcagtgaagtctgcctatatggaacaggaatctgaaggaaatatcttggaggtatttcagggaccaagtttgaaagccttcataattggtggaggtttagtcctttttcaacagataactggccaaccaagtgttctgtattatgctggtccaattctacagagtgctggattc

SEQ ID NO: 7292 - DNA, 413 bp, Gossypium hirsutum
  Clone ID: LIB3120-018-Q1-K2-A5
attcatcatcttccatctcttaagacccttccatttgcctgctatggccggtctcctcaagacgctgtcgtttaaatccactcctcttcctcctctatctccatccctaagacccatttccttgaactctccaaggcccttttatgtctgcttcaaacaaagacttcctcgtacacccggtgccctccggttcagcccctctccttctcttcggttcgtaaagttggttccttttgcttctaatggtggtgaaactgaaaccgctgagacccaagaagaagttgaagaacctcaaattgaggactcttcagatggtgctgtcagtgttgaagaggacaccactggagatgagagtaacgactttgaggacacaccatctccaactatcgtgtcattgctccaaacatacaaag

SEQ ID NO: 7293 - DNA, 316 bp, Gossypium hirsutum
  Clone ID: LIB3120-018-Q1-K2-A6
acctttttctttttatttctacaataacgatcattcttccaatcatatgggaataaataggtatccttttattatttaatcgccatatatactacttacaatactattcttactaatttgcatggcctctataagaatcctcttcgtagcttgtacactttcacacaatagagatcgcatttcctactgttgcatgatgtttcttgacccttatatgccatagctcagccctttctgatataaattcaaccaacatatttactttgctactctggaaacaggttataaaaccttgcaaaagggctgtgaagatata

SEQ ID NO: 7294 - DNA, 252 bp, Gossypium hirsutum
  Clone ID: LIB3120-018-Q1-K2-A8
cgcgtccgaagagacctccattgacgtagtaaacagatttcctaccgtcacagcactggctttcatgggcttcttagtggggcacgcagctatgctatctcaggcactggatcatatgagcttactgccaagctcgcttcaacacaattagctgcttccccacttatgagcagaggtcacaagcatcctgtgatcagaaaacagcaagcttaattttctgattgcgaaggatcaccagccatcgaaggaaga

SEQ ID NO: 7295 - DNA, 446 bp, Gossypium hirsutum
  Clone ID: LIB3120-018-Q1-K2-B1
aattgagctccatttccctagtaaacagagttctttttttcacagcaatggcagccatgggctccagtgttttggcatgcaactatgctatctcaggcactggatcatctgagcttaatgccaagcttgcttcagcaccatcagttgcttccccagttatgtgcggtggtcacaagttgcctgtgatcagagcccagcaggctaaattttctgattccaaaggatcaggtgccagtgaaggaagaagagctgctatgctctacttggcagctggccttttcaccacagctgttgcttcttctgcaaatgctggggtcattgacgagtaccttgaaaagagcaaagctaacaaggaattgaatgacaagaagaggttggcaacaagtggagcaaacttttccagagcatacactgttcaatttggcacttgcaagttccctgagaac

SEQ ID NO: 7296 - DNA, 434 bp, Gossypium hirsutum
  Clone ID: LIB3120-018-Q1-K2-B3
ttatcattacgataggtgtcaagtgtaagtgcagtgatgtatgcggctgatgcaggctaacagaccggttattgactttgaaccaaatttgattctctcttgcatcctatcaaatggcagctactgcagcaatcaccactctcccccagttcagtgggttaagacccaaagtttctactgctccagttaggagcctggcagcagttcaaccaatgaggcgcaaggggaagggtgctctcggtgctcgatgtgatttcatcggatcccccacaaatttgataatggtgactacaacaaccctgatgctgtttgctgggaggtttggcttggctccatcagcaaacagaaaggccaccgctggattgaagcttgaagtaagggactcaagcttgcagactggtgaccctgctggttttacactcgctgacactttg

SEQ ID NO: 7297 - DNA, 420 bp, Gossypium hirsutum
  Clone ID: LIB3120-018-Q1-K2-B4
gctgattacaccctcaagctcctccacaggataatccccccagctgtccctggaatcatagtcttgtctggcggacaatccgaggttgaagcaaccctcaacttgaacgcaatgaaccaatctccaaacccatggcacgtctcgttctcgtatgccagagctctccagaacacttgcttgaagacatggggaggcagacctgagaacgttaaggctgctcaggattcacttcttgtccgtgctaaggccaactcacttgctcagctcggcaaatacaccggcgagggagaatcagaggaggccaagaaaggaatgttcgtaaagggatatgtctactaagctgctgcaaacaaagcttagctgagatgatggaaatttcatgatatgggttctctttcattctcaatggggttaaaggtc

SEQ ID NO: 7298 - DNA, 401 bp, Gossypium hirsutum
  Clone ID: LIB3120-018-Q1-K2-B5
cccacgcgtccggttttgatggggaaggaacagagcttagatgagacttggaactccatggctaattctggaagtgaaagaacgcctctcttgaacaaggatgcaagtaatcaaacaaatgggcaacaagcaactgaaaagtctctgtcagaccttgagcaaggcaatgcagaagaagcagtcaatgttggattttggagagtatttgcactggcaaagccagatgcttggaagatatttgttgccacctttgcattattgatagcatccactacaaatctcttgattcctaaatatggtggaatgatcatagacattgtttcaagagatataaggacacctgaacagcaatcataggccctggaagctgtcaagaatactgtaacatacattgtgctgat

SEQ ID NO: 7299 - DNA, 280 bp, Gossypium hirsutum
  unsure (1)..(280): unsure at all n locations; Clone ID: LIB3120-018-Q1-K2-B6
gcgtgcggccagtcttaccataacatttcttgaaacttacaatctctcacttnttgagaaactaaagttcgatttcgatggcatttcctgctattaaacccaccaaccctgacttggaggaataccatgaacaccctcacaaaatctggatctctctctcctccaataatgtgaaaaacctcttgaaaacatgtgctgacttacctcgtaacgccaaggataatagacttaagctttatgtaccactgagaatgcccaccattggtctttacatcaacac

SEQ ID NO: 7300 - DNA, 169 bp, Gossypium hirsutum
  Clone ID: LIB3120-018-Q1-K2-B7
tcgaacaaagattcacaatctctctcctttgacctacagataaaggacgcaatagggtaatgacgggactccttggatactggacaataaaatcacactgaacctatcatgatgtcacgaaggctggagcacgctagttgattgatccgaaagattaagaataataaac

SEQ ID NO: 7301 - DNA, 425 bp, Gossypium hirsutum
  Clone ID: LIB3120-018-Q1-K2-C2
cctttcctttccttttctctctctctagcaatggagtcgcgattgttatcacgcgcttctgttatcaccggcttacctcatctcatgccgaagctttcgccggggattgtcaacgtttcgtatgcttcggctaagccgatcggagccgtcggtgaaggcgggaacgtcatatggcggaggcaactaaggccctccttgctactcgaatgctcgtcggttagcaagcgagaggttctgaaaccggtttcggctgccgcgtcgtcaccggccgagggaggaagcgattccgccggggaggggaagatcgctccggttggattcttcgagaagtatcctgctcttgttaccggatttttcttcttcatgtggtacttcttgaatgtaatattcaacattctcaacaagaagatctacaattaccttcc

SEQ ID NO: 7302 - DNA, 432 bp, Gossypium hirsutum
  Clone ID: LIB3120-018-Q1-K2-C3
gaaccagaaaccaaggcaatggcttctcttgcaaccttagctggtgttcaaccaacgaccgtcaagggccgtggtggcagctctctcaatggaaccaagctcttggtgaagtcaactcgccagagtttcaaacccaaaaactacagggctggtgctgtggtagcaaagtatggtgataagagtatatactttgatttggaggatattggcaacacaactgggcaatgggacttgtatggatccgatgcaccttcaccgtacaacccactccagagcaagttctttgagacatttgcagctccatttaccaagagaggattgttgctcaagttcctgatcttgggaggcggttccctcggtctttacctcagtgccactgcttccgatgaccttctaccgatcaagataggtgcgcaactcccacccaagcct

SEQ ID NO: 7303 - DNA, 99 bp, Gossypium hirsutum
  Clone ID: LIB3120-018-Q1-K2-C4
cccactcgtccgcccacgcttactgctgatggaacttgccgcttcatttaaatcttctgagagacgacccgttactagacttttgagtgttgcaagaag

SEQ ID NO: 7304 - DNA, 398 bp, Gossypium hirsutum
  Clone ID: LIB3120-018-Q1-K2-C5
ccaccatctaccccaaaaaacccatcacattggtgaagatggcaacacacggccttgcatggtgggcctcttacctactcattgaagactggaaggcggcactcttggagctaaacgacgaatggaagccttcaaggaaaggatcctttggggttaaagcagcttctactccacccgttatgcacggagctgatatacctttatggcttgcatctaaacaaagcctttcatacttggataggctccttccaactgattcatggatttgaccccttgcgactctgagaccctgaaggtacaagagggatcatggagcctaaatggctaccctaccgcgagatcattagcgcgcgatatgctctgtcgtatgcagtcagtgcgattgcacctgaaatact

SEQ ID NO: 7305 - DNA, 420 bp, Gossypium hirsutum
  Clone ID: LIB3120-018-Q1-K2-C6
ggaacaacatgaaaacctccctttttttcttgtacttattatctctctcatatttcaatgtaggaaactaaattccctagtcttgtttttgctctatattgtcttttctacattttcatttgatatacttacattctagactttgttgctttaatttatttatttctatttccaggtggtgcaagtatccggtacaagcagaagcgatggtaatgagaacccatttacagccaaagcctcgttgattcgttactggaacaatcacatttccaacaatcttcccaagccaccatttcttatctccaaagcttacccactaaacgccattgacttggccaagctcactcaacttgccaatcataactctctgtcttcccacattgaatctttttgttccttatccaatcttttctgctcatt

SEQ ID NO: 7306 - DNA, 431 bp, Gossypium hirsutum
  Clone ID: LIB3120-018-Q1-K2-C7
gcacaagcaatggcatcgatgactggtttacgtggctcttcacaagctgcgttggaagggagtctccaactcagcggccaaactcggttgaacgttgctagcaccaacaggttggctgtggctagacccggttttaccgttagagctcaacaggtccctgccgagcctgaaactggacgcagagctgtgctgggtcttgttgctgctggtttggctactggctcctttgttcaagctgtgcttgctgatgcacgaagcatcaaggttggcccgcctccaccgccctccggtggattgcccggaactttgagttccgatgagccaagagaccttgatctgccgtacaaagatcggtttttcctccaaccattgactccggcacaagcggctcagagggcaaaggaatcagccaaagacatccttggtgtcaa

SEQ ID NO: 7307 - DNA, 388 bp, Gossypium hirsutum
  Clone ID: LIB3120-018-Q1-K2-C8
cccacgcgtccgcgagaaacttcactggaccttaaaaacatctcttatcctcttctgtttggaatatggagggatagatagatagcccaacacactgtaaaagaaaaaagctctcacaggaaacagcgccaatggctacttgtaccaccacaccttcatcatcgttgatgataacatacgccgccgcatctactgtacacgcccaagccctcacttcttccgttctatccttcaagtccaacaatcctaccttttctattaacccacttgctctcaagacttctatagacagaaaatccggcatcaaatgggctaatctatgtccccagagagattccaagcaccatgtcgtggcttccgtgtctgcggaggctgaagtggctgatgc

SEQ ID NO: 7308 - DNA, 447 bp, Gossypium hirsutum
  unsure (1)..(447): unsure at all n locations; Clone ID: LIB3120-018-Q1-K2-D1
cccacgcgtccgaatttgacccaaaatggcctctgtttgtgcttcttcggctattgcagctgttgccatctgatcccccaggtcccagaagactggatcagtagtggggacaacaaaggcttctttccttacagggaagaaacttacatctgtgagaaagtacacaaaaccagctgccggaccaacatttccagtgtgcgccgtcgccgaccccgacagacccctttggttcccaggcagcactcctcctccatggctggatggcagtctccctggtgactttggtttcgatcctctcggtcttgggtctgaccctgagacattgagatggaacgtacaagcagagctggttcactgcagatgggcaatgttgggagctgctggtattttcatcccagagttcttaaccaagattgtgattntaaacactccatcgtggtactcagc

SEQ ID NO: 7309 - DNA, 418 bp, Gossypium hirsutum
  Clone ID: LIB3120-018-Q1-K2-D2
cggactcgtccgcccacgcgtccgcggactcgtggggtttaaatccattcattctttccaggtagtacgtaatattttaacccccaacccccactatctgtccatctttcagtaagagaaaggaaatggagtttagttcagaggctaaccagcgcattgccaggctcgcagcccatctccaacctcagatggaggaaagttctattttgaggcgagctgactgtagagcgaaaggagggtcaccagggttcaaagttgctatcttaggagcagctggaggcattggccagcctcttgcaatgttaatgaagatgaatcctctcgtctcggttcttcatctttacgatgttgtgaactctcctggtgtcacagctgacctcagtcacatggatactggtgctgtggttcgtggtttcct

SEQ ID NO: 7310 - DNA, 448 bp, Gossypium hirsutum
  Clone ID: LIB3120-018-Q1-K2-D3
ctcattgcctttcaataaaaattgcattttgattttgatccaaagcccttttttttctttgtttaatttgaccttctttttgctactgggcatttgaagtggataatcaatcaatcaaagaaatatcccaaaaccatgtcggcactcttcaatttccgttcattcttaacggtagtgctattgggaatctgcacctgcacttacttgaagatgcaatttccagctatccttgaacagagaactgggttccgtggtttcttttggaaggcagccagaataggtgaacggttaagtccctgggtggctgtaggatgcttcacaatgggtgtctcaataatatttttctgaacaaggagcacaccctctactgttcggaggagggatccaatctttgccgtgtgagctaatgttcttgttgaaatttaacatgtttaaaagtgcttggatg

SEQ ID NO: 7311 - DNA, 428 bp, Gossypium hirsutum
  Clone ID: LIB3120-018-Q1-K2-D4
accactcctacacaacatcttcaatggcagtttgaaaaccatccaaactgcctcataccggggatctgaagcaaatcctgaagagatcttcaagcttatgcaggaaacatggatatgacgaagatgtgctcccacttgacgtaccaaaaggtcactttgccgtttacgttggtgaaaacagaagcagatacatagtccctatctcattcttgacccaccctgagttccaatgtttgcttctaccagcggatgaagagtttgtctttaaccatgatatgggccttaccatccctcgtgaagaagtagtgattagctatctggcatctatgcttagatgaaaatgcggaaaatgaatatattgagttgcgacatgaaagggttctgcctttgcatctgttgagaaagatgaccaatataagcatagcaac

SEQ ID NO: 7312 - DNA, 437 bp, Gossypium hirsutum
  Clone ID: LIB3120-018-Q1-K2-D5
ggggttcaactttaccttttagctttttggtatttccaatcccacgctgcggaaaaacaggctctcctccccctctctcaccctctaatctgatcactgatttcttcgatttcaagttgaagtcaagctgcagctatactgtgattcggttaatatagaattgaaacaatgggggagctgttgggactgctaaaagtggtggttgtgcaaggtaaaaggttggttatccgggattttaagagcagcgatccttatgttatagccaagctcggtgatcaggtagcacagactaaggttatcaacagctgcctcaatccagtatggaatgaagagctcactttctccctcactgaacctgttggagttctaaatttggaagtattcgacaaagatcgtttcaaggctgatgacaagatgggacatgcttatctgaacct

SEQ ID NO: 7313 - DNA, 436 bp, Gossypium hirsutum
  Clone ID: LIB3120-018-Q1-K2-D6
ctctattgagttggaattgaaaaaaggttctctgaaatggcttatcgttctctagtttccggttacaagtgccttttcaggcacccttttcaatcatctgcaaaacccacgtctccttttctctttaaatccctttctccgtttcaaactcaactcgcggccaactctgtcccatctccgagacctgcctcttttcgattcccagtcttccaaacctcacaagttcagcacccaatttaccacatcctgaggaagtacagttctgagtcaccagcatccaagttggatgtgaacaaggaggtggactcgatcaacctcaagtttgcagaggcaagagaagagatagagatggcaatggagtctaaagagaccgtttatttcaacgaagaatcacagtgtgctcgtgctgttgttaaagaggttttggacatgtttg

SEQ ID NO: 7314 - DNA, 439 bp, Gossypium hirsutum
  Clone ID: LIB3120-018-Q1-K2-D7
cggacgcgtggggccgggtcagcctgaaggggtggattttgatcaatatgcaggctatgtggcagtagatccggtggctgatcgagcattgttctatttttttgtggaatcaccggttaattctccgaataagcctctggttttatggttaaatggaggtccaggatgctcgtctttaggatatggagccatgcaagaacttggacctttcagagttaacagtgacggaaaaacgctttacagaaatgaatatgcatggaacaatgttgcaaacgtgatattcctggaatcaccagccggagttggatattcttattccaaaaattcctcagactatacccaagtaggtgacaagagaacagcagaggactcctatgtttttctcctcaactggcttgaaagatttccccagtataagacccgacatctctttataacc

SEQ ID NO: 7315 - DNA, 301 bp, Gossypium hirsutum
  Clone ID: LIB3120-018-Q1-K2-E1
gaaaacgtgctaaaaccaaaaaactaacttataaacggcgtgtgcagctcagcaatccacaggcattagaggaactacactattcttatgtcggctttatgcgaaaccaaatccaacccacacagttggccctcttgcttgttctatatcttcagacctcactgtcttaaatgcacacaccaaacatagtctcgtactcactatgatattcatatattctcactaaagctgttgaactgatcctatggaaggcagagctttcactgttaatgattttaaaactgctcttgctaactatgac

SEQ ID NO: 7316 - DNA, 359 bp, Gossypium hirsutum
  Clone ID: LIB3120-018-Q1-K2-E2
aaaactcttgaccttatctttcctgtaaaatctttcgatctaacgccaacattctattgcgattgaaaggatatattctctacacatccttactaaacttaatcatcacactcttgtaccattcatctgagtccatataactactccaaactccatcatcaatccatttaaaatcataactagtttcccggaaacctagggcttttctctactatggccttttaaccgacctataattcattcatcccttatgtacatcgaaattatccctacaaacatctagattccgcttataattcatactggacagaaaaccgctaatcaacactttatacgaactcatgcctatttattcctac

SEQ ID NO: 7317 - DNA, 406 bp, Gossypium hirsutum
  Clone ID: LIB3120-018-Q1-K2-E3
atttggattctttggaccagaacctggctatgaatatggctggtgagatcattggaactaggaccgaagttgccgacgtgaaggcgacgccgtttcagccttacagcgaggtttttggtctacagaggtttagggagtgtgaattgatccatggacggtgggccatgttggctacgcttggtgcacttaccgttgaatggctcactggtgttacatggcaagatgctggcaaggttgagttagttgagggttcatcgtatctcggccagccccttcccttctcgatgacaacattgatttggatagaagtattggtgatcggattcatcgagttccaaaggaacgccgagcttgaccctgagaagaggttgtaccccggaggaaagtcccttgatcctcttggcct

SEQ ID NO: 7318 - DNA, 437 bp, Gossypium hirsutum
  Clone ID: LIB3120-018-Q1-K2-E4
cgacgacccgaaccaacccggtctcgtgataactgtgaccgaatccattcgcttgtttcttgttgcagcctccaatgaccgtcgtctctctgaagaactccgagaactcgctctcactctttcctcagcagccaatgcaccgtacaagcagatccgaagcatatggatggaatcagcttttgacaccaggcccgaattgatttctctcttctccggatctaatttcgttttcaccagtccaaaacccagagagaagagcgaagaattaaaggagagattaaggaagcttaaagaactagcagagaggaaagagtatcaagagcttgttaaagatatcacgccgaagaaggatctcaatgaacctttctctacttataaggatcaaattggctttggtttacatgttgctctgacaatgtttactgggtatttggttg

SEQ ID NO: 7319 - DNA, 439 bp, Gossypium hirsutum
  Clone ID: LIB3120-018-Q1-K2-E5
cggacgcgtggggtgagcttgtgtttgccaagatgggtatcaaccccatcatgatgagtggcggagaactggaaagtggaaacgccggttaaccatccaagttgatcaagcaaaagtaccgtgaagcttccgacataatcaaaaagggcaaaatgtgcgccctcttcattaacgatctcgatgctggtgccggtcgtatgggaggaaccaaccaatatacacgtaacaaccagatagttaatgctacccttattaacattggcgattaccccaccaacgttcagcttcccggtatgtacaacaaggaagagaacccccgtgtccccattatcgtcactggtaacgatttctccacactgtatgctcctctcatacgagacacgcgtatggagaaattttactgggcaccaactatggacgaccgcgtcggtgtttgcaa

SEQ ID NO: 7320 - DNA, 429 bp, Gossypium hirsutum
  Clone ID: LIB3120-018-Q1-K2-E6
ggaaagatctgatgatcttttataaccgtatgttgaatcacttgtagacaaccaagcgatggggcacgacgttggggagagtcccgtttcgaatttggagataggctttgatggactcctttgggcttaattattaacgattgtgaattgagttcgacaaaaggtcaggggataaaagaaaatcatcactcggaaattatggtcggttttgcgagcagcttcagttcgcctttgccaagtcaaagtttcagagtagcttatgatgctgatttccatggagcccttatcagaataacagagtgccatatcttccttcctttaaccctgtactttgggttataccatttttctaaaaaaaaaaaaaagaaaagaatttggttgtaacagttttccagaattcttgaatgattaaagggagaataatagcat

SEQ ID NO: 7321 - DNA, 378 bp, Gossypium hirsutum
  Clone ID: LIB3120-018-Q1-K2-E7
gagagccttaacattagctctagcactagtttcaaccatggcttcctccgggtgtttctggcaccaccactcactcaccaccaatggcacatcatcatcattaccgccgtcgctacgccagttttgaaacatgaatcctaaccagctcgtggtgtccaaggctcacaatcaggaatatgatggaagccttgtgtccctaaggttgactctcactatactcattgatgctgccgatgttggctctaacgtttctcctgctgatactgcctattgtgaagctacaaatgtatttggaaagccaatatcagacacagatttcttgccatacaatggtaacggattcaagctgtcgataccatcttaatgcaccccaagcaa

SEQ ID NO: 7322 - DNA, 288 bp, Gossypium hirsutum
  Clone ID: LIB3120-018-Q1-K2-F1
ataggcttactgacatggagcttctaagagtcccttttcttcacatcgatgattatgggtgggatttgagactaattgagtaccaaagggacagctatgacgctggacctctcatgagacaacctctttatgatgttcatgttagtaacaagagttctttggtcaatggatacagcaattatctcggttatggacatgagagcaatatcggctataactcgcatgaatacgaaacaagtgaattacatctcgaagatggtcatttgggagatgttggaccttttattc

SEQ ID NO: 7323 - DNA, 423 bp, Gossypium hirsutum
  Clone ID: LIB3120-018-Q1-K2-F2
cccacgcgtccgagaaaattaatgaacatcttctgggcatagtaaaatgcggggaactgggcatcaatgaactgcttgctgccaaacttagtataagtggtaacgatgcacgccatgcagttgaagaaagggatttatgcgagaagttactaaaacagattgaagcgaatgcctatgagttggtagctgaaaagaagaaaataagacatctccttgatgcttacaaaatgctaaaatctcagtacaactacctctgcagaaagaatggtcttactaccgataacatgtctttttcaaataaactggaagatgaaagtgactcagccaggcatcatgacaaatccaaaccttctcttgatgctgaaaacagcattctgaagactcctatggttgtttttggcacaaaaagcatgaaagatgtaa

SEQ ID NO: 7324 - DNA, 345 bp, Gossypium hirsutum
  Clone ID: LIB3120-018-Q1-K2-F3
ggaaaaaagaaaaagaaaagatcaagtgagatttggcatcaaccataccatggctggtttgcgaagatctggagtgtcgtttaggaggcaaggatcttcagggattgtttgggatgacaggtttttgtccgagttaacccatgcaaatcaagaacaacaaggagacaccaagcaagaagaacatgcccaggttgcgcaagacaacaataaccctgaaaaactcgatgctattaaggatgttaagcccacaagaaaccttccacccatcaacaccatcgaaaggagccgatctaatggtgaaaggcgaggttaccgtaccggtaaagtatcccctgctattgagcc

SEQ ID NO: 7325 - DNA, 413 bp, Gossypium hirsutum
  Clone ID: LIB3120-018-Q1-K2-F4
cccactcgtacgataaaatttatgaacaacttctgggcaaagcaaaaagcgtggatctggggaggaatgaactgccaactgccaaacttattacaagcgagaacaatgcacgcaatgcagtcaaagaatggtaattgatgctagaagttactattgcagaatagaaacaatgttgtctgcctctttatctgacaataaaaaaaaaagatagctgcttgatgcttacaaaatggtaaagactaaatacaacaacctcttcagaaagaataggacttactaccgagaacaatgctctttcaaataaactggaagatgaaagtaattcagacatgcataataacaaatccaaacattttcttgattctgaaaacatgattcataaaactcctatagatgattttgacacaaaaagc

SEQ ID NO: 7326 - DNA, 426 bp, Gossypium hirsutum
  Clone ID: LIB3120-018-Q1-K2-F5
cccacgcgtccgcgtaaatggctaccactgcttctccaatggcgactcaggggaagagcgggtttacgtcgtctgttacaagaggactggtagtccccaggggcatttcgggatccccgttcaaagtatcttccggaaagaccaggaccccttgcttcactgtcaaagctgttcaatccgacaagtcaacatttcaagtaatccaacccatcaacggcgaccccttcattggaagcctggagactccaatcacctcaagccccttaattgcatggtacctttccaacctcccagcctatatgacggcagtgaacccacttctgaggggaatcgaagtgggtctggctcacggcttcctcctggtgggtccattcgttaaggccggccctctaaggaacactgcgggggcgggtcaagctgtgtcct

SEQ ID NO: 7327 - DNA, 446 bp, Gossypium hirsutum
  Clone ID: LIB3120-018-Q1-K2-F6
gcagctcaggacagaaaagaaatgctggaataaatcatgcggagaggaacaagctcacttggaacagatgttccaagtgagagggaaatcaatcgacttgcagctcggtcagatgatgagttccggatgtttgagcaaatggatgaggaaagaagagtaaaggagaattatcggtctcgtctcatggaagaccatgaggtacctgagtgggtatttgtacttaatgatgataggaagggcaaaatttcagaaagctatgttgaattagggaagcgaaaaagaaaaggtgggaactattatccagatacattaagtgacttacagttcatgagggctgtggaaaatgcagaagacatggcaaagaagttaccaagcaaaaggaagagaaaagaccatcttccagctgatgaggactccgagttgcctattaataacataggagtaga

SEQ ID NO: 7328 - DNA, 377 bp, Gossypium hirsutum
  Clone ID: LIB3120-018-Q1-K2-F7
cccacgcgtccgcccacactttcggtgcgccataaggcaaggacgttctcgggaaacatagcggttttgcttcagctaacgtcagcctcactccgtactaatcatgcagcaattatgcatagcttgtgattagcagttgatggacagctaataactgataaaaactagctgctcaagtttggctactctgttgttgctattaattattataacccattgtctactgctgaaccggcctttatactttcatggctggatatcaagctagcaatatccaacaatgcatgtaattttagtcttagataatatcctgtgtctaccttctccttgcatttgaaaaactaaaactcgcttctttaatcaactactattagttt

SEQ ID NO: 7329 - DNA, 395 bp, Gossypium hirsutum
  Clone ID: LIB3120-018-Q1-K2-F8
ggattattgcgagggaatcttcttcaaaaatttgtgcctgcctaccatggtcaactcctacgtgtactggtgtgctacatgcaattgcttcagcaacaaaagcatatggaactccattgaggatttctgagcaagataaaagaatttttccttcctagtctctggtcactacacctgaagctcaccggttctgaatctcattatatgcaccatcaaaattaatctttatggattcccactgtgatgcacaggaaaagaatcgactttgataggggtttaactgctctagcacccagcacattctcaaaataaatgattcatagtttcatctccttcttcacatatatgacaccacgtgttgactgcttatttccggtgatgtagatatacctttg

SEQ ID NO: 7330 - DNA, 438 bp, Gossypium hirsutum
  Clone ID: LIB3120-018-Q1-K2-G1
tctttttctttagctgccttgttttcctctttgacaatggaggaacaaatactaccttctgcttcagctggtgctgctgctgctgctgcttctgcttctgcttctgctactcaacacgatctatcgccttcagctgcttctagtggagctcgctacaagctggtggctccggctaagctaccgatctcaaggtcggcttgtattacgatcccgcctgggcttagtccttcttcttttttggagtctcctgttcttctttcagatgttaaagcagagccttcaccgactactggttctctcattaagcctcacgcagtgcatggctctgttaattctagtacatattcagtgactgctgcgtgttctaatgcttttgatgaaagaaatccaagctgctttgagcttagaccccatcctagatcaaatctggcacctgca

SEQ ID NO: 7331 - DNA, 405 bp, Gossypium hirsutum
  Clone ID: LIB3120-018-Q1-K2-G2
tatcaatgaattatgaatgactggccaccatgttgcaagagtagctctacaaatgaatgttattgagctcgcttctgcaaacaatccttttatcaccacttattacatgacctacatgtttaagtacgacagtgctcacggtcaatggaagcaccatgaacttaaggtgaaggactcaaagaccttgctctttggcaaaaggcctgtcactgtttttggcatcagaaaccccgaggaaatcccatggggtgaaaccggcgctgattatgttgttgagtctaccggtgttttcactgacaaagacaaagctgctgctcacttgaaaggtggtgcaaagaaggtggtcatttctgattccaggaaggatgcccccacgtttgttgtgggtgtcaatgaaaaggaata

SEQ ID NO: 7332 - DNA, 386 bp, Gossypium hirsutum
  Clone ID: LIB3120-018-Q1-K2-G3
cgaccacgcgtccggaactttaagctttttctcattgagaaaccacatcagagggaaaaaaactaatgatttcgttgattctcgatatatgtctgtggtgacaatgaccactgttggttatggataccttgtgcctaactaattcctttcacaactggtctgcactggtttcattaccgaatggatgcttctgtttggaataatagcgaaactagctgctaaatacttggttttcaagcaacaaaaggtgctgattaatgccctgcacacagctaggataatgggtccgatggaagcccttaacgagattgaaagcatagaaatagactacaccaagtgtttaatatcattgatcgctatggcggtgcattttgtcatcggaatct

SEQ ID NO: 7333 - DNA, 452 bp, Gossypium hirsutum
  Clone ID: LIB3120-018-Q1-K2-G4
cgcgtccgccacgcgtccgcccactcttccgaaactacacataaaatctgtgcctgcccttttctctggacacctcagaatatcattttcaactccactcatcccacgggttgagtaccgagtccatatatcgctaagttcaaggaaggaacttgggcatcatgggtcttaaggcattagactatgagacaatgaatgaaaacgtgaagaaagttcaatatgcagttagaggtgagttgtatcttcgagcttctgagcttcagaaggaagggaagaagattattttcacaaatgttggcaatcctcaagctcttggacagaagccactgactttccctcgccaagtggttgctttgtaccaagctccatttctgctagatgatcctaatgtaggacttatattttctgctgatgccattgcaagagcaaaacattatcttttcgtgacttct

SEQ ID NO: 7334 - DNA, 421 bp, Gossypium hirsutum
  Clone ID: LIB3120-018-Q1-K2-G5
ctcagttttcgttatttttcttctttgttctttacattcttttcgtctacgcaacagatgggtagtaatggccggtaaaggagaaggtccagctatcggtatcgatctcggtacaacttattcttgcgttggtgtttggcaacatgaccgtgttgaaatcatcgctaacgatcaaggtaacagaacgacgccgtcttatgttggttttactgataccgagcgtttgatcggagatgcagcaaagaaccaggttgcaatgaacccgattaacaccgtcttcgatgctaagaggttgattggtcgtagattcactgattcttcagtgcaaagtgatatcaaattgtggccattcaaggtcatagcatgacctggtgacaaaccaatgattgtcgtcaattacaagggcgaggagaagcaattt

SEQ ID NO: 7335 - DNA, 341 bp, Gossypium hirsutum
  Clone ID: LIB3120-018-Q1-K2-G6
atcggaatcaatggattctgaaggattggacgttcaggttgcgagagttgggctccaaagggatgatattgagctcgtttcttctaaccatccttttatcaccacttattacatgacctacatgtttaagtacgacagtgttcacggtcaatgttagcaccatgaacttaaagcgaaggactcaaacaccttgctcttttgctaaaggcccgtcactggttttggcatcagaaacccttgagaaataccatggggtgaaaacggcgcttattatattgttgagtctaccgatgtttttactgacaaagacaaagcttttgctcacttgaaaggtggtgcaa

SEQ ID NO: 7336 - DNA, 121 bp, Gossypium hirsutum
  Clone ID: LIB3120-018-Q1-K2-G7
atcagaataaattcaattttttcatttatgtttacattctccacatctacggatcacttagatctttttgtcacataaacaatattatccatttatttttatatctctttcatcaactcat

SEQ ID NO: 7337 - DNA, 345 bp, Gossypium hirsutum
  unsure (1)..(345): unsure at all n locations; Clone ID: LIB3120-018-Q1-K2-G8
natgttttaatatcacctttttaaaatacttatctctgaacaattccccggcactactgggtctattgtgtctatccatgttcattccaacatcatgtttctcgaccgttgtaaacctttataaaccgaagctactattaaatactaccgtttattgcatgttactgttcgaaaatgtaatacttcgacgtcttatattttttttagaacgtcacaaagtttgttttttactaccccccggccatcgaatttaactaatgctaagatttactctttactatcatctacgaatccaacacctagaagctccagtcttatccatactgatttttattttatgatgac

SEQ ID NO: 7338 - DNA, 88 bp, Gossypium hirsutum
  Clone ID: LIB3120-018-Q1-K2-H1
gcgggagatttctgttcattattcattacattttctttactaataaactatgtcccatatacttgttctaaggggaatattttttgag

SEQ ID NO: 7339 - DNA, 429 bp, Gossypium hirsutum
  Clone ID: LIB3120-018-Q1-K2-H2
cgtccgttttgcaatcctttgtatagctccgggatctattgtcaccatgtcttgctcaaatctgacgagtgtgggtggcctcaaaaccctctctttctgacacttcttcactctctttccgttctttcatcagcccttttcagctcccatctcagagctcaacccccggtaacccttccaggtcctcatctgtaaccccagttcactgtggtcttcgtgagcttagagaccgtattgattcagtaaagaacacgcagaacatcactgaagccatgaaacttgtggctgctgctaaagttaggagagcacaagacgctgttgtcaatggcagacctttctctgagtccctggttgaagttctttacaacatcaatgaacagctccagactgaagacatagatgctcctctcacaaacgtcaggcctgtca

SEQ ID NO: 7340 - DNA, 421 bp, Gossypium hirsutum
  Clone ID: LIB3120-018-Q1-K2-H3
ctttagagtaaatttctcttgcaatcctttgtagagatccgggatccattgtcaccatgtgttgctcaaatctgacaatgtgggtgtcctcaaaaccctctctttctgacacttcttcactctctttccgttctttcatcagcccttttcagctcccgtctcagagctcaacccccggtaacccttccaggtcctcatctgtaaccccagttcactgtggtcttcgtgagcttagagaccgtattgattcagtaaagaacacgcagaagatcactgaagctatgaaacttgtggctgctgctaaagttaggagagcacaagaagctgttgtcaatggcagacctttctctgagtccctggttgaagttctttacaacatcaatgaacagctccagactgaagacatagatgctcctctcac

SEQ ID NO: 7341 - DNA, 375 bp, Gossypium hirsutum
  Clone ID: LIB3120-018-Q1-K2-H4
cttgtcttcttttttttttttttccttaaacagtatcctttagggtttttattcatttgtgattctactcggaagcttttagcaatggctttttcttctctcttcaaatccaccgccgctgcctccgcctctctcatcgaggccgcctccgatcggtctgacctatatctctcaccctctgatcgcctcaaggtttccagccttggttttggtggaaatttcaactccttttttggtgcctctgtttcaactagatcttcttcattacagaaatgcaactcaaggagcatccagcccatcaaagctacagctactgaaattcctcctacagttccaaagtcacggagcagtggcaagacaaagattggaatcaat

SEQ ID NO: 7342 - DNA, 299 bp, Gossypium hirsutum
  Clone ID: LIB3120-018-Q1-K2-H5
cacaacacacccactggtgttatcgtgtgtcacctacggagtccacactaccctctatatcttacactctaaacaacaaatttgcccttcataaaaaagactctttatttttaatgtaacttctactccacccgttaagcaaggagctgataaacctttatcgcttgcatctaaacaaatcctttcatacttgaatggcatccttccaggtgattatggatttgaccccttgtgactctcaaaccctgaacgtccactaaggttcatcgagcctaaatggctatcctactgtgagatca

SEQ ID NO: 7343 - DNA, 421 bp, Gossypium hirsutum
  Clone ID: LIB3120-018-Q1-K2-H6
gcggagggagaaatgaaagtttagcaaattacatccgaaactctactcggggtaaaacaggctaaatacgttttggttcttttctgggaagacattgttcattgtcttaaaatgatgatgtactttgatctcaacgtcggtgggttgattcgatacttatttctttccactttaaattgatcagcgcaacagattcaggtttgaagattcgactatctgaataatgtaactttggtgataacagagtgcattcctttcaatttcatagacatgcactgcatctgactgctctggtggacatatattcaacttagctataagcttaatctagaaatagccttgaggttcaatcactgaactgccatcgaacatctgtgattctcattgttgacttctacatttctacaatattttggtatct

SEQ ID NO: 7344 - DNA, 327 bp, Gossypium hirsutum
  Clone ID: LIB3120-018-Q1-K2-H7
tctctacttgtcatctagccttttcaccacatctgatgcttcttctgcaaatgctggggtcattgactagtacctctaaaagagcaaaactaacacggaatcgaatgacaagaagaggctgtcaacaaattgagccaacttttccagaacatacactgctcaatttggcacttgcacattccctgagaacttcactggctgccaacatcttgccaagcaaaatatagtaccattcatctcttatcatttggccttggaatgtgaacgtgaaagacaaatacaagctgttgtccaacgtactctggaaatggtgataccatccaaatg

SEQ ID NO: 7345 - DNA, 424 bp, Gossypium hirsutum
  Clone ID: LIB3120-018-Q1-K2-H8
cccacgcgtacgctttgatactggaaggcttaaagaagctttgagcaaggtgcttgtcgcgttttaccctgttgctggaaggttggggtatgatgaaaatggaagacttgagataatatgcaacggtgaatgagttttattcgttgaagctgaaactactgcagtcatggaacatttgattggtgcttttgccgagaaccatcaagtgttacgtttagtccctaaagtcgactattctgaaggaatatcttcctatccacttattttattgcaggtaactaagttcaaatgcggtggactttgtcttggagtaggtattcaacatactttatgagacagctcagcggctcttcatttcatcaatagttgggctgacacttcacagtgctggactcctgccattgcaccattcattgatcgaact

SEQ ID NO: 7346 - DNA, 427 bp, Gossypium hirsutum
  Clone ID: LIB3120-019-Q1-K1-A10
cccacgcgtccgataagcaataattttggcctgcactttgctgacaaaatccatctccgcttctgtaataaaacccttgcctatgaactaaccgtaattttaatttttctttttttaatgttttaaggggtgggtatttcaatgcattccttttcctctcatccattaccaacaagattttatattctttaaaaggattacccttgtttatcttaaaatacagggtagggtttggtttctcttttttgattttttcctcttccatatttgcttactccaaatggatgtttcgcttcgatagccaatagtagcaaatatgctctatttaagggatctttggagaaggcataggaggaaggttttggttacagcaggtgttttaggaagtgggtatttggtgtataaactatatgatgctcacaaacgt

SEQ ID NO: 7347 - DNA, 440 bp, Gossypium hirsutum
  unsure (1)..(440): unsure at all n locations; Clone ID: LIB3120-019-Q1-K1-A11
gatgaagggtttaaggttcgagttgtctccccagacaaggatttctttcagatcctatgtccttcattacgcctactacgaattgcaccacgtggctatgagatggtttcatttggaatggaggatttctcaaaaagatatggagatctgaaaccttctcagtttggtgatgtagtctctcttgtgggtgatagatgtgataatatcccaggagttgatggaattgggaatgtccatgctgttcaacttatcactaagtttggcacattggagaatttactgaagtgtgttgatgaagttgaagtggaccacatcaggaaggcctngatagcanatgctgatcaagccgtcttaanngcaaaacttggcatgctgagatgtgatctttcattctatatggtaccatttttcaaccagagatctcacatttaataaacccg

SEQ ID NO: 7348 - DNA, 365 bp, Gossypium hirsutum
  Clone ID: LIB3120-019-Q1-K1-A12
cctttgtttgctctccaataccctctctaggaagtaggaatgccaaaaatatctctttaactccacaactcgagactcttaaaagagattattattttccatcctttctctctttctctcaattaatcaggccatgagtatttaatcatcgtcgtcttcatcagcttcttcatcgtatctctctttcgaatacgttttatagaaagaaacaagaagaaggtaaagagggttacatggcgtttcaccccaaccatctttctcaagaccttcctcttcatcacttcaccttccaacaacaacaaacgaaccaactacctgaaaccacagctcccaattggttaaacacggctctcctccgttcccag

SEQ ID NO: 7349 - DNA, 424 bp, Gossypium hirsutum
  unsure (1)..(424): unsure at all n locations; Clone ID: LIB3120-019-Q1-K1-A2
cccgaattgaccgcacgcgtccagcccacgcgtccggacacagtgtctgaggcgtgcatttgccttcaagataacaacatancgtacaatgggctcatctctgattgtggaaagcgcatcttcctcctccctcagtgttatgctgagaaacaagctcttggggaagtgagcgtagagcttttggacacccacgtgaacccggctgtgtgggaaattagtggtcatatggtgttgaagaggaggaaggactatgatgaggcgtccgacgaaaatgcttggaggctacttgcagaggtatctctctctgacgagaggtttgatgaagtgaatgcacttatctttgaagccattggcgggggcaaagatgcaactgaaaatgttgaggagcctgatacaaaaactcaatctattgaaaaagaaaatg

SEQ ID NO: 7350 - DNA, 344 bp, Gossypium hirsutum
  Clone ID: LIB3120-019-Q1-K1-A3
gctaaacgtccggtctctgtctttgtggacggcagcgttcgccatgaaaccaacttctttagagcttgggccatgtgagacggtggtatatttatcgtgcgaccattggtggttttactggctactaaaagcttagctaacagggggtaagtcctttcgacactcagccaggagtgcaagctaaccatcactatgagcagatggcgttcgattaaagaaatgactcttgaccacattgcgacaaaaatggacagtggatactctcatacggtcccgaccctgaagagccctatatattatgggcctgccactttatcctagcgaatggcaaggagaacttaggt

SEQ ID NO: 7351 - DNA, 352 bp, Gossypium hirsutum
  Clone ID: LIB3120-019-Q1-K1-A4
cccacgcgtccgcacggtgcagtactaagactccagtttctgaaaaaccacttcctcttggcatcaataaacaaatttgggcagcttcattatcaggatgttacaatgggtgagatggtaggcaatttccggactggtttaggccgcactgatgttatgcaggtcaatccatttaacggagttgttgcattgggtcattctagtggtacagtaaccatgtggaagcccaccagttctgtcccacttgtaaagatgctatgccatcctggacctgtctcatcattggcgttccatccaaatgggcatctcatggctacatctggtaaagaaaataaaatcaagatttgggact

SEQ ID NO: 7352 - DNA, 444 bp, Gossypium hirsutum
  Clone ID: LIB3120-019-Q1-K1-A5
cccacgcgtccgcatttggtgggatttttaacgcaacaaagaagctatgtggcagttccatcaacgaatccttctcgaaaacaactacaccaacagtacccacgacgacaaacggcactagaaacgatcaccatggaagtactgccggtagtaccaccaccaccaccaccactcagggtggtgatcaaggcttgacaagagatttcttgggtcttcgagctttctctcataccgatattctcaacattgccggtcctggtcgtaattactgcatcgacacttcgcaagaacaacacaaccagtctcaaaaaccatggcaaggttaggtaatatagcaactcttttttgttcaaatgctatatcttaaaatttataagcacctttttcggaatttattcctgttctttatctttaattaaattccttctaccttttgctacaatc

SEQ ID NO: 7353 - DNA, 451 bp, Gossypium hirsutum
  Clone ID: LIB3120-019-Q1-K1-A6
tatatttactgcacgcactacttggctaaactgttgtagctagttgtatgtaacatgcattatgcatatgccataatgagatgatactttagcctttctaaagttttgggcgtattagttattatttagtgtgcttatgatcttgatttttgttattgtgctttgatagatgcagtccggtggacatgggacaacttttctatgacaagggtctcaatttggaaagttgttggcattttgtgctattcggaagttaaataaattatattcccctacgtggtggaaaataataaaagcatttatcaagggaaagtgagaactttcatactatgataaacattttctaacaagactactgctatcgtatgaaggttctgaatttgctagcattatgttaacccttagatgtggggcttggagcacagaatgtcttgtgtctggctgaactaaa

SEQ ID NO: 7354 - DNA, 426 bp, Gossypium hirsutum
  Clone ID: LIB3120-019-Q1-K1-A7
cccacgcgtccggggtgacatccccacctatgttgttggagtgaatgctgacacctacaacccagatgagcctatcatcagcaatgcttcttgcaccaccaattgccttgctcctttcgtcaaggttctggaccagaagtttggtatcatcaagggcaccatgactaccactcactcgtacaccggtgaccagaggctacttgatgctagccaccgagacctcaggcgtgctagagccgcagctctcaacatcgtcccgacttcaactggtgcggcaaaggccgtggcccttgtactccctactctcaaaggcaaacttaacggcatcgcattgcgtgtaccaacaccaaatgtgtcggtggtggacctagtggtccaggtttcaaagaagacgtttgctgaagaggtgaacgctgctttcaaaga

SEQ ID NO: 7355 - DNA, 411 bp, Gossypium hirsutum
  Clone ID: LIB3120-019-Q1-K1-A8
cccaagcgtttgtggacgcgtgggcggacgcgtgggccccatccctttattaaggctgctattgaacctaggactagagctgatttctataaaatggctaatggtttgatcaagcttgctcaagaagacccttctttccacttctcacgggatgaagacatcaaccagaccgtaattgaaggaatgggagaattacatctcgagattatcgttcatcgtttgaagagagagttcaaggtccaagccaatgttcgtccaccacaagttaattaccgggaaagtatttccaaagtttcataagtgaaatacgtacacaagaaacaatcatgtggacaagggcagtttgctgatattactgttcgtttcgagcctatggaagcaggtaatggatacgatttcaagagtgaaatc

SEQ ID NO: 7356 - DNA, 365 bp, Gossypium hirsutum
  Clone ID: LIB3120-019-Q1-K1-A9
tttgctttcagttaacaacaaaatccgtaaatggctaccactgcttctccaatggcgactcagctgaagagcagctttaggtcgtctgttacaagaggactggtagtccccaggggcatttcgggatccccgtttaaagtatcttccggaaagaccaggaccccttgcttcactgtcaaagctgttcaatccgacaagtcaacatttcaagtaatccaacccatcaacggcgaccccttcattggaagcctggagactccaatcacctcaagccccttaattgcatggtacctttccaacctcccagcctataggacggcagtgaacccactttctgaggggaatcgaagtgggtctggctcacg

SEQ ID NO: 7357 - DNA, 435 bp, Gossypium hirsutum
  unsure (1)..(435): unsure at all n locations; Clone ID: LIB3120-019-Q1-K1-B1
attttctctcaaagttcactacttgtgtgcagacaaaaatggcttttgctgggtttttcttgttgggtttactttcaatggtctcagctgttcatggatatggtggtggatggactaatgctcatgctactttctatggtgggagtgatgcttcaggcacaatgggtggtgcttgtggttatgggaacctgtatagccagggatatgggacaaacaccgcagctttgagcacagctctgttcaacaatgggcttagctgtgggtcttgctatgagattaagtgtgtgaatgatggcaagtggtgcctgcctggttccattgtggtcactgctaccaatttctgccctccaaacaatgctctcccaaacaatgctggtgggtggtgcaaccctcccctgcaacactttgacctttctcagcctgtcttncaacaca

SEQ ID NO: 7358 - DNA, 449 bp, Gossypium hirsutum
  unsure (1)..(449): unsure at all n locations; Clone ID: LIB3120-019-Q1-K1-B10
ctatgaaaatcaccattacaagtcccaaagaagacccccgctaattctaaaagaaagaaccggagttttctttctctttagttgacgtttattgtccttttggaatttttgatactaaaaaaaggaagcaacgaagaagggaaatggagggcaaagaagaggatgttagattgggagccaacaagttcacagagaggcaaccaattgggaccgcggctcagagtcaagatgacgggaaagactacactgaaccaccaccggctccatttttcgagcctggcgagttaacctcatggtctttttatagggctgggattgccgagtttgtggcgactntccttttcttggatatcactattttgacttgtatggggagtgttaaggaaaaaactaagtgcccaactgttgggattcaaggaatngcttgngcttttcgtggtatgatcttt

SEQ ID NO: 7359 - DNA, 456 bp, Gossypium hirsutum
  Clone ID: LIB3120-019-Q1-K1-B11
cccacgcgtccgatgagaggccaatatagagggaaagaagaggcatgaagaacacaatccggtgctgcatctcttgcattctgccctgtggagcactcgatgtgattcgaatagtacactccaatggccgcgttgaagaaatcagtggctccatcaaagccagcgacatcatgaaggcttaccctaaacacgttctaaagaagccttcctcttcttccgatgatgggatggtcccaaaaatcgtcatcgtcccacccgacgccgaacttcaacgtggcaagatttatttcctaataccactcccttcaacacccgataaaacccgttccaaaacttcctcaacaaccaagaagaaaaaaagagacaggcttgacaccaccaacaacaacaacggccggggcgccagcagcaacggccgcacccgccagcataatcacagtcgaagcatgagcaacg

SEQ ID NO: 7360 - DNA, 448 bp, Gossypium hirsutum
  Clone ID: LIB3120-019-Q1-K1-B2
gaaggcaggactctcagactactctttcgaaccagctccaccatcacccccaaaaaacaaagcaaattgtagaagatggcaacacaagcacttgtatcatcgtctcttacctactcagtggagactgcaaggcagattcttggagctaaacgacaaattgggtcttcaaggaaaggatcctttgttgttaaggcagcttcgactccacccgttaagcaaggagctgatagacctttatggtttgcatctaaacaaagcctttcatacttggatggcaaccttccaggagattatggatttgaccccttgggactctcagaccctgaaagtccaggaaggttcatcgagcctaaatggctagcctacggtgagatcatcaacgggcgttatgctatgttgggtgcagtaggtgcgattgcccctgaaatacttgggaaggccggtctta

SEQ ID NO: 7361 - DNA, 369 bp, Gossypium hirsutum
  unsure (1)..(369): unsure at all n locations; Clone ID: LIB3120-019-Q1-K1-B3
cccacgcgtncggaaaattttcttttatttttattttctttgaatcaccaaaatgggcggaggagctatgatagcggcggcgaaagttgccggagcgggaactgttaacactggccttcgtggcggtgttcacgtggctccgtcgtctgcggaatactccgtcatgcgcgttgccgcttctcgttctgcttcttccgggatttctgtttccggcggtggggtgtcttccgtctctgacatgacggcgtcgcccaatcagatgatgtcatgggagatggtggatgattgggagtttgctggtggtattgaagaggaggtgcccaccgccatttccggcggaggagagccgatgcctcgggtgttgtttgg

SEQ ID NO: 7362 - DNA, 263 bp, Gossypium hirsutum
  unsure (1)..(263): unsure at all n locations; Clone ID: LIB3120-019-Q1-K1-B4
cagactcatgataatagtgagatatatgagaaggcagtcaagattctcgagacttactggctggaggaggatgaagagacgctacctcctgctgacggtactcancaaagttttcagtttggggagaatgggcttcaagttccatccggtggattcaacttcagttgaagggtttatagaataaacagttcgtaatgcgggttacgactgatacttggggtcgaagtttggtcagggcaccatgatgtttctggttacataaa

SEQ ID NO: 7363 - DNA, 450 bp, Gossypium hirsutum
  Clone ID: LIB3120-019-Q1-K1-B5
tattgacattcttgtgaatgctgctgctggaaactttcttgtgcctgctgaagatttgtccactaacgggtttcgaacagttatggatattgattctgttggtaccttcacaatgtgccgcgaagcactcgagtatctcaaaaagggaggacgtggaaggaactcaccgagtggaggatcaatcttgaatatcagtgctactttacattatacagcctcttggtaccaaatacacgtctctgcagccaaggcagcagttgatagcattaccagaaacttagcactcgagtggggaactgactacgatatccgggtcaatggtattgctcctggccctattgccgatacacccggcttaagtaaactcgcacccgacgagattaccatcaaggctcgagagcacttgccttcgtataaaataggggacaaatgggatattgctatgtcagc

SEQ ID NO: 7364 - DNA, 452 bp, Gossypium hirsutum
  Clone ID: LIB3120-019-Q1-K1-B6
cccacgcgtacggttaaattcagagaagaattagaggccaatctgctcggggagagatcgagatctgctcgggcttttagacgcggcggtgcacatggggaccagtgttgggcaaatcgacggtgctactgcgcaagctaacgtcgcaagggactattacggctttgattaatggggatgacgtgtttattgtcccacataccacccagtgaccatattgtgatcctttttgctaataaaaagactgggtggaacgtctgttctcttttttcctctccgtgatctttagaaacctgagctgaagagcatccaagccatcttgaatctgtttttagccgaatttatatcttgatatctaaaaagcctgataatggatcgtaaagagagggtatgtggtgagctacaaaaggaatgttccaaaggcgcgtcttttacttaagtcatacacaaca

SEQ ID NO: 7365 - DNA, 443 bp, Gossypium hirsutum
  Clone ID: LIB3120-019-Q1-K1-B7
cccacgcgtccggttttcgccacatagaactgtttgacactgttaaaaacgagtttactgagctaactcggcatgtttctcctacaacccatcacttaaacccgttcatatcacccgactcagcccgagttgggtaccataagtgtaggggagaaagtaatggagcaaaagctactcaattattgcttgaaaatgttaaaagcccagtgccgaatctctctcttttcagaatgtacggttcattcccatctttctcacccgcgggtgaccgaatagcctacgtggatttccccggtgtttatgtagtgaaccgggacggttcaaacctgcgccaggttttccacttgaatgcttttggaagcgcttgggacccggtccgaaagggaattgtatacacaagtgctggaccggagttttcaagtgtgagtactgaagttgatatt

SEQ ID NO: 7366 - DNA, 447 bp, Gossypium hirsutum
  Clone ID: LIB3120-019-Q1-K1-B8
cccacgcgtccgggttatgcttgttccatggcctgccattatgcttactatgctgcctttggaccttcagtaacattgagaggctttggtcccaagaacagagaacccaggccttttcaagtacatctttcttccattagcagtcctgttagagcctcctacaatacccttgtctctgaggctgcaaggcttttggttcctacagcaattttcgaagcttcaaaactcaaagttgtcttcatgggagaggggctaaaaagttattctgcaataatcccaagaacctacatcctctcccactgtgacttcactgctaacttaacattgaccatctcaaatgtcatcaaccttgatcagttgaaagggtggtataacaatgatgatgtggttgctgagtggaagaaagtgaaagaaaccatgtttctgaatgtgcattgttttgtaagc

SEQ ID NO: 7367 - DNA, 445 bp, Gossypium hirsutum
  Clone ID: LIB3120-019-Q1-K1-B9
gccagggcttattcagggaagatttggctcgcatatatgctgcagagatagtatcagctgtgtctcatctccattctaatggcataatgcacagggatctcaaacctgagaatattcttctagacgcagagggacatgttatgctgactgatttcggcctggcaaaggaatttaacgaaaatacaagatccaattccatgtgtggaactctggaatatatgtccccagaaattgttcttggcaaaggccatgacaaggcagctgattggtggagtgtgggaattctattgtatgaaatgcttactgggaagccaccctttagtggtggaaacagacagaagatacaggataagataataaaggaaaagataaagctgccagcatttttgtctagtgaagcacactcaattctcaaggggctgctgcagaaagatgcaagcaagcg

SEQ ID NO: 7368 - DNA, 447 bp, Gossypium hirsutum
  Clone ID: LIB3120-019-Q1-K1-C1
atttagctatagcatacactactagtacccactactagcaatggcttcctcaatgatctcatcggctgccattgccactgcctctccggcacaggctaacatggtcgctcctttcaccggcctcaagtctgcctctgctttcccagtcaccaggaaggccaacaacgacattacttctctcgcaagcaatggcggcagagtgcaatgcatgcaggtgtggcctcctactggaaagaagaagttcgagactctctcatacctccccgatcttacacccgtgcagttggctaaggaagtggattaccttcttcgctcaaaatgggttccttgcttggaattcgaattagaggagggattcgtgcaccgtaaatactcgagcctacccacgtactacgatggacgctactggaccatgtggaagctgcctatgttcgggtgcaccgactc

SEQ ID NO: 7369 - DNA, 453 bp, Gossypium hirsutum
  Clone ID: LIB3120-019-Q1-K1-C10
ctctctagaattttctaattatatttccatttctctctccctcttttgtgaaatcgccggggtccaaatataccccgcgtgagctcaaaactccggcgattaaaaattcttgtttcgatctcgagatcttattatcattgccggtttctttctggaaaaacggggattaaagacgaagaggagggatagaatcggaaaaagaaaggaaatcgcatgagctggttgggaaatctgggttttacttgcttctcttcggtgaattcttccaaccattttataacgtgtcttttaatttttattcttcattacctcccttcaattacctccttcgttatttaaattcgaaaaaaaatcaactgagcctttattattattgcttaattctaattccaaacatagtcctcccttacatcttaaatctaaatcctaatcccgatcttaatccatggagtc

SEQ ID NO: 7370 - DNA, 449 bp, Gossypium hirsutum
  unsure (1)..(449): unsure at all n locations; Clone ID: LIB3120-019-Q1-K1-C11
caacaccgtcacttcgattgctccatctttccccatgacttctagtaattgttaggcatctctttatccttttcctggtgacctaaacgaagatgatcaacaccaacaccaccagcttttcaacttaatatctcaaccttcttcttcatcatcatcatcatcttcttcttcgtcgccttctacttcacttacttgtcctttttccttcagcccaactgttcaacaccagcaagcagctttctatcagagcctaccccagcagttccatgatgatcaacaagatcaggaaaaaatacatgttccacaagatggaccattgaagagggactgtgagctcangttatctatatggaaaaaggaagaaagggttgaaactcatcatcaaagtcatgattctgctaagtgggatgccttcaagatgaggatgatgagctccgatcacaccaatt

SEQ ID NO: 7371 - DNA, 406 bp, Gossypium hirsutum
  Clone ID: LIB3120-019-Q1-K1-C12
cgcgcgttccttagagagatggcagccgccatgaaagttgtatgcatgatgtttcgggttgccatatttcataaacaccatgcccatggcgcaatatcagcagatacacaaaaacttatcgatgaagccaacatgaatggaccttacttaggcttgctcattccaaaccttttcgaaatgaaccctcttcttcaacatccaaactatacttccaccaacttcaccattgatattgctggaaggagatttcggttcgggaaaattgttgagaaaaatgttatattagtcatgacgggactgagcatgataaatgcaggaataacgagtcagctattgttaactctattcaaaatcgaaggagttgtccattatggaatagctggaaatgccaaccccttcttacaca

SEQ ID NO: 7372 - DNA, 431 bp, Gossypium hirsutum
  unsure (1)..(431): unsure at all n locations; Clone ID: LIB3120-019-Q1-K1-C2
cctcagcctattaagtatcgtggagtggatcatttgtctgacatgctgttccactacaatgagacatgtgatattttatactgtgaaggattagacatccctctgccagaactacaaggtttgaaaacgctgaaggtagcatttcatcatgctgcaaaagatgaagttgttatccatactattaggcttccaaaacagagcactgttggtgatgtgattaatgatcttaagacaaaagtggagttgtctcatcctgatgcagaattgagattgcttgaagttttctataacaagatctacaagattttcccacccaatgagaagattgagaatataaatgaccaatactggacactacgagcagaagagataccagaggaagagaaaaatcttgggccaaatgatcgnctaattcatgtataccactttac

SEQ ID NO: 7373 - DNA, 452 bp, Gossypium hirsutum
  unsure (1)..(452): unsure at all n locations; Clone ID: LIB3120-019-Q1-K1-C3
gtgccacgtncgaatacataaatgctttacctacttacaagttcaaggtgaaaaaaaatagggatggtgatggtagggaaataaacttgggtgccagtgagggtggtgttgtaactgccggaactgaaaaggaacgtgtcatctctggagaagatgcaatctgctgcatttgtttggcgaaatacgcaaacaacgatgagttaagggagttgccatgttctcatttcatgcacaaggaatgtgttgacaaatggcttaagatcaatgcttcctgccctctttgcaagagcgaggttggcgagaacttactggacgcaatctcgggtacaagtgccaccatcttgagttctctctctggaccgaatgacaaccaccgacgaggagaaatgaggactggtaacagttataccaggtgcagcttcagctacatgttttaatattataatgatgat

SEQ ID NO: 7374 - DNA, 412 bp, Gossypium hirsutum
  Clone ID: LIB3120-019-Q1-K1-C4
cccacgcgtccggctaacttgataagtgatcaagaagcaaattatgcgatggaaaggtatgggacaaaatttatggacgattatcaagcaatactgagccaaaagcttggcctccaaaaatacaataaacagcttgtcaataaacttcttagtaatttggctgttgataaagtggattacacgaacttctttcgggcactttccaatatcaaagcagatcctagcattccaggtgatgagttgttggtgccattgaaagctgttctgctagacatgggcaaggaacgcaaggaggcgtggactagttgggtacaaacctacattcaagagctggttgcgagtggcgtctcagatgaggagaggaaagcttcaatgaactcagttaaccctaaatatgttctcaggaactact

SEQ ID NO: 7375 - DNA, 377 bp, Gossypium hirsutum
  Clone ID: LIB3120-019-Q1-K1-C5
cggatgtatcagtcccgtgcgcgaaagtgacggagacgacttatcagactgtgcaactctggttggcggagagagaagcgagggtgctgaggtacagagagaagagaaagaacagaaaattcgagaaaacgatacgttacgcttctaggaaagcttacgcggaggtgcggccgaggattaaaggaagatttgcaaagcgcagtgacgttgaagtcgaagtcgacggcggtaacatgtatggatttggcgtcgttccgtcgttttgaaattaactaaggtagccatgtagtaatattctacgttaaattttggaattgtaattttccaagtgtttttttttcttcttttctttcttttttacttcattgctcacttaa

SEQ ID NO: 7376 - DNA, 375 bp, Gossypium hirsutum
  Clone ID: LIB3120-019-Q1-K1-C6
caaattgactgtggtgaagggaagaaggttttccagaaggaagatatggcagaaggaagccgattttgttatgttgatgagggcatttttagaacaaaacctacatttgctcgtttttgttctctcttggataattacaacccaaatgctgggtgcaaggaagttgttacatctgaggagaaacaagagcaggctgcatttatagaagaaatcagtagaactgcgcctattaaatatcttcacaagtacctgtctcggaagggcattgtatctgaaaactatcaagatttcaaaagaatgttgacaagcctatggtttgatctttatggtcgaggaggtacatctggttcctcttctgcttttgaacatgttttt

SEQ ID NO: 7377 - DNA, 419 bp, Gossypium hirsutum
  unsure (1)..(419): unsure at all n locations; Clone ID: LIB3120-019-Q1-K1-C7
aagcaaggaacccattttgaggagggattcgtgcaccgtaagtactcgagcttacccacgtgctacgatggacgctgctggagcatgtggaagctgcccatgttcgggtgcaccgactcggctcaggtgttggaggagcttgaggaatgcaagaaggcataccccaatgcattcattagaatcattggcttcgacaacgtgcgtcaagtgcagtgcattagtttcattgcctacaagcctccaggcttctaagctttttattaactttgtctctccatttgtttgaatttgtactcagaaaaaatcatgttctttacttttgcttttccttttctttgagttattggcctttgtttctcgatttccgggttttaatcctgagaactaatgaataaaaagttggttttcttcccnnnnna

SEQ ID NO: 7378 - DNA, 451 bp, Gossypium hirsutum
  Clone ID: LIB3120-019-Q1-K1-C8
gaattatcaagtataaagaaacagcttcttgagggcttttcacccgatgatgcatgttcatgaggtgttccggtgtggagaccatgttctcctcttgcgcagatggagtttcagtcatttgatgagatgcctctagctgcagtaacagatgaagccaatggaagtcagtcaggtcgcaaagcatcattatccataagtaaactagatgtcttaagtgccaatgagctattggattcagctctggaaacagcccggcaagttgtaagcttttcggtttccccagcaccgattccttatgaccagatgaagagtcagtgtgaagctagtgtaatgggtaaacagcagaagatgtcaatacttcatcacttcaagcatcaacaggaagccagtgcaacctcagaggaaattgaaaatgaaattctctatttaccaagtgagaaagcggagtcta

SEQ ID NO: 7379 - DNA, 440 bp, Gossypium hirsutum
  unsure (1)..(440): unsure at all n locations; Clone ID: LIB3120-019-Q1-K1-C9
cggacgcgtgggcggacgcgtggggtcggtctcacttcaagctgcanctaccctgatgcagccaatcaaggttgctgcaccatcaaggaccaatgtgctgctcaagtcctcccagagcgtttctaaggccttcggtttggagcctgttggtgctaggctcacctgctctttgcaaactgacctcaaggacttggctcagacgtgtgttgatgctaccaagctcgctggtttcgctcttgctacatctgctcttgttgtctcgggagcaagcgctgaaggagttccaaagcggctaacctacgatgaaatccaaagcaagacatacatggaagtcaaaggaacaggaactgctaaccagtgcccaaccatcgatggtggtgtcgactcttttgccttcaagcctggcaaatactacgccaaagagttctgcttggagccca

SEQ ID NO: 7380 - DNA, 441 bp, Gossypium hirsutum
  Clone ID: LIB3120-019-Q1-K1-D1
cggacgcgtgggtatgtatgaaatccttactcaccatccgatctcatcgcatttcaatctttgaactgggtttctttcaacaatcctttaaacctcgtctttctttcccttttttcaaatcacaatctcagcctttttcttgaatcctgtaatccatgcaacaccaacaagaagttccggccatggaagtaaatatgaacttgttggggaaacttgaatcgttggggttcccacgggccagagcagttcgaggacttcatcatacagggaatactacagttgaggatgctgtaaattggctcattgatcatgagaatgatgcagacattgaccaaatgcccttggtggtaataaacttggatctagagacccctcagccaaatgatatcacagaagcaataaaactcaaagaacaggaactaagggatcgagttcgcatga

SEQ ID NO: 7381 - DNA, 433 bp, Gossypium hirsutum
  unsure (1)..(433): unsure at all n locations; Clone ID: LIB3120-019-Q1-K1-D10
aaacttcaccgttacctcaaaaggaggagatgatggagaattttccgaactgtggctattcgggtggacatctttgttgattccccccatgacattgttgatcatcaacataatcggagtcatagtcgggatttcagatgccatctctaatggatacgactcatggggccctctattcggtagactgttctttgcattctgggtcattgttcatctttaccccttcctcaaggggttgatggggaaacaagacaggcttcccaccattattgtggtttggtcaatacttntagcatcgattttctctcttttggggctcgagtcaacccctttatatcgaaaggaggcattgttttagaggtgtgcgggttgaactgggaactaaaaataaattgtggaagaaaaaacaaaggagtagaattagatgttcagt

SEQ ID NO: 7382 - DNA, 413 bp, Gossypium hirsutum
  unsure (1)..(413): unsure at all n locations; Clone ID: LIB3120-019-Q1-K1-D11
cccacgcgtccgccccattctcatagctttcatcatcttcaaatggctaaatcacttgtcattgttatgttatgtgttctcttagtaattgttttacttggagaaatccaggcatcaagcccttctcaaaaacaaagacaaggcaaccatggaaatggaatgtatggtgccacccaagggagccttcgtcctcaagagtgtggtccaagatgcacacagagatgctcagctacagcatacaagaaaccatgcatgttcttctgccaaaagtgttgtgccaagtgcttgtgtgtgcctccaggcacttacggcaacaaacaatcttgcccttgctacaataattggaagaccaagagaggaggccccaaatgcccttagatccctaactatatctatgtntgtctctagttaaa

SEQ ID NO: 7383 - DNA, 452 bp, Gossypium hirsutum
  Clone ID: LIB3120-019-Q1-K1-D12
cccacgcgtccgagttgatcaactattatgtaagagagaaatacacattgaggtgcactgggggaatggtacctgatgtcaaccagatcattgttaaagagaaaggaatatttacaaatgtggcctcaccatctgccaaggccaagctgagattgttatttgaggtagcaccattggggttcttgattgagaaagcgggtggttatagcagcgatgggcaaaaatcggtgcttgacaaagtgatcgagaacctcgacgataggactcaagtcgcgtacggttctaagaacgagattatacggtttgaagaaacgttatacggatcgtcgaggcttaatgcaggggtccctgttggagctactgcttaagcaacaatgtttttacttttgtttgccttttcaagacattttgttttcgttgtaccttaatgatctcaaacaaaacttttaagt

SEQ ID NO: 7384 - DNA, 455 bp, Gossypium hirsutum
  Clone ID: LIB3120-019-Q1-K1-D2
cacagaggagttctcaggggaaaatggagaaatctttcttgtggtatactccattgcttggggaatatagtttgggaatctaatgttacagtattctatgcgataaaaagcttacagcatcctttgaatatactatctgatgaggcataatatgctaatgctttgtaacaaatttcatttacatacaacttacgattattcatgattaatctctgctttttatattgtgttgaatctcttctgatgtataatttcagctcgactaattttttattccgattgcagtttcaagagtagctatccttcatgggaaccagattctcaaggaaagcatttcttgtcaaatattcgaactttccgggatcaaatgttgcaagggcagggagctagacatgtatattcttctgatagactgtggcgaggtagcccgctgagagcttacagtgatagaaatg

SEQ ID NO: 7385 - DNA, 340 bp, Gossypium hirsutum
  Clone ID: LIB3120-019-Q1-K1-D3
ctttcaactccgatttcaacgaagccaagaggaatctgtggccgattcgcaaggtaagatcgggccctttattttctctgttggtatcttacatacaatagcgttataaaatcaaaaaagaaaacaagataattcgacggagaactttaaggaaaatggaaaatcaccttcaagaatatctttcaaaatgccttttctaatatttagtgtgcgtaatatgcgtatttcagagtgcgtgcgtagtatgcgtacactgtgcgtaagattacagagatgaaatcgacgactttttatagccagatttttttagaataaataaaaataaaaattacatttattt

SEQ ID NO: 7386 - DNA, 375 bp, Gossypium hirsutum
  Clone ID: LIB3120-019-Q1-K1-D5
ttttgatgtaagaacatcatccatctcttcttttttttgaatgcaaatatagcatgtcccggttgcaactggaggatttctattacatggctgaagacatcatcgatgatatggatgaagacgactatggtagagctggtggagacatggatgcccatgaatatgacatgctgaccaaggtgactgatacatcttctggtcaagcacggaaggggaaggacattcaggggattccatgggaaagattgaacataaccagggaagattatagattgacaaggcttgaacagtataagaattatgagaatatcccggcctctggtgatgctgttgtcaaggaatgcaaacagatggaaaaaggggggaactactatg

SEQ ID NO: 7387 - DNA, 449 bp, Gossypium hirsutum
  unsure (1)..(449): unsure at all n locations; Clone ID: LIB3120-019-Q1-K1-D6
gccagtgattgtttattgggtttatggtggactgtatacgattttaggctacacttgtaacaattagaggttgcatcctaaagaagatgaggatganaagaactttgcctccaaaaagaccgtcatcaaaggcgtccttgggcaacaatttcgtcagttcatcgccactaacctattatatatgataacaagaggaaacgatgccgaagcttcttcagggcagtcaacttccttctttgttatagcgagacagtttattgtagcaatgttcgtattcgatacgtaccaatattttcttcacagatacctacaccagaacaagttcttgtacaagcacctccattccaagcatcatcgactggtggtttcgtacccatttggtgctatctacaggcatccgatcgagggacttctttttgacatcatatgcggtacaatggctatttaca

SEQ ID NO: 7388 - DNA, 439 bp, Gossypium hirsutum
  unsure (1)..(439): unsure at all n locations; Clone ID: LIB3120-019-Q1-K1-D7
cggacgcgtgggcggacgcgtgggcggacgcgtgggcccgctgagtttaagcatatcaatgggcggaggaaaagaaacttacgaggattcccctagtaacggcgagcgaaccgggaaaagcccagcttgagaatcggtcgccatcggcgtccgaattgtagtctggagaagcgtcctcagcgacggaccgggcccaagtcccctggaaaggggcgccggagagggtgagagccccgtcgtgcccggaccctgtcgcaccaagaggcgctgtctacgagtcgggttgtttgggaatgcagccctaatcgggcggtaaattccgtccaaggctaaatacgggcgagagaccgatagcgaacaagtaccgcgagggaaagatgaaaaggactttgaaaagagagtcaaagagtgctngaacatgtcgggagggaagcggatg

SEQ ID NO: 7389 - DNA, 442 bp, Gossypium hirsutum
  Clone ID: LIB3120-019-Q1-K1-D8
attggaacagtcgatttctttttatttcatatttatttggactccacaagaatgcggcgagatttccgattcaatcgtcttggtcctaggaataaattaatattctattcctttcgagataaagagaaacatttatttcaagttacaacctaagagcctttttcaacatcttatctttctttgattccagaacacaacaagatccatttctatctatatattctatctattctataatagatagaaacctaaatcaaatcatgtcttcacatatcaaatatttccatatcgatacatatgacacttttgttctgccaatgtgatggagagtgagtgcgaaaaagaaactttcattttgagtctcctattatttaatttaatattattaaatattgtattagattgaaaaataggaacttcgaatctttttttgatatacata

SEQ ID NO: 7390 - DNA, 453 bp, Gossypium hirsutum
  Clone ID: LIB3120-019-Q1-K1-D9
gtctttgccaagatgggaatcaaccccattatgatgagtgccggagaattggagggggggaacgccggagaaccaggcaagttgatcaggcaaaggtaccgtgaggccgccgacattatcaagaaagggaaaatgtgttgcctctttatcaacgatctcgacgctggagccggtcgtatgggaggaaccacacaatacacagtgaacaaccaaatggtgaacgccacactcatgaacatcgctgataaccccaccaacgttcagctccccggtatgtacaacaaggaagagaaccctcgtgttccgatcattgtcaccggtaacgatttctcgacgctgtacgcgccgctcatccgtgacggtcgtatggagaagttttactgggcacccaccagggaagataggatcggtgtttgcacaggtattttcaggaccgacaatgttcccgttgat

SEQ ID NO: 7391 - DNA, 410 bp, Gossypium hirsutum
  Clone ID: LIB3120-019-Q1-K1-E1
cctataattatttgatctgtgaaaacacagaattttgtgagggctattatctcgttttgggatgaattaagtgaataaagtttagttctctttgcgcgtgtcccgttctcttctccaatcctccaaaacttgaacttaaaaccccattttagttgatcccaaagttgacccctttttttgtttcagtatagtaatataccaagcctttgcttaaatggaggttaagctatggaacgacaagcgcgagagagaaatgtatgagaattttgcagagctgtatgccattatcaaggcaacagagaagcttgaaaaagcttatgtgagggatattatttcatcatctgaatatgagactgaatgccaaaagcttattgcccatttcaagaccttggcttcaacactcaaagata

SEQ ID NO: 7392 - DNA, 451 bp, Gossypium hirsutum
  Clone ID: LIB3120-019-Q1-K1-E10
ctgggttcttctttctctctctccaaagttcttcgatcctttccgtctccaaaggtctccggagttagctgcatacgagttgagtagaaactggatattgcaagttttttagggtttcatttaatcaaaggccgttgaaggaggacgatttaatggaggcggcaacggcgcaagggatggacccagcggtactagacaatataatcagacggccgacggaagtccggtcagccaagctagtgaaacaagtgcaattatctgaatctgagatcaaacagctttgtgttgcttcgaaagatatcttcgttcaacaacctaatttgcttgaactcgaagcacccatcaaaatttgcggtgacatacatgggcaatatagtgacttactaaggctgttcgagtatgggggttttcctcctcatgctaattattttctggttcagtagcaacaaat

SEQ ID NO: 7393 - DNA, 450 bp, Gossypium hirsutum
  Clone ID: LIB3120-019-Q1-K1-E11
aacaaaatcaactgcttcacaatggcctctacaaccatggctctttcttccccatcattcggcggtaaggcagtgaagttctgcccttccacccctgaaatccagggaactggccgtgtttccatgaggaaaaccaccaagcctgttccttctggtagcccatggtacggtcctgaccgagttttgtacttgggtccactttccggtgagccaccatcttacttgaccggtgagttccctggtgactatggttgggacactgctggactctcagctgatcccgagacctttgctaggaaccgtgagctcgaagtcattcactgcagatgggccatgttgggagctcttgggtgtgttttccctgagctgttggctaggaacggtgtcaagttcggtgaagctgtatggttcaaggccgggtctcaaatcttcagtgagggtggacttgac

SEQ ID NO: 7394 - DNA, 435 bp, Gossypium hirsutum
  Clone ID: LIB3120-019-Q1-K1-E12
ggtacctcacaggctgactgtgctgttctcattattgactcaaccactggtggttttgaagctggtatctctaaagatgggcggactcgtgagcatgctttgcttgcttttaccctcggtgttaggcagatgatttgctgctgcaacaagatggatgcaacaaccccaaagtactcaaaggcaaggtttgatgaaattgtcaaggaagtctcttcttatcttaagaaagttgggtacaaccctgagaagatcccgtttgttccaatctccggttttgagggtgacaacatgattgagagatctacaaacctcgattggtacaagggtcctactctccttgaggctcttgaccagatcaccgagcccaagaggccctcagataagccacttcgtcttccacttcaggatgtctacaagattggtggtattggaact

SEQ ID NO: 7395 - DNA, 417 bp, Gossypium hirsutum
  Clone ID: LIB3120-019-Q1-K1-E2
cttgattggtggaatcccaattgctatgcccactgtgttgtctgtcaccatggctattggtgcccacaggctttctcaacagggggctatcacaaagagaatgacagccattgaggaaatggctggcatggacgttctctgcagtgataagactgggactctgactttaaacaagcttactgttgatagaaacctcattgaagtatttacaaagggagtcgaaaaagagcatgttattctttatgcagcaagggcttcaaggactgaaaatcaggatgctattgatgctgcaattgtaggaatgcttgcacatccaaaagaggcacgggctggtgtccgagagattcacttcctaccattcaaccctgtagacaagagaactgctctaacctacattgataatgatggaaactggca

SEQ ID NO: 7396 - DNA, 268 bp, Gossypium hirsutum
  unsure (1)..(268): unsure at all n locations; Clone ID: LIB3120-019-Q1-K1-E4
ctaccttgtatcattattctctagcctttgaccacgagccaacggctaccatggatcacgtgagtttctaccccatctatggggaggaccgttcanaagccactatccttcctatgataaagaacaattggatgctcacttgacgattataagaaactataccctcccttgcaccatggaactgtcatgggtccagtctgctctgagcctgatcctgaatgctccttcggaccatcttactcttgacgagaacaaccctcttcctatt

SEQ ID NO: 7397 - DNA, 450 bp, Gossypium hirsutum
  Clone ID: LIB3120-019-Q1-K1-E5
cccacgcgtccggcttcctccaaacatggtcttagctcaagtctcagcttccctttctctgaccgttcgtgatgtctcccctatgatcggtccaaaaacaacccacaaactttctcgtgtacccatttccagtttttcaggaactggttccatttttgccactggttcccctttcttgataagggaatcatttaaccaaaggaaacctgtatgtaaagcaacaacatttaccattacatgtgagcaaagcaccaaggggggtagcaccaacagtttggatgtatggcttggcaggcttgctatggttggttttgcagtagccattactgttgaaatatccactggcaaaggactcttggagaattttggccttacaacacctttgcctacagtggccttagcagtgactgcgttggttggtgttttgacagctattttcatctttcaatc

SEQ ID NO: 7398 - DNA, 421 bp, Gossypium hirsutum
  Clone ID: LIB3120-019-Q1-K1-E6
ctcatctgaaggagcacggtgtaggtgctagtcgtggaacatcattcagagtccctgatgcagagatgtttttgtacaccgggggggagaatacatacgatgcacgttgtgataaagaaagcgtggaatatagctcgtgcctgagtgaactaagcgacttgaacttgagtacttcgtttgatactaagaagtcgagctccgtaaatcatactgcgagacgactgaagaattttctccattggcctatgaagaaggaaagaaaagctactagcacggaattggtagacactgatgatcctgtggaggttacgagtgcttatcgaaactggccagacattcatatttcgcttcgtgaaaagtacactaaatctgtatctcttccaaataacaaaaggacccttgctcttcacaatgatctttc

SEQ ID NO: 7399 - DNA, 354 bp, Gossypium hirsutum
  unsure (1)..(354): unsure at all n locations; Clone ID: LIB3120-019-Q1-K1-E7
agctgtccttcaagatattgccattcttactggtgccgagttccaagcaaatcagctgggtttgttaatcgagaacgcctctgtttancatcttggtatagccaggaaagttatcatcaccaaggattcaacccaaataattgctgatgccgcttcgaaggatgaaatacaagctagggtgcaacaattaaagaaagaactagccgagacagattctgtttacgacacagaaaaactggcagaaaggattgccaaactatctggtggtgttgcagtcattaacgttggggctgcaactgagactgaactctaggatcgcaagctacgtattgaagattccaataatgctacctt

SEQ ID NO: 7400 - DNA, 448 bp, Gossypium hirsutum
  Clone ID: LIB3120-019-Q1-K1-E8
cccacgcgtccgcactactagtacccactactagcaatggcttcctcaatgatctgatcgggtaccattgccactggctctcgggcacaggctaacatggtcacccctttcaccggcctcaagtctgcctctgctttcccagtcaccaggaaggccaacaacgacattacttctctcgcaagcaatggcggcagagtgcaatgcatgcaggtgtggcctcctactggaaagaagaagttcgagactctctcatacctccccgatcttacacccgtgcagttggctaaggaagtagattaccttcttcgctcaaaatgggttccttgcttggaagtcgaaattggaggagggattcgtgcaccgtaagtactcgagcttacccacgtactacgatggacgctactggaccatgtggaagctgcccatgttcgggtgcaccgactcggct

SEQ ID NO: 7401 - DNA, 303 bp, Gossypium hirsutum
  Clone ID: LIB3120-019-Q1-K1-E9
cccacgcgtccgaacagtttcatttccattctaagtttgtgtttttgatttgcctgttgtgggtttttttttataaaaaagttcagcaaaaatgtttattgagaattttaaggtggagagccccaatgtgaagtacacagagaatgaaattcagtctgtttacaactatgaaactacagagcttgttcatgagaacaaaaatggaacctatcaaggggtggttaaacccaaaactgtcaaaattaattcaaaaattgatttcaatgcccttaaatggggggtgatgcttgtggaatggggagg

SEQ ID NO: 7402 - DNA, 409 bp, Gossypium hirsutum
  Clone ID: LIB3120-019-Q1-K1-F1
cccacgcgttcgcccacgcgtacgggtttcctttcttgtcgttgtaatctcaacaaaccccgtccaaatgcctcgtaacatggtcgtgaaccgtctaatcacttcgctgcctgcactaatggcgacccaagccctctctcgcgctctgctctcgaaacccaaagccgcatcttccttcctcttcccctcctcccgctctttctcttacttttgctcctcctgctacggcgcttgctccaccaaaactcttatcaccccatcgccaaccccttctctctccttactccgtcgccttcgtgccccgccttgctactcactccttcgtgactcactttgcccagctgttaaatcgttctccactcgagcaggcaggtcctccctcaatgaccccaatcctaactactcgaac

SEQ ID NO: 7403 - DNA, 441 bp, Gossypium hirsutum
  Clone ID: LIB3120-019-Q1-K1-F10
cggacgcgtgggcaaacctctggtggctaaaaccaaaaaacctgttggggttcgtcaaaggaagtggggcaaatgggctgctgagatcaggcatccactcaagaaaaccaggatttggttgggaacttacgatacccttgaagaagcagccaaggcttatgaagctaagaagctcgagtttgaggctctcactgttgctgccgccgcctctgcttcatctgataaaaccaacgacctttcatgttctgcagctgcttctcacaacaacactgttccctctgcttcagaagagtctgagagccttgtatcgcatacttcaccatcctcgatgcatgaattggatacttctgcatcttgttcagtctctaataacaatgatgattgcggtgatgccaacaaagaggtgttcgatgcgaactttgctgatataccgatacctga

SEQ ID NO: 7404 - DNA, 425 bp, Gossypium hirsutum
  Clone ID: LIB3120-019-Q1-K1-F11
aaggaaatgagcttcctcgtctcgtctatgtatctcgagagaaaaggcctggttggttgcgtcacaagaaagctgggggcatgaacgcccttgttcgggtctcgggggtgctcacaaatgctccttttatgttgaacttggattgtgaccattatttaaataacagcaaggctgtaagagaggctatgtgtttcttgatggaccctcaaattggaagaaaggtttgctatgtccaattccctcaacgtttcgatggtattgatagacatgatcgatatgccaatcggaacacagttttctttgatattaacatgaaaggtctagatggtatacaaggccctgtatatgtcggcacggggtgtgttttcagaaggcaagctctttatggttatgaaccttcaaagggacctaagcgcccgaaaatg

SEQ ID NO: 7405 - DNA, 398 bp, Gossypium hirsutum
  Clone ID: LIB3120-019-Q1-K1-F2
cccacgcgtccgcaaagttccatggacaagatggaattgtggctaattttttcagcctgcgggcttggatgggtttgagctgtgtcagcttgtttggagctcagagggtggtgggctttctaagcttttggcaccgacgtgaagtgcggacgacaagagcatatgtgttgccggggcatatcttccttggtctctacacttatggcttatccaaggcaacagcggaaacagggctggtagagaaattgacattcttgcaaagcacgcggactgcattcaaacactgtccggagaccatgattgttaatagtctatgtctggggttggatctcctctgtggcattgtcatattgacagcagatgcgcctaaatatcatgctctgcaaaccaaacttatg

SEQ ID NO: 7406 - DNA, 403 bp, Gossypium hirsutum
  Clone ID: LIB3120-019-Q1-K1-F3
gcacgatgccgggacgtatgatgtgagtactaaaaccggaggtccaaatggctctataaggaatgaagaagagttcactcatggcgccaatagcggcttgaaaatcgctattgatttttgtgaggaagtgaaggctaaacatcctaaaattacgtatgctgacctataccagcttgctggtgttgttgctgttgaagtcactggaggtcctaccattgactttgtacctggaagaaaggattcaaacatttgccccagggaaggccgactgccagatgctaaaagaggtgcacctcatctgagggacatcttctatcgaatgggtctttctgacaaagatattgtggcattatctgggggtcacactctgggaaaggctcatcctgagagatcaaggttttga

SEQ ID NO: 7407 - DNA, 447 bp, Gossypium hirsutum
  unsure (1)..(447): unsure at all n locations; Clone ID: LIB3120-019-Q1-K1-F4
gcgcccacgcgtncgcatctctctcatggttatcagacggacaccaaaaagatatctgctgtgtgcatgggtttttagacaatgccggatgggttgaatgaaaacactggctatatcgactatgatcagttggagaagagtgcaactcttttcaggccaaaattaatagttgctggtgccagtgcttatgcacgtctgtatgattatgcacgcattcgaaaggtttgtgacaagcagaaagcaataatgttggcagacatggcacacatcagtggtttggttgcagccggtgttatcccttcaccttttgagtatgccgatgttgttaccaccacaactcacaaatcacttcgtgggcctcgtggagccatgattttcttcagaaagggagtgaaagggattaacaaacaagggaaagaggttctgtatgattatgaagacaaaatc

SEQ ID NO: 7408 - DNA, 454 bp, Gossypium hirsutum
  Clone ID: LIB3120-019-Q1-K1-F5
caaacatcagcaaaacataaggcaatggccactactacagccacctgttttcacttacaaaacataccatcatcaccatgggtgaacaacaccagcagaataacaacatacaaagccatggatggatcattaagagcttcaaacccccgaacccaaacattcattaaacccgtgaaatgtagtagtagtagtagtagcggaaatgagataggcatagccgatttcatcggtggagatctattaaaattcgatttagggcaatggctatcggatgtagaacaacacaaagcccttgctatttacacccctcacgaaggtggctacgagggtcgttactttacacggcttcgacaccagggttactatttcctcgaccttactgctcgtggccttggtgatcccgaaactacactcactaagatccatccttgttgccctctcatgttgggaagca

SEQ ID NO: 7409 - DNA, 438 bp, Gossypium hirsutum
  Clone ID: LIB3120-019-Q1-K1-F6
cccacgcgtccgctagtacccactactagcaatggcttcctcaatgatctcatcggctaccattgccactgcctctccggcagaggctaacatggtcacccctttcaccggcctcaagtctgcctctgctttcccagtcaccaggaaggccaacaacgacattacttctctcgcaagcaatggcggcagagtgcaatgcatgcaggtgtggcctcctactggaaagaagaagttcgagactctctcatacctccccgatcttacacccgtgcagttggctaaggaagtagattaccttcttcgctcaaaatgggttccttgcttggagttcgaattggaggagggattcgtgcaccgtaagtactcgagcttacccacgtactacgatggacgctactggaccatgtggaagctgcccatgttcgggtgcaccgactc

SEQ ID NO: 7410 - DNA, 265 bp, Gossypium hirsutum
  Clone ID: LIB3120-019-Q1-K1-F7
acactcttgtaggaggttgaacacgaagacgttacggtagtaagctaatccttagcttaagaagcttgaaaggacaaagcggcgttggcttgtcagagcatcaaacgacctctgggggattaaactgagccagaaagacaccatcaatggaatctcgtgattcttctggagaagaagaagttcatctatttaattttttcagaaactgattagggtcatgtttattttctgacaactgttttttcactgcttctcgatgccatgt

SEQ ID NO: 7411 - DNA, 323 bp, Gossypium hirsutum
  Clone ID: LIB3120-019-Q1-K1-F8
cccacgcgttcgataataagcacctccccgtaagcaaaccacaaaggaaaactgggggagagacccaaaaacagtgggtaaggaagttagtgaacaaggacaaggtcctaaggactatgtggacccttcaccggcacctctgattgacatggctgaactcaagtcatgggctttttacagagccctcataactgagttcatagccactctcctcttactgtatgtcactgttgctactgtaattgggcacaagaaacaacaagatgcatgtgatggtgctggtctcttgggtattgcatgggctttcagtggcatgatcttta

SEQ ID NO: 7412 - DNA, 338 bp, Gossypium hirsutum
  Clone ID: LIB3120-019-Q1-K1-G1
agttgcttcacaatggcctctacaaccatggctctttcttccccatcattcgccggtaagggagtgaagttctccccttgcacggcctgaaatccggggaactggccgtgtttccatgaggaaaaccaccaagcctgttccttctggtagcccatggtacggtcctgaccgagttttgtacttgggtccactttccggtgagccaccatcttacttgaccggtgagttccctggtgactatggttgggacactgctggactctcagctgatcccgagacctttgctaggaaccgtgagctcgaagtcattcactgcagatgggccatgttgggagctc

SEQ ID NO: 7413 - DNA, 451 bp, Gossypium hirsutum
  Clone ID: LIB3120-019-Q1-K1-G10
tacaagatcaagtgggggttctactcccttgagatccccatctgttcagcctccattgccaagctttaatactgcttctgctgatgcactgaattctgtaccagtgcctcttcgtgatgctctaactgaagttttctcaaagctttccgtagaagttgcttcgaaagcttcatctgccagtccattgttgggtgatcttttggagtccttgtctaagatgggacaatcctacttgagtcctgcttcccaacctggagttggtgctgattctggcattcctgttggatcttctgagagcccttctggaccatatgctccaactggtgttttaccaaaatttacagctgttgattcaagcttcaagactggcaaggaagccaacactgaaaacgcagcagatggtgtggatgtacctgctgtttctgatccagctgctgttgatttgaatgct

SEQ ID NO: 7414 - DNA, 451 bp, Gossypium hirsutum
  unsure (1)..(451): unsure at all n locations; Clone ID: LIB3120-019-Q1-K1-G11
gctattgggacaattcccaagtggccagacaggctaacaacagctccttcaagggccttgggcatgaaaaacgggattgacttgtttgaggcanacacgaggcggtgggcaaggagagttgcctattataagaatactttgaacgtgaagcttggtactccagcaatacgcaatgtcatggacatgaatgcattctttggagggtttgcagcagcactcaaatctgatccagtatgggtgatgaatgttgttcctgctcggaagccattaactcttgatgttatatatgacaggggtcttatcggggtataccatgattggtgtgagcctttctcgacataccctcgtacttatgatctcatccatgtagctggcattgaatcactaataaagctcccgggttcaagcaagagcaggtgtaatcttgtggatctaatggtggagatagatc

SEQ ID NO: 7415 - DNA, 349 bp, Gossypium hirsutum
  Clone ID: LIB3120-019-Q1-K1-G12
gggagcaagcgctgaaggagttccaaagcggctaacctacgatgaaatccaaagcaagacatacatggaagtcaaaggaacaggaactgctaaccagtgcccaaccatcgatggtggtgtcgactcttttgccttcaagcctggcaaatactacgccaagaagttctgcttggagcccacttccttcactgtcaaggctgaaggtgttaacaagaatgcccctcctgagttccaaaacaccaagctcatgacccgtttaacctacacccttgacgaaatcgagggccctttcgaggtatccaccgatggcaccgtcaaattcgaggagaaagatgggattgattatgct

SEQ ID NO: 7416 - DNA, 357 bp, Gossypium hirsutum
  Clone ID: LIB3120-019-Q1-K1-G2
cccacgcgtccggttgaagttgaaaccaaggaggtggtagaagaaccaaaggctgttactgaggagccagtagtagaggaggctcctaaggaaacaatgccagaaccagttgccgaggagatcaaggaaaccactgaacaaaccgttgaaaccaaagaaactacagagtctagtgaggcagcagcagaagcacccaaagaggaagttaagaaggaagaagaagcaaaaccagctgaagtggaggagaaagttgaaacagaagctgatccagcagagaagactgagtaaataataaagcttttgtgatgaaaatgcgggtgtcaatggaagtgtgtttcaaatggctacagtttgata

SEQ ID NO: 7417 - DNA, 412 bp, Gossypium hirsutum
  Clone ID: LIB3120-019-Q1-K1-G3
cggacgcgtggggttaattataaggttaagtttatgtgcagctatgggggcaaaatccaacgcgcgttcccacgataaccagctggcttatgttggtggagataccaaaatcctcgtcgttgatcgcaacatcaagttctctgctatcatggccaagttatcttctctttacggtggggattctgaggtttgtttcaagtatcagcttcccggtgaagatctcgacgctttaatttccgttaccagtgatgaagatctggagcatatgatgatggaatatgaccggttgcatcgttcctttgccaaaccggcccggttgaggttgtttctattcccgttgaattcgcccgtggtggcgtcaggatttgaagggagtgaaccgaagtccgataggcaatggttcattgacgca

SEQ ID NO: 7418 - DNA, 427 bp, Gossypium hirsutum
  Clone ID: LIB3120-019-Q1-K1-G4
atcatagcactctttcttgcatagcatgcaaccgttaagcagagaagatatgatgttgcacgccatgaaatctataataacctttatgcaaacctacttacaaacgacctgacgggctattatgcaacacaagaaactgaacactactgacatcttgacttgacaacagctttcccaagaggatttgctttcgaagttatccaagtctactctggcccgccatcgattgtgtataagttcaggcactgggggtataaggaaggtcctttcaaaggccatccccctactggggaacttgttcaactttatggaatatcaatttttgaggttgacgatgagatgaaaatcttgaaggtggagttcttttttgatcgtggggagctgcttggaggtcttatgaaaggtgataaattgactagtggaactg

SEQ ID NO: 7419 - DNA, 443 bp, Gossypium hirsutum
  Clone ID: LIB3120-019-Q1-K1-G5
cccacgcgtccggctaatttaagagaaatattgaatttttgttaccaagaaaacttggtattacttggagatgaggtttaccaacagaatatataccaggacgagcgcccctttatcagttctagaaaggtgttgatggatatggggccaccaattagcaaggaagtccagctcgtttctttccacactgtgtctaaaggatattggggtgaatgtgggcagcgagggggatactttgagatgaccaacattcctccaaagacagttgacgagatatacaagattgcatcaatatccctcagtcctaatgttcccgctcagatatttatgggattgatggtcaacccactcaaacctggagatgtttcatatgatcaaaattgtagggaaaagcaaagaatcctttgatcattgagaagagagcaaggatatgactgatggat

SEQ ID NO: 7420 - DNA, 418 bp, Gossypium hirsutum
  Clone ID: LIB3120-019-Q1-K1-G6
ggcgcttcaaccaacaccgacctcaacttcctcaacggcgagatgaagaagttgaggcccggaaaagagaagctgaaaaagaacgagcccgacgtgaccgtctttataatctcaaccgatcgaaccagaaccagcaacgtcgtgaagctgcgattttcaaatcctccgtcgatatccaaccagagtggaacatgctggatcaaatccctttctcaacattctccaaattatccttttccgttccagaacctgaagatttacttctctgcggtgctttagagtattacgatcggtcctttgatcgaattaccccgaagaacgaacggagactcgagaggttcaagaacagaaacttctttaaagtcaccacgactgacgacccggtgatccgaagattggcaaatgaggacaaagcaac

SEQ ID NO: 7421 - DNA, 319 bp, Gossypium hirsutum
  Clone ID: LIB3120-019-Q1-K1-G7
ggaactcatttctgcttacaagcagatgaatccgggacactggcgaaactctgggtcttctgcaatgactcgagatgtaaaatgggaaatgatatcttattccaagatgcacctatcatctaagcttataaatggcaaatccatttgccttgatgtaaacttcagcaatgctatcgtcacaaacagttgcaaatgcataagtaaagataacacatgtgaccctgccagccacgtgttcaaactcgcggacagcacacggagcagacatgaggaacaattcttcttacattctgactgcatcttcgacttgcctggaaag

SEQ ID NO: 7422 - DNA, 215 bp, Gossypium hirsutum
  Clone ID: LIB3120-019-Q1-K1-G8
cccacgcgttcgcccacgcgttcgcccacgcgttcgcgagtactcaaaatatatatatattggtcacatttaaagagctaacccttttttgctttgcagacaccgcaaaccctaaccctagtaccttcaattttctccctgctttaattaagttcaaagataaatgggagaaacaagggacaacgatgcttacgaagaggagcttcttgattacg

SEQ ID NO: 7423 - DNA, 450 bp, Gossypium hirsutum
  Clone ID: LIB3120-019-Q1-K1-G9
aaatcgcacaaattcttccatttggccaggataagggtcttgagtctttgattcagccagttgaagatgagtgcattttcgatcacgcgcaagaaaactcctttccagaagcacagagaagaggaggaagccaagaagaagagggaggaggatgaaactgctcggttatacgagcagttcgtggcttcttttcaaggagacaatgcacctgggtcgaaggcatttgttcgaggtggaacaatcaatcccaatgagaaattcaagcccgattctgaaggtgaaaaggccaaagatggggtgtctgttccaaagaagggaagtaggtatgttccatctttcataccacctcctttgtctgccaagggaaaggaatctgagaagaagaaggaggaggagaggccaaaaggaaaaagagaaggggaagtctcggaacatatgatcctgatagat

SEQ ID NO: 7424 - DNA, 410 bp, Gossypium hirsutum
  Clone ID: LIB3120-019-Q1-K1-H1
atggttagctgctgcaacatggcatcggctgcttcaggtttcttgctaacacccaatgtttgtgcagggacttctaagaccaacaacaacaacatggtgtttttcccatccaagaccaacaacacctcaaggcttgttgtgagggcagctgatgaggaggcttcaccaccaccaccctctccaaccccagcaaccaccactgcaccacctgaagggggtgaagctcctaagcctaagccaccaccaataggaccaaaaagaggcaccaaggtgaagattcttaggagggagtcctactggtacaacagctatggatcagttgttacagttgaccaggtcactctttctctctttcttcttccagctccatttgcatgcatgcatgcatgtatgaaggaactatggatcta

SEQ ID NO: 7425 - DNA, 442 bp, Gossypium hirsutum
  Clone ID: LIB3120-019-Q1-K1-H10
gtgcttcttcggctattgcagctgttgccatctcatcccccagttcccagaagggtggatcagtagtggggacaagaaaggcttctttcctttcagggaagaaacttacatctgtgagaaagtacacaaaaccagctgccggaccaacatttccagtgtgcgccgccgccgaccccgacagacccctttggttcccaggcagcactcctcctccatggctggatggcagtctccctggtgactttggtttcgatcctctcggtcttggttctgaccctgagacattgagatggaacgtacaagcagagctggtgcactgcagatgggcaatgttgggagctgctggtattttcatcccagagttcttaaccaagattgggattttaaacactccatcgtggtactcagctggaacagaggaatacttcactgacaccacaac

SEQ ID NO: 7426 - DNA, 362 bp, Gossypium hirsutum
  Clone ID: LIB3120-019-Q1-K1-H11
cccacgcgttcgcccacgcgttcggcaggcacttggagtgagcaacagttcagctgccagtgtgccactatcacaacagacgtcaagtgctttgcaatcagcacaatccaaatatgttaaagtctgggagggaaatttatctggccagagataagggcagccagtctttatcaccagattggaaggttatcggagtgcctcagcttctgagacacttgcagcacattggccacaaaccatgcaaatagttcgtcttatatctcaggatcacatgaataacaagcaatatgttgggaaggcagattttttagttttcagggcaatgaatcagcatggatttcttggacagctacaagagaaga

SEQ ID NO: 7427 - DNA, 340 bp, Gossypium hirsutum
  Clone ID: LIB3120-019-Q1-K1-H2
gcaacgtgtgcatcatacctgtttcggcacatgggacaaatcctgcaagtgctgctatgtgtggaatgaaaattgtttctgttggaaccgattccaagggtaacatcaatattgaagagttaaggaaagctgctgaagctaacaaggacaagttgtccgctcttatggttacttatccttcaacacatggagtgtatgaagaaggcatcgatgagatatgtaagattattcatgacaatggaggtcaagtttacatggatggggctaacatgaatgcccaggtcggtttgacaagtccgggttttattggagccgatgtttgccatctgaatctccacaa

SEQ ID NO: 7428 - DNA, 283 bp, Gossypium hirsutum
  Clone ID: LIB3120-019-Q1-K1-H3
cccacgcgtccgcccacgcgtccgcccacgcgtgcgcccacgcgtccggatttcccttttagcttttaacaaactccgtgcttgctctagatctctccgccttccatgtctggttttgtttttatctcacagtaatataatcaatatctcatatggctcttcttgatgcttctcttatttgcgtgagaatgaatgctcatcaacgtcttgctcctgatggctgaggactcatgtgtaccgtgctcagtggaatactgctttgtgggttgatgatcaactctac

SEQ ID NO: 7429 - DNA, 380 bp, Gossypium hirsutum
  unsure (1)..(380): unsure at all n locations; Clone ID: LIB3120-019-Q1-K1-H4
cccacgcgtncgcccacgcgttcgctaccccattctacaaaccaaatatgagcttcaccatggtaaaaccatggattcactggagttatcttcaacctaccaaattcggcaactacccatcttcaagcagcactagacttttcaacaatggctgccagcagattgatgaaggcaacaagagtaaaataaggggagcttttgttaaagtgaatgctttaccagactggcctctaatggcagttttagttcatcatgttcaacaacttgatgcccaaagagaaattataaccaataaatctatttggcatcttagtgatgaagccattaaaaaaagttatgctttctacattatgttcacttgctggggatgtttggttttt

SEQ ID NO: 7430 - DNA, 283 bp, Gossypium hirsutum
  unsure (1)..(283): unsure at all n locations; Clone ID: LIB3120-019-Q1-K1-H5
cccacgcgtccgcccacgcgtccgcccacgcgtncgcagagtttgaaataatgtctgggttgttctttacattgctgctggggttcatcatttttaattgttactcagagggtagccatggatatcagcaacagcaatctgctgttgttgttggaactgtgtactgtgatacatgtttccagtctgacctctcaaggccaacccatttcatttcaggttttaaattgaatcccaaactccatcttctcttttctcacgtgatgcaagttttcctttttttttc

SEQ ID NO: 7431 - DNA, 418 bp, Gossypium hirsutum
  Clone ID: LIB3120-019-Q1-K1-H6
cccacgcgtccgcccacgcgttcgcccacgcgttcgcccacgcgtgcgcattcattttcattctttctgtaagaaacaagctctgagagaagacaatggtgggttttgaacaatgaagaagaagagaaagtgtgggttatgcttgttccatggcctgccattatgcttactatgcttccttttcaccttcagtaacattgagaggctttggtgccaagaacagagaatccaggccttttcaagtacatctttctttcattagcaagcctgctagagccttctacaataaccttggtctttgaggtggcagggtttttggttctccagcatttttggaagcttaaaacttaaaagtggctttatgggaaaaaaggttaaaaggtatttttgcattattccaaaaaccttccttcttttc

SEQ ID NO: 7432 - DNA, 446 bp, Gossypium hirsutum
  Clone ID: LIB3120-019-Q1-K1-H7
ggcgatttcgacggcgttatccagtgcggctgagaacacgatagttgttgaagatgttggggataaatttgagaaacggaagactaaagagtttattgaggctttgaagagatggggattagacccaaagcagaaatctatgtttttgatgatggaagtgccggaaactgtgaataaatcgagtcggaatattgggactttgaggatgttaacgccgaggacccttaatttgtttgatattttgaattgtgataatttggtgttgactccggatattgtggattatcttaatggaagatatggtgaagattatgaaggtgatactgaggatgataatgaagaatatgaagaagaagacgaacaaagcggtcaagatgagaatgttgatgcagctcaatgacctggcttttcccccttcattagcatataagccatacatatatgct

SEQ ID NO: 7433 - DNA, 426 bp, Gossypium hirsutum
  Clone ID: LIB3120-019-Q1-K1-H8
aaatttcagaaccctaaatccatcccctttcattcctttttcaatcccagttcacaaatttccctttgaattttgattttgtggagccttttaggacgatgtggaatcaggcgtaccggaaaatcgacgatgcggaggcaggagcaaggcccctgtaccccatgatgttagagccgccggagatgagatgggcttttatccggaaaatttactcaatcgtcgccattcaattgttagccacaatcgcggtggccgccacggtggttactgtccatccgattgctcttttcttcgtcagcactggaactggatttgcactttacatagtcctaatcatcacgcctttcatcactctttggcctttgtattactatcaccagaggcatcctggtaattatcttcttcttgggggttttacgggttctt

SEQ ID NO: 7434 - DNA, 414 bp, Gossypium hirsutum
  Clone ID: LIB3120-019-Q1-K1-H9
atacctgtagcatatagtaatagtaagcagtaatagcaatggcctcctccatgatctcatcggcaaccattgccaccgtgaaccgctcctccccggcacaggccaacatggtggcccccttcaccggcctcaaatctgcctctgctttcccagtcaccaggaaggccaacaacgacatcacttctcttgcaagcaacggtgggagagtgcaatgcatgcaggtgtggccgcctcttgggaagaagaagttcgagactctctcatacctgcccgatcttactcccgtacagttggctaaggaaagagattaccttcttcgctctaaaaggattccttgctttggattcgaattagaagaaggattcgtgcaccgtaagtactcgagcttacccacgtactacgatggacgctact

SEQ ID NO: 7435 - DNA, 445 bp, Gossypium hirsutum
  Clone ID: LIB3120-020-Q1-K1-A1
actactttgagaaagctaattgagctccatttccctagtaaacaagagttctttttttcacagcaatggcagccatgaactccagtgttttggcatgcaactatgctatctcaggcactggatcatctgagcttaatgccaaacttgcttcagcgccatcagttgcttccccagttatgtgcggtggtcgcaagttgcctgtgatcagagcccagcaggctaaattttctgattccaaaggatcaggtgccagtgaaggaagaagagctgctgtgctctacttggcagctggccttttcaccacagctgttgcttcttctgcaaatgctggggtcattgacgagtaccttgaaaagagcaaagctaacaaggaattgaatgacaagaagaggttgtcaacaagtggagcaaactttttcagagcatacactgttcaatttggcac

SEQ ID NO: 7436 - DNA, 424 bp, Gossypium hirsutum
  Clone ID: LIB3120-020-Q1-K1-A10
cccacgcgtccgcccacgcgttcgcccacgcgtccgcccacgcgtccggttgtcaggtcatgtgtggagatcagtctgcaaggcacgtggacttgaagatgatcaagggactaaactgtacattgccactgatggaagggcaaggttgcgccccccactcccacctggttactttgggaatgtgatcttcactgctaccccaatagcagtggcaggggatctactgtcaaagccaacatggtacgctgcgagccgtattcatgatgcattggttcggatggatgatgaatatctaaggtcagcccttgattacctggaatttcagccagatttgtctgcacttgtacgtggtgctcatacttttaggtgtccgaaccttgggattactaacttggttaggctaccaatccatgatgcagatttc

SEQ ID NO: 7437 - DNA, 430 bp, Gossypium hirsutum
  Clone ID: LIB3120-020-Q1-K1-A11
gtttttatgttaggtattgtgatggactcgggagatggtgtcagccacacagtgcctatttacgagggttatgccctcccacatgccattcttcgtcttgacttggctggtcgagacctcactgattacttgatgaaaattctgactgagcgtggatattccttcaccaccacagccgaacgggaaattgtgagagacgttaaggaaaagttgtcttacattgcccttgactatgaacaggagctagagacctcaaaaacaagctcatcagtagagaagagctatgagttacctgatggtcaggttattaccattggtgctgaacgtttcagatgccccgaagtgcttttccaaccatccttgattggtatggaagctgcaggcattcatgagactacatacaattcaataatgaagtgcgatgtggata

SEQ ID NO: 7438 - DNA, 301 bp, Gossypium hirsutum
  Clone ID: LIB3120-020-Q1-K1-A12
tttaggcatagcatacactactaggacccactactagcaatggctctctcaatgacctcatcggataccattgccactgccaatgccactcaggctaacatggacgctaacatgaacggtcttaagaccggccttgattttgcagttgctaggaaagccaacaacgacattactaacctcgcaagcaatggcgcgagacttcaatgcatacaggtgtggcctcctacttggcagaatacaggtgagactaacttatacattctcgatctcacacccgaacagacatctaaggaattagatt

SEQ ID NO: 7439 - DNA, 444 bp, Gossypium hirsutum
  Clone ID: LIB3120-020-Q1-K1-A2
gaaaaaaacaataaagagaaaaaatggatgaagaggagcatgaggtgtacggaggggaaatccccgacgaaggagagatggagggcgaattggaccctcagaacgccgacgtcgacatgtccgccgccgatgaagacgctgtcaaggaattggacgagatgaagaaacggttgaaggaaatggaagatgaagcggcggcactccgtgaaatgcaggccaaagtcgagaaggaaatgggtgctgttcaagatcccgctggtgcaacagctaatcaggcgagcaaagaggaagcagattcacgatcagtttttgttggcaatgttgattatgcatgcacacctgaagaagtgcagcagcattttcaatcttgtggcacttgtaacagagtaactattctgacggacaagtatggtcaaccgaaaggatttgcttatgtagagtttc

SEQ ID NO: 7440 - DNA, 419 bp, Gossypium hirsutum
  Clone ID: LIB3120-020-Q1-K1-A3
gccacgcgtacgcccacgcgtccgggttattatctattgaaatggctgcggtgagagaagctttgctaaagcgcctgagggtgaacgcaacatccctgtcgctgctccgtaaccctaaacctagccttaacggtctctttgctctcaccttcaacgccgtccatcgtcgtttttccgacgacgtcatgggctcatttctcgacaaatctgacgtcaccgatcgcgtcgcctccgtcgtcaaaaacttccagaaagtagatccttccaaggttaccccaaatgcccattttcaaaatgatctcgggttagataatttggacactgtggaggtagtcatggcccttgaagaagaatctgggtttgagatacctgataatgaggcagacaagatcggcactattaatcatgctgctgagttc

SEQ ID NO: 7441 - DNA, 364 bp, Gossypium hirsutum
  Clone ID: LIB3120-020-Q1-K1-A4
gttggggctggtatcaagccaacatcgatagtgagttacaaccatctgggaaataatgatggcatgaatctgtcagcaccccaaaccttccgttccaaggagatctcaaagagcaatgttgttgatgacatggtttcaagcaatggaatcctctatgagcctggtgaacatcctgatcatgttgtggtcatcaagtatgtgccgtatgtgggagacagcaagagagccatggatgagtacacatcagagatattcatgggaggcaagaacaccattgtgttgcacaacacatgtgaggattccctgttggctgctcccattatcctagatttggttcttcttgctgaacttagcaccaggatcc

SEQ ID NO: 7442 - DNA, 431 bp, Gossypium hirsutum
  Clone ID: LIB3120-020-Q1-K1-A5
cccacgcgtccgcaacgggcgttatgctatgttgggtgcagtaggtgcgattgcccctgaaatacttgggaaggccggtcttatcccagcagaaacagccctcccttggtttagaaccggtgtgatcccaccagcaggaacatacagctattgggcagacccttacactttgtttgtgttcgagatggcactcatgggatttgcagagcacagaaggttccaagactgggccaaaccaggttcgatggggaaacaatatttcttggggttcgagaagtaccttggagggtctggtgagccggcataccctggaggaccactgtttaacccacttggttttgggaaagatgagaagtcattgatcgatttgaagctgatagacgtgaacaatgggagaatggcaatgttggcaatcttgggttacttcatac

SEQ ID NO: 7443 - DNA, 467 bp, Gossypium hirsutum
  Clone ID: LIB3120-020-Q1-K1-A6
cccacgcgtccggtgatacctatgcatacacaccctggggcttctgaagtccttgttgttattcaaggcacaatttgtgctggtttcatatcctcagctaacaaagtttacttcaaatctctgaaaaggagacattatggtattcccacaaggtttattacatttccaaatcaatgcaggcagaactcaatccttggcatttgtatccttcagcagtccagaccctggtctccaaatcctcgactttgccttgtttgcaaatgacttgccgactgacattattgaagaaaccacttttctggatgctgctcagattaagaagctgaagggtgttcttggaagaactggttaatattatctgaacttgttgagaagcccttttttttttttttttggatgctttcacgtttgcttggggcttcttgtcagtggtaatttggttgaaattactagccaaagaatgagtc

SEQ ID NO: 7444 - DNA, 433 bp, Gossypium hirsutum
  Clone ID: LIB3120-020-Q1-K1-A7
agaatacatggagaagcatgaatttgtttttgatgcagtgctgaacgaggaggtctcaaatgatgaggtctatcgtgagacagtggagcccatagttcctataatttttcaacgcactaaagccacttgttttgcatacggtcaaacagggagtggaaaaacctatactatgaagcctcttccgcttaaagcttctagggatattttgaggttgatgcaccatacctacaggaaccaagggtttcatttgcttgtaagcttctttgagatatatggaggaaaactgtatgatctcctcagtgataggaagaaactttgcatgcgagaggacggtaagcagcaagtttgcattgttggcctgaaagagttcagagtattggatgtagagactattaaggagcttattgagaaaggaaatgccacaagaagtact

SEQ ID NO: 7445 - DNA, 73 bp, Gossypium hirsutum
  Clone ID: LIB3120-020-Q1-K1-A8
attaaccatgcctaagcatgatttgtatggaaattatgtgtttaattagctaatcttaatataggttttatat

SEQ ID NO: 7446 - DNA, 431 bp, Gossypium hirsutum
  Clone ID: LIB3120-020-Q1-K1-A9
gctgaagcaatggcagtttgctcagcatacaccacccagtccctcaattcaacttgttcaatctccacaccagcgaaaacccatttaggttttcaccaaaaggaagtagttttctataggagaagcagcaagagaggtggcagcggcagcggcagcagcagcggcccatgcgtgataacatgctcggccggtgattcacaaactgttgtgattggtttggccgcagactcaggatgtgggaagagtaccttcatgaggaggctaacaagtgtgtttggtggtgcagccgagccaccgaagggaggcaatcctgattcaaacacactcattagcgatatgaccactgtgatatgcttagatgattaccattcactcgacagaactggaaggaaagagaaaggggtgacagcacttgacccaagagctaacga

SEQ ID NO: 7447 - DNA, 391 bp, Gossypium hirsutum
  Clone ID: LIB3120-020-Q1-K1-B1
ctcacgcatacactattagatacaattattagccccggtactatcaatgacttcatcaatgaccatagccactgccattgccactgactctaacatgcacgctaacatgaccggtcttaagaccggccttgagtttgcagttgctatgacagtcaacaacaacgtcactatcgacattagttatgtcggaagcaatgactgcatacagcaatggacgcatactggaacgaatactgtaaagactatgttatagattctctaatatacacccgagcttacacctaaggaagtggattacgaagtggattaacaacggggttcaagatgggaatcttgattagaagacggattcgaggaccgattatagtaccgcatatacacgtgcttacat

SEQ ID NO: 7448 - DNA, 406 bp, Gossypium hirsutum
  Clone ID: LIB3120-020-Q1-K1-B10
atttgatttacagagaccaaagggggggaaatggcgatcacactgaacaatggatttaagatgccagtggttggtttaggtgtttggcgtatggatggaaaagacgttagagacctcatcatcaactccatcaagcttggttatcgtcattttgattgtgctgctgactacaagaatgaagcagaagttggtgaggcattgtctgaagcattcaaaactgggcttgttaagagagaggacctctttattacaaccaagctttggaattctgatcacgggcatgttcttgaggcctgtaaagacagtcttaagaagcttcaattggattatctggatttgtatctagttcactttcccgttgctgtaaagcacactggagtcggtcaaacggacagtcctttggaca

SEQ ID NO: 7449 - DNA, 441 bp, Gossypium hirsutum
  Clone ID: LIB3120-020-Q1-K1-B11
gaaaacacttcaaataaaaaaaaaaaaaccctcgaaatttctcgttctttctcggtcgatcctgaatagggatccaatcatgttgacagtgagtgtgaaatggcaaaaggaactcttgaaggctgtggaaattgataccagtcagcctccatatgttttcaaatgccacttgtacgatctgactggagtacctcctgaaaggcagaaaattatggttaaaggtggcttgttgaaggatgatgcagattggtcaacagttggtctgaagcagggtcaaaagttgatgatgatgggaactgctgatgaggttgttaaagccccagaaaagggccctgtttttatggaagatctttcggaagaagaacaagtggtatctttgggtcatagtgctggtctatttaatctgggaaatacctgctacatgaattctacagtacaatg

SEQ ID NO: 7450 - DNA, 374 bp, Gossypium hirsutum
  Clone ID: LIB3120-020-Q1-K1-B12
ggcaattgctgtgtgtgagagagagagtgagagtaatagtagtatcaataatttggcttacgtggcatctctgtgtctgatgcaacagagaggaaggactaacaaccgtacatcaaggtctttctccacatctcggcttgctgtcgaaggattttagttccccttttcactccccattaaaaaataaaaaaaaatatcttaaaaaaaatcaattcctctcagagctcactagagatcttctctgttaaccatggcggctaacggatttgtaggagatgaacgcaaagttcaaaagaattactggattgaacactcggttgatcttacggtggaggctatgatgctcgactccaaaaccgctgatattgacaaag

SEQ ID NO: 7451 - DNA, 395 bp, Gossypium hirsutum
  Clone ID: LIB3120-020-Q1-K1-B2
gatttgttgaatatttccgccttgctacaccagagttggagtatggtagaatgaatattggaagccgaccatcaaagcggaagccaagtgggggtatcgaatctcttcgtgcaatcccatggatctttgcgtggacacagacaagattccatctccctgtttggctcggatttggagctgcatttaaacatgtcattcagaaggacattaagaatctccttatgctgcaggagatgtacaatgaatggcctttcttcagagtgacaattgatttggtttaaatggtctttgcaaaaggagatcccgggattgcagccttatacgataagcttcttgtttctgaggaactctggtctttcggagagcggttgagaaccaactttgaagaaactaaa

SEQ ID NO: 7452 - DNA, 405 bp, Gossypium hirsutum
  Clone ID: LIB3120-020-Q1-K1-B3
gatatgctgaatatttccgccttgctacaccagagttggagtatggtagaatgaatattggaagcgcgccatcagagcggaagccaagtgggggtatcgaatctcttcgtgcaatcccatggatctttgcgtggacacagacaagattccatctccctgtttggctcggatttggagctgcatttaaacatgtcattcagaaggacattaagaatctccttatgctgcaggagatgtacaatgaatggcctttcttcagagtgacaattgatttggtttaaatggtctttgcaaaaggagatcccgggattgcagccttatacgataagcttcttgtttctgaggaactttgggctttcggagagcggttgagaaccaactttgaagaaactaaaagcctttttc

SEQ ID NO: 7453 - DNA, 413 bp, Gossypium hirsutum
  Clone ID: LIB3120-020-Q1-K1-B4
gaaaaccctaagccctacataaaatacaaggtattgaaagagaagttggacaaagaaagagaaatgagtctgctttcgaatgcagattggggaccaatcgttgttgcagtggtcttgtttatcctcttgtcgccagggatgatgttccaattgccaacgaggacaagggtgatagagtttggcaacatgtgcacaagtgggatagccatcttggttcacgccataatttatttcagcttattcaccatcttgatcatggcaattggtattcacatacatgtttactagttgatccaaaatctcaacaaaaagggtaggctcttctttggctcctttctgtaatttggcttcactggtatttcattgttgtttgtaagagaaaatttggataggagtatgatgaatctatttct

SEQ ID NO: 7454 - DNA, 425 bp, Gossypium hirsutum
  Clone ID: LIB3120-020-Q1-K1-B5
cggacgcgtgggatcatctccgatctcttctcgaaatggcgtcgtttcggtgcttcatagttatctccctcgtttctctcatcctcatttcaactctcactccttcaatctccaagaccgccaaaagcgacgacgtcgagcttgacgacgacgaggatctccgttttctcgaagaaacggagggaaaaaaagacgccgctccttctcactcccacttcaacgaagaagatgacggcgacgacgagtaccccgacctggacgacgaggagttcgggaactaccacgatttcgatgactccgattcggatccgtacaaggaacccgaaatcgacgacaaggacgtcgtcggtttgaaggaagggaacttcagtgatttcattgagaaaaacaagttcgtgatggttgagttctacgcgccgtggtgt

SEQ ID NO: 7455 - DNA, 385 bp, Gossypium hirsutum
  Clone ID: LIB3120-020-Q1-K1-B6
gcctctttttttttttctaatgatacgatgatgacaaagcagaggccttgattactacaatcctatcgtcttccactctcagatcctcacaaattccatctccaaatcccagcccaaagctaaaaactatgtttcttgtcgattggttctacggcattcttgcttccctcggcctctggcagaaagaggctaagatcctctttctcggcctcgataatgccggtaaaaccaccttgcttcacatgttgaaggacgagagattggttcagcatcagccaactcaataccccacatcggaagaacttagtattgggaaaattaagttcaaagctttcgacttgggaagtcatcagattgctcgcaaggtctggaaagattactatgc

SEQ ID NO: 7456 - DNA, 394 bp, Gossypium hirsutum
  Clone ID: LIB3120-020-Q1-K1-B7
cccacgcgtccgggaaaaagggggaaaaaagtgaggatcaagcatagatggaggacatgggagtgtctaggcaaggtggtggattaccttctattgttatcattcttcagcatcacattaacagctcagttggacatccccgagtccatcctcccccacgcctacaatcccttctatcaagtttataccacgttaacccaagattatttggtgcttgagcagcctgcttttttcaaggcacttatgacgttggaacttgtttaccaactccctctcgctttgcttaacatctatgggttgttatactctaagccctggttcaacaccacctgcctcctctttggtgcctctatcgttgcctctacgacagctatggtgggagacattctcaatt

SEQ ID NO: 7457 - DNA, 421 bp, Gossypium hirsutum
  unsure (1)..(421): unsure at all n locations; Clone ID: LIB3120-020-Q1-K1-B8
gtcgcagcttaaacgatgggaacggaaggaatgcaaaccgaacagccttccagttttgcataaaatgcacgttaaggttggagataccatcaaagtaatatcgggtcgtgataagggcaagattggagagataagcaagatcttcaagcataacagcaccattgtagtgaaagatataaacctgaagacgaagcatatgaagagcagaggagaggatcaaccgggacagataattaagattgaagcaccaattcacagctcacatgtgatgctgtattctaaagagaaagaagtgacgagccgggtgggtcataaagtgttagantacgggaaaaaggtccggtacctcataaagccgggagaaatccttgacagtgaggagaattggaagaaactgaaggaagcttcaaaagagaaaact

SEQ ID NO: 7458 - DNA, 442 bp, Gossypium hirsutum
  Clone ID: LIB3120-020-Q1-K1-B9
gccacgcgtccggtgctagtacccactactagcaatggctatctcaatgatctcatcggctacgcattgccactgcctgtccggcacaggctaacatgggcacccctttcaccggcctcaagtctgcctgtgctttcccagtcaccaggaaggccaacaacgacattacttgtctcgcaagcaatggcggcagagtgcaatgcatgcaggtgtggcctcctactggaaagaagaagttcgagactctctcataccttcccgatcttacacccgtgcagttggctaaggaagtggattaccttcttcgctcaaaatgggtaccttgcttggagttcgaatcggaggagggattcgtgcaccgtaagtactcgagcttacccacgtactacgatggacgctactggaccatgtggaagctgcccatgttcgggtgcaccgactc

SEQ ID NO: 7459 - DNA, 423 bp, Gossypium hirsutum
  Clone ID: LIB3120-020-Q1-K1-C1
ctccattgaatatggctttatccatggcttccacttcattttcaagcttctcaataatcaggaggcatcccaaaaaattattttcgagaaaagttacgacattgttacgaggggaaactcgtacgaaagcaacgaaaggtggagtctcgagtgtttgtgaaccactgcctcctgatagacctttgtggttccctggtagcacacctcctgaatggcttgatggcagccttcctggagattttggtttcgatccacttggattaggttccgatccagaaaccctaaaatggttcgcacaagccgaactaatgcacgcaaggtgggcaatgctggccgtggccggaatcctcatacccgaactactcgaatccttgggcttcatcgacaacttctcatggtatgacgccggctctaaacaatact

SEQ ID NO: 7460 - DNA, 376 bp, Gossypium hirsutum
  Clone ID: LIB3120-020-Q1-K1-C10
gggaaagtctggtgcttctttcaaggactcatctctctttggagtgtcactttctgatcacatcaaagctgacttcacctcttctgctttaagatgcaaggttgggattctgtgttctttaaattggacaactatggtgtttatgctgtttttgtgcctttaattgagcctttttcctttgtagagggaattcaaccatagaactggggctgttagagcccaaacaacagccactgcaacaccagcaatcaccagatctacagtggatggaaagaaaacactaagaaagggtagtgtgatcatcactggtgcctcctctggattgagtttagccactgcaaaggccttggctgaaactgggaaatggcatgttata

SEQ ID NO: 7461 - DNA, 399 bp, Gossypium hirsutum
  Clone ID: LIB3120-020-Q1-K1-C11
aatttctccaaagttgaccgctgccgccggttctccgtagctgccaccgccactactactccacagagcgaggattctgacgtttccactaaaattcctcctgatactcgcattcccgccaccataatcaccggctttttgggctctggcaagacaacattactcaatcacatcttgactgcagatcacgggaagcgtatagcagtgatagagaatgagtatggtgaagtagacatcgatggctctcttgttgctgctaaagctgctggggctgaggacatagtcatgcttaacaatggctgtctctgctgtactgtaaggggtgatcttgtgaggatgattgcagagctagtcagtaggaagaaagggaaatttgaccacattgtaattgagactaca

SEQ ID NO: 7462 - DNA, 379 bp, Gossypium hirsutum
  Clone ID: LIB3120-020-Q1-K1-C12
accactcgtgcgcttcacagcaggaccagatgaggttaaatgctggcaaattagactgctatgcaaggctgctcaagctgcaggagccattcatactgattttgatagaggatttatatgtgctgacgtcatgaaattggaagatctgaaggagcttggcagtgagtcagctgtcaaggctgctggaaaatataagcatgaagggaaaacttatgtggtccaagacggacacataatattctttaagttcaatgattctggaagccggaagaactgaaatgagactcttgagtggggatatggtgctgggttcggacttacatacctggattatcaaatccgtacgcatattgctgccatctgagactttgcttagata

SEQ ID NO: 7463 - DNA, 241 bp, Gossypium hirsutum
  Clone ID: LIB3120-020-Q1-K1-C2
ttcactttcagggtttccaatgaagaacaaattaagagcataaaagcaccaggatcaaattcagagtaaatttgaaaaataaccccaaaattcaaggcttcctttgattccaaagtaatctttaaaaaaaatcctttcttttaatcaactcattaagcccatccttcaccgccaaatcgaacctaccacaaaattttgcgcagaaaaaaaattggatctagattctcctttcttcttctct

SEQ ID NO: 7464 - DNA, 342 bp, Gossypium hirsutum
  Clone ID: LIB3120-020-Q1-K1-C3
ggccactcttacttcaacttggtcctcctcacgaacgtcgtaggtgccgcggatgcccatgctgagtcaatcaagggctctaagacaggatggctgtcaacgtcgagaaactggggtcaaaactggcagagcaactcctaccttaatggtcaaagcctgactcttcaagtgacgacaagtgatggcaggactgtgagcacctacaacgtggcacctgcagattgtcagttcggacaaacctttcaaggtggtcaggtttagagtttcagggcaaatgcctgtaattccaaaatgaggctgtaatgtcatgagatagccattgcttgagacacacagagaaac

SEQ ID NO: 7465 - DNA, 380 bp, Gossypium hirsutum
  Clone ID: LIB3120-020-Q1-K1-C4
ttcaatctccacaagttcatgctggtggcaaagagcaattacataaggaagttgataatggaaacaaatgaagcggatttgacaagaatcaacctgtctgaaatccccggaggccctgagatcttcgagaaagcagccaagttctgctacggcgttaatttcgagattacagtgcataacgtggcggctctccgatgtgctgccgagtatcttcaaatgacggataaatactgcgacaacaacctggcagggcgcaccgaagatttcctctcacaggttgccctgtctagcctttatggcgccgacgtcgttcttaaatcatgcgaggatctgctttccatggctgaagagctcaagattgttcaaagatgcattgatgt

SEQ ID NO: 7466 - DNA, 329 bp, Gossypium hirsutum
  Clone ID: LIB3120-020-Q1-K1-C5
aacaagctcacgaaaatctttaatctgtatcaatccttgtgaacatcgtagggggattaaacgccgtcttatacggatctccacgagacgattttagtaaccatgggcatgagcgcagcaactgtaaacacaatgacattttcaacatgaccctttcaaagaaagtagatcatcaagtgcagaggaatgtctagcatgaaatgtgcatgaaataatagaacatacatgagtcccacaaacagtatcataagagctgattacaactgtgcatcaatatgaggaatggaagactgctgataacataacagcactgcatgtgcctaattgca

SEQ ID NO: 7467 - DNA, 401 bp, Gossypium hirsutum
  Clone ID: LIB3120-020-Q1-K1-C6
ctcaagatatcattgtccaatctgcaagaccctatggtcagagggctgtcttgaaatttgctcagtacactggttgtcatgccattgctggaaggcacactcctggtacattcactaaccaactccagacatctttcagtgagccacgccttcttatcctcacagatcctaggaccgaccaccagcctatcaaggaagcagctcttggaaatattcctaccattgctttttgtgacacagactcaccaatgcgatatgttgacattggtattcctgctaataacaagggaaagcacagcattggctggcttttctggcttgtagctaggatggttcttcagatgcgtggtacaattgctcctggacagaagtgggatgtgatggtggatctatttttctac

SEQ ID NO: 7468 - DNA, 354 bp, Gossypium hirsutum
  Clone ID: LIB3120-020-Q1-K1-C7
caaagtacaatcactcccaatactttcataacatttcacgaacttcactctggagtcttcaatggcggctgtcgggttcaccatcggtgctgtcaaccgagcaccgttgagtttgaatggatcaggtgccggagcttctgctccaagctcaactttcatggggaacagcttgaacaaagtgagcgctaggttcaacaacaacggctaggcttcagtgggaagtttcatgattgtagctgccaaagaaatcgacgaagacacacagaccgaccaggaccgatggaagggtcttgcttatgatatctccgatgaccatcaagacattaccagagggaaaagtatggtcgactcatt

SEQ ID NO: 7469 - DNA, 465 bp, Gossypium hirsutum
  Clone ID: LIB3120-020-Q1-K1-C8
gtcggttactgtttctgtagccaaaccaacccttcaggcaaatgcaaagggttttgcggaattctcaggtctgcgcaactcagctagccttacctttgccaggaaaacctcggatgactttcaatcagtcattgcttttcagacttctgctttgggaatcaataatggtggataccggaaaggcgtggtagaggcaaagctaaaggtcgctattaatgggtttggtaggattggcaggaactttttaaggtgctggcacggccgtaaggactccccacttgatgtcattgcaatcaatgacactggtggtgttaagcaggcttctcaccttctcaagtatgactctacccttgggatatttgaagccgatgttaagcctgttggtgataacgccatatcttgtgatggcaaggtcatcaaagtcgtttctgaccgcaaccccgtgaaccttccatggaaagactt

SEQ ID NO: 7470 - DNA, 459 bp, Gossypium hirsutum
  Clone ID: LIB3120-020-Q1-K1-C9
taattttgtttaattttttcaattaatacaaattccatagcaatggcttgcagtggacagcttcatgtggaggttgagctcaagtctcttgcagaaaaggtctgggaaaccattagggactctaccaaaatatttcctcaagctttgtcccatgattacaagagcattgaagtgctcgagggcgatggcaaggcccccggatccatccgcctcatcaattatgctgaaggatctccaatcgttaaggtttcaaaggagagaattgaatcagtggatgaagctgagaagatatatgtttacagcatctttgatggggatctcatgaaatactacaagactttcattgctaagatcaatgtgattcccaaaggagagtcgagcttggttaaatggtcttgtgaatttgagaaggcaagtgaagagatccctgacccaagcgtcattaaggacattgcggtg

SEQ ID NO: 7471 - DNA, 421 bp, Gossypium hirsutum
  Clone ID: LIB3120-020-Q1-K1-D1
tgagcgatagaggaaaatcacgaattcctgaaaataaatacaatgcatagatcgcgatctccagggctattagctttatcatttctgttcacatccttccccatctctaacgctctttacgtgccgtcgtcgccggtggttcagctcactccatctaatttcaagtccaaggttttaaattctaacggagttgttttggttgagttcttcgcgccttggtgtggccattgccaagctttaacacctacatgggagaaagccgccaatgtcttgaaaggtgtcgctacagtggcagccctcgatgctgatgctcataagtctcttgcccaagaatacgggattagaggatttcctacaataaaagtgttcgcccctggaaagccacctgtagattatcagggagctagagatgtcaaaccta

SEQ ID NO: 7472 - DNA, 389 bp, Gossypium hirsutum
  Clone ID: LIB3120-020-Q1-K1-D10
gcttcttatcatgaaattgcctttccagaggcttgttcgtgaaattgcccaggacttcaagactgatttgcgtttccagagccatgctgttgtagctcttcaggaagctgcacaggcataccttgcgggtctttttgaagacaccaacctttgtgcgatccacgccaagcgtgtcacaattatgcccaaggacattcatttggctcgtaggatcagaggagagcgtgcttaatttacatgcgtgtggatcagtcgctttgaaagactatactattgcttatttctaggcaaatgtattgatcgttgggggtttgtaataatctttcatgccatgatggccatggtaggttcaatgtgatgtgatgatcacttggggcgtctgatatgct

SEQ ID NO: 7473 - DNA, 300 bp, Gossypium hirsutum
  Clone ID: LIB3120-020-Q1-K1-D11
accacctgcaatcgctgcaataccaatgccttaatttgtatgaaaaatgctccaaagatacctgcaaagaatttccatgcactgactaggttggatgaaaatagagcgaaatgccagcttgccctaaaagcaggtgtcttctacgatcaagtgtcaaacatgaccatctggggaaatcactcaacaactcaggttccagacttcctaaatgctagaatcaagggcttacctgtcaaagaggtcatcaaggatcacaaatggttagaagaggagtttactgaaaaggtccaaaagagaggc

SEQ ID NO: 7474 - DNA, 258 bp, Gossypium hirsutum
  unsure (1)..(258): unsure at all n locations; Clone ID: LIB3120-020-Q1-K1-D12
gccatgtctcaggaagatatcttagctcttacgaaagctggagaggtgactattgctacacactgtttgaagctgactgaaattaagcttgtgcgggaatttaaacatcctgatggcatgacagataaagagatggatgcagctggagatggtgatgttttggtggggtttggatatccgtnctgatgagtcattgnttgatgctggtgttgcacgtgaggtggttatagaattcaaaaatcacgaaagaaagctggc

SEQ ID NO: 7475 - DNA, 404 bp, Gossypium hirsutum
  Clone ID: LIB3120-020-Q1-K1-D2
cccacgcgttcggcgaggcactccataggtcatgtggatgttgtggaagctgcgtagaagatgaggttcaacgtgaacaatgtgaattaacctgtgacttagcaacccatgtcttgtgccatccttgtgccgtttgtcaggaaggtcgcgagattcgtcgaaggttgcaccatccacggttcaatgctcaacctgtcttcaccatggtcccttctggcgagcaaaccatggcccgttgagcctaatttcatgttctgcccattccctaccttataactaaacgtaatctagtagctagctcaacaacattttgttgcgtgatgtctatgctgtgaaaaatatattgcgtgtaatgagttgtggaaattaagtttagaagcagctttatgttacattttctagta

SEQ ID NO: 7476 - DNA, 426 bp, Gossypium hirsutum
  Clone ID: LIB3120-020-Q1-K1-D3
gttatgtttcggcggtctaaatcacagaaagctttgaagaagaagcttttggaggtgcaaaacatggggcccaagaaaggtggaaaggtggctgtgcccgacaagaagaaacaagagaacgttgtcaatccgttatttgagaagcgtccaaagcagttcggcattggacgggctttacctcctaagaaggatttgcatcgattcgtgaagtggcctaaggttgttcgtattcaaaggaagaagaggatcctcaagcagaggttgaaggttccaccagcattgaaccagttcaccaagactcttgacaagaacctcgcaacaagtctgttcaagttgctccttaagtacaggccaaaggacaaagcgggcaagaaggaacgtctctttgaaaaggcccaagccgaggcttaaggaaaaggccccgag

SEQ ID NO: 7477 - DNA, 453 bp, Gossypium hirsutum
  Clone ID: LIB3120-020-Q1-K1-D4
gccacgcgtccgcccacgcgttcggaacaacattggtgaaatcaccagcggaggatttagcccctgcctgaagaagaacatagcaatgggatatgtgaaatctggactacacaaggcaggcaccaaagctaagattttggtaagaggaaaggcctatgatggagttgtcacaaaaatgccttttgtacccacaaaatattacaagccatcctaagatggaatttgcgctttcagctcctcagttttactgcgatgtttcatctgcaatcaaatgccaatgccctgtttctcttttaactgacatgacattacatgaacatgcatgtgattattgcttgtattctgttcaattccaatttctcgaataatgacaatgaatgttatatatcactaataaagggaaagattgaaacctggcaaagcttcattaaaaataaattatttctgatttca

SEQ ID NO: 7478 - DNA, 392 bp, Gossypium hirsutum
  Clone ID: LIB3120-020-Q1-K1-D5
cgtgaggccaaataccaaaatataaatacatggcatcataaacagcgctaagaggatctaattcgagttcaactgggtgtaatctaaatgggtttcaaaggagaccaacccctttatcttcttcaactcgttttctgagtcttcgtactcgagcttcttcttcttcaatttcctcttctttatcccacttcatggggagtgtcacaattggctcaagacttcctatttcacttcaacacaaggggaagagaaggaacttctctctctttgctatggccgctgatgagtcaaagcgttctgtacctttgaaagattatcccaatattggaattatggctcacatttatgcctgaaagacaacgactacctaacgtattttatactacacagga

SEQ ID NO: 7479 - DNA, 435 bp, Gossypium hirsutum
  Clone ID: LIB3120-020-Q1-K1-D6
gcgactggtcgtctagtcacggtgaagaacgggaacgattcgctcgaaatatgtcgagtccttaacggcatgtggcagaccagtggaggttggggcagaatcgaccgagacgccgtcgttgaagccatgcttcgctacgctgacgccggtctctccaccttcgacatggccgaccactacgggcctgcagaagatctttatggcatctttatcaatagagtgcgtcgggagcgtccaccagagtacttggaaaaagtcagaggtctcactaaatgggtacctccaccagtaaagatgacaagtggctatgtcagggagaacattgatgtctcacgcaagaggatggatgtgccttcattggatatgcttcagtttcactggtgggattattcgaatcctggctaccttgatgctctaaaaaaccttactgatctg

SEQ ID NO: 7480 - DNA, 188 bp, Gossypium hirsutum
  Clone ID: LIB3120-020-Q1-K1-D7
gagaagaacatgcaaccttcatccacttaaatcaatgacaccctctttcttggtgtatctctgcatctctttgtggtaactaccatctttgttcacgatggagattactgtacattctccattacatttcctttactaataaactatgttccatagacttgttctaaaaaaaaaaaactacattccaa

SEQ ID NO: 7481 - DNA, 409 bp, Gossypium hirsutum
  Clone ID: LIB3120-020-Q1-K1-D8
ctctcactcgcttacgcgccacttcgaattccagcgcttccattcaccatatgccttgccagcggatcttccgtcctttccaccggctctcctttcctttatccaccgtcaacgctggctccagttctcgcaggtcatccgcttttgttgtcgccgctagcggcactctcaccgccaattccgtttcgccgagaggtggagtatatacagttggggatttcatgacgggaaaagaggatttgcatgttgtaaagccaacaacaactgttgatgaagcactggaagctcttgttgaacacagaatcaccggttttcctgttatcgatgatgattggaaattggttggacttgcttctgattatgacttgctagcattggactccatatctgggcggcggactgagaatga

SEQ ID NO: 7482 - DNA, 425 bp, Gossypium hirsutum
  Clone ID: LIB3120-020-Q1-K1-E1
cccacgcgtccggtattccaaagggagcaaccactgcatcactcttgaaagaagccatccatgggtcagctgcggttatgaagatggaacagattggggaaaagaagttgggtggatatatggctcagttactgaggatatattaacaggcttcaagatgcactgtcatggttggcggtcagtgtactgcattccaaaaaggcctgcatttaaaggttcagctccaatcaacctctcagatcgtctgcaccaagttctacgttgggctctgggatctgttgaaattttcttgagcaggcattgcccaatatggtacggttatggttgtggattgaaatccttggagcgcttttcttatattgcttcagttgtgtaccctttgacatcagttccactgctcgtttattgtacgctgccagctatat

SEQ ID NO: 7483 - DNA, 425 bp, Gossypium hirsutum
  Clone ID: LIB3120-020-Q1-K1-E10
cccacgcgtccgaaaggatactattacaggtgaaactcttagcgaccctgaccatcctattgtacttgaacgaatggacttccccgatcccgtgattaaggttgctattgaacctaagactaaagctgatgtcgataaaatggctaatggtttgatcaagcttgctcaagaagacccttctttccacttctcacgggatgaagagatcaaccagaccgtaattgaaggaatgggagaattacatctcgagattatcgttgatcgtttgaagagagagttcaaggtcgaagccaatgtcggtgcaccacaagttaattaccgggaaagtatttccaaagtttcagaagtgaaatacgtacacaagatacaatcaggtggacaagggcagcttgctgatattactgttcgtttcgagcctatggaag

SEQ ID NO: 7484 - DNA, 429 bp, Gossypium hirsutum
  Clone ID: LIB3120-020-Q1-K1-E12
gcgactcgttcgtccacgcgtccgcaatgatcggagaccgtgtgttcgatcctttcgggtttgctaaaccgggtggatacttacagtacgatgtggactcgttggaccagaacttggccaagaatgtggccggtgatattataggggtgattagcgagactgcggagctgaaaccgacgccgtttcagccgtacacggaggtttttgggattcaaaggtgtatagagtgtgagttgattcatgggagatgggcaatgttgggtacgcttggtgctattgccgttgaggcactcacctgcgttgcatggcaagactcatggaatgtatatttagtggaatgagcatcatacttagggctaccactttcattctcattgaccacattaatattgattgaggttttggtgattgggtacattgagttccaac

SEQ ID NO: 7485 - DNA, 434 bp, Gossypium hirsutum
  Clone ID: LIB3120-020-Q1-K1-E2
gcatacactactagtacccactactagcaatggcttcctcaatgatctcatcggctaccattgccactgcctctccggcacaggctaacatggtcacccctttcaccggcctcaagtctgcctctgctttcccagtcaccaggaaggccaacaacgacattacttctctcgcaagcaatggcggcagagtgcaatgcatgcaggtgtggcctcctactggaaagaagaagttcgagactctctcatacctgcccgatcttacacccgtgcagttggctaaggaagtagattaccttcttcgctcaaaatgggttccctgcttggagttcgaattggaggagggattcgtgcaccgtaagtactcgagcttacccacgtactacgatggacgctactggaccatgtggaagctgcccatgttcgggtgcaccgac

SEQ ID NO: 7486 - DNA, 461 bp, Gossypium hirsutum
  Clone ID: LIB3120-020-Q1-K1-E3
ggttgagatcacccaccacatctgctgaatcaaagaagaatttggtatatttcctgcgtgaattttgtagtttaagcaagagcctgcacatggtgcagcagcttcaactatttagggatcttataaatgaaggtatctttgacattatcagtgatgctctgcagagtcaagataaaaagctcgtactaactgggacagacatcctcatactattcttgaatcaggatccaacccttctgcgctctcatgttgttcgccaggaagggattcctcttttaggacttttggttaaagggatgattacagattttggggaggatatgcactgccagtttcttgaaattcttcgtagcttattggattcggtctcattgacaggagctcatagagataccattattgatattttttatgacaagcatttgggccagctaattgacgtcataatattatcatgccct

SEQ ID NO: 7487 - DNA, 445 bp, Gossypium hirsutum
  Clone ID: LIB3120-020-Q1-K1-E4
gacagatacagatcaaatgtatacactgatttctgcagttcatgcgctatgcaatgaaacaatacttgccaatgatatgtatgttggcgaatgccaagactcgagtaacttcaatgaggaacttatccaaggaaacctgttaatctgtagctattcaatccgatttgtgcttggactctctacaatcaagcaggccttagaaactgcgaaaaacctcagtgcagctggagttgtgttctacatggatccttacgtaattggttttcagcttaatcccacaccattggaaatacctggcatcataattccatccccagatgattcaaagattttactccaatattacaattcatctttggaaagagatgggctttcaaggaaaattgttagatttggggcacttgcaagcattttacgtggactgaaggcaaactacagcattact

SEQ ID NO: 7488 - DNA, 425 bp, Gossypium hirsutum
  Clone ID: LIB3120-020-Q1-K1-E5
acgcggacgcgtgggggcgctctcttgacattgagcgacccacttacaccaatctgaaccgtcttggctcccaggtgggctcctctttgactgcttcacttaggttcgatggtgccttgaacgtggatgtaacagaattccagaccaacttggtcccttacccaagaatacacttcatgctttcttcatacgctccagtcatctctgctgagaaggcttaccatgagcagctatcagttgctgaaatcaccaatagtgcctttgagccctcatctatgatggccaagtgtgatcctcgccatggcaagtatatggcttgctgcttgatgtaccgaggtgatgttgtgcccaaggatgtcaatgctgctcgtgccaccatttagaccctgagaactattcagttcgttgactggtgcccaactgga

SEQ ID NO: 7489 - DNA, 389 bp, Gossypium hirsutum
  Clone ID: LIB3120-020-Q1-K1-E6
gataaagctgatgactcgggtcttgcttcgtatgttgccggacaaatcgatcgttcccttagctggaaggatgtgaaatggcttcaaacaatcactacattgccaattcttgtgaagggtgtactcactgctgaagatgcaaggatagcggtagaggctggagcatccggaatcatcgtctccaaccacggagctcgccaactcgattatgttcctgccactatcatggccctggaagaggttgtcaaagctgctcaaggtcgggttcctgtcttcttggacggtggtgttcggcgaggaaccgatgtttttaaagctttggcattgggagcctctggtatatttattgggcgaccagtggtgttctcattggctgctgaaagagaagc

SEQ ID NO: 7490 - DNA, 407 bp, Gossypium hirsutum
  Clone ID: LIB3120-020-Q1-K1-E7
gaccaatacgccttccggaacctcccagccccaccataggagtgccggagatcttcgaaggcggcgcctacagcgttatcagacgcgccgtcatcatcggcaacggctaccctggatccgagaatcagagtatcgggttggtccgagctctcggcttatacgacaagcatgttatttatcgagttacgaggccaagaggagggataaacgagtggcttctttggcttccagttagtcttcaccaaaaattggattatctcatccagttcattcaaatttactcccgagggaggaattatgtgcctttacctctagaacatggtggtggaagtgttggcttggcttctgctttagaagctgatgttaagcagatcgtaaccatggcttgccagacttttgaaaaggat

SEQ ID NO: 7491 - DNA, 426 bp, Gossypium hirsutum
  Clone ID: LIB3120-020-Q1-K1-E8
atcttcccaccatctttgaagttgttactggaaggaagcaggtcaaagacaaacccacagtagagagcggaagcaaatcacgaaatagcactaagaggtcactcgatgggcagccgagaaacaatcctaagatagctgataatagttacaaggaggatgaagaagagcagggtgataccttttgtgggatctgtgggggaggatacaattccgatgagttttggattggttgtgacaactgtgaacggtggtaccatggaaagtgtgtgaagataacaccagcgaaggcagaaatgattaagttttacaactgtcctttgtgccaaaagaaggtaaggcaatagtcatcaatggagggattaaccccgattggttttattcaccgatggtgtttgtaagcaactatgggcaaatgagtgcgtaatt

SEQ ID NO: 7492 - DNA, 443 bp, Gossypium hirsutum
  unsure (1)..(443): unsure at all n locations; Clone ID: LIB3120-020-Q1-K1-E9
tcgcccacgcgtccgcccacgcgtccgctttcttccctaatggaaggaaccgtgacttctccagaccctcttgcctctagcacatgggaggaggttcctcctgagaataccctgattacaccagtacaatgtaagtcactatggagacagttcaaatcagagactgaatatacagttactcaagctatttcagcacaggaggcatacaagcgaagtaacaactggttacctcctccatgggcaattgtggcaatggttgtccttggatttaatgaatttatgcttcttctaaggaatcctctctatctcatgtttctatttgttgcatttttactctcanaagctatgtgggtacagatggatgttccagggcagtttcaacatgggactttggctgggctaaactctatttcatcaaggtttctttctactgtcatgaatct

SEQ ID NO: 7493 - DNA, 436 bp, Gossypium hirsutum
  Clone ID: LIB3120-020-Q1-K1-F1
cccacgcgtccgaaaatatctgcagaatcataatggagaattatctctttctgttctcgcttgttcttctctttggtcttttacccttttcctctcaaaccccaaaccctaaaaaccccaatcccaaacctccgctcacccaggcacacaccgagcttataaactatggttttccgatcggtcttcttccggcctcggtgacgaagtacactcttaaccaaacatccggtaacttcgccattgatctcggtggcacgtgcaagatcacgctcccgcctgacaactacctggctacttactcgaagcgggtaacggggaagattgaaaacggaaagatagcggaactcgatgggatcagggtacgggctttgttcaaatggtggtccataaccgggattcgatccagcggggataatttggtctttgaagttgggat

SEQ ID NO: 7494 - DNA, 459 bp, Gossypium hirsutum
  Clone ID: LIB3120-020-Q1-K1-F10
ggcaaacctgatagctttggaggagacttccttgtaccatcctaccgtggctcatctttcttggacccaaagggaaggggtggctcaaccggttacgataatgcagtggccttgcctgctggaggaagaggggatgaggaagagctagccaaggagaacaacaagagtgctgcatcttcatcagggaaaatcaccttgagcgtcacaaagagcaagccggagaccggtgaagttatcggtgtgttcgagagccttcagccatctgacactgacttgggtgccaagactccaaaggatgtcaagatcactggtgtctggtatgctcagcttgattcataaacaagtcttgtatgaatttgcttattctcggctgagattttgtaatttttaaacaagtgttgctaaactttgcagtaatccactgggaaacccttatcttccttgtatggtactatgctg

SEQ ID NO: 7495 - DNA, 350 bp, Gossypium hirsutum
  Clone ID: LIB3120-020-Q1-K1-F11
cgattcatgcctttccctcactttctaggttctactctttcagtgagggtttccaaattagcctatctttgatacgcaggtgtctggattggttaaagaatggccatgacgccacaaatggcttaataaataaatcccacacccagttggccaaagctttacaccgaagaagcaaagcagcatcggcatggcagtttattgcaattccgctcccttttcttgcaaagcctcgagaaacagagaccccacacccttatccgcactcttacccacccgtctcttctcacttcttcaacccccaatcagcttccatccagatagattaaagctctcaacttgcacgtgggata

SEQ ID NO: 7496 - DNA, 114 bp, Gossypium hirsutum
  Clone ID: LIB3120-020-Q1-K1-F12
tcggcaccgtcgcctaacgtgaatgggaaaggcattagattttgaagggtacctttgaaccaaccgttattaaggggaacccgttaactcccgtggtaccgtataatggcttga

SEQ ID NO: 7497 - DNA, 180 bp, Gossypium hirsutum
  Clone ID: LIB3120-020-Q1-K1-F2
cttttagtttaatcgaagagagaagaagcgagaggtaccagcgtacgccatggctggtactgcaaagatcaccggcgctcttttaggaggccagggtcatcatcgcttgtctggcatgacacgttgccgtcggacacgactcaaggcgcaccagaacatcatgagcccgatggacacact

SEQ ID NO: 7498 - DNA, 401 bp, Gossypium hirsutum
  Clone ID: LIB3120-020-Q1-K1-F3
aaacggcagacgaaaccaaagaacacaaaacgaaaaacgcaatctttacaaacatggagatgagtttaacccaaatagccaagccaccaccatgtcttgttaacaaaaattctctttttacaaacaaaaaaagagtaaaaaccactgtagaagctctaaggaattcatatccaaaaagagcaacactatccagtaattggaatgtctctaatttatcccctctttcttcatcttcaacaactccaacttggtttcccagatttgaagagcttgacactaccaacatgcttcttcgtcaaaggattatatttttgggttctcaggtggatgacatgacagcagacttgattataagtcaactgttacttctcgatgctgaagactctgagaaagacataaaa

SEQ ID NO: 7499 - DNA, 448 bp, Gossypium hirsutum
  Clone ID: LIB3120-020-Q1-K1-F4
aaacaatagttaaaaagaaaaatgagcttctcttcactaacaagtgcttgcagttccttgggtgttaaatcatcaagcttgatagtgcagttgggttttcagactactgaaaataacaagttccctggagcttttgtttcatcccccaaaagaacaaaaattaagaagttttctatagcttgctcttctactgatccattgttggttaaggctgcgagaggagatcctgtaagtcgacctcctgcatggatgatgcggcaggcaggaaggtatatggctgtttacagaaagcttgccgagaaacacccatccttcagagagaggtccgagacaactgatctcattgtggaaatttctctgcagccttgggaagctttccgtcctgatggagtgataattttctccgatatacttacttcactgcctgcatttggggtcccatttgaca

SEQ ID NO: 7500 - DNA, 408 bp, Gossypium hirsutum
  Clone ID: LIB3120-020-Q1-K1-F5
cccacgcgtccgcccacgcgtccgctagtattaggcttcggacagcttgtgagaagctaaagagagtacttagtgccaatcctgaggcccctttgaatattgagtgcttgatggatgagaaggatgttaggggtttcatcaagagagaggagttcgaacagatcagtgctccaattttgcgacgtgtgaagaggccacttgagaaggctcttgccgatactggacttgcagttgaaaatgttcatatggttgaagttgttggctcaacctcccgggttcctgctatgttgaaaatcctcacagagttctttggtaaagagcctaggcgtacaatgaatgctagtgaatgtgttgcaaggggttgtgctttaaaatgtgcaattcttaagtccacattcaaagttcgag

SEQ ID NO: 7501 - DNA, 425 bp, Gossypium hirsutum
  Clone ID: LIB3120-020-Q1-K1-F6
ggggctgtgtgtccatggaagtgctagcaacctcctctgcatcttctacataccctcttttcactttagataaccccaacaaaccattttctttcacattcaaccccatcatcatttctcaggttcatccatggaaatcttttcctgttaagaagattgaagctcgattattgtgtcggattttgtgtaaacggacgaatctcgacaactctggaagttggcgcagcagtactaatgcgatttgcaagcacaagtttgtgtttcacgcactctgcagaccgaataaaaactttacatctcagtctggtttatttgcaataaggcatgggcacttacttagatcctggaatacaagtagtcatcaaaaggtgaatagtcattcgcaaaagatcagagaacatttctcgcgtggtttcgttcgctta

SEQ ID NO: 7502 - DNA, 439 bp, Gossypium hirsutum
  Clone ID: LIB3120-020-Q1-K1-F7
caatttaatagggtcgattgggtgattgttggtttttgagtgctgtcgctgttttgacggagggtttgcaaatatctgaagtgatgattactccagagtacaatgaggagggaatctacaccgttcgcttctgtattcagggtgagtgggtccctgttgttgttgatgattggattccatgtgaatctcccggcaagccagcatttgctaccagcaggaagggtaatgaactatgggtttctatattggagaaggcatatgcaaaactgcatggttcttatgaggcactagaaggtggtctcgttcaggatgcacttgttgatcttactggaggtgctggggaggagattgacatgagaagtccccaggcccagatagaccttgccagtggtagactatggtctcaattggtgcgggttaaacaagaaggatttcttct

SEQ ID NO: 7503 - DNA, 438 bp, Gossypium hirsutum
  Clone ID: LIB3120-020-Q1-K1-F8
cccacgcgtccgtgtgcgtgtgttctcccccttctttacaaaaatgaaaggaatggctttataggcgaacaataatccaacatagagaaatacaagccccccttttttttattctgttgttttttgcttctatttgctgatgtctgcttgtctgcttgcaggtacatggcggtgtacggatgtggtatggtcgtgtcgacgtggaggctcgagcgatggtagtgctggaggctgctggaggctactgcatcggcaagcgaatggggctagggttagggtttccaagaactttcaaaggattgggcctatcgggctctatttttgggtctaggttaatattagttgttgggccattgagtattgagctagggttaattcgggtttggggtttaaatatatgtttgggtttgtaatggattgggtttaaaaattgggtta

SEQ ID NO: 7504 - DNA, 299 bp, Gossypium hirsutum
  Clone ID: LIB3120-020-Q1-K1-F9
tcgcccaaaccttcaccatgccctccaccttcttgccctaaggacacattgaagctcggtgtctgtgctgacgtgcttggacttgtcaacgtgattgttggaacccctgctttcagcaaatgctgtgctttgcttcaaggattggctgatttggaagctggcctttgcctttgcactgccattaaagccaatgtacttggaatcaacctcaacatgccaatttctcttagtctaatccttagtgcatgtcaaaaagaggttcctccaggcttcaaatgtgaatcaaaaagatatattat

SEQ ID NO: 7505 - DNA, 408 bp, Gossypium hirsutum
  Clone ID: LIB3120-020-Q1-K1-G1
aaaaaatccaattttcatttcaaagattctctcaaaacagtgagggagtagtagttcgagttatcgacgacgttttttttcaacacgaaaaaaaatggataacttttacgcaccagggaagaaccatctcttcgttccgggtccggttaacataccggaacccgttattcgagccatgaaccggaacaacgaggattaccgttccccggctattccggcgatgacaaaaacccttctcgaagatgtcaagaagatattcaagactacgaccgggactccttttatgatcccaacaacaggaaccggtgcatgggagagtgcacttactaatacgttatcccccggtgaccgaatcgtatcgttcctcattggacaattcagtcttctttggatcgatcaacaacaacg

SEQ ID NO: 7506 - DNA, 91 bp, Gossypium hirsutum
  Clone ID: LIB3120-020-Q1-K1-G10
aaactgtaattccacaaaaccaacttctttttatacgtataaaaaggagaatatgaaggcatcatatattgcattgtgtgcagtgatggtg

SEQ ID NO: 7507 - DNA, 372 bp, Gossypium hirsutum
  Clone ID: LIB3120-020-Q1-K1-G11
cccacgcgtccgtttagctatagcatacactactagtacccactactagcaatggcttcctcagtgatctcatcggctaccattgccactggctctccggcacaggctaacatggtcgctcctttcaccggtctcaagtctgcctctgctttcccagtcaccaggaaggccaacaacgacattacttctctcgcaagcaatggcggtagagtgcaatgcatgcacgtgtggcctcctactgggaagaagaagtttgagactctctcatacctccccgatcttacacccgtgcagttggctaacgaagtagattaccttcttcgctcaaaatgggttccttgcttggaactcgaaatggatgaagggattcgt

SEQ ID NO: 7508 - DNA, 398 bp, Gossypium hirsutum
  Clone ID: LIB3120-020-Q1-K1-G12
cggacgcgtggggtttgatttaagttagtgagtttcttagtttccctagaagttaagcatggctcaaattaagaggatggagtgccaactcgagatcaagtcctcagctgataagttctttgatgcctacaagaccaaagcccagcttatgccaaaaatggccaatcaagtcgttagagatgtaaaacttgttgagggtagtggttgggattccgagggttcggttagacaatggtattttgttgccggaggtaagcttgagacttgtaaggaaatgatggaaaaggtgaatgataaagacaggactattgtttacaaattggtggaaggtgaaatcatgaaagcttttaaaagctggaactccatcctcaacgtgacgccaattgtggagagaaatt

SEQ ID NO: 7509 - DNA, 462 bp, Gossypium hirsutum
  Clone ID: LIB3120-020-Q1-K1-G2
ctttggaaacaaaaaacaaaaaatagaaaaaataaagagcaagagatatggcaagcacattctcttataattcttttggattccttctcattcttgtcgcctttagttccttgataaatataagttcagctggtaggcaaattgcccctaaaactagcattgagtttatcagaacatcttgtagttcaacgacttaccctaaactttgttacgaatctctcttaacacaggctagcatgatccaaacaagcccccaactcatcgcccatgcagccctaaacgtgaccctttcaaccgccaagtcaacctcggccatgatggtgaagcttgccaaaagccaaggattgaagcctacagaggtgggcgccatgcaagattgcgtggaggaattggaggacacgatagatgagctgagaaagtcaatcagcgaaatgggtcagattaaaggcttcaattttggac

SEQ ID NO: 7510 - DNA, 235 bp, Gossypium hirsutum
  Clone ID: LIB3120-020-Q1-K1-G3
aaataccgtccaacacagtccggatgtccagaaacggcttaatgaactagcgcacatatgcatggggctagtctgcatgctgagctggcccatatacaatggtgagcatctgagagcgattgcagcagctcttacacacagtgtgcacataatacggatgacacttatccgacctggactatcgtacgatgaacccactgcaaaagcaactgactattatgatgcctacaaggaa

SEQ ID NO: 7511 - DNA, 462 bp, Gossypium hirsutum
  Clone ID: LIB3120-020-Q1-K1-G4
gctcaaggtcgggttcctgtcttcttggacggtggtgttcggcgtggaaccgatgtttttaaagctttggcattgggagcctctggtatatttattgggcgaccagtggtgttctcattggctgctgaaggagaagctggcgtgaggaaagtgctttcgatgctgcgcgaggagttcgagctaaccatggcgttgagcggttgtcgttcgcttaaagaaatcactcgtgaccacatcgtgacagaatgggacagtcctcatcctcgtccggccccgagactgtagagtcctatatattatgggcgtgcaactttagcctagcaaatcgcaagatgaacttagttggagctcaagagatatatatagcatttgcattgcatttatggcataaaattactgtctttttttttctttgggaacaagtttctggttcattgagttaaaaagttattgtatgataat

SEQ ID NO: 7512 - DNA, 342 bp, Gossypium hirsutum
  Clone ID: LIB3120-020-Q1-K1-G5
gctcaaggtcgggttcctgtctcctaggactgtggtgttccgcgtgtaaccggggtttctaaagcttcgtcagtgggagcctctggtatacttattgtgcgaccagtggtgttctcattgtctgttgaaggagaatcttgcttcaggaaagtgctttccatgctgcgctatgagttcatgctaaccatggcattgcgcctgtgtcgttcgcttcatgaaatgactcgttaccacattcctacagtttgggtcagtcctcatcctcgtcctgcccctatactgtgtatgcctttatcttatgggcctgctactttagcctatccatattctataataacttat

SEQ ID NO: 7513 - DNA, 306 bp, Gossypium hirsutum
  Clone ID: LIB3120-020-Q1-K1-G6
cgcctgcatgtactcggtccgagactacgcgtgcggtccgaagcctacgcacatatcaatagtgagcttacattggcatgaaacacggccagcgcattcgccgatacttcgtcgggattacttctacattcacgtcgactatactttacagacctgttgacgaacagcatgtatgacacgtcgaaactaatactagcctaaacaacctcaaaccatcgggaaccataataactgacggtacactatgaggctaatccgtcgaaactcacgctaacgctgacatagaaacgttcctaactcaacgaa

SEQ ID NO: 7514 - DNA, 56 bp, Gossypium hirsutum
  Clone ID: LIB3120-020-Q1-K1-G7
cccacgcgtccgctagatcgcgagcggccgctcttctataaattttgattttggtt

SEQ ID NO: 7515 - DNA, 441 bp, Gossypium hirsutum
  Clone ID: LIB3120-020-Q1-K1-G8
tgtggtgagattttaacatacaaaaaaaaaaaaaaaaacacaaaggctctaatttccaaactcctttacagattagatataatagatagagcagtttttgataagaaaagagagggaaaaaggaaattaaagatgtcaacagcttcttcattttgttcatcaactcaagttaatggctttggagggggacttaggcttctaagaacccatctttctcaacccaagtccttttcttttactaggaggagaactgctacagtagtgaaggcaactgctcgagtcgataaattttcgaaaagcgatatcattgtttccccatctatactctctgctaatttcgctaagttgggggagcaggtgaaagccgtagaagtggcatgctgtgattggatccatgttgatgtaatggatggccgatttgttccaaacattacgattgga

SEQ ID NO: 7516 - DNA, 291 bp, Gossypium hirsutum
  Clone ID: LIB3120-020-Q1-K1-G9
caaatttctttttcctttctactctcaaaatttgcccccaaatttcttttttccttttcatttcactgcactaaattcacccaccatagctactccttttcttcttctttttctttcttagtattatttcttttctctttttattttttttggcctactgtgtaatgtatttaccggtaactttttataggcggatgtagagacggaggttgcggcggccggtgtgcccaagaagagaacattcaagaagtttagcttccgaggtgtcgatttggatgctctccttgatat

SEQ ID NO: 7517 - DNA, 399 bp, Gossypium hirsutum
  unsure (1)..(399): unsure at all n locations; Clone ID: LIB3120-020-Q1-K1-H1
ccttatcccattcactgagtctcaacaccgagtcatcatcactcatggctatcgaggcttggtttatggatgaaagcaaagaagaccaaaggcttcctcatcgacgcaaccccaacgaacctgtttcgttggagcacttggcagagctgggagtgttgtattggcatttgaaccccaaggattacgagaacgatgaagagttgaagaagattagagaagccagaggttataattacatggatttgcttgatttatgccctgagaaagttgacaactatgaggagaaactgaggaacttttacaccgagcacatncatgctgacgaagagatacgctactgcctggaaggcagtgggtattttgatgttagggacaaggatgaccgatggattcggattt

SEQ ID NO: 7518 - DNA, 266 bp, Gossypium hirsutum
  Clone ID: LIB3120-020-Q1-K1-H10
gtgtgcctctgctacgcaccacttcttaagcagcttcctctacgatcataatggtgtcggttactgtttctgtagccaaaccaacccttcaggcaaatgcaaagggttttgcggaattctcaggtctgcgcaactcagctagccttacctttgccaggaaaacctcggatgactttcaatcagtcattgcttttcagacttctgctttgggaatcaataatggtggataccggaaaggcgtggtaaaaggcaaacctaaaggtcgc

SEQ ID NO: 7519 - DNA, 385 bp, Gossypium hirsutum
  Clone ID: LIB3120-020-Q1-K1-H12
tcgaaagaagacaatggtgtaagggtgtgcaatgggttcaatttcacaaagtgttttaatggcactgactgtggcagtcaaccagttggctccttgaaacgtgcatgcagttcatatgaaacaaggcaaatcgccatcccccacttctaaacctaaaccaaaaccaacctatacaacaacaatcacagccgtcgtagtaaacgttggtttcaccggaattgcaacgagaggtatcattttattcggcgtggctttcgctcctcaacttaatgattccagaaccgagctattcaaaaagtacttgaagaaaacagaggagaacaaagccaataatgacaaatagcatagaatggataattattacaggcgaaactacaaagattac

SEQ ID NO: 7520 - DNA, 428 bp, Gossypium hirsutum
  Clone ID: LIB3120-020-Q1-K1-H2
agatgatcaaaatgggttttattgttttggccttgatggtggtttccgccgcgacggtggttacggcggctgacgagagtgggttagcgaatgagtgcagcaaagatttccagagcgtgatgacttgcttaagctttgctcaaggaaaagcagcgtcgccgtcgaaggagtgctgtaattcagtggcggggattaaagagaataaacccaaatgtttgtgttatattttgcaacaaacacaaacctctggtgctcaaaatctcaaaagcttaggtgttcaagaagataagctgtttcagttaccatcggcttgtcaattgaagaacgctagcgtcagtgattgcccaaagcttcttgggttatctccgagctcaccagacgccgtcatcttcaccaacttcttctctaaagcaacgacacccagtact

SEQ ID NO: 7521 - DNA, 352 bp, Gossypium hirsutum
  Clone ID: LIB3120-020-Q1-K1-H3
accacattcaggagaactggaggattctggacttgattgcgcaccatgccgaaagcttgcacatcggcaccttacctagagtgatgacatcggaggtccacaggattataggcacatgcatggctctggcgttcatacctacacactaatcaacaaggctgcgaagtcacactatgtgaaattacattggaaacccacttgaggtgtaaaatctttgttggaggatgaagccctacgagtacgtggtgctaatgacagtcatgccacacgcgatcgttatgactaggatgcagtcggacactaccctgaatggaaactgttgattcacattatggatcctcattatgaagat

SEQ ID NO: 7522 - DNA, 403 bp, Gossypium hirsutum
  Clone ID: LIB3120-020-Q1-K1-H4
gtacggtgctcggtgattacggtggcggcgacaacactttctcttccctttgggaagctcttccttccgttgccgtcgtcggtggtcagagttcagggaagtcttcggtgcttgaaagcatagtcggacgtgattttcttcctagaggatcaggaattgtgacgagacggcctttggtgttgcaacttcataagacagacgaaggttcacaagagtatgctgagtttcttcaccttcctaagagaagattcactgattttggggcggtccggaatgaaattcaggaggaaaccgatagaattactgggaagactaaacaaatttctcctgttcctattcatctcagtatctactctccaaatgttgtcaacttaaccctgatcgatttgccgggcttgacaaa

SEQ ID NO: 7523 - DNA, 374 bp, Gossypium hirsutum
  Clone ID: LIB3120-020-Q1-K1-H6
acgccaattgccattgggttgccaacaatggcgattaaagtgaaacgtgatgtgtcctatgatggaggaggaggaaaagaatagctctagcgttggcatgagtgctgcatcgatgacagctgcaaccgtcatgtcaagctcaccggctatggctctggtggatgacagaatgtccaccgaaggaactggacttccctttgggttgagcaacaaccttcttgggtggatcttgcatggcgtattcggcgtgatatgggctctctactttgtttacacttcatccctcgaagaagatgaggagtctggattgtccctctaaacccataaaagtgtaacttcactcaagctcaccaccccaattgccattgggttgc

SEQ ID NO: 7524 - DNA, 358 bp, Gossypium hirsutum
  Clone ID: LIB3120-020-Q1-K1-H7
tcgactagttctagatcgcgagcgactctctgttactcataaaactgactcttccaagcggacgctggtagttttctatgggcctggtgtagttaaagtcagtgggattcggctcattgctggtctaattactagcaaagaaactttgacggggttgatattaatcgtgcaaaaccacataacaaaccaagctttgaaagctttagaccttttctcttttaaggtggagatattccagattactgacctacttgttaatatcacaaagcatgtgctgaagccccaagaccgggttactaacagaacatgagaaacaaaggctcttgcataaatacagcatataagaaaaacaggttcc

SEQ ID NO: 7525 - DNA, 252 bp, Gossypium hirsutum
  Clone ID: LIB3120-020-Q1-K1-H9
tcggaaaactctgagagaaatggcttcttcaatgatatctttgcaaaccagcaatttgaggtctgcgtttttgggagagaaaactgggatctgtgcttctagcattcccataactcgcgtaagtttattgaggaaggctatcgagtgtaaggagtcaagaatcgggaagcagccgataacggttccggtcaatgcgacgattactatggagggtcaggacataaaccttaaaggtcctttgggagaaatggc

SEQ ID NO: 7526 - DNA, 297 bp, Gossypium hirsutum
  Clone ID: LIB3120-021-Q1-K1-A1
gcgcgctgcaacagcagcaggcaggcgaagctcacgtatttgatcccccatctttggcttattggccagtatcgggcctttcattgtaatccgaaatgattttgaggagtgcatcaacgccgctactcaattcattgggtccacattctaaggagccatcgccggacctcgagttttcgtaccagatttctcgaacccgaaccctttcgttcacaggttcgcgttcgagctcgatttctgtaggatggagcgacgattctactctgaggatgacgagggcggtgtctgagacggatc

SEQ ID NO: 7527 - DNA, 462 bp, Gossypium hirsutum
  Clone ID: LIB3120-021-Q1-K1-A11
acggaaaattcagaagaggattacacttttgggactagacatagagaatcatctacaaggcgttatgctaatggaggtggggaagatgaagaacagagactcgttggaaaaattaaggaaagtacatctttaaaacccagacttgagcatgatttcaactacccaacatcagataagctcaggtcttggaatctttgtaagaaaaaattgcatggcaaagacatttacaagtataggggggaaaaggctccttgtagtgcagagtgtacatcaagtcagataatgatggatgagaggaaagaacaatgtatatcaaaagcttcaaaatttgggaaaaattaaagcttgggttatgataaaacagagcaaattttctcaactgggattcttgcaatttaggacttttttgctattttgctctgtaaataaatatttatagaaaaatactatacaatattatga

SEQ ID NO: 7528 - DNA, 430 bp, Gossypium hirsutum
  Clone ID: LIB3120-021-Q1-K1-A12
attagaaagtcaaaatctagaagcagacttggtgttatggacggttgggtccaaaccacttcgtcctgcacttgaaccctgtgacaaaccccatgaacttccactgaatgcaagaggacaagcagaaacagatgaaactcttcgtgttaagggccatccccgcatttttgcacttggtgactcggcttctctaagggactcaactggaaagcttctgccagccacagctcaggttgcttttcagcaagcggactttgctggctggaatctatgggcagccattaatcaccgtccattgttgccatttagattccagaatcttggagagatgatgaccctgcgtagaaacgatgcagctatttcaccaagtttcgctgatggtctcaccttagagggtcctattggtcatgctgcaaggaaattagcatac

SEQ ID NO: 7529 - DNA, 60 bp, Gossypium hirsutum
  Clone ID: LIB3120-021-Q1-K1-A3
ggcttacttactttgttattcatattaatgtaatcatactgaaattttttctctatgtac

SEQ ID NO: 7530 - DNA, 397 bp, Gossypium hirsutum
  Clone ID: LIB3120-021-Q1-K1-A4
aaaagagtctgtcatttcccttacttcctcaaaccagaagccatggccagcatgataatggcttcctcaaagcctgtaatctccattgctgcttcatcatccttcttttccaaacccaaactcaaacaaatcccacaactttccctcccaaaactccccactccaaagttcttgaaaacccaacaaattccctcactctcgtccaccactctcaaatctatctccctcttcacagtcaccactttatcctttgccccaccttctgttgctgcagaaatagaaaaggccgctcttttcgatttcaacttaaccctccccatcatgatggtccagttcttgttcctcatgtttgctcttgacaaggtctactttaccccactcgggaaattcatggatg

SEQ ID NO: 7531 - DNA, 173 bp, Gossypium hirsutum
  Clone ID: LIB3120-021-Q1-K1-A5
atgggcccattctagatgcctcccacatatatgcccattatgctaagggacccatgcccgtcttttacgagttataacaaggcatttttatcagcaacggttgcttacttgcacaagacaacatctgggaccgcttaaccgggcttaaaaatgtctttggtactcgagtcacc

SEQ ID NO: 7532 - DNA, 456 bp, Gossypium hirsutum
  Clone ID: LIB3120-021-Q1-K1-A6
cccacgcgtccgggaagagaaccctcgtgttccgatcattgtcaccggtaacgatttctcgacgctgtacgcgccgctcatccgtgacggtcgtatggagaagttttactgggcacccaccagggaagataggatcggtgtttgcacaggtattttcaggaccgacaatgttcccgttgatgacattgttaagcttgttgacaccttcccgggccaatccattgactttttcggtgctctgagggccagagtttacgatgacgaagtgaggaaatggatcggagaggtaggagtcaatagtgtcgggaaaaagctcgtgaactcgagggaagggccaccatctttcgagcaacctacgatgaccattgagaagctgttggagtatggaaacatgcttgttgcagaacaagagaacgtgaagagggttcaattggctgacaaaatattgagtgaagc

SEQ ID NO: 7533 - DNA, 393 bp, Gossypium hirsutum
  Clone ID: LIB3120-021-Q1-K1-A8
aaaaccctgaaaaagttccatggctggattgctagttccgctttcacggttgcattgaagggggctccacatgggaagaaggtcatggaagcgatagctgggactggagatgttaatgctgacatggagaaattttgttcgactttccccccatttcttgaggagaatcacaaatatctggccaagtttggcttggatgatatgaatgcctgatggaataagtttaatgagtagaggagagactacctacctatatttactcccgtgttcgaacttccaatatcttgcttccggcttaaaccttcgtatttacttgaaaaaattaatgagttatgactttaaacacatactcttgaatgcttaatttttagaaattttttgggtaaatgtctt

SEQ ID NO: 7534 - DNA, 355 bp, Gossypium hirsutum
  Clone ID: LIB3120-021-Q1-K1-A9
tttatgttaggtattgtgatggactcgatagatggtttcagccacacagtgcctattgaggaaatggatgccctcccacagggcgcattcttcatcttgacttggctggacgagacctcactgattacttgatgaaaattctgactgaacgtggatattccttcaccaccacagccaaacgggaaattgtgagagacgttaatgaaaagttgtcttacattgcccttgactatgaacaggagctacagaccttaaaaacatgctcatcagtagagaaaaactatgagttacctgatgtcaggttattaccattggagctgaacgtttcagatgccccgaagtgctttttcaacca

SEQ ID NO: 7535 - DNA, 295 bp, Gossypium hirsutum
  unsure (1)..(295): unsure at all n locations; Clone ID: LIB3120-021-Q1-K1-B1
tccggcaaaaccagttttcattgaaatgtggaacccaaatgggaaatacagagttattatcaccggacctattcctggaactggggggatcaacctcttaatttancaagattgccgtgtcgaaatatgtactgtgaagaaaacgattttgtccgctgaggatatcatttctttgattggcaataagtgcgatggggtgattggacagttgactgaagactggggggagactttatttgcagcttttagcagagcaggaggcaaaacatttagtaacattggtgttggttacaac

SEQ ID NO: 7536 - DNA, 354 bp, Gossypium hirsutum
  Clone ID: LIB3120-021-Q1-K1-B10
gtggaggcaaaggtcaaggaaaatctttccaatgtgagcttgtctttgccaagatgggaatcaaccccattatgatgagtgccggagaattggaaagtgggaacgccggagaaccagccaagttgatcaggcaaaggtaccgtgaggccgccgacattatcaagaaagggaaaatgtgttgcctctttatcaacgatctcgacgctggagccggtcgtatgggaggaaccacacaatacacagtgaacaaccaaatggtgaacgccacactcatgaacatcgctgataaccccaccaacgttcagctccccggtatgtacaacaaggaagagaaccctcgtgttccgatcattg

SEQ ID NO: 7537 - DNA, 441 bp, Gossypium hirsutum
  Clone ID: LIB3120-021-Q1-K1-B11
cccacatcagatataacatttactactcacttcttattcctacattatacaaaaagaaaagagaagacatggctgctgatactggtgcatgctcttttccttctaccaagtacacctctctccctgctagaacctatattgtctctcctgataggatcaccttcaagaaggtgcctgtttactacagagatgtcagccgtgggcggagagtggcatctgacacggcccaggttacaactgaagctcctgccaaaggtgacaaggaattcaagaaaaatgattacagtcttgcggttaacaagtgcaggcctatcaacccttacattggtagatgccttctaaacactaagatcactggcgaagatgctcctgcagagacttggcacatggtcttcagcaccgtacgtatgcatgcaagctataatagagagagccgctaca

SEQ ID NO: 7538 - DNA, 418 bp, Gossypium hirsutum
  Clone ID: LIB3120-021-Q1-K1-B12
gtaaaaaagtctacctcagcaaaaataagattgaggggcttattgaatcaacctgataatcgcgcttgtgctgattgtggtgctccagatccaaagtgggcatcagcaaatattggagtctttttatgcttgaaatgttgtggtgtgcacagaagcctcggtacacacatatccaaggttttatctgtggcattggatgaatggtctgatgaagaaattgatgctatgattgaagttggaggaaattcctctgctaattcaatctatgaggcttatatacctgaaggttatacaaagcctggcccaaatgctagtaatgatgagcggaggaaattcattaagtccaagtatgaacttcaagaatttttgaggccagcttgcggatcacatcaaggaaagattcctcttcttcttctac

SEQ ID NO: 7539 - DNA, 453 bp, Gossypium hirsutum
  Clone ID: LIB3120-021-Q1-K1-B2
ctcagcttaattcagctgaaaatggcaccttcatctctgccacaaacaccgccgtccgccgtggttattgtcctcttcttactcttctccacggcattgctttgtgaatcaaggttaagcttagattactactccaaaacctgtcccagtttcaccaaaatcatgcaagacaccataaccaacaagcaaatcaccagccccacaaccgccgccggtgcactccgtctattttttcacgactgtctttccaacggttgcgatggttccatcctcatatcttccaccgcattcaacaaagctgaacgtgatgccgacatcaacttatctctccctggagatccatttgacctcattgttcgagctaaaacagcccttgaactcgcctgtcccaacaccgtctcttgctccgacatcctcgccgtcgctactcgtgacttagtcaccatgcttggt

SEQ ID NO: 7540 - DNA, 237 bp, Gossypium hirsutum
  Clone ID: LIB3120-021-Q1-K1-B3
ggcataaccagtttccattgaagtgcggcacccaaatgggaaatacagagttattagcaccggacctatgcgtggaactcgggggatcaacctgttaatcgagcaacattgccgtgtccaaatatgtactgagaataaaacgattttgtgcggtgaggatatcattcctttgactgccaatctcaccaacgggtaaaaagaacgggtatctggatgaccatattgcgactttatttg

SEQ ID NO: 7541 - DNA, 402 bp, Gossypium hirsutum
  Clone ID: LIB3120-021-Q1-K1-B4
ctttccttgacctgcttcaaagtagaaaatcaacattgccaacatagcaattctagcatgtgtaatctccgctggctgaagggtctccagtttggcataatcggggatgtagacaccatttcggatggtacccgcaaggcctaatgggtcgaagaacttgcctcccgggtaaccctgctggccggtggcgttggcgaagttctcggctgttttcgaccatggagttgcccattctacggattgagattttgggttgaaaaagtctacccatcgcttgctctccacccaacccatgaggaggagttgggtgccaaggagtgagccgaaggagaatggggctattgcaccggggtcggctccggcctcgaaccatggtacaccactccaggcttggcctatgaa

SEQ ID NO: 7542 - DNA, 445 bp, Gossypium hirsutum
  Clone ID: LIB3120-021-Q1-K1-B5
ggcaaaaccagtttccattgaagtgtggaacccaaatgggaaatacagagttattagcaccaaacctatgcctggaactcgatggatcaacctcttaatcgagcaagattgccgtgtcgaaatatgtactgagaagaaaacgattttgtccgttgaggatatcatttctttgattggcaataagtgcgatggggtgattggacagttgactgaagactggggggagactttatttgcagctttaagcagagcaggaggcaaagcatttagtaacatggctgttggttacaacaatgttgatgttaatgctgccaacaagtatggtgttgctgttggtaacactcctggtgtactcacagaaacaacggcagagctagcggcttctctttctttggcagctgctaaaagaattgttgaagcagatgagttcatgagggctggctta

SEQ ID NO: 7543 - DNA, 447 bp, Gossypium hirsutum
  Clone ID: LIB3120-021-Q1-K1-B6
gaatggcataccatggaccgcaatgagggtcaagggaatgtcaaggtgggtacacttgctgtgccttcacgcaggatgacatgtattcaaccactttgggaccacgattcataccattatacttggggtccacatgatgtgcataaccagtttggaattgaatgggatatcattaatgatttgaggattgacatggctagactggagcaaaggatgaatggtttgcagaagatgcttggggcctgcatggaaatgcaactcgacttacagtgatcaattcaacaagagaggtctggtggcctcaaccgttcagctggttcacgagggatgattgatgacagctcgttcaaggatgcccacaattgggataatgtcaagaaagggctctgatgtatatgctccaaaggcaatatcgcttcactactatacacatgtgggcacatgtgc

SEQ ID NO: 7544 - DNA, 369 bp, Gossypium hirsutum
  Clone ID: LIB3120-021-Q1-K1-B7
gcgggaaacgacgaaaaatggcaagataccacagaacgattaccgtgttctcaccggacggccgtttattccaaggggaatacgcgcctccaagccgctcctaaaggtaacgccgccgatagcgtacactgcaccgacatcaaccaattaggcgtcgagataaaatccgaacgcaaactccaggactcactatcggtttacaagatggcgaatttggaacatcatagtgcattggcatgtgctggactcaaagacgattctcttgttctcataaacagggctcaaatcgaatgtcttagccattcgctgactgctgaagattcctcttcgggcgactgtattactaagtacagttccggtcttcaatac

SEQ ID NO: 7545 - DNA, 406 bp, Gossypium hirsutum
  Clone ID: LIB3120-021-Q1-K1-B8
cggacgcgtgggcggacgcgtgggtagcaatggcttcctcaatgatctcatcggctaccagggccactgcctctccggcacaggctaacatggtcgctcctttcaccggtctcaagtctgcctctgctttcccagtcaccaggaaggccaacaacgacattacttctctcgcaagcaatggcggtagagtgcaatgcatgcacgtgtggcctcctactgggaagaagaagtttgagactctctcatacctccccgatcttacacccgtgcagttggctaaggaagtagattaccttcttcgctcaaaatgggttccttgcttggaattcgaattggaggagggattcgtgcaccgtaagtactcgagcttacccacgtactacgatggacgctactggaccatgtg

SEQ ID NO: 7546 - DNA, 326 bp, Gossypium hirsutum
  Clone ID: LIB3120-021-Q1-K1-B9
accacgcgtgcgcttagctatagcctacacttctagtacccactactagcaatggggtactcggtgatctcatcggcgaccattggcactgcctatccggcacatgctaacatggtcgatcctatcaccggcctcaagtctgcctctgctttcccagtcaccaggaaggccaacaacgacattacttctctcgcaagcaatggccgtagattgcaatgcttgctggtgtggtcttctactggatagaataagttctagactctctcataccttcccgatcttacacccgtgcatttgtctaaagaagtggattacctttttcgctc

SEQ ID NO: 7547 - DNA, 58 bp, Gossypium hirsutum
  Clone ID: LIB3120-021-Q1-K1-C1
tcgggaatagaaaaaaaactggcagatacgacataactattaccgtgttctcaccgga

SEQ ID NO: 7548 - DNA, 415 bp, Gossypium hirsutum
  unsure (1)..(415): unsure at all n locations; Clone ID: LIB3120-021-Q1-K1-C10
cccacgcgtccgaaaaccccaattttctattctcccttttgttttctatatcgatgccaattctgttgttcaacaatttaatcgctgaatcaaccttctgccctgaaacaatggcgacaaccactactttgggcggagtccacccttcccaaggctcccaaaacagcgtcgagctcgaaaacctagcacgctttgccgtcgacgagcacaacaagaaagaaaatgcaatggtggagtttgtgagggttgtgaaagcaagcgagcaagttgtggccgggacgctttaaccatttgacggtggaagctgacgacgccggcaaaaagatgctttatgaagcccaagttttgggttaaacctttggatgaatttttaaagactngcatgagtttaaacatgcttggtgatgctgatagt

SEQ ID NO: 7549 - DNA, 365 bp, Gossypium hirsutum
  Clone ID: LIB3120-021-Q1-K1-C11
ctgaagctcactcaaagtgctggcttaaaaccttagtttttgagctctcttacagtggtccggaggccatgtcaaggaggaaggggagggagcccaaggaggagaatactaaccttggacctgctgttcgagagggtgagcatgtttttggcgtggctcacattattgcttcattcaatgattcatttattcacgtgactgatttgactggaatggaaacaatggttcgaatcactgtctgtttgaacgtgaaagctgatagggatgagtctttccctcatgcatccatgcttgcagcacaagatgcttctcaacgctgcaatgacatgggtattactgcccttcatataaagctaccatctact

SEQ ID NO: 7550 - DNA, 339 bp, Gossypium hirsutum
  Clone ID: LIB3120-021-Q1-K1-C12
caatggcgactcagctgaagagcagctttacgtcgtctgttacaagaggactggtagtccccaggggcatttcgggatccccgttcaaagtatcttccggaaagaccaggaccccttgcttcactgtcaaagctgttcaatccgacaagtcaacatttcaagtaatccaacccatcaacggcgaccccttcattggaagcctggagactccaatcacctcaagccccttaattgcatggtacctttccaacctcccagcctataggacggcagtgaacccacttctgaggggaatcgaagtgggtctggctcacggcttcctcctggtgggtccattcg

SEQ ID NO: 7551 - DNA, 305 bp, Gossypium hirsutum
  Clone ID: LIB3120-021-Q1-K1-C3
tcgattcaaacgtaccaccttatattgaatggttaccttgtgtggacttgaacaaagcatttcgggggactttctggggggggggggggtttttttcgacccccccattttcattgttctcagccaaaggttaaaaacccatactgaaaccaagacttgcttttcctcacactatatacaacaaacttaccgatctccgccgtggctattgggttggtaaccggagcttcatcacttgctatgttgacccatccactgagtctcgtgtcaacgtgttaggggtgagtcagataaaggagaaatgc

SEQ ID NO: 7552 - DNA, 254 bp, Gossypium hirsutum
  Clone ID: LIB3120-021-Q1-K1-C4
ttgtacaggctaaaagggatctgataaacggggtgaatgatcaaagaaaaaaccaagtcttgtattgttattttacaccatactggagaggataacacaacctccaaattgggcagaatgtctgggtgatgtacataatgatttaacatttcaccacactttttgaacctaaacaccataaagaagctcattccattgatactaatacagggttatgcttgaggagcaaaaacttttctattggacctcttaac

SEQ ID NO: 7553 - DNA, 325 bp, Gossypium hirsutum
  Clone ID: LIB3120-021-Q1-K1-C5
tcgaatcaaacgcacaactttctgtacgaatgagtagacacttccacgcatcttgatccaatcatcatgatatgcagcctgccgcttgcattatcagggctccataccacccaccgcgtggtttcagacaaccatattgacgcagctacctgctccgaaactcaaatgcatatgggacacaacttgtataaagtgcgcgctaagcaaacaacaagctggaggtgtaagaaagacgccgcatgagagtcactacataacaaattcaggaatactcgcgaacggactgattacagatgaagattctagctaatcatatcatcgctga

SEQ ID NO: 7554 - DNA, 345 bp, Gossypium hirsutum
  Clone ID: LIB3120-021-Q1-K1-C6
attaatatgtgttattttgggaattttacagttattttttgggatctaaataatggggtagctcttttaatcagattatggcacttggattggtatttaacactctacaggaattgattcagcttcattttattgcattgttcaagaagggtgatgtatctaaggatttaacatctggaactgttggaggagcaattcaatttattgttgggcatccatgtgatactattaaggttaagcttcataagtaaccttgttcgcttactggtcaaccacctaaatatgctggtgctatggatgctgttaagcacactttaactgctgaaggaccaatgcggttgtata

SEQ ID NO: 7555 - DNA, 331 bp, Gossypium hirsutum
  Clone ID: LIB3120-021-Q1-K1-C7
atttgagtggaacaaaaataacaaacagttgagtggtgggaataaagatggcggctgccacggttcttcatgttgtggcggcggcttttctccgaccgccgcattcgctgccgcggacgaaggctaaagaacccatactgaaaccaggacttgctttacctcacctttacgataacaagcttcccgttctcggtcgtggctatggcgctggtaaccgtacattcatcacttgctatgtagacccatccactgagtctcgtgtcagcgtgttatgggtgagtcagataaaggagaaatgcagtaagtggcaatggaaagggcggtacttcat

SEQ ID NO: 7556 - DNA, 455 bp, Gossypium hirsutum
  Clone ID: LIB3120-021-Q1-K1-C8
gcaaaggatttttcttcctgcaacatcaacgttgatgagaggttgctcctttgctacatatgaggttattccaaaaggacaaggaagagaagcacactgtgaccacgttgtgaaggatcaatgtaataaccaagtcgcgaatctctatcccaagccaaatgttggaggtcaacagaagctccaaattgggcagaatgtctcaagaaaggacaaaattaagtttcttgtcaccacacttcttgatcttaaagacagtaaagaagctgtctacagtgctcttgatgcgtgggttgcttgggagcagaattttcctattggacctcttaaaaatgtaatccttgctcttgagaaggagcatcagtggcatagagttgttcaggtttgtaaatggatgctaagcaaggggcagggaaacacaatgggaacatatggacaactattacgagctttagata

SEQ ID NO: 7557 - DNA, 408 bp, Gossypium hirsutum
  Clone ID: LIB3120-021-Q1-K1-C9
cccacgcgtccgctcaaaaccattgcatatcttatctgttgagagtattggtaaggagaaaaagccagtaattcaatgcaacgcttatgaagctgacaagtcagagcctattgaggcagcagagcaagttaaatcagaagctgcaaaaagggtgaaaattgggatttattttgcaacttggtggggtttgaacgtggttttcaatatttataacaagaaggttttgaatgcttacccttacccttggttgacttcaacattgtcccttgcttgtggttctttaatgatgttaatttcatgggctacaaggattgctgagaccccaaaaacagattttgagttttggaagactttgttcccggttgctgtggcacatacaattggacatgttgcatcaactgtgagtat

SEQ ID NO: 7558 - DNA, 435 bp, Gossypium hirsutum
  Clone ID: LIB3120-021-Q1-K1-D1
tcgacttgagtcgaacaaatatttcacatcaggattttaatgcgaataaagatcgcggctgtcggggttctaaacggggacgggggggcttttgactcactcgggtattctttgccgacgaccattgctatataacttagactgaatatatggcaactcgatggtatcgttcacataaactgcgcggctcattttacttcaactacacccctgcggtcgatatttggagtactagatacatatacgcttacactatcactggaaaaccattgtttccagtgaagaatgtggaggagcaattggaacatgggaaccatatagttggttactcctttggtggaaccattgcgcgggattataatgaaaaaccttaaaattattttgataacttgagaaaaaagaaaccaattccttttctcaaaaaattcccaaata

SEQ ID NO: 7559 - DNA, 169 bp, Gossypium hirsutum
  Clone ID: LIB3120-021-Q1-K1-D10
gattaacataaccaaatagaaagctggcttctgtttccggtactaatatgacatgtggacctctggtccacaagtccgagtggattaagggccaaaaccttcgacacccttaggcttggtttgtacggtcacaccctacattggtcgactttaccattcgagctaattc

SEQ ID NO: 7560 - DNA, 434 bp, Gossypium hirsutum
  Clone ID: LIB3120-021-Q1-K1-D11
aaaccaagtcaacctaaagccttaggcaccatggcaacctctgctatccaacaatctgctttcgttggccagaccgctttgaagcagtccaatgagctcttacgcaaagtcggagctttcgatggtggtcgtgttaccatgcgcagaactgtgaaaagtgcccctaccagcatctggtacggccctgaccgcccaaagtacttgggtccattctcagaccaaatcccatcatacctgacaggtgaattccctggtgactatgggtgggacactgctgggttatcagctgacccagagacatttgctaagaaccgtgagcttgaagtgatccactgcagatgggcaatgcttggtgcccttgggtgtgtcttccctgaaattctttcaaagaatggagttaaggtcggagaggcagtttggttcaaagctggatc

SEQ ID NO: 7561 - DNA, 356 bp, Gossypium hirsutum
  Clone ID: LIB3120-021-Q1-K1-D12
cccacgcgtccggacggcttctatcaacggttggtgccttacctcctcttcttgcaccactacgacctcctctttttccgctcgtggacgacctacattgcggccttcagtcgtcgctagccttaactcttctccttctcctccgactcttatccaagaccgcccggtttttgctgcccctattcctttgctcaccccgagagaagagatgggaaacaagtcctacgacgaagccattgaagctctcaagaaacttctcagtgagaaaggagaactgaaagctgaagcagctgcaagggtagatcaaataacagcagagttaaacacagcatcagctgatggcaaaccatctgact

SEQ ID NO: 7562 - DNA, 377 bp, Gossypium hirsutum
  Clone ID: LIB3120-021-Q1-K1-D3
cattcacacagcacatctcttccatacacatttaaagccaaaaaatatacttgctaatgcggattgcaaactgaaactgtgggattttgaactcgctcagctgtcatttacagacgttccttctcctattctttgaactgattatatgtcaactgcatggtttcttgctcctgaactgagctgttcattttactccaactacacatcataggcctatcatctcgtggtaggatgcatatttgctgagttgatcactggaaaaccatcgtattaaaagaacaatgttgtggaccaattgtatcttgtgaccgatttactatgcactacctctgctgaaacaattgccagtattaaaaattaaaaagctcctaattatt

SEQ ID NO: 7563 - DNA, 350 bp, Gossypium hirsutum
  Clone ID: LIB3120-021-Q1-K1-D4
gggcaaccatgctctcactctctccaaatcctcccatcacaactttaccctctcttcgttgcagtttcaaggaaatctgaggaatttaaaacacaaacaccttttcacattattcgtatcaggaccaagcagccaggggtagaggcacgaaaggggacacggtctttagtggttgtgaaccaagcaccaacaacccaagtgtcggttacagcttctaatatgaggtttcgggtggacaacctgggacctcagcctgcgtcaagaaagaaagggaagagaaaggggagaggaatatctgctggacaaggtgggaacattcaggttggaatgaggggtcaaaaatcaccttc

SEQ ID NO: 7564 - DNA, 431 bp, Gossypium hirsutum
  Clone ID: LIB3120-021-Q1-K1-D5
cattcacacagcacatgttttccatagagatttaaagccaaaaaatatacttgctaatgcggattgcaaactgaaactgtgggattttggactcgctcgggtgtcatttacggacgttccttctgctattttttggactgattatgtggcaactcgatggtatcgtgctcctgaactgtgcggttcattttactccaactacacccctgcggtcgatatttggagtgtaggatgcatatttgctgagttgatcactggaaaaccattgtttccagggaagaatgtggtggaccaattggatcttgtgaccgatttgcttggcactccctctgctgaaacaattgcaaggattaagaatgaaaaagctagaaattatttgaatagcttgagaaaaaagaaaccaattcctttctcaaaaaaaatcccaaata

SEQ ID NO: 7565 - DNA, 463 bp, Gossypium hirsutum
  Clone ID: LIB3120-021-Q1-K1-D6
tggcaaccatgctctcactctctccaaatcctcccatcacaactttaccctctcttcgttcgagtttcaagggaaatctgaggaatttaaaaccaaacccttttcacattattcgtatcaggaccaagcagcaaggggtagaggcacgaaaggggacacggtctttagtggttgtgaaccaagcagcaacaacccaagtgtcggttacagcttctaatatgaggtttcggttggacaacctgggacctcagcctgggtcaagaaagaaagggaagagaaaggggagaggaatatcggctggacaaggtgggagctgtgggtttggaatgaggggtcaaaaatcacgttctggcccaggtgttagaaagggatttgagggtggccaaatgccactctataggcgtatccccaaattgagaggaattgccggaggtatgcatgcgggattaccaaaatacatacc

SEQ ID NO: 7566 - DNA, 432 bp, Gossypium hirsutum
  Clone ID: LIB3120-021-Q1-K1-D7
cccacgcgtccgcccacgcgtccgaccacgcgtacgcccacgcgttcgcccacgcgtacgcccacgcgtccgattttttttcttttctgttttttcatttctgggaataggaatagagaaaagacaacaacaaagacaatgttgaatgtgaatagcatggcttctctatcaaactcaaagctttcatttcaatatttccattattataataagcattccagcacgtgttgtaaggtattaacacccaggaaatcagagctgcgactgcgaattataagggcttcttcttcagctgctgctcctgatgttgatctcaacaccctcgaatgtgccatttccaagaaagacagtgaagcagtgaaagaagcacttaatcagctgagtgaaagtgggtgggcaaagaaatggagttcacagccgtatgtgtcacgt

SEQ ID NO: 7567 - DNA, 437 bp, Gossypium hirsutum
  Clone ID: LIB3120-021-Q1-K1-D8
gaagaacccagattccaaatgaacaaattcaaacttgaaaaggatctttctgattctcgaagaatgaggggcaaagggattgagcgagaaagatctcttgttcttattataagatcgtgtgattggatccgcagatgtttggtaaaaaaaatcttctcttttgagaataatcaaaaatggaaagtgttcaattggaacatgaaaacgtgactgaatttgtcctagttactcttcgggacagagtggaagaagggaggagattctcgaacgaggaaaaggacccaatgacttcgaaagaattgaacgaggagccgtatgaggtgaaaatctcatgtacggttctgtagagtggcagtaagggtgacttatctgtcaacttttccactatcacccccaaaaaaccaaactctgccttacgtaaagttgccagagtacga

SEQ ID NO: 7568 - DNA, 338 bp, Gossypium hirsutum
  Clone ID: LIB3120-021-Q1-K1-D9
atctttacacaaaggaaactgctgtccttgttaggaatcttcaatttccaaacggggtatccgtgagcaaggatgggtgttttctcatatcttgcgaaagatgtccgtgcagattactcaagtactggttgaaaggtgagaaagcagggagtactgacgtatttgccatcttaccaggattttcggacaatgtccgaacaaataaagaaggtgaattttgggtagcaattcactgtcgcaggttcacgtatgctcatataatgggattatatccaaaacttatgaaattcattctcaagcttcctatatttgcaaaaattcaatacctgcttcagatt

SEQ ID NO: 7569 - DNA, 191 bp, Gossypium hirsutum
  unsure (1)..(191): unsure at all n locations; Clone ID: LIB3120-021-Q1-K1-E1
ctcacgcgtntcttcacgccttcttaagatgctctttaatatcgttcgcccactcttacggccactcgtacgaatgaaatctgctcccttcagggcatttgtgggaatacgaatatagtatcgtcaaccacattttcaatgcgggactggaaatattagaagccctatctatctcatagctatcattttaa

SEQ ID NO: 7570 - DNA, 313 bp, Gossypium hirsutum
  Clone ID: LIB3120-021-Q1-K1-E10
gaggatatgaaaatagggaaagaaatggggtgttccactacaaggaatgctgtcggaactgaattcgagaaaagctgatctaatcaaagggagcgatccatggaattgaacagtgaaggccttgaggggctagttccacgggctaaactgttgctaacacttggaggaactttcttccttgccttttggcctttgatccttttaactatcgcattctttttcgacctttaactttaatttggaccattattcatttataacggaaataagacattaggtttccttgcggaatacattgacccttacgaacttt

SEQ ID NO: 7571 - DNA, 381 bp, Gossypium hirsutum
  Clone ID: LIB3120-021-Q1-K1-E11
tccacgcgttcgcccacgcgtccgtaagcgtttgtctcagatttttgaagatggcccgtaccaagcagacagcccgtaagtcgactggtgggaaggctccaaggaagcaacttgctaccaaggctgcccgtaaatctgccccaaccaccggtggtgtgaagaagcctcatcgctaccgtcctggaactgttgctcttcgtgaaattcgaaagtaccaaaagtgtactgagcttcttatcaggaaattgcctttccagaggcttgttcgtgaaattgcccatgacttcaagactgatttgcgtttccagagccatgctgttctagctcttcaggaagctgcagaggcataccttgtgggtctttttgaagacaccaaccttt

SEQ ID NO: 7572 - DNA, 423 bp, Gossypium hirsutum
  Clone ID: LIB3120-021-Q1-K1-E12
tccacgcgtccggctggtttagctgttgctcaacaagtttcacaagcaggactttgagtgtggtcaattgatccatcaccaaaattgatttggcctaataattatggtgtttgggttgatgaatttgaagctatggatttgcttgattgtcttgatacaacctggtctggtgctgttgtgtatattgatgatggaaaaaagaaagatcttgatagaccttatggaagggttaataggaaacagcttaagtcgaaaatgttgctaaagtgtatatctaatggtgtgaaattccatcaagcaaaggttattaaggttattcatgaggaatcaaagtctttattggtttgtaatgatggtgttactgttcaagctactgttgttcttgatgctactggatttttgaggtgtcttgctcaatatgat

SEQ ID NO: 7573 - DNA, 359 bp, Gossypium hirsutum
  unsure (1)..(359): unsure at all n locations; Clone ID: LIB3120-021-Q1-K1-E2
tcggccacgcgttcgcccaaacntccggtggtacaaattggtaacagcggatccgaacctggtgggaccttcgaggaccatacgggtcaccgtctggcctaccaatcttgaagctccagcgtggagcagcatctcgtgacttactgtgtaaccaagaggttcttttctccttgaagactatcatttagtggagaatctggccattatcacctgactgcgcataccttaactactctttcatacaaaatgagacaaggcgagagggttttttacggtgactcatgatatatctcaactcacaagttctgcgatgagtcgtgccactggaaaacataccccgctcattgttagattttcca

SEQ ID NO: 7574 - DNA, 434 bp, Gossypium hirsutum
  Clone ID: LIB3120-021-Q1-K1-E3
gctcttcttctatcacaggcctttatatcaggagtgcatggaacaggctgtaccatcgaagacagaagccatgacgtcttatgggctgtggttgtatacaacgctggtgttttcacacacatcaccacacgcttgactctgcgaagaggtgaatccatctccattatcgcaccgtcatcatggggaggacgattttggggaaggacccattgctcccaagagtccgccggtaaattctcatgttagaccgtcgattgttgttccaggaagctagaatgtacagggaacagcgctgcttcgcctgccactttggctgaatttaccttggacggagccgggggtcttgattttttcgatgagagtttggttgacggatacaacgatcctattttggtggtttcccacggcgggacagggcaaaactgtacctacac

SEQ ID NO: 7575 - DNA, 405 bp, Gossypium hirsutum
  Clone ID: LIB3120-021-Q1-K1-E5
ctattttatctcttcagatcttctcaagatgctcttcaatatggatgtctcctcttgttcgcattgacgatgaatgaaatctgctcccttcagggcattgtttgaaaacatggttgctatctttttccacatttcgacaccgaggacaggaaatatcagaagccactctttttaatctgagattttttaaagtaggaataaagttccaggaaatatgccaaaaagtgatggtaatctttgataggagatgtaaattccatagttttctatagaaattttttgtttcgaactgtattaaataagcactaggatccatattagcatcttgtaatagtttatagacacttctgactgaaaatttgccagaatgttcttctcgccagacttgaaaatcatcatggtttt

SEQ ID NO: 7576 - DNA, 457 bp, Gossypium hirsutum
  Clone ID: LIB3120-021-Q1-K1-E7
acaaaatcagttgcttcacaatggcctctacaaccatggctctttcttccccatcattcgccggtaaggcagtgaagttctccccttccacccctgaaatccggggaactggccgtgtttccatgaggaaaaccaccaagcctgttccttctggtagcccatggtacggtcctgaccgagttttgtacttgggtccactttccggtgagccaccatcttacttgaccggtgagttccctggtgactatggttgggacactgctggactctcagctgatcccgagacctttgctaggaaccgtgagctcgaagtcattcactgcagatgggccatgttgggagctcttgggtgtgttttccctgagctgttggctaggaacggtgtcaagttcggtgaagctgtattgttcaaggccgggtctcatatcttcagtgagggtggacttgactacttggg

SEQ ID NO: 7577 - DNA, 290 bp, Gossypium hirsutum
  Clone ID: LIB3120-021-Q1-K1-E9
tcgtccacgcgtccgcccacgcgtccgttccaggatagacttgtcacatggtttttagtaccgaatgggaagttaccatacagagatggacaattccattggtgtcatcccatatggtattgacaagaacggaaaacctcacaaacttagattgtactctattgctagcagtgctttgggagattttggcaattcttaaactgttttcttgtgtgtgaaatggcttgtctacaccaactaacattgatagatagtgaaaggagtttgctctaattttctgtgttacttga

SEQ ID NO: 7578 - DNA, 259 bp, Gossypium hirsutum
  Clone ID: LIB3120-021-Q1-K1-F1
accacgcgttctgcttgaaaagccctgtacaaccatagatttttctacctgagtacacgactcaaaggcagtgaagttcttcccttgcacccctttaatccggggaactggtcgtgtttccatgaggaaaaccaccaagcctgttccttctggtagcccatggtacggtcctgaccgacttttagacttgcgaccacttttcggtgagccaccatcttacttgaccggcagcggatcgtgaaaaatgcacttgtgctca

SEQ ID NO: 7579 - DNA, 414 bp, Gossypium hirsutum
  Clone ID: LIB3120-021-Q1-K1-F10
ctaaactacatcgggcaaatgtgaattttctttctgaacctatcaaggatggaacaactggaacagtgatagttctcacaactccggatgctcagcgcacaatgcttgcttatcagggtacatcatcgactattaattatgattcttgcctggctggcatagtatccaagactaatatatttgttgttgagggttatttatttgaacttcctgatacgatcaaaactattatacgagcatgtgaagaagcgcgcatgagtggtgccctgatagctgtcaccgcatcagatgtctcctgcattgagagacactatgatgattactgtgaaattgtagggaattatgcggatatctcgtttgcaaacagtgacgaaacgagagctctatgccatttttcttcaaaggaaagcccaa

SEQ ID NO: 7580 - DNA, 411 bp, Gossypium hirsutum
  Clone ID: LIB3120-021-Q1-K1-F11
tcggtcaaccccagcaaggaagaggctgatgagagacttcaagagactacagcaagatccacctgctggtattagtggggctcctcaagataataatatcatgttttggaacgctgtcatttttgggcctgatgatactccttgggatggcggtacgttcaagctgactttgcagttcatggaggattatccaaataagcctccaaccgttcggtttgtctcacggatgtttcattcaaatatctatgcagatgggagtatttgtctcgatattttacaaaatcagtggagtcctatatatgatgttgccgctatactcacttcgaatcagtctcttctttgtgatccgaacccgaactctacagctaactcgtaagcaactcgtatgtttagtgagaataaacgggaata

SEQ ID NO: 7581 - DNA, 407 bp, Gossypium hirsutum
  Clone ID: LIB3120-021-Q1-K1-F2
tcattcgctagccatagacgtattataaacatggctctttcgttctcattctggaggagatattgtggtgtttttttgaagcacatgaataatgcctgagaaaataacaacagaggacttatttaacaatctagtagagaccattgcagatggtgtctttaagcagaaatccgcgtccttttttgaggaagagaaatcaaactcagttgtctttttgttttaatcggcttttttgtatggtaaatgcgcgtttaacatattttgtcttttatatgatctctttacttttctttggaacgtacaaattaattttatccttcttttagcgagagcaactttaatatgggttctatttgaatggcttatttaccatttactgactcttttatgctttgcttttggttctt

SEQ ID NO: 7582 - DNA, 231 bp, Gossypium hirsutum
  Clone ID: LIB3120-021-Q1-K1-F3
tcgcccacgcgttcgcagtgatgcacttggttcatagccaacattgccctacttgagtccagaactcaagggagataggctacttgtttgggcccactctttccaaaactggcattggaatcctcaatgacacccgagtcccatttataaacctgatctataaggtcaagcaattaaaattctttcaacaataccagaccaaggtggctgttcttttttggtttcaaggaa

SEQ ID NO: 7583 - DNA, 425 bp, Gossypium hirsutum
  Clone ID: LIB3120-021-Q1-K1-F5
cccacgcgtccgcagtgatgcacttggttcagagccaacattgccctacttgagtccagaactcaagggagataggctacttgttggggccaactttgcgtcagctggcattggaatcctcaatgacaccggagtccaatttataaacatcatcagaatgtacaagcaattaaaatactttcaacaataccagaccaggttggctgatcttgtcggattcgaggaagcacagcggattgtaaacgatgcacttgtgctcatcactgtcggcggcaacgatttcgtgaacaactactatttggttccattctctcctagatctcgccagtttagtctaccagattatgttcgatatctcatctctgagtacaggaaacttctaatgaggctatatgatctaggagctcggaaggttctggtgactg

SEQ ID NO: 7584 - DNA, 244 bp, Gossypium hirsutum
  Clone ID: LIB3120-021-Q1-K1-F7
acattactgatgatcatatcttagccactcataaacgcagggccactcgcaaagaagcatggggctattcttatgttaacccagatagaaatgcggcaagcaagcgaacatggtcattacatgccaaaattgcgaggctgtcatgacatcatattttatcttctttgagcagggctgcactatgatcctgcctacgtaatggaactgaagattatggggtaatggagcgttaactctagaagta

SEQ ID NO: 7585 - DNA, 460 bp, Gossypium hirsutum
  Clone ID: LIB3120-021-Q1-K1-F8
ctcaccattgttccaagtttgttgtaaaccaagttagaaccagcagccaacatggcctcaggagcagcctccaccgctgccggctcccttggcgtctctgaaatgcttggtaaccctctgaatttcagtggtggagctaggtcatcggctccaacaccatccaactcatccactttcaagaccgttgctcttttctccaagaagaaggccgctcctccaaagcccaaggctgctgctgtcgccccggccgatgaagagctggctaagtggtacggtccggacagaaggattttcttgcctgaaggtctgttagacagatcggagatcccagagtacttgaacggagaagttcccggagactatggataccatccgtttggtctgagcaagaagccagaagactttgcaaatatcaagcatatgagttgatatacgcaaggtgggcaatgcttggtgctgc

SEQ ID NO: 7586 - DNA, 201 bp, Gossypium hirsutum
  Clone ID: LIB3120-021-Q1-K1-G10
caatgtaggcaagggaagtcggcaaaatggatccgtaacctctggaaatggattggctctgagggctgggcacgggggtcccagtcccaaccccgtcggctgccggcccactgttcaacctgttccctcgtcataagcggttcgcccgttcccgtccggggaccgacctggaaccggttcctttggggcccttccctggcc

SEQ ID NO: 7587 - DNA, 347 bp, Gossypium hirsutum
  Clone ID: LIB3120-021-Q1-K1-G11
ggctaccactgcttctccaatggcgactcagctgaagagcagctttaggtcgtctgttacaagaggactggtagtccccaggggcatttcgggatccccgtttaaagtatcttccggaaagaccaggaccccttgcttcactgtcaaagctgttcaatccgacaagtcaacatttcaagtaatccaacccatcaacggcgaccccttcattggaagcctggagactccaatcacctcaagccccttaattgcatggtacctttccaaccttccagcctataagacggcagtgaacccacttctgaggggaatcgaagtgggtctggctcacggctttctcctggttg

SEQ ID NO: 7588 - DNA, 458 bp, Gossypium hirsutum
  Clone ID: LIB3120-021-Q1-K1-G12
tcggttaatttcaatttctggatctttgcttctttttgtccttatttttgtggaaaagcgtgcgtgtatttttatttgtttagttgtgtcaatttattttatgattaattcttatttaattttgaatttcttgataatttactttttttcttttctattattagctttctacagttagttctttgctcagtttttacataccaaagatcaaaaatctttaaatagaaatcgccttatatatgtgttaaaattttgattattttccctttaacacatagattaaacaagaaattttactctttctttcttcctttggttgaaaatcctgagtagtattatgatttaaattctttttgtccccataagctgatctgtacatagatcaattaagaaattctttggtttcactttctcttttgggctttgttaatgggatcacattcccagtggtcttattt

SEQ ID NO: 7589 - DNA, 224 bp, Gossypium hirsutum
  Clone ID: LIB3120-021-Q1-K1-G2
ggccaggctaaagataccaccagcagatacccgctacaaaacagaggctacaacggcttcggaaggaaatgaatctgtggagtattttctgaaacgtgaacttctcttgggaaccctttagaatggatttgaaagaccatgtcctattcatgaagagagtattcccattgctttgtccagaacggatcttcttgccacagccaaaaatggaactggaaaaaccc

SEQ ID NO: 7590 - DNA, 197 bp, Gossypium hirsutum
  Clone ID: LIB3120-021-Q1-K1-G3
ggcacgcggacgcttaacctaaacaccgccctagaagattttatattcatcgcctaaattactgatcgacgctcaaaagcttgtcttttttcggggaattttatatgggtagtttgctttagtatcgagggcgaacagaccagacccagatatcgatgatgaatttcaggaaatttacaaggagtacactggcccgc

SEQ ID NO: 7591 - DNA, 460 bp, Gossypium hirsutum
  Clone ID: LIB3120-021-Q1-K1-G5
cccacgcgtccgccagccctagccaccgccctagaagattttatattcatcgtcgaaattactgttcgacgctcaaaagcttctctttttccggggaattttatatggttagtttgttttagtatcgatggcaaacagaccagacccagatatcgatgatgatttcagtgaaatttacaaggagtacactggcccgctagggtccgcagtttccaaggcagaagatagggtgaaagagaataaacgttctcatgctgcttcaaatgaggaagaggaacagcgtgaccccaatgctgtccccactgacttcactagccgggaagccaaggtctgggaggctaaatccaaggctactgagaggaattggaagaagaggaaagaagaagaaatgatttgcaaaatatgtggagaatcgggtcactctactcagggttgccccttcactcttggagcaaatcgc

SEQ ID NO: 7592 - DNA, 409 bp, Gossypium hirsutum
  unsure (1)..(409): unsure at all n locations; Clone ID: LIB3120-021-Q1-K1-G6
ggccaggctaaagataccaccagcagatacccgctacaaaacagaggatgtgacagctactaaaggaaatgaatttgaggactattttctgaaacgtgaacttcttatgggaatatatgagaagggttttgaaagaccatctcctattcaggaagagagtattcccattgctttgaccggaagtgatattcttgccagagccaaaaatggaactggaaagacagcagcattttgcattcccgccttggaaaagattgaccaagataacaatgttattcaagttgttatacttgttccaactcgagaactggctttgcagacatcacaagtgtgcaaggagcttgngaaccatttacaaattcaagtcatggtcaccacgggaggcaccagtctcaaggatgatattatg

SEQ ID NO: 7593 - DNA, 450 bp, Gossypium hirsutum
  Clone ID: LIB3120-021-Q1-K1-G7
ggaaataggaacattaatcaaaatattattgaaaataaaaaaagggactcccttatagcaccaaacgaaaaacaaattattggattagagaatcgaaatcaagaagaaaaagaacccataggtgaagggggtcttgtatcagatgcacaaaaacaaggaaattttaaatccgttctctcaaaccaagaaaaagatgttgaagaagattatgataaatcagacaaaaaaaaacgttgaaagaaaaagcaatacaagagcaacacggaagcagagcttgatttcttcctaaaaaggtatttgcgttttcaattgagatgggatgattctttaaatcaaagaataatcaataatatcaaagtatattgcctcctgcttagactgataaatccaaacgaaattgttatattctctattcaacggggagagatgaatcttgatattttgatgatt

SEQ ID NO: 7594 - DNA, 405 bp, Gossypium hirsutum
  Clone ID: LIB3120-021-Q1-K1-G8
gtcgttttggttttccttgattcaacagaggaaagagcttttaactttttaatagagagatggcagccttttccgcaacgcattgccgttcatattcatactctcattcttcatcgataaatggaggccaaaatcaacgcttttctttctcttctttttcgagattgtctgttccagctaaagctataagaaattcccatcaaactgttgttctcatgcaagatgggaatacaagcaaagatattggagaaaagaattttcaattatggaaaatctttattctgtttggaattgggaaaaatccttgactatcaatttgcttaatacaaatacatggttgatatataaacatatttataatttatgaatggcttttgatgcataggtgtagtggccacaaaagtg

SEQ ID NO: 7595 - DNA, 413 bp, Gossypium hirsutum
  Clone ID: LIB3120-021-Q1-K1-H1
ctgagatagtgaggtagctaaacaatggcagtttgcccagtatacaccacccaatctctcaactcaacatgttcaatctccacaccatcaaaaacccacttcagttctcaccacaaccacctagttttctacagaactagcaagagaactagcatgagaggtggcagcagctcatgtgtgataacctgctcagctggtgactcacaaacagttgtgattggtttagctgctgactcaggatgtgggaagagtaccttcatgaggaggctaacacgtgtgttcggtggtgcagctgagccaccaaagggaggcaaccctgattccaacacactgatcagcgatatgaccactgtgatatgtttagatgattatcattcacttgacagaactggaaggaaagagaagggagtgac

SEQ ID NO: 7596 - DNA, 324 bp, Gossypium hirsutum
  Clone ID: LIB3120-021-Q1-K1-H12
ctcaagcacacggggcaaatgtgaattttctttctgaacctatcagggacggaacatctggggcagtgataggtctcacaactcgggatgctcatcgcacaatgctcgcttatcagggtacatcatcggctattcattatgattcttgcctgactggcatagtgtccaagactgatatatgtggcgttgacggttattaatttgaacttcctgataccatcaaaactattatacgagcatgtgaacaagcgcgcatgagtgcagccctgatagctgccaccgcataagatgtctactgcatcgttagacactatgaggattact

SEQ ID NO: 7597 - DNA, 328 bp, Gossypium hirsutum
  unsure (1)..(328): unsure at all n locations; Clone ID: LIB3120-021-Q1-K1-H2
cgccacgcgtgctaagaataaaacccactttgccaaacatggtgactagtgtcacgtgctacgctcgtgggattcggaacgcagtggcctccataaagcaactctcattcttaatctaccctccatccacatattcttcgctcatctttatcagccttaacacaaatgcactattcagcgaatcatataaggaagttccaaggaactgatggtctcatgcaaaaggggaatacactacttcactagtgacaaaatgtgaaattggagagtctttggaagagtttctcacaaaggcaacaacagataangcattgattagattaatgat

SEQ ID NO: 7598 - DNA, 402 bp, Gossypium hirsutum
  Clone ID: LIB3120-021-Q1-K1-H3
gccacgcgtccgcccacgcgtccgagaacacacaacaatggccgtcaacacactaatgagctgcggcataggcaccacatttccttcacttcattcctcatcaaagtccaaattgagtggcgccgccgtatcgttacctacagctgtgggtaccaatgtgggccaccgcgctagcatgtaagctgactggatgcctggtcaacctacaccaccttaccttgatgcgtcaccaccagctgactttgggactgacccactaagactaggtgaaggccctgagaaccttgagacgttcaaagaatccgagttgattcactgcatatgggctatgcttgctggttcagggatattggtaccagaggccctagggttaggaaactgggtcaaagctcatgaatgggc

SEQ ID NO: 7599 - DNA, 261 bp, Gossypium hirsutum
  unsure (1)..(261): unsure at all n locations; Clone ID: LIB3120-021-Q1-K1-H4
acttttccaaacatggagactagtgtcacgtgctacggctcctggattgttcttcctggtgtctcttctaagcactcctcggcattagtctcccctccatccacatctccttccttcagctctaagagccttaaaacacgttcactatttgntgaatccttaaggccatgcgcccggtcatcattgaacgtttcaaaggcaaagcacactacgtgacttccaacttactggagcagagaaagtctttgaagagtttctcac

SEQ ID NO: 7600 - DNA, 457 bp, Gossypium hirsutum
  Clone ID: LIB3120-021-Q1-K1-H5
cccacgcgtccggcagaaatgctgaatcagcttcagtgaagctgcctatcaacaagcggagagaacagcggagagaaacggacggtggtaatggagctactagctctgcacatttctccgacgttagccagagagtgtttcttaacggccagcaataataactcttgtgttttccctcgctacgttcgaaatcgtcacggaaaatcgcggtttcgattccaagctcgaaaaggcggttccaggagctggaatccaaacaagatttctaggctagatttaatccaacaagtacttgaaagaaacaatctcattgaagattcacaagaagaagacgaagacgaaataagtggtgacgactcgtcttttttgtctttgagtgaaaaaccagataggaacatggctttgcttgacgagtacgagttggaagagcttgattttacctctcccactaatcatc

SEQ ID NO: 7601 - DNA, 456 bp, Gossypium hirsutum
  unsure (1)..(456): unsure at all n locations; Clone ID: LIB3120-021-Q1-K1-H6
cccacgcgtccgaagaagaaaacccactttgccaaacatggagactagtgtcacgtgctacgctcgtgggattgttcttcctggtgtctcttctaagcactcctcggcattagtctcccctccatccacatctccttccttcagctctaagagccttaaaacaagttcactatttggagaatcattaagggttgttccaaggtcatcattgaaggtttcaaaggcaaagcacactacttcactagtgacaaaatgtgaaattggagagtctttggaagagtttctcacaaaggcaacaacagataaggcattgattagattaatgatgtgtatgggtgaagcattaagaacaattgcttttaaagttagaacagcttcatgtggtggtactgctttgtgtaattcctttggtgatgaacaactngcttgtgatctacttgccaacaagcttctttt

SEQ ID NO: 7602 - DNA, 410 bp, Gossypium hirsutum
  Clone ID: LIB3120-021-Q1-K1-H7
cccacgcgtccgaacaaaatcagttgcttcacaatggcctctacaaccatggctctttcttgcccatcattcgccggtaaggcagtgaagttctccccttccacccctgaaatccggggaactggccgtgtttccatgaggaaaaccaccaagcctgttccttctggtagcccatggtacggtcctgaccgagttttgtacttgggtccactttccggtgagccaccatcttacttgaccggtgagttccctggtgactatggttgggacactgctggactctcaactgatcccgagacctttgctaggaaccgtgagctcgaagtcattcactgcagatgggccatgttgggagctcttgggtgtgttttccctgagctgttggctaagaacggtgtcaagttcggtga

SEQ ID NO: 7603 - DNA, 419 bp, Gossypium hirsutum
  Clone ID: LIB3120-021-Q1-K1-H8
aaatttatatccctgtgataaattggtttttgatgatcatgtgtgtagttgttgtttccatcttccgcagtaccactgatatcgccaatgcatatggcatagccgaagttggtgttatgttggtcacgaccacattggtgacacttgtaatgcttttaatatggcagaccaatttgtttatggctttgtgctttccgctcgtatttggatcaatagagcttatctacttctctgctgttctttccaaagtcttagagggaggttggcttccactcgtttttgctagtttctttctctctgtgatgtacatttggaactatggcagtgtgttgaagtaccagagtgaggtcagagagaaaatatccatggactttatgcttgaactcggctctacacttgggactgtgagaacttcgggg

SEQ ID NO: 7604 - DNA, 312 bp, Gossypium hirsutum
  Clone ID: LIB3120-022-Q1-K1-A1
cagtaacatatgcacagctcaagcattactagcaaacatggctgctatgtatgctggttatcatggacctgaaggcttaaaggccattgcacaacgtgttcatggtcttgctggggtatttgctttgggactgaagaaacttggcaccgtgggagtccagggccttgcctctttgatactgtaaaggttacatgtgctgatgcccattcaattgctgatgctggttacaggagtgagataaatcttcgggttcttgatgccaaaacaattactgtttcgtttgatgaaacaactactttggaagatgtggac

SEQ ID NO: 7605 - DNA, 243 bp, Gossypium hirsutum
  Clone ID: LIB3120-022-Q1-K1-A10
gacttggttttttcagctctcttcttctctttttcaacattattataactctattcgttttgcaaactcactctcactgtgtgcccattcttctcttaagaaaaaaaattatggattgctttgatcttgagaacccattcaccagcttggacaatcaagaatctgatataatctcagctctcttctcttcagaatctgatcacatgccgttccacaactactgtctaagttaaaagagcaatg

SEQ ID NO: 7606 - DNA, 248 bp, Gossypium hirsutum
  Clone ID: LIB3120-022-Q1-K1-A11
cacacattgcctccattctctaaaaccgacgccctcaaccgcggccatacgccgtcaacgggctccggtctcatttcagcgggcaggttcccgccacgttcgtcttttggtaaacttcataaaccagatgaagtttgggctgtagatgagcaagtgactttgtcttgatgctattgaactagttattcttggttattggataatggctttgtcgatctctagaaggattgtacgttcttttggttcac

SEQ ID NO: 7607 - DNA, 149 bp, Gossypium hirsutum
  unsure (1)..(149): unsure at all n locations; Clone ID: LIB3120-022-Q1-K1-A12
cacacacganctacactatgtcacactctcgcaatcgaaacgagtcatacgctatgcaccatgtcctccctaattcctgcgtgggctctccatatgaatccgaatatccgattacttccttctaaccaacatgagtgtggtggctcact

SEQ ID NO: 7608 - DNA, 388 bp, Gossypium hirsutum
  Clone ID: LIB3120-022-Q1-K1-A2
tcagtttcattgaactgggttcgaccttcctttacaaagaaggcaaattatgtgacacactccactgagctagccccaccttctgctttttcttcgcaaaactcactcacgtacaccaaagaaaccatttccaatgaagaaaacaattgcaagagaagactgttgctgttgggtgttggagctattacagctaatttactccctgcaaattcccttcttgcagaagagataccacaaaactatcgagctttcgttgacattccagatgggtattcttattactacccatcagattggagggaatttgattttaggggacatgattcagcattcaaagacaggtttcttcaactgcaaaatgtaagggtgagattcataccaactgata

SEQ ID NO: 7609 - DNA, 353 bp, Gossypium hirsutum
  Clone ID: LIB3120-022-Q1-K1-A3
tcgatttcgtttcttttataactttattatggttccattttgtttttaatgtaaagaatgtttttttgatagaattaatgtaaagaattttgaaaataaaaaaaaggaccctttttttttctacattttagtgattgagcagcagagaatgataattccgaacaagcatggtgaaaaactagtgggattattgcatgaaaccgagtctaaagagattgtcatcttatgccatggtttcaaatccacataggtcagttgcgtcatttcatctctatcaccttgctttcattagcaaatatattacgtggaaatgcctgttcatggaggaatagtaatcatttatggaaagcagc

SEQ ID NO: 7610 - DNA, 241 bp, Gossypium hirsutum
  Clone ID: LIB3120-022-Q1-K1-A4
gaagccgtgcatgggaatcactcgtgggatcgatctgttgctgctctagcgtcttccagaaactcctagggtttctggtgctttcacattattgggctcctttgggccgtttaggaattgggtcagggattaaattaggggtttgggtgtaatgggattttgggttggtgttttgggcctttattatttttttgggttaattgtaaatggactttttatggacatttattggatttttgtt

SEQ ID NO: 7611 - DNA, 357 bp, Gossypium hirsutum
  unsure (1)..(357): unsure at all n locations; Clone ID: LIB3120-022-Q1-K1-A5
ccctgttatcgtacgctgcacccctctgaacctacgcaccccattccagaaaccattctacattaggtcccaagccgccccagtgctttcccaagatgatcttaaaaagcttgcagctgacaaagcagttgagtcagtcaaatcaggcatgatcctaggcctaggaacaggatcaacagcagcttttgtggtcgacaaaataggccaactcctttgcacgggccaactttctaacatcgtaggtatcccaacttcgaaaagaacacangaacaagctgcatcacttaacattcccttatctacccttgacttgcatcctcgtattgaccttgctattgatggtgctgatgaaggtga

SEQ ID NO: 7612 - DNA, 377 bp, Gossypium hirsutum
  Clone ID: LIB3120-022-Q1-K1-A6
cgccaccaccggcgccgccatgggtcgcctgcacagccgcggcaagggtatttctgcctcagctctaccttataagagaactccaccaagctggctcaagatctcttctcaagatgtcgaggagaacatttgcaaatttgcaaaaaagggcttgaccccatctcagatcggtgtcattcttcgtgactctcatggcattgctcaggttaacagcgttactggaagcaaaatcttgcgtatcctcaaggctcacggtcttgcccctgaaattcccgaggatttgtaccaccttattaagaaggctgttgcgatccgcaagcatttggagagaaacaggaaggataaggattccaagtttcggttgattcttgttgaga

SEQ ID NO: 7613 - DNA, 216 bp, Gossypium hirsutum
  Clone ID: LIB3120-022-Q1-K1-A7
tgccatcgacaggataggccgcaacacccgtgtcaaagaaccggactcgacaggctgctctatccgtgaagaggaaacgctaccggcggatgactctgactgagactaggagagaatacgcatactatcaacatgacatatacagctcatgaatagcatacatcgcgacatgggatgcattgactcatacggatcaatgatccgctaggcgatgca

SEQ ID NO: 7614 - DNA, 377 bp, Gossypium hirsutum
  Clone ID: LIB3120-022-Q1-K1-A8
cacatcaaaccaagagagaatccatgtctcattgtagtgaagcttaaacgatgggaacggaaggaatgcataccgaacagccttccagttttgcataaaatgcacgttaaggttggagataccatcaaagtaatatcgggtcgtgataagggcaagattggagagataagcaagatcttcaagcataacagcaccattgtagtgaaagatataaacctgaagacgaagcatatgaagagcagaggagaggatcaaccgggacagataattaagattgaagcaccaattcacagctcaaatgtgatgctgtattctaaagagaaagaagtgacgagccgtgtgggtcatatagtgttagataacgggaaaaaggtccg

SEQ ID NO: 7615 - DNA, 353 bp, Gossypium hirsutum
  Clone ID: LIB3120-022-Q1-K1-A9
gcaatgtcgacggcttccatcaacggttggtgccttacctgctcttcttcctccaccaccagcttctctttttccgctcgtggacgacctacattgcggccttcggtcgtcgctagccttaactcttctccttctcctccgactcttatccaagaccgcccggttttcgctgcccctgttcctttgctcaccccgagagaagagatgggaaacaagtcctacgacgaagccattgaagctctcaagaaacttctcagtgagaaaggagaactgaaagctgaagcagctgcaagggtagatcaaataacagcagagttaaacacaacatcagctgacggcgaaccatctgactc

SEQ ID NO: 7616 - DNA, 361 bp, Gossypium hirsutum
  Clone ID: LIB3120-022-Q1-K1-B10
acgtccacgcgtgcggcgaatattgaaagctcacgcgattctcctgcatgcggcttaggaggttgcccatctagacaattcaactctggtccaagtatggctgcaattgctgctgcaactgtagcagctgcaactgcatggtgggccgcccatggactgcttactgtatgtgctcctctgcatacaggctttacctgttttcctgcatccactgctgcagttccaccaatggagaatggtcaacctccagctgccaagacagaacaaaaggggtaaactgatcaagctctatctctgcaggttgagcaactagaccccgaaaactcttgaactttgcaaggtcagcattcatcatctaaat

SEQ ID NO: 7617 - DNA, 190 bp, Gossypium hirsutum
  Clone ID: LIB3120-022-Q1-K1-B11
gatcatcaagaaatttctgggagtggttcaaaaccagctgagagttcatccattaaagggaaattttgggaagaagatccagatgctggtggattggacaacgagttattagctgttttgggttacaaagttcggtcatcagatttggcggatgtagctaaaaaattggaaatgttggagaaagttatgg

SEQ ID NO: 7618 - DNA, 207 bp, Gossypium hirsutum
  Clone ID: LIB3120-022-Q1-K1-B12
tccaagcgttaccttaaggcctaccctaaagtgtcctctcatctatcattttctttagcagtgtctgttccatctaatggatggggtgaaagaaatgacggctgaatataatgctgaatgtgctacggtttaacctactgttaaaccttgtgccaatggtatggcctctaccatgctcactcactgcatcattctacccatcgatat

SEQ ID NO: 7619 - DNA, 373 bp, Gossypium hirsutum
  Clone ID: LIB3120-022-Q1-K1-B2
tcacagctcctgtcttgagtactataatgggttaggagaatggtcacatgaacattgtggccattggccatgtcaactctgggaagtctacaaccactggtcatgtcatctacaagcttggcaggattgacaagcgtgtgattgacagggttgagaaggcagctgctgagatgaacgtcaggtcattcaagtatgcatgggagcttgacgagccttatgccgcacgtgcacgtggtattaccattgatattgccctctgtaaggttgatactaccaaatactactgtactggcattgatgcccctggacatcgcgactttcatcataacatgaatgcatgtacgtgacaggctgactgcgctggtctcattat

SEQ ID NO: 7620 - DNA, 365 bp, Gossypium hirsutum
  Clone ID: LIB3120-022-Q1-K1-B3
acaatggctgacttcaagaaagccactgctttgattctcacagtggctttgcttgtgaatctcgctttaatggttgatgctgatggtgatgatgataagaagattcgagtcaggaaacataagggtgagaagcagtgtatacaaggatgggaatgttcctactggtcgaaatattgttgcaacaaaacggtttcagatgtcttccaggtttatcaatttgaggacctgtttgctaaaaggaattcgccggtggctcatgctgttggattttgggattaccattcttttattttggctgcttccatttatgagcctttgggttttgggactactggtggtaagcgtatgcaaatgaaggaagtcgc

SEQ ID NO: 7621 - DNA, 309 bp, Gossypium hirsutum
  Clone ID: LIB3120-022-Q1-K1-B4
tgctacatcctgcttcatggggacacgcttccccgacgtctacacaagttcagggagattcgtcgccaggtttggttttggcggccaaaaaagcagctcccaagaaagcctcgaaacaaaccttcgaccgccctctatggtacccaggagcggtggctcctgattggctcgatggaagcttggtgggtgattacgggttcgacccgttcgggttaaggaaaccagcggagtacttgcaatatgatttggattctttggaccagaacctggctaagaatatggctggtgagatcattggaactaggaccg

SEQ ID NO: 7622 - DNA, 378 bp, Gossypium hirsutum
  Clone ID: LIB3120-022-Q1-K1-B5
gcctaaaagagctgaagcaatggcagtttgctcagcatacaccacccagtccctccattcaacgtgttcaatctccacaccagcgaaaacccatttaggttttcaccaaaagcaagtagttttctataggagaagcagcacgagaggtggcagcggcagcagcagcggcccatgcgtgataacatgctcggccggtgattcacaaacagttgtgattggcttggccgcagactcaggatgtgggaagagtacctttatgaggaggctaacaagtgtgcttggtggtgcagtcgagccaccgaagggaggcaaccctgattcaaacacgctcattagcgatatgaccactgtgatatgcttagatgattaccattcact

SEQ ID NO: 7623 - DNA, 373 bp, Gossypium hirsutum
  Clone ID: LIB3120-022-Q1-K1-B6
gacatcgtttcggctttcgaagggaactccaatctgttctgggcggaacggtttggaaaacagtttttggggatgaacgatttgtgggttaaacactgtggaatcagccacactggcagtttcaaggatctgggtatgactgttttggtcagtcaagttaatcgactccgaaaactgaaacgacccgtcgttggagtcggctgcgcttccactggtgacacatcagctgccttatccgcttattgcgctgccgcgggtattccttccattgtctttttacctgcgaataagatctccattgcacaattagttcaaccaattgcgaacggcgcgttcgttttgagcattgacaccgatttcgacggttgcatga

SEQ ID NO: 7624 - DNA, 369 bp, Gossypium hirsutum
  Clone ID: LIB3120-022-Q1-K1-B7
atgatacattggatgcattcctcttttactggattgacaaaggggaaactgatcctatcatactgcccaaaatagggggtagtggtgcagcgctttttgattatgctcgagggggtccccagtttggggctgatgggttactcattggacctcccctggcgccggtcatgggcgggtttgcagggcctgacactaattcaggcattggggacttgaggcaagccaagtctagattgggattatcatatgctaagaggaaggatggtaaggagtccctctttggggatgactccaaggttactcttgaggaagtgcaagttttttgcagtcctcacattgctagcttatactaagatgagtaatggagct

SEQ ID NO: 7625 - DNA, 380 bp, Gossypium hirsutum
  Clone ID: LIB3120-022-Q1-K1-B8
tggttcccttggatttcttccaaggaagcgagcttctcgtcacagaggaaaagtgaaggcattcccaaaggatgatccaagcaaaccatgcaagcttactgcctttttagggtacaaggctggtatgacacacattgtcagggaggtcgaaaaacccggatctaagcttcacaagaaggagacgtgtgaagctgttacaatcattgaaacccctcctatggttattgttggagttgttgggtatgtgaagacaccacgtggtctccgctcattgaacaccgtctgggctcagcatttgagcgaggaggttaaacgtaggttctataagcattggtgcaagtccaagaagaaggctttcaccaagtactcaaagcagtacg

SEQ ID NO: 7626 - DNA, 81 bp, Gossypium hirsutum
  Clone ID: LIB3120-022-Q1-K1-B9
attgctccggatattgaccaataatgctactatagctaaaggaccgtctgctgcaaaagtggttgagcccctttttcagtt

SEQ ID NO: 7627 - DNA, 367 bp, Gossypium hirsutum
  Clone ID: LIB3120-022-Q1-K1-C1
atccaacaatctgctttcgctggccaaacagctttgaagcagtccaatgagctcgtctgcaagatcggtgccgtcggtggtggtcgcgtttccatgcgtagaaccgtcaaaagtgctccaaccagcatctggtatggccctgaccgcccaaagtacttgggtccattctctgaccaaatcccatcatacctgaccggtgaattccctggggactacgggtgggatactgctggattatcagctgacccagagacatttgccaagaaccgtgagcttgaggtgatccactgtaggtgggctatgcttggtgcccttggctgtgttttccctgaaattctttcaaagaatggtgtcaagttcggagagg

SEQ ID NO: 7628 - DNA, 226 bp, Gossypium hirsutum
  Clone ID: LIB3120-022-Q1-K1-C10
cacgcgtaccgagagagggatagaactgccggctggggactggctgccatctcgggccagggatgtgctttccagacgctggacaagaaatggactcatcccattgcccacttatgtgacggctacaagattggtgactatgtggacgtccaggtcaatggcgccgatcacaagggcatgccccacaaattgtaccatggacggactggacgtgcctggaacatca

SEQ ID NO: 7629 - DNA, 311 bp, Gossypium hirsutum
  Clone ID: LIB3120-022-Q1-K1-C11
ccacgcgtacgggcaagaaccagattgcattgaagtgtggaacccaaatgggaaatacaaacttattggcaccgaacctatgcctgggactggatggatcaacctcttaatcgagcaacagtgccgcgtagacatatgtactgagaagaaaacgattttgtccgctgaggatatgatatatttgattggcaataagtgcgatggggtgattggacagtcgactgatgactggggggagactttatttgcaactttaagcagagcgggacgcaaagcatttactaacatggctgctggttacaacaatgttg

SEQ ID NO: 7630 - DNA, 252 bp, Gossypium hirsutum
  Clone ID: LIB3120-022-Q1-K1-C12
ctttgaattgaaaccctcaaaattgcacttaaaaaatgggctcctcagcttccctctccacgggcgtagccaccacctgtttggtccgcggccacccggccccgaaaaccctaagctcccttcctttcaaccaatctcttttcgggctaaaaccccaacgaaatggccgtctcaccatggctgcatacaaagtgacactgttaacacccgaaggacctcaaggattcgtgtgcccccgacgacgtttacatc

SEQ ID NO: 7631 - DNA, 372 bp, Gossypium hirsutum
  Clone ID: LIB3120-022-Q1-K1-C2
gacctcggccccctcctctcctcctccgccaatgcaacagccctcgcctccttcctttgtgcccgtttctccaccatctccagccaactctctgacgccactcacgccattgacaacacttacctcctcttctccgcttacctagtcttcgccatgcaactcggctttgccatgctttgtgctggctctgtcagagctaagaacaccatgaacatcatgttgactaacgtccttgacgctgcagccggtgctctttcttattacctctttggttttgcctttgcctttggtgccccttctaatggtttcattggacgtcacttatttggtcttaaagcatacccttcacccgacggtgattatagttttttt

SEQ ID NO: 7632 - DNA, 362 bp, Gossypium hirsutum
  unsure (1)..(362): unsure at all n locations; Clone ID: LIB3120-022-Q1-K1-C3
tcaagtaccaaattgggccaaacaaattttaggtatcaaaaaaaaaatgttaggtttaggtacccaatgttatattaagtcaaataataataatggttgatatttattatgtatgatttagcaggtaactaagttcaaatgcggtggtgtttgtttgggacttgggtttcaacatactttaggagatggcacatcggctattcatttcatcaatagttgggctgacaccgtccgaggcgtctcgcctgccattgcaccattcatcgatcgaactcttcttcgtgctcgagtccgaccaatgcctaaattccaccatattgaatatgagccttctgctncattgaaggctgttgaatctgatc

SEQ ID NO: 7633 - DNA, 387 bp, Gossypium hirsutum
  Clone ID: LIB3120-022-Q1-K1-C4
gtttattgagtgtattttggaattaaatattcagggtttcaactcataacaaaagttccaagttgctaatatggtatctatataccagtgcattatcaatcatctgcaatcactttccagttgtcattaacttatctttctctttaggttgaaacatagaatgaaaatgagcttctatagagggttatagatagtttagaaggaaatgggattttaaagaataataatagagagaggatgctgatagtatttgttatccctgtataattctagcatcaatatgatcccactggttgacatttgtagttttatgcagccttacattgaaatttaatttgcaggacctcttgagacgtgaagccaaaagaggtaatggtggtattccat

SEQ ID NO: 7634 - DNA, 360 bp, Gossypium hirsutum
  Clone ID: LIB3120-022-Q1-K1-C5
gaagcaaagccgattgacgtcaagcccctcccacacaccaaatcctgcaactagttctgaaaaaagaaagtttggttaaaaatgagtcagtgtgttcccagttgggatctggacgataatcatgtcactgcacgccattccttacgctctaactccaactccaccgcccctgatgttcacatgtcggactacgaagtggcagaattaacatgggaaaatggccaactagccatgcatggtttaggtccggcacgtgtgccggctaaacccttagtttccaaccctccctctaagtacacttgggataaaccaagggctaatggcactttggagtccatagtgaaccaggccactcgcgtt

SEQ ID NO: 7635 - DNA, 241 bp, Gossypium hirsutum
  Clone ID: LIB3120-022-Q1-K1-C6
aatcatgggcttcgacaacgtgcgtcaagtgcagtgcattagtttcattgcctacaagcctccaggcttctaagctttttattaactttgtctctccatttgtttgaatttgtactcagaaaaaaatcatgttctttactttgcttttccttttctttgagttattggcctttgtttctcgatttccgggttttaatcctgagaactaatgaataaaaagttggttttcttcccaaataaa

SEQ ID NO: 7636 - DNA, 240 bp, Gossypium hirsutum
  Clone ID: LIB3120-022-Q1-K1-C7
acggtcgtggcaccatcatgggccagggcgctatgcacgttcttccaaagcgtggttaatgccttccgcttgtatcctgatgcttctaggctcagctgcccttagcatactgacttcaaggactcgacttagacctgtgccgatgcatcctaactccctgcttacgctcatgcgacatctgctcttgacgagtcgcgtgcatgcgcctgaggagccgcaaagcggctgacctactacgaa

SEQ ID NO: 7637 - DNA, 376 bp, Gossypium hirsutum
  Clone ID: LIB3120-022-Q1-K1-C8
aaagggcatctgtatatgccaaaagagctgtacaagctgctgtgtcgcagcagaagagagcaacttctagcgtagaagctgatataacaggtgcttcttcactccatgttttgccaaagcaggaagtatctaccgctatatctaaaaactatacatttaagaaaggtgatagggttaagttcgtaggtaccacatcaccttctacactttcctctctacaacctgctttaagggaaccgacaattggtgtacggggaaaagtagtccttgctttcgaagaaaatggttcctcaaaaatcggggtcagatttgacaggtctattcctgaaggcaatgaccttggtggtctttgtgaagaagatcatggtttcttctg

SEQ ID NO: 7638 - DNA, 128 bp, Gossypium hirsutum
  Clone ID: LIB3120-022-Q1-K1-C9
tgtggacatacaattctgagacaccacggaatctaatactcctaaacatggcgataatcatactcggacgtggagggcagacacctattattggctattgaccacacaatgcaatacacacatattat

SEQ ID NO: 7639 - DNA, 359 bp, Gossypium hirsutum
  unsure (1)..(359): unsure at all n locations; Clone ID: LIB3120-022-Q1-K1-D1
caagtcagttgataaccttgcacctcttgccttttgtttatggttgtgtcttctagttaattagtttcatatggtacattcgtccaaaatgagatcttaaataatgtttagaatgagaatgtcgttgctgaaagaaagagaaaatggaatattagtcacagatttcccaagtcgggtgtttggtgagttttattcatatgtttcatgtatttataaatgtaattgctgaaagggagagaatatagaacagtattttgaagatttctgattctcactgaatattttctctgaacagttngatgttntcagtgtatgtngctagttaaaatatcttctttaacccacatatctttgaagtg

SEQ ID NO: 7640 - DNA, 330 bp, Gossypium hirsutum
  Clone ID: LIB3120-022-Q1-K1-D10
cccacgcgtccgcttcaacagctttttcaacaatccaaggtcgttgatgaagaaacaatgaatgttgggattgatttccctagagatttcgccaattcaaggttgaaagaaaccatgattctcacccataggttctccaaaaacatattcagaaccaaggagttgtttgcttgtaggacaatccaaatgctgatttcagggcttgttttaggctctatctttcacaatgccaaagatgatctcagcggagcagaagaaaaagtgggtctatttgcatttatattaacattcttgctttcatgcaccacagaagcattaccaatcttttta

SEQ ID NO: 7641 - DNA, 274 bp, Gossypium hirsutum
  Clone ID: LIB3120-022-Q1-K1-D11
cagtaattcatatttctctctcttgattatattttaaaaagctagatctgtttttttattggcggtgaatcgcgattgtcggcggtacttaatcgggaaagattttgttctaattagctaggctgattttcataagagatctgaggtttttttgaatttgagatgatttgagtctttagaggctttggtttttatattacagccttcaatttttggggaaattcctgccattttctgatactggtgaattttatgattggtgtttggtttgggt

SEQ ID NO: 7642 - DNA, 144 bp, Gossypium hirsutum
  Clone ID: LIB3120-022-Q1-K1-D12
tcgcccacgcgtgcggcgaagagaaagtttatttatttatttatttatttaagatttgaatcacgggataatataccacgggcgatcatttcaatcccatgaggaattcaaaaaattaccggtagggacccgtgaaaaacccga

SEQ ID NO: 7643 - DNA, 264 bp, Gossypium hirsutum
  Clone ID: LIB3120-022-Q1-K1-D2
ttccgaactctgaagctcactactccagagctgtacgccaatcatgctcacgttgctgacatgtcatatctcaactgctgaaggtctgtcgctttcatatgttcatgatgatcgaatgcagtttgagacttgaacgacttgatctgtgccaccatgagtggagcgacatgctgtcttcatggctgtggtgcattaaactcagatacactcatgcttgtcgtcaatgtcatgggattgactctgctgcattgatatatggctggc

SEQ ID NO: 7644 - DNA, 376 bp, Gossypium hirsutum
  Clone ID: LIB3120-022-Q1-K1-D4
ggctgctagaactacctcatcttcactagttggaatgcagaagaatcctattagccgcccggtcaggcatcttggtccgccaccaggttttagccctgttcctctaaaggctctgaatgaatctgtttctgctgtagaattgaggaaccctctgatggatgattatagttggttggatggacatcagttggcatcatcattagaaggctctacgcgtgagagttctctctattatgtatctcatgctgatccccaacatgtaaataacagaagcaatggcttcactggaacggtaagctttcctttccctggaaagcaagctcctgcagtgcagtttcatatggaaaaggataaaggctggcaggactaccatact

SEQ ID NO: 7645 - DNA, 379 bp, Gossypium hirsutum
  Clone ID: LIB3120-022-Q1-K1-D5
gggttgcgtgccggtgataatagccgatggtatccaattgccatttccctccgccgtgaagtggtcggagatttccttcacggtggcggaaagggacgtagggaagctagggaggatcctggaacacgtggcgaagaccaatttgtcaaccatccagaaaaacctgtgggaccctgctgtcagcaaggccctactgttcaatgatcacatgcaagaaggagatgccacgtggcaggttctcgagtcactctacaagaaactggaccggtcgtacaagagatcgagggtttcaagccaatagggagcgaacacgtggaactgtgttgtgtggcgccagctaaggtttgtttccttcccaacgtggaagacagctaggaat

SEQ ID NO: 7646 - DNA, 90 bp, Gossypium hirsutum
  Clone ID: LIB3120-022-Q1-K1-D6
aaaaaaaagaaaaaaaaagagaaaaaaaaaaaaaaaaagaaaaaaaaaaaaaagaaagaaaaaaaaaaaaaaaaaaaaaaagaaaaaaaa

SEQ ID NO: 7647 - DNA, 222 bp, Gossypium hirsutum
  Clone ID: LIB3120-022-Q1-K1-D7
cgactcggctcgtccattgacaagcctgtgcgtcctttcttcaatgccccttccctctattacatgtcgtctttgccaaatgaagctgtgtacgagaaggagaaacctgtcgtcacttggccaaagcaactgaatgctccacttgaaaccgttgatcctgaaatcgctgacatcatcgagcttgaataagcgcactaatggaaggtacttgaacttatctta

SEQ ID NO: 7648 - DNA, 371 bp, Gossypium hirsutum
  unsure (1)..(371): unsure at all n locations; Clone ID: LIB3120-022-Q1-K1-D8
agttcaagagaacatttccttggagcataaaaaaaagtttagaacatgggtgtccaagctgaaattgagttcccagtcattgagttccgttcagcagatttggagcggggaaccgatgggtggcaccgtttgtgcaagagggttcgagaggcttgtgagactttcggctgtttcgaggtggcgtataaaaaaatatcgacggaagttcgagaggagacatttgggttgatgaaagaattaattgaggtcccagtggaaaggaaacaaaagaacgctagtcccatgccttatcatggctgggttggaccatgcaatcaggtttctttgttgtatgaaggctttggacttggagatgcctncaactatgactc

SEQ ID NO: 7649 - DNA, 323 bp, Gossypium hirsutum
  Clone ID: LIB3120-022-Q1-K1-D9
gcgaccttgggttgagcgtagacatgaggaaaatcatgggtgccaaagttctcttcttctgtgctttgctttccttttgagctgtgtccgcatttgcacaggatgaggaagaccaaggtcttgttatgaacttctacaaggattcttgtcctcaggctgaagacattatcaaagagcaagttaagctactgtacaagcgacacaaaaacactgctttttcttggctgagaaacattttccatgactgtgctgtacaatcatgtgatgcttcactgctgcttgactccacaagaaggagcttgtctgagaaggagacagacagg

SEQ ID NO: 7650 - DNA, 285 bp, Gossypium hirsutum
  unsure (1)..(285): unsure at all n locations; Clone ID: LIB3120-022-Q1-K1-E1
aaagggctcttggcacgacttacgccagttagaacctccttaaaacacagcggctgcaccagctgatcctccgnctcccgctctgattgatgcctcatacgtcttgacatgactcgtcgacacctcaaagactgctgtgtcaatcgcagcctaggcttctccttcgatgacagtggggactgtgatgggtccctacatgcctgctgcaaagttcgatgtctcatgggaaaagggtcaacatggggtgattcaatgggccagaagagtgatgaggactagactggc

SEQ ID NO: 7651 - DNA, 187 bp, Gossypium hirsutum
  Clone ID: LIB3120-022-Q1-K1-E10
gcgacccaattgtttgcataaaaatgatgcaaaagaggaccctcatatgcatcaactgcgagtgtgacacctctcatcggatgctgtcgagacaagaaccgagaccagataagcaccattgatacacattgcttgaccactcagactacccaactcccgggcttttattaatacacaaccagctttg

SEQ ID NO: 7652 - DNA, 370 bp, Gossypium hirsutum
  Clone ID: LIB3120-022-Q1-K1-E11
gtcccgagagcactagcattatcactagcactagttgcaaccatggcctccgccgcatgtttcttgcgccaccacgcactgacaacgaatggcagatcatcatcattatcgccgtcgctgcgccaggtttcaaacatgaagcctacccaccatgtggtgtgcaaggctcaaaagcaggaagatgatggaagccttgtgtcccgtatgttagctctcactgtactcattggtgctgacgctgttggctctaaagggtctcctgctgatgctgcctattgtgaagctggaaatgtatttggaaagccaaaaaccaacacaaacttcatgccatacagtggggattgattcaagctctcggtaccatcgaaat

SEQ ID NO: 7653 - DNA, 254 bp, Gossypium hirsutum
  Clone ID: LIB3120-022-Q1-K1-E12
gcaaccaacatggcctgattagcagcctccaccgatgccggcttccttggcgtgtctgaagtgcttggtaacactctgaatggcagtggtggaactaggtcattggctccaacaccatccaactcatccactttcaagaccgctgctcttttctgcaagaagaaggccgctcctccaaagcccaatgctggtgctgtcgccccagccgatgaagagctggctaagtggtacggtccggacagaaggattttctt

SEQ ID NO: 7654 - DNA, 372 bp, Gossypium hirsutum
  unsure (1)..(372): unsure at all n locations; Clone ID: LIB3120-022-Q1-K1-E2
cttggtggaagtgctgaccttgcttctgccaacatgaccttgctcaaaatgtacggtgatttccagaaggaccccctgaggagcgcaatgttaggtttggtgttagggaacatggaatgggatccatctgcaatggcattgcccttcacagcccaggcttcattccgtactgtgctacattctttgtctttactgactacatgagagctgccattaggatttctgccttgtgtgaagcangagttatctatgttatgacccatgattccattggtcttggggaagatggaccaaccnaccagcccaattgaacacttggcaagcttncgtgcaatgcctaaatgtntgatgcttcgtncagctgatggaaat

SEQ ID NO: 7655 - DNA, 359 bp, Gossypium hirsutum
  Clone ID: LIB3120-022-Q1-K1-E3
gtgtgttggatcaagagcagatagtaagcgcctttattatggacgctttattctgtctccacttatgaaaggccaagccgacacaataggcattgcgatgcgaagagctttgcttggagaactagaaggaacatgcattacacgtgcaaaatttgagaaaataccccacgaatattctaccatagtaggtattcaagaatcagtccatgaaattttaatgaatttgaaagaaattgtattgagagggaatttgtatggaactcgtaacgcctttatttgtgccaagggtcccggatatgtaactgctcaagacatcatcttaccaccttctgtggaaatcgttgataatacacagcatg

SEQ ID NO: 7656 - DNA, 368 bp, Gossypium hirsutum
  unsure (1)..(368): unsure at all n locations; Clone ID: LIB3120-022-Q1-K1-E4
gaggcagaccgaatccccgagcattcccgtccacgcaggttatccgggagggtagccttagttggggatgcagctggatatgtgacgaaatgctcaggtgaaggtatctactttgcagctaagagcgggagaatgtgtgcagaggcgattgttgaggggtcagagaatgggaagaagatggtggatgaaggggacttgaggaagtacttggagaagtgggacaagaaatactggccaacctacaaggtattagatgtgttgcagaaggtcttctacagatcgaaccctgcaagggaagctttcgtggagatgtgcgcggatgagtatgtgcagaagatgacatttgacagttacttgtacanaacagt

SEQ ID NO: 7657 - DNA, 354 bp, Gossypium hirsutum
  Clone ID: LIB3120-022-Q1-K1-E5
tgtccagtgccatggagaggaccgaccagtgggttttctcccaagagattcctactgatgatattgacgaagttggtgtaaccaatggcaatcttcacaagttcatgctagtggcaaagagcaattacataacgaagttgataatggaaacaaatgaatcggatctgacgagaatcaacctgtctgaaatcccctgtggccctgaaatcttcgagaaagcacccaagttctgctacggcgttaatttcgagattacagtgcataatgtggcggctctccgatgtgctgccgagtatcttccaatgacggatgaatactgcgactacaacctggcatggcgcaccgaagatttgc

SEQ ID NO: 7658 - DNA, 372 bp, Gossypium hirsutum
  Clone ID: LIB3120-022-Q1-K1-E6
gctaatgatgatgtgaagcagtgtgaagtaatccagcatttgcttgatgtaacggaagttgcagcttctattcccgataagagttcatccccaaaagtgtctaagaaagtggagcgtaattactcagatgtggataatgaaaaaggtcattcgtacaatgataactctcctaagaaacctgattctcgcttgacttcaagaaacacttcttcagtttcatcgggacatgatctactctctgatagaggatcacatcggtatgaagaatggaatgctgatttgcttggttgtttctcagaaccatctctgtgtataaagacattcttttatccttgtggtacattttcaaagattgctaccgttgcgacaaac

SEQ ID NO: 7659 - DNA, 380 bp, Gossypium hirsutum
  Clone ID: LIB3120-022-Q1-K1-E7
tcttacgtggcctgcacaaaattctccatgttgggttggagtggagggaaaagagacttgagaatgaaaagggttctttcggtttcggctcagcagcaagctgaagttggtgaaacacaagaagctaaagtgcatgaagagcaagaaaaggttaagcatcatcaacctacacaaccaaggccagtggaaaaacaactgaatgtaaagagcaaaaacatgggcaaagattatggaggacagtggcttagcagtgttacgaggcacgtcaggatctatgctgcctacattgatcctgaaacctctgagttcgatcaaactcagatggataaactcacccttatacttgaccctactgatgagtttgtttggactcctgaaac

SEQ ID NO: 7660 - DNA, 260 bp, Gossypium hirsutum
  Clone ID: LIB3120-022-Q1-K1-E8
ggatccatgtagagaagcaaacaacgtcgtgacgatgtaccatgcttacacaccaggcgtcaaacccattattaccaacaagacatttactgcagtcgagatctttaaccaccctgaacttgatgctgcagagcctagggatggtaatgagcatgattacactcttattcaaaaggatactatgtggcctgacagatggcctgatggaagattacttggaacacatggtgcagactactcgagtgcaggtgctgacaagt

SEQ ID NO: 7661 - DNA, 284 bp, Gossypium hirsutum
  Clone ID: LIB3120-022-Q1-K1-E9
ggtttggttaatttgtgtgctattccacctcatattgaacattgaccattccatgatactggactactaccgatgctctatatcacgcagcatacatctggggttgatccatttacatcacattactaacatgacattcaatgcatgggactatcgtgaagtaaacaaggcaaaaaaccatgccattttttcattccatacatggaattgttagcaacattggcatgggccattaggcccttttggttcgggaaaccgaaaaatggtgattggcatgcctttta

SEQ ID NO: 7662 - DNA, 376 bp, Gossypium hirsutum
  Clone ID: LIB3120-022-Q1-K1-F1
tggctacttgtgccaccacaccttcatcatctgtgatgataacatacgctgccgcatccactgtacacgcccaagccctcactccttccgttctatccttcaagtccaacaagcctaccttttctattaacccacttgctctcaagacttctatagacggaaaatccggcatcaaatgggctaatctatacccccagagtgattccaagcaccatgtcatggctgccgtggctgcggaggctgaggtggctgaggctacggacgaaaatgatggagtggcagctgagggtggcaccgctaccgctattgctactgctccacccaagcccaagaaaggaaaggctgcgttgcctcttaagagagacagaacgagatc

SEQ ID NO: 7663 - DNA, 411 bp, Gossypium hirsutum
  Clone ID: LIB3120-022-Q1-K1-F10
gcgtatttgaagagattagaaagatgaaaatgagttggttttccttaataccgctgctgcttagtgtaccaatcaataatctgtcggaggctatccatggacataagctaccttctgctgttgcttctggaactgtatactgggacatttgtttccaacaagatttctcaaaggcccatcactttatttcaagtgcatcagctgcacgagaatgtgaagatggggattctaggccgagtcttcgacaagatgcgaaaaccaacgcgcagggagagatcatagctcgcctgccattctcagttaccaaacatgtgaagaaagtcaaaggatgttcactgaaacttgtgagaagcagcgagccatactgtgcagtggcctcatcttcaacattatcatcactgcatctgaagt

SEQ ID NO: 7664 - DNA, 198 bp, Gossypium hirsutum
  Clone ID: LIB3120-022-Q1-K1-F11
ctcagcttccctttctcttaccgatcatgatgtctcccctatcatctctccaaaaacaaccgagaaactttctggtgtgcccagttccagcttttcaggaactggttccatttttgccactggttcccctttcttgatgagggaatcatttaaccaaaggaaacctgtatgtaaagcaacttcatttaccattacatg

SEQ ID NO: 7665 - DNA, 401 bp, Gossypium hirsutum
  unsure (1)..(401): unsure at all n locations; Clone ID: LIB3120-022-Q1-K1-F12
atttgggttgcaatggcacaagcaatggcatcgatgactggtttacgtggctcttcacaagctgtgttggaaggtagtgtccgactcancggccaaacccggttgaacgttgctagcaccaacagggtggctgtggctagacctggttttaccgttagagctcaacaggtccctgccgagcctgaaactggacgcagagctgtgctgggtcttgttgctgctggtttggctactggctcctttgttcaagctgtgcttgctgatgcacgaagcatcaaggttggcccgcctgcaccaccctccggtggattgcccggaactttgaattccgatgagccaagagaccttgatctggcgtacaaagatcggtttttcctccaaccattgactccggcacaagc

SEQ ID NO: 7666 - DNA, 384 bp, Gossypium hirsutum
  unsure (1)..(384): unsure at all n locations; Clone ID: LIB3120-022-Q1-K1-F2
cttccctctgcaccgccgtagccaccacctctttcctccgcggccatccggcgccgaaaaccctaaactcccttcctttcaaccaatctcttttcgggctaaaaccccaacgaaatggccgtctcaccatggcagcatacaaggtgacactgttaacacccgaaggaccccaagaattcgtgtgccccgacgacgtatacatcgttgaccaagctgaggaagaaggcattgatcttccgttctcgtgtagggctgggtcttgttcttcgtgtgccggagtgattaagcaaggctccgtcgatcaatccgacggtaatttccttgatgatgnaccagatgctgcaggttntgtcctcacttgtgttgcttaccctcagagtgatg

SEQ ID NO: 7667 - DNA, 388 bp, Gossypium hirsutum
  unsure (1)..(388): unsure at all n locations; Clone ID: LIB3120-022-Q1-K1-F4
ctgcgtagcgacttcaacgtgataggatttgggctgatcggatggattgctccgtcaagcataccggcaatcaatggcaagagcttgacggggcttttgtttgagagcattggaaccgagcttgctcacttccctactcctcctcctcctacttctcagttttggttgtggttggtattatggcacttgggactgttcatcactcttacatttggacaaattgggttcaagggaaggactgaggactacttttaattattattattttatttatgaaatatgatattattttggtactctctctatcttccatcatttccctataattgctatgcactttgtttcctttatgtccctttcaatgcaaaanagacggattctcttcact

SEQ ID NO: 7668 - DNA, 378 bp, Gossypium hirsutum
  Clone ID: LIB3120-022-Q1-K1-F5
ttttagtagagatccgcgagaggttggaattgcaaacgattggaaatgggagtgccagcgttctacaggtggttagcggagaagtatccgctgattgtggtggacgttatcgaggaagaaccggtggtgatcgaaggtgtctccattccggtggatactagtaaacccaatccaaataaacttgagtacgataatctttatctcgacatgaacgggattattcatccttgtttccaccccgaagacaggccttcaccaacaacttttgatgaagtttttcaatgcatatttgattacattgatagattgtttgttatggtccgtcctcgaaagcttttgtatatggctattgatggcgttgcccctcgggctaaaatg

SEQ ID NO: 7669 - DNA, 347 bp, Gossypium hirsutum
  Clone ID: LIB3120-022-Q1-K1-F6
tgggccctctcggctccactccacccgtctgatatgggctcaccctgaatatatatccacaaaagctatctcttccatatcacaaccttttttttttctcttttaaaactttcctaatcagaaaaagaaatgaaaagaagctttatatagtctcgaaaccaacaatagataagtatagttgcctctaccccccacagcgtccctttccttctccgcctctttcttataatctttgcgtgtgcttgctctccttcctgttgtcttctgctttctcctattaatatctacacacacactcacgtcttattcagtacctcttcaaacttaattctttcttcctagttaac

SEQ ID NO: 7670 - DNA, 367 bp, Gossypium hirsutum
  Clone ID: LIB3120-022-Q1-K1-F7
ccgactgtgaactggtgcagcgaaggctgtggcccttgtactccctactctcaaaggcaaactaaatggcattgccttgcgtgtaccaacaccaaatgtctcggtcgttgacttagttgtccaggtctcaaagaagaccttcgctgaagaggtgaatgctgctttcagagaaagtgcagagaaggagcttaagggtatcctttctgtatgcgatgaaccccttgtctcagttgatttcaggtgctcagatgtgtcctccaccgttgatgcatcactcaccatggtcatgggagacgacatggttaaggtgattgcttggtacgacaatgagtggggttactctcaaagagttgtagacttggctgac

SEQ ID NO: 7671 - DNA, 178 bp, Gossypium hirsutum
  Clone ID: LIB3120-022-Q1-K1-F8
gcggttgcagctgaggcagtgggcctggtacttcctactctcaaaggcacactaaatggcattgccttgcgcgtaccaacaccaaatgtctcggtcgttgacttagttgaccaggtctcacagaagaccttctctgaataggtgaatgctgcttacaaagaatgtgcatacaaggagc

SEQ ID NO: 7672 - DNA, 436 bp, Gossypium hirsutum
  Clone ID: LIB3120-022-Q1-K1-F9
gaacttttattatgagaaataggaggagtcatactaagtccttgttgccgaccttaaaacggttgcaaactactaacagtgtgtcaacgggtacagggtattttagtactaatgcacaactaaaggtttttgtcaaacccctgtcccaaactgagatgatgacagaaggaaaaaaggtctttgtttttagagtgccaccaaaaacacaataagtcataaggggtttaaagtctaaatgtaccaactggtggtggaaggttacccttgacaagaaaatgaacttgaaagtccaacttttgaggaatttattgggtgccaggagcaattggaagtaatggatcaagatactgggaccaacccatcggtagaatcattgcatgctttgaatgggtcacacggacacaacactgtgaggattttagcatctatcaacaat

SEQ ID NO: 7673 - DNA, 362 bp, Gossypium hirsutum
  Clone ID: LIB3120-022-Q1-K1-G1
ctgtgtcaaagatccgtggtaggtggggaggatttgagacattagaaaaatgggtgactggagcatttgctggtcatactgcggtttgcttgaaggatgacatgggtaatctatgggttgctgaatcagggcatgaaaatgaaaagggtgaagaaattatagtggttattccatgggatgaatggtgggagctgtcactgaaggacaattctaatccacagatagccttgctttctttacatccagatatacgtgcaaagttgaactccaccgcagcatgggagtatgctcggagcatgtcaggcaagccatatgtttatcacaacatgatatttagttggatagacactgtagctgacaac

SEQ ID NO: 7674 - DNA, 298 bp, Gossypium hirsutum
  Clone ID: LIB3120-022-Q1-K1-G10
tccacacgtgcgatcagataaacataggcaaagagaaaaatggcttctgctaccgctactgggtcagatcggcaggtgttagcgtcaatttcaagacgcttaagggccatatgatacacctccctactgcttgttgcgtgcggtcacacgctacataggtcaggtataccgtgcgtacttgttgatatgccgctgagcttgatacgaccaggaaaactgatgcctagcctaggcgggggctgttcaccatggttggatcacaggctccatggaggatgcagcttgcctgcgattggct

SEQ ID NO: 7675 - DNA, 376 bp, Gossypium hirsutum
  Clone ID: LIB3120-022-Q1-K1-G11
cggacgcgtgggcggacgcgtgggcttcctctttccattttcaatctcttctttcacatctgattgaaagatatggacacctggctattcacttccgaatctgtcaatgagggccaccccgacaagatttgcgaccaggtttcagatgctattcttgatgcatgcctagaacaagatccagaaagcaaagtagcttgtgaaacttgtaccaagacaaacatggttatggtctttggcgagatcacaaccaacgctaaagttgactatgagaaaatcgttcgtgatacttgcagaggtatatgggtttacatcagctgatgttggccttgatgctgacaactgcaaaggtctagttaacattgagcaacagagccct

SEQ ID NO: 7676 - DNA, 340 bp, Gossypium hirsutum
  Clone ID: LIB3120-022-Q1-K1-G12
tcactcgtggggaaaatatgcggtttataacgtgaattatatacttaatatatgatatacctaatgtcatattcccatattctcgggaagtggcgacatacgagcccttgattcgatttatctctttatctccccgtgaattgtatgtttgtaacaatattgacagaatttcttcaattccaatcgactgggcgtattgcgtcgatttttttgagtaatatacctcggaaatacccgttgattccttattaacgccgcttcgaacacaactggtacattccaaaataatcgtccctcggacttctttactcttggccatgaaccttctttgagtttttaa

SEQ ID NO: 7677 - DNA, 341 bp, Gossypium hirsutum
  Clone ID: LIB3120-022-Q1-K1-G2
caaaaaagttgctttggttgttgttactggtgatcgtggtctctgtggaggtttcaacaatgctatcctcaagaaagctgaagctagaattgcagaattgaagcagcttggacttgattatacaataatcagtgtggggaaaaagggtaattcatatttcatccgcaggccttacatcccagtggacagattcctagatggtagctcactccctacagctaaagaagctcaggcaattgctgatgatgttttttcactctttgttagtgaagaagtcgataaagtggagcttttgtacaccaaattcgtatccttggttaagtctgatcctgtgattcata

SEQ ID NO: 7678 - DNA, 365 bp, Gossypium hirsutum
  Clone ID: LIB3120-022-Q1-K1-G3
ccttctagttcctttgattccccgttctggactaccaattctggtgctccagtttggaacaataactcatcacttactgtgggagcaagaggtccaattctccttgaagactatcatttggtggagaagctagctaatttcgacagagaacgcatacctgaacgtgttgttcatgctagaggagccagtgcgaaagggttctttgaggtcactcatgatatatctcagctcacatgtgctgatttccttcgtgcccctggagtgcagaccccgctcattgttagattctccacggctattcatgaacgtggtagtcctgaaactatgagagacccccgacgtttcgctgagaaattttacactcg

SEQ ID NO: 7679 - DNA, 381 bp, Gossypium hirsutum
  Clone ID: LIB3120-022-Q1-K1-G4
aaattggaacgtgactcttaaggaaggataatgctatccttgcgcttcgctattcctaccgcaaatacattaactccacccaagactaaaccgaaaccgggtttagtagtacaaaccgcttggaaccaaacggacctttttccttctcttcccaaacgatatgattataagctacaagcagctaccacggacttatctgtggagggagatataccggcggaggacgtggtggagctgccggcggagctgcgcagagagttgatgccgaagcacgtagcggtgataatggacgggaacgggcggtgggctcggcagcggcgattggcgacatcagcaggacacgaagccggtgtaaaggcgttgagggagctgatcgaacta

SEQ ID NO: 7680 - DNA, 390 bp, Gossypium hirsutum
  Clone ID: LIB3120-022-Q1-K1-G5
gtaagcagtagtagcaatggcctgctccatgatctcatcggcaaccattgccaccgtgaactgctcctccccggcacaggccaacatggtggcccccttcaccggcctcaagtctgcctctgctttcccagtcactaggaaggccaacaacgacatcacttctcttgcaagcaatggtgggagagtgcaatgcatgcaggtgtggcctcctcttgggaagaagaagttcgagacactctcatacctccccgatcttacacccgtacagttggctaaggaagtagattaccttcttcgctctaaatggattccttgcttggaattcgaattagaggagggattcgtgcaccgtaagtactcgagcttacccacgtactacgatggacgcta

SEQ ID NO: 7681 - DNA, 325 bp, Gossypium hirsutum
  Clone ID: LIB3120-022-Q1-K1-G6
ttcttgcccatcattcgccggtaaggcagtgaagttctccccttgcacccctgaaatccagggaactggccgtgtttccatgaggaaaaccaccaagcctgttccttctggtagcccatggtacggtcctgaccgagttttgtacttgggtccactttccggtgagccaccatcttactcgaccggtgagttccatggtgactatggttgagacactgctggactctcagctgatcccgagatccttgctaggaaccgttagctcgaagtcattcactgcagatgggccatgttgggagctcttgggtgtgttttcctgaactgt

SEQ ID NO: 7682 - DNA, 367 bp, Gossypium hirsutum
  Clone ID: LIB3120-022-Q1-K1-G7
ttttgaaaactgaactcaactgttgatatcttccagaaatcttgagtttttcaccaatggctaccgatacctcattcagattgtccccgctgctgttgtcgctcctatgtatttctctggaaaaattgagtttggtgtcattaatcagtctgtatcagcttttagtcatatccttggggacgtctccttggtcgtatatcaatttcaagcaattagtgccttttcagcgatcattgacagacttggtgaatttgatgatattctggatagcagcagatccaagtctctctctgatcccatggagtatattaatcttacgtattctcatgtcagagggtcccaagttttggattctaatggatccaca

SEQ ID NO: 7683 - DNA, 379 bp, Gossypium hirsutum
  Clone ID: LIB3120-022-Q1-K1-G8
acgactctccgcttccattgacaagcctgtccgtcctttcttcaatgccccttccctctattacatgtcgtctttgccaaatgaagctgtgtacgagaaggagaaacctggcgtcacttggccaaagcaactgaatgctccacttgaaaccgttgatcctgaaattgctgacatcatcgaacttgaaaaagcgcgccaatggaagggacttgaactcattccatcggagaacttcacgtcggtgtcagtgatgcaagcagttgggtctatcatgaccaacaagtacagtgaagggtatcccggtgctagatactatggagggaatgagtacatcgacatggcagagatattgtgtcagaagcgtgctctggaagcattc

SEQ ID NO: 7684 - DNA, 328 bp, Gossypium hirsutum
  Clone ID: LIB3120-022-Q1-K1-G9
atccgtccacgcgttcgggaagtgaaaaaaaccagagtaggcaaccatggcgacgttggctactgtgggaagtagttcagttcttcggttcaacaaaacagagcctctgtagacgaacccatcttcaccatttcttggtttcgttacttcccaactcatcggcatcaaaatctcttgcaacctccctgtcgtggtggcgcctttaaaacccatatctgtccctttcactcctgctctccagcctgttgctcgtaggatatgccctttcaccggcaagaaagcgaacaaagccaacgaagtttcggtcttcaatcacaagacgaagaaa

SEQ ID NO: 7685 - DNA, 372 bp, Gossypium hirsutum
  Clone ID: LIB3120-022-Q1-K1-H1
tctcaagttgttggtgtaactgaagttgtgttggctattaattaccaacctgaggtgatgttgaacttcttgaaggagttcgaaactaaactcgggatcacgatcacgtgttctcaagagactgagccgctcggcactgctggtcctcttgctttggctagggacaaacttgttgacgagtccggcgaaccgttttttgtccttaacagtgacgttatcagtgagtatccattcaaagaaatgattgaattccacaaagctcatggtggagaagcttccataatggtaaccaaggtggatgaaccatcgaaatatggtgtggtggtgatggaagaatcaacaggacaagtggacaaattcgtggaaaaacct

SEQ ID NO: 7686 - DNA, 254 bp, Gossypium hirsutum
  Clone ID: LIB3120-022-Q1-K1-H10
ctccttcgttttccaataattcgtaacaatgtgttgtcttacttcaagctgcagctaccccgttgcatgggatcaaggttgctgtggcatgaaagaccaatgtgccgctcatgtcctcacagagcgtgtcttaggccttccggttggagcctgttggctctcggctttcctgctctttgcttactgacctaaaagacttgactctgaagtgctttgttgcttcttagctggtttgtgtcgctcttgttacatat

SEQ ID NO: 7687 - DNA, 276 bp, Gossypium hirsutum
  Clone ID: LIB3120-022-Q1-K1-H11
tcgaatagccatttcctctaacatatacagctttttcacctgaaacaggttatcacttgattcctgctcaccttacgcagagatgcgtgtattctagtgtaaaaatcaagtccccttaattagcaattttttttctcccttatcttgtaaggaataaacacatcatatgttgataaaacataaatcagatagatacatgtacttttctgaaaacaaacttccaagaatggatgctttttcccattaagaaagcgaggagcgctcaaataaaaattt

SEQ ID NO: 7688 - DNA, 291 bp, Gossypium hirsutum
  unsure (1)..(291): unsure at all n locations; Clone ID: LIB3120-022-Q1-K1-H2
ggatcaactttcgacgactncaaccccatncagatggtatccgatggcctcaccggcttcgaatcctccgttcttcgtgtcatcggtcacactcgccatgctctctccttcgcccgttttgcatacaagcatgggaagaggtatgaaaacgtggaggagatgaagctacggtttcagattttcgaagacaacttggatttaatcagatccactaacaagaagggactgccttatactcttgctggcaatcagtttactgattggagctgggaagagttccagatacacaga

SEQ ID NO: 7689 - DNA, 357 bp, Gossypium hirsutum
  Clone ID: LIB3120-022-Q1-K1-H3
gtatttgaccctcttgatggatcatccaacattgatgctgctgtttcaacaggttcaatttttgggatatacagtcccaacgatgaatgcctagcacaaatagatgatgattccactcttggttcagcagaacaaagatgtgttgtgaatgtgtgccaaccagggagtaatctattagctgctggatactgcatgtactcgagctctataatctttgtgctcacgttagggaatggagtgtacgcgttcaccttggatccaatgtatggtgaattcgtgttaactcaagagaaaattcagataccaaatgccgctaaaatatatgcattcaatgaagggaattaccaattgtgggat

SEQ ID NO: 7690 - DNA, 285 bp, Gossypium hirsutum
  unsure (1)..(285): unsure at all n locations; Clone ID: LIB3120-022-Q1-K1-H4
gctcaacttcctggtgatatggtatatataaaggcaactagtgaaaagagtgcagaaatggtgactgaccaaggggccatatatgttacatcaaacaggggctataactggagagctgctgttcaagagaccgtctcagctactctgaatagaacagtttctagggggattaatgggggcaggtattacaccgggaccttttaacactgtgaaccgctctncggatggacgatatgtggctgtctcaagccgtggtaactnttatcttacatgggagcctggaca

SEQ ID NO: 7691 - DNA, 371 bp, Gossypium hirsutum
  Clone ID: LIB3120-022-Q1-K1-H5
caaagttgaaggattttgtagcaaccttacagtcggatacatactttcaaaccgaaatcgctaagctccgacaagaagtggaggagtacgcaaaacagtttccgactattggttttgagaaagaagcaatgaaatacaaggactaaagcggatatctttacacacaatgcaaggtttgtcagctctaaagaacttcctaaactggttgctgtcttatttgttgaacgtaatcttctagaggcaactatcttagaatttattgaaatgccaaaatatgcacgttagtttttagtattaaggatgttatctggggttgagccgaactgtattcaaactgtatgaaactatgagcttttcattcaaagtttgag

SEQ ID NO: 7692 - DNA, 250 bp, Gossypium hirsutum
  Clone ID: LIB3120-022-Q1-K1-H6
tctcaggccctgcatctagcggcggcggtgctgcctacatcatctgctcaaatctgatggtgatgcctgtctatatttgtgtgcacaatactactgctccagagagactgcacatcacgtcagtacctcataacatacttattaagtcgcttatgcttgctaacaatccagctggttacagctcagacgatgtcaaagctgatgatgaaggtgctagtcgtgggctgctgacaaagacatggataggagc

SEQ ID NO: 7693 - DNA, 260 bp, Gossypium hirsutum
  Clone ID: LIB3120-022-Q1-K1-H7
actattggatgattgagatcattctgacatgaatggtcaccgcctaagaagttcatggggctcttcgtgcactatgacctgcctccgcgttgaccatatgtacattatcaccgcctaattgaggtgatcagagcacataccctgactactatacccagattacaactagcgagcacacttacgagatgatcgataagatgctgcgcatgtatgataaagcgatgatcaatacgcgatccatgcacgtgacagaatatatt

SEQ ID NO: 7694 - DNA, 362 bp, Gossypium hirsutum
  unsure (1)..(362): unsure at all n locations; Clone ID: LIB3120-022-Q1-K1-H8
ctgtaatgcagcagtatctctgccatcttccaagtcatctaccctgtcatttaaaaactcagtcactgtccctgaaagaatcaacttcaacaagagtgttttgtacccaaaaaatgtcagccttggtggaaatgtggtttccattagagctcangtcactacagaagctcctgcaaaagcaccaaaaatttccaagaaagatgatgagggtattggtgtgaacaagttcaaaccaaaggaaccctacattggaaagtgcctnctcaacaccaaaattaccggagatgatgctccaggagagacttggcacatggtttttagtaccgaaggggaagtaccatacagagaaggacaatccattg

SEQ ID NO: 7695 - DNA, 205 bp, Gossypium hirsutum
  Clone ID: LIB3120-022-Q1-K1-H9
tcgtattacctttgttattggtacccataagccttctgtggaaattctatcttttgcacctgaaggtctaagagttcttggtgctggaacgatttcactaacgactattatggaaactgctattagtgggtgcattcctcaagacgtaaggctagctcttgttgatcactcttatgttctggcacgattgacgaatggaatgctg

SEQ ID NO: 7696 - DNA, 312 bp, Gossypium hirsutum
  Clone ID: LIB3120-023-Q1-K1-A1
cccacgcgtccggggactttcaatgacctagacaaattgtcaatggcgaatattgaagagaggagtccaaggttgtgggcatgtctgatagctgtatactgggtctctcttgtcacctatgtcctttcgtggaaggcttataaacatgtttctgcactaagagctaatgctttaatgtctcctgaagtgaaacctgagcaatttgctgttcttgttagagacttgcctgatgtcactccaggtcaaactagtaaggagcaggttgattcgtattttaaatctatctatcctgatacattctacagatcactg

SEQ ID NO: 7697 - DNA, 282 bp, Gossypium hirsutum
  Clone ID: LIB3120-023-Q1-K1-A10
ctcagttaacaacaaaatccgtaaatggctaccactgcttctccaatggcgactcagctgaagagcagctttacgtcgtctgttacaagaggactggtagtccccaggggcatttcgggatccccgttcaaagtatcttccggaaagaccaggaccccttgcttcactgtcaaagctgttcaatccgacaagtcaacatttcaagtaatccaacccatcaacggcgaccccttcattggaagcctggagactccaatcacctcaagccccttaattgcatgg

SEQ ID NO: 7698 - DNA, 285 bp, Gossypium hirsutum
  Clone ID: LIB3120-023-Q1-K1-A11
ctaaagaacatatcttgttggctaaacaggtcggtgtccctaacgtggttgtgtttttgggcaaactagaccaggtcgatgatgaagagctttttcaatgagtgtaattggaggtgcgtgaaatggtttatagttacgaatttcccgctgatgatctacctattatatttagcttctcacttttagctgtagaagctttgatggctatgcccagaatgcctagaggttaaaaccaatgggtggattagatttatgagacttttggatgctgttgatagatacatc

SEQ ID NO: 7699 - DNA, 331 bp, Gossypium hirsutum
  Clone ID: LIB3120-023-Q1-K1-A2
atttctgtggggggacaatagacaagctgagaagagaatcagcatattgtaatttggaagggcaacaaaattttttaatggattggcagggagtcatgggcagagaatggaagcaactatataaaagacaatgctgatctgaatgtaatatttttggatgaaaaagataaataatcttttgtagtgtaatatttgttaacctacgtctgcagtgttttgtgaattttgtcatccccttgatctaaccacgagtgaattctattactttagtctcatcttggagaagtgtgtaatctagcttttcatcgactgctgtaaatttattggacat

SEQ ID NO: 7700 - DNA, 238 bp, Gossypium hirsutum
  Clone ID: LIB3120-023-Q1-K1-A3
gcggacccagctagggcaaactggttctgcgaaaatactcatagatataaacctcgatcttcctgcccgaaaaatgggtgaaatttaggagaataccacatgacctgctctctactatcatcactacaacgacgatgacgttcgggactctcaaactattagcacgaggaaacttgcccactttgtaaagagaccacctatggtggtcagaccaccaccaaagacgtccagtggcatt

SEQ ID NO: 7701 - DNA, 210 bp, Gossypium hirsutum
  Clone ID: LIB3120-023-Q1-K1-A4
gaaagaaataagacacccttgttttccattaataccgaaatttgtaaagccgttcttcattgggattaatatgcctctattatcgcaaatttagttttgaacttttgctctacggatctagatctgacagcaagagcggggatcttttttgttgcacgatttcgtgatgtacatccttttatctgggatcatataaggtttgatgtttac

SEQ ID NO: 7702 - DNA, 271 bp, Gossypium hirsutum
  Clone ID: LIB3120-023-Q1-K1-A5
gcttaaaccaaatcaaagcaatcacccagaattcataaatcctatcttcctgcgggtcaaatgggggaaaattaggtgaatcacaaatgacaagcccttaacttacctaccaaccaccatctgcccatccaggaggccccaagtcttagtctttgtgctatgttgaaatgctgatgtcctatgtctatgccatttatgctttgatataaaaggcatcaccactctttaatttctgatttcacttacaaactcaaccatctttggcctttca

SEQ ID NO: 7703 - DNA, 221 bp, Gossypium hirsutum
  Clone ID: LIB3120-023-Q1-K1-A6
gattcaaccgaatcttgctattggccaaaaataataaatcgtatcttactgtgcagcaaatgggcggaaagaagaggaatggcgtatgacctgaccttagcttgccttccaaccgccatctggacctccaagaagcccgggagcttatgctctgcgacttgatcaaatgctgacgtcctatgtcgatgccattaatgcttagatatggaaaggattaacac

SEQ ID NO: 7704 - DNA, 258 bp, Gossypium hirsutum
  Clone ID: LIB3120-023-Q1-K1-A7
aagacatgggtgttgtaatcattgacggatcgacggtgagagccttcgtgactgacgaccagcagttcacgaagagcgtggatgagcgtttcgcacctcttgacctcaacaacgacggtgtgctctccaggtccgagcttcgcaaggccttcgagtctctgcgtctcctggagtcccacttcggtgtcgacgtcgccactccccccgacgagctcactcagctttacaactccattttcgagaggtttgattgcgatg

SEQ ID NO: 7705 - DNA, 364 bp, Gossypium hirsutum
  Clone ID: LIB3120-023-Q1-K1-A8
atagaatacgaccctaatcgaaatgcatacatttgtctcatacactatggggatggtgagaagagatatattttacatcccagaggggctataattggagataccattgtttctggtacagaagttcctataaaaatgggaaatgccctacctttgaccgatatgcccttaggcacggccatacataacatagaaatcacacttggaaggggtggacaattagctagagcagcgggtgctgttgcgaaactgattgcaaaggaggggaaatcggccacattaaaattcccttctggggaggtccgtttgaaatccaaaaactgttcagcaacagacggacaggtggggaatgttggggtgaacc

SEQ ID NO: 7706 - DNA, 407 bp, Gossypium hirsutum
  Clone ID: LIB3120-023-Q1-K1-A9
aaatcatacatgacatagctttttacatttcatcttcaacatcttcactgcaatggcaaccatgctctgactctctccaaatccttccatcacaactttaccctctcttcggtccagtttcaagggaaatctgaggaatttaaaaccaaacccttttcacattattcgtatcacgaccaagcagcatggggtagaggcacgaaaggggacacggtctttagtggttgttaaccaagcatcatcaacccaagcgtctgttacagcctctaatatgacgtttcggttggacaacctgggaccttagcctgtggcaagaaagaaaggtaagagaaacgggacaggaatatcgtctggacaaggagggagctgtgcgtttggaatgacgggtcaaaaatcacgttctggcc

SEQ ID NO: 7707 - DNA, 353 bp, Gossypium hirsutum
  unsure (1)..(353): unsure at all n locations; Clone ID: LIB3120-023-Q1-K1-B1
gtgaaattcgtctccaccccacacccccaatcatctctctcatcaccaaatagattccattaccactctatttcacttcatcaaaatttcatttcatttttcttctataaattctcttctcatttctctcataaacctcttcccctttcatacaaaaatctctctcttctcttcctctgtgttatttgaagtcttatgtgttatgaaatttttcatgtttgagactcatgtctccggttgttagtgaaatcctccgttctgggtttatgataaattcttcacttagacgaaggactcatcttgntcaatctttctctggtggttttctttactggttgtatgttttctcataa

SEQ ID NO: 7708 - DNA, 383 bp, Gossypium hirsutum
  Clone ID: LIB3120-023-Q1-K1-B10
cacacatcctcaaagatatggctcattgcgttttggctccaaccccaattcagtttcagtttcagtttcattcccgcagaactggatttcttagatgcttctctgaatctgctctcaagacttctctgccatatcctattcatcctcgttttcctcctagaatcttctgtaactacgatgattccaatcgaaacagccagacacagtcctcttctcttcagctctatcgcgatattgaaaggttagtcacggacactgtaaggcaatctcaaggtgcttggggtagttcaagtgattggagccaagtcgagggagcatggattcttaaaccgaaaggctcaaaacctggatcagtcggtcattttattggtggtatatttggt

SEQ ID NO: 7709 - DNA, 260 bp, Gossypium hirsutum
  Clone ID: LIB3120-023-Q1-K1-B12
gatttgcagcccatcaacagagaattcaacagacaaattatccaataacaatggcactcagaatgtgggcttttttcactggcaatgcactcaaaatctcttgttcctccaaacctaatgttttccttgctttatcactctctagatgcttctccactgatgtggatgggctgaagtatgctcattcacatgaatgggagaagcatgaaagtcctgtggctaccattggcactactgaccatgctaaggaccatcttgga

SEQ ID NO: 7710 - DNA, 237 bp, Gossypium hirsutum
  Clone ID: LIB3120-023-Q1-K1-B2
ggttgcagcagtggcagcaacagcatcatctcaactactggtatcaagttcccgctctttgtgacggctgtcaccatttcagctatgcgtatttgattccaagtccctcgtgtcatgccccagcaatggcaatggcattaacaacagtatcaagagaaggcatgttaggtgcctggctgtggggacagcaccagaggcagaaaccaagaaaagtgggttcgaaatccagacactaac

SEQ ID NO: 7711 - DNA, 313 bp, Gossypium hirsutum
  unsure (1)..(313): unsure at all n locations; Clone ID: LIB3120-023-Q1-K1-B3
cggacattttactcaccattttccctcttatttcgactcttggtttcttctgtctctaatctcctcacttaactcaaaattacaacaatggcaatggctatggcaatggcagaagcggtatggcttctcttggctccctttcttttcctctctggttctgcccttactcaaaccaaactaaccgataacccaacggatgacttggtggctgtgcttaatgccaatagaacggcacataagtcatcatccctcgcagacaacccangcctgggctgcattgctttgcaatatataaaagcataccaaggtgatt

SEQ ID NO: 7712 - DNA, 282 bp, Gossypium hirsutum
  unsure (1)..(282): unsure at all n locations; Clone ID: LIB3120-023-Q1-K1-B4
cgatacttacctcatttttgaaagacatttgggttgcaatggcacaagcaatggcatcgatgactggtttacgtggctcttcacaagctgtgttggaaggtagtctccaactcagcggccaaacccggttgaacgttgctagcaccaacagggtggctgtggctagacctggttttaccgttagagctcaacaggtccctgccgagcctgaaactggacgcanagctgtgctgggtcttgttgctgctggtttggctactggctcctttgttcaagctgtgc

SEQ ID NO: 7713 - DNA, 275 bp, Gossypium hirsutum
  Clone ID: LIB3120-023-Q1-K1-B5
catagattttaaagagaacaaacaacaatggctgctacatctggggctcgtactaaattgattaggctcttcatttactttgaggggaaagaggagccaaaccctcttgggtgctagcattgaggccaaaggctcgccctcctctgctgctggaactagaaagttgatcgttgtggcaggcggcggcacctaaaaaatgacaggtatccctggtgcgaaacgcatgggcaacttcattgacccaaagcggctcgatggatggctccctggatact

SEQ ID NO: 7714 - DNA, 274 bp, Gossypium hirsutum
  Clone ID: LIB3120-023-Q1-K1-B6
acggtcacccaccaatctgtcattatccctcaaccatacgccaaaatatggcagccacttttgtgagcccatcaaccggcgctgggctcggtggcaccgccacctgtatgtcatccccgccgatgaaaacccgcctctcttcacggtttgtgaaatctggggtgacggctaggaaccctttgaggctggctggtgcttgtgggggcaagtttacttgcttcgagagagactggctacgatggactttaacgtgataggattggactgatggggg

SEQ ID NO: 7715 - DNA, 324 bp, Gossypium hirsutum
  Clone ID: LIB3120-023-Q1-K1-B7
gttcgtaacaatgtcggtctcacttcaagctgcagctaccctgatgcaaccaagcaaagttgctgcaccatcaaggaccaatgtgctgctcacgtcctcccacagcgtttctaaggcctttggtttggagcctgttggtgctaggctcacctgctctttgcaaactgacctcaaggacttggctcacacgtgtgttgatgctaccaagctcgctggtttcgctcttgctacatttgctcttgttgcctcgggagcaagcgctgaatgatttacaaagcggctaacctacgatgaaattcaaagcaagacatacattgaagtcaa

SEQ ID NO: 7716 - DNA, 161 bp, Gossypium hirsutum
  Clone ID: LIB3120-023-Q1-K1-B8
cttccgttcctgctgagaagccaccaggtgagcttccttcaatggcaaagccacccattgcagtccgagcagtgacttggggctcctgtgaatgcaccaattgaccttcttccaattgcaaaaccggccatcacagttcgtccaatgaccctaccagtccc

SEQ ID NO: 7717 - DNA, 390 bp, Gossypium hirsutum
  Clone ID: LIB3120-023-Q1-K1-B9
gccattctagccttcgaattgaaaccctaaaaattccactaagaaatggccttcacagcttacctctgcaccgccgtagccaccacctctttccttcgcggccatccggcgccgaaaaccctaaactcccttcctttcaaccaatctcttttcgggctaaaaccccaacgaaatggccgtctcaccatggcagcatacaaggtgacactgttaacacccgaaggaccccaagaattcgtgtgccccgacgacgtatacatcgttgaccaagctgaggaagaaggcattgatctttcgttctcgtgtagggctgggtctggttcttcgtgtgcccgaattgattaagcaaggcttcggcgatcaatccgacggtaaattccttgatgatga

SEQ ID NO: 7718 - DNA, 320 bp, Gossypium hirsutum
  Clone ID: LIB3120-023-Q1-K1-C1
gcgcccacgcgtccgctcgtcgttgaagcgaaagcttatctcttttcgtctctgaatctgatcaagcaacacctgaaaaggaaaacttacaaacaactactactagtctactacccagcactagaagcagctcgtagccagccatggatgaagagtacgatgtcatagttctaggaactggtctcaaggaatgcatcctcagcggtcttctttctgttgacggactcaaggttctgcatatggataggaatgattactatggaggagagtctacatcactcaacctcattcagctctggaagaagtttagaggaaatgat

SEQ ID NO: 7719 - DNA, 383 bp, Gossypium hirsutum
  Clone ID: LIB3120-023-Q1-K1-C11
cccacgcgtccggtcacgtgtcaagcatgaaggtatgagaagggaatacctctgtagcacctttcagacaaagaggaaggacaaaaacttcaattctactagcaaaagggaatgtagcatatgttactttgatttgcacctctcagcagtgcactgttcatgttcttctgatagatatttgtgtttaaatcatgcaaagcggctctgttcttgcacatggacagaaaagattttcctctacaagtacgaaatcaacgaattaaatatgcttcgtgaagcagtggaaggaacattgagtgcggtgcatgcatgggctagagaggacctgaatttgggtcttcgtcactacactccaaagaaaaatcattcagagaagatgaagg

SEQ ID NO: 7720 - DNA, 256 bp, Gossypium hirsutum
  Clone ID: LIB3120-023-Q1-K1-C12
ataatctctaggaacatttctccgtcaaacaaaattaagatcaattttaatggctgcatcctcatgcgattctctttcgtcatcgtcttcgttgatctgttcggcttcttcttcgcttcggttttgttttgtcgatcgttctttaatttctaagctgtcttctcatcttcagattcttagtcaaccttttacctgttattgacataattaagaagtaaaattcaatccaataggaatcgtctgcaacatgggaaaa

SEQ ID NO: 7721 - DNA, 351 bp, Gossypium hirsutum
  Clone ID: LIB3120-023-Q1-K1-C2
gcggaagaccaacaccaatgtgaattacataacaggcttgaattcttttggtgggttgaaagctcataacaaagtggtctcactaggccaacgtgtatgcaccgagcaatcatttgcaaacgttgttagctcactcaaagctccgacaaagggcaagacaggtaaaagcagcggcggtgcactgtcttcaacctgtaatgctgttggtgagatattcaggattgcagcaatcatgaatggccttgttcttgttggtgttgctgacggatttgtgctgcttcgaatcgaagcttctgtggaagaggctgagtaagagaattttaagacataacttgttttcatttccccaaa

SEQ ID NO: 7722 - DNA, 299 bp, Gossypium hirsutum
  Clone ID: LIB3120-023-Q1-K1-C3
gccacgcatacggaattttagaactactcttctgctcatcaaaaatgcatgtttcaagcatggggacaaagatgcattgagagcttgtgtaaaggctatcaaatactgttccactgagcgtggaggatatcttcaagattttgctcatgacaaactaaatgagcttggggatgagcttcttgataagcttaaatctgctactaaagaagtgatcgatggagaagatgacgattctcttcttgggaatttcaaaagattgtacgaacttccattgtcaaggcctatatcacttgatgaac

SEQ ID NO: 7723 - DNA, 272 bp, Gossypium hirsutum
  Clone ID: LIB3120-023-Q1-K1-C4
cttatactaagtctgttaaacaggtaccgtataatatttctatactggagatcagtgcgccggttattgctcccggtgttttatgagctcctgcaccgtcggcttccggtgttaacattaccggcttacttgagaaagctggttgtaagacgtttgctaatttgcttaccagtagtggtgtgttgaagacttatgaagcggcgcttgataaacggttgactatttttgccccgtccgatgaagcttttaaagccgacggtgtacctgatctg

SEQ ID NO: 7724 - DNA, 270 bp, Gossypium hirsutum
  unsure (1)..(270): unsure at all n locations; Clone ID: LIB3120-023-Q1-K1-C5
ctccaatggcggctgccgtctccaccatcggtgctgtcaaccgatcaccgttgggtttgaatggatcaggtgccggggcttctgctccaagctcanctttcatggggaacagcttgaagaaagtgagcgctaggttcaacaacaacggcaaggctccagtgggaagtttcatgattgtggctgccaaagaaatcgacgaagacacacagaccgaccaggaccgatggaaggggcttgcttatgatatcttcgatgaccaacaagacattt

SEQ ID NO: 7725 - DNA, 347 bp, Gossypium hirsutum
  unsure (1)..(347): unsure at all n locations; Clone ID: LIB3120-023-Q1-K1-C6
tgattgcatacataaggatcatatacgatccgtgatctgaacaaatatagcacaatgactgggttgctttgaaaggagctagctgctccangagtttcaaagcggataacctacgctgaaatccaaaacaagacatacatggacgtcaaaggaacaggaactgataaccagtgcccaaccatcgatggtggtgtcgactatattgccttcaagcctgacaaatactacgccatgaagatctgcttggagcccacttacttcactgtcaagggtgagggggttaccaagaatgccccttctgagttccaaaacaccaacctcatgacccggttaacctacacctttga

SEQ ID NO: 7726 - DNA, 270 bp, Gossypium hirsutum
  Clone ID: LIB3120-023-Q1-K1-C7
atccttttttttttttttttaactaaagaaatcttttaaatatatattttggtgggactcatggcatggcgatggggaattagacaaaacccaaacagatgaaaatatccttgatcatcattcatgcactgaacatatatatatgcgcctaccaggatccaatacatcacctaaccaattgacaaccatatggcgcccgctgagcctatcctttaccctaactctgcttcatataccgttccctatctcaaacaatggctattacatata

SEQ ID NO: 7727 - DNA, 248 bp, Gossypium hirsutum
  Clone ID: LIB3120-023-Q1-K1-C8
cccccgtcgggccacgcgtgacctaatcctaccttctttaaacacttacctcataatatttctatactgtacatcaatacccccgttatttctccccatgttggatgagctactgcaccctcaacttcccttgttaacattacccgcttacttcacaaaactacttgtaagacatttcctaatatacttaccagaagtggtgtgttaaagacttatgaagcaacgcttcttaaaagattgactatttt

SEQ ID NO: 7728 - DNA, 399 bp, Gossypium hirsutum
  Clone ID: LIB3120-023-Q1-K1-C9
gcgcccacgcgtccgagaaactagtcactgagaccactgtataaagagggtgtttcaaggtccaccttggggcaggcatttcaaacactggctgccttgccaagcttctaggtggaccataccagctattcatcaagaagaaaaacctggtgttcaaggttgacaaggtgggacatcaacccttacacttacaccctttccactagactggctatctccacttcatgcccttcaacattcattgatgctaaaaaatgtttagctcaaaaggggatcggtgtatccaagaccgtagctctgttaatacccccggagtggggacttgcgccattcaactattgtgtagccttacttactcatcatcgtgattccttgtttactattttaatggattaaaga

SEQ ID NO: 7729 - DNA, 424 bp, Gossypium hirsutum
  Clone ID: LIB3120-023-Q1-K1-D1
gcggtcaacctaaagccttaggcaccatggcaacctctgctatccaacaatctgctttcgttggggagaccgctttgaagcaggccaatgagctcttacgcaaagtcggagctttcgatggtggtcgtgttaccatgcgcagaactgtgaaaagtgcccctaccagcatctggtacggccctgaccgcccaaagtacttgggtccattctcagaccaaatcccatcatacctgacaggtgaattccctggtgactatgggtgggacactgctgggttatcagctgacccagagacatttgctaagaaccgggagcttgaagtgatccactgcagatgggcaatgcttggggccctgggttgggtcttccctgaaattctttcaaagaatggagttaagtccggaaaggcagtttggttcaaagt

SEQ ID NO: 7730 - DNA, 55 bp, Gossypium hirsutum
  Clone ID: LIB3120-023-Q1-K1-D10
cttttacttattctgcaacaacaaccatcatacataaataacatattctactttc

SEQ ID NO: 7731 - DNA, 189 bp, Gossypium hirsutum
  Clone ID: LIB3120-023-Q1-K1-D11
ttctccttttggctgctcgaagaatgatactgatatatactccaacggttaagtcggctggtgcgagtgcttgctggtatactactcaaatctcaatgcgcttgagtacggattacttatctgcaggattccttagcgaaaggagctcctaggttcaattcgagttcaccaacttaccactttgacaag

SEQ ID NO: 7732 - DNA, 359 bp, Gossypium hirsutum
  Clone ID: LIB3120-023-Q1-K1-D12
attattactattcctatgactaagtatttgactttcccacatcggtaaggagtttattacgtaaaagaagtgtttttttgagtctgtttacatgatgtaattgagtaaatttcatttcttgggggtataagaatgattcttgttgcatgtttagtagagggtctctcttattttttagaagtttttaaatttgtgttggatacatatttggatatggaggccgtcatactaatgatgaactacttgtacacgatccttgataatggtggtccgtagctatattatttggattggcgtgtcaatgtcagatacgggtatggttcgattttttcccattggacgttaaattcttatccatg

SEQ ID NO: 7733 - DNA, 396 bp, Gossypium hirsutum
  Clone ID: LIB3120-023-Q1-K1-D2
gtagaggaacccagaatcggcctcgccctcgtccgcagctctacttattcttttttctctggggttagtacaaccatggcgagtcgcaaacggttccctaatttcgtctctcttattctcctctctctcgtcgccattgcctctgctgaagttttcttcgaagaacgcttcgaagatgggtgggaaagtcattgggtaaaatctgactggaagaaagatgagaacatggctggggaatggaattacacttctggaaaatggaatggacatcctaatgacaaaggtattcaaactagtgaaaactacaggttttatgctatttcagctgagttcccaaaagttaacaccaagggcaagactctagtcttccaattttttgtgaagcacaaccaaaac

SEQ ID NO: 7734 - DNA, 193 bp, Gossypium hirsutum
  Clone ID: LIB3120-023-Q1-K1-D3
gccattcattctccaaagccgtggctcaatcctttgcgcttttacattggaacaacctactgggacaatagggaatctgttagagtcttccaacatgctcaacactaatcctgaatatttataaagaaaaaacatctttaacataacatagagtaaacctgaaaccggtgaagctattggagattctaataac

SEQ ID NO: 7735 - DNA, 324 bp, Gossypium hirsutum
  Clone ID: LIB3120-023-Q1-K1-D4
gcggaagaactaaattccccagaatttgcttcagtaatggctgcctcacttatggcttcttcaggtgccctcaggccttcattcaatgttgagaaatctgctgtaagaggggttccttcccttgctaggtccccttcttctttcaaggttgaagccagtggtggcaagaagatcaagaccgacaagccttatggaatcaatggtggtatgaacttgagggatggtcttgatgcctctggaaggaagggtaagggaaagggtgtttaccaatatgttgacaaatatggtgctaacgtcgatgggtacagtcctatctacaacacc

SEQ ID NO: 7736 - DNA, 222 bp, Gossypium hirsutum
  unsure (1)..(222): unsure at all n locations; Clone ID: LIB3120-023-Q1-K1-D5
aaggcccaggccggccgacgcatccaatccaatcactcccaatactttcataacatttcaccaacttcactctccangcggcnaacgcgtttaaccggtccaccatccttgctctcaaccaaacaccttttaattttaatggatcaaccacccgcacttctgctacaagctcagctttcatcgggaacaacttgaacaaactgaacactttctttaacaaca

SEQ ID NO: 7737 - DNA, 265 bp, Gossypium hirsutum
  unsure (1)..(265): unsure at all n locations; Clone ID: LIB3120-023-Q1-K1-D6
acgtttaactatagcatacactactagtacccactactagcaatggcttcctcaaggatctcatgggctaccattgccgctgcctctccngcacaagctaacatggtcgctcctttcaccggcctctgcttttccaatcaccaagaacgccaacaacgacattacttctctcgcaagcaatgacggcagaatgcaatgcatgcacgtgtggcctgctactggaaacaataaattggagactctctcatacctccccgatctacac

SEQ ID NO: 7738 - DNA, 259 bp, Gossypium hirsutum
  Clone ID: LIB3120-023-Q1-K1-D7
ccaacaaccccaaattactcaaactcaaatgttcgattaaattgttaaggaagtctctgcgtatctttcgaaacttgggtgcgaccctcaaaacatcccatttaccccaatctctggttttgagggttacaacattatcgacagatctacaaacctcgattggtacaatggtcctactctccttgaggctctttaccacatcaccgatcccaaaatgccctctgataaaccactccttcttccacttcaagatttctac

SEQ ID NO: 7739 - DNA, 206 bp, Gossypium hirsutum
  Clone ID: LIB3120-023-Q1-K1-D8
cccacgcattcaaattttcagcccataatcaaataaatcaaaatataaaatatccaataacaatgtgccttaaggtgttcacttcttgcactgccaatccactcaaaaactcttgtctctcctaacctaatgctttcctttctttctcactctatacatgcttttccactaatatcaataccctcaagtcttctaattcacatgaa

SEQ ID NO: 7740 - DNA, 288 bp, Gossypium hirsutum
  Clone ID: LIB3120-023-Q1-K1-D9
ttctgacaagatctacaatcacttgcctctaatactacttcactttaggtcattcacttgttcgctggcgtaggctactgtatgttgagcatcgctgtatgcctaccttatcggactgctattgattcaaacctactcgtagatttgatatactgctcctcaatgtcatgtacttgctcatgcaactagcactgtcttccatgcacttattgctattcttaaacccacactattaaatctactgagcctttcttcaacacatctgatatccaacatatactttgacaa

SEQ ID NO: 7741 - DNA, 282 bp, Gossypium hirsutum
  Clone ID: LIB3120-023-Q1-K1-E1
ggatgcaacaaccccaaagtactcaaaggcaaggtttgatgaaattgtcaaggaagtctcttgttatcttaagaaagttggttcgaccctgagaagatcccatttgtcccaatctctggttttgagggtgacaacatgatcgagagatctacaaacctcgattggtacaagggtcctactctccttgaggctcttgaccagatcaccgagcccaagaggccctcggataagccactccgtcttccacttcaggatgtctacaagattggtggtattggaact

SEQ ID NO: 7742 - DNA, 298 bp, Gossypium hirsutum
  Clone ID: LIB3120-023-Q1-K1-E10
cccacgcgtccgagctaattgagctccatttccctagtaaacaagagttctttttttcacagcaatggcagccatgaactccagtggtttggcatgcaactatgctatctcaggcactggatcatctgagcttaatgccaaacttgcttcagcgccatcagttgcttccccagttatgtgcggtggtcgcaagttgcctgtgatcagagcccaacaggctaaaatttctgattccaaaggatcaggtgccaatgaaggaagaagagctgctgggctctacttggcaactggccttttt

SEQ ID NO: 7743 - DNA, 323 bp, Gossypium hirsutum
  Clone ID: LIB3120-023-Q1-K1-E11
gaaagaagcatcttggggacttgctcgctatgccggcatttctcaagacagtggactggtcccgagtgtggagccggaaatcttgcttgatggtgaccatggaattgataggactttcgaagtagcgcagaaggcttgggctgaggttttcttctaccatgctgggcttatcattattatgtcatatataaagcgtctatgttatctttacccgtaatgtgtataactttataagatggaataatcttgctcttataaaccatgcttgtaactaatatgaataaaaccattcgattcttattgatggttggtcattgtcttgt

SEQ ID NO: 7744 - DNA, 315 bp, Gossypium hirsutum
  Clone ID: LIB3120-023-Q1-K1-E2
gcgattttgcaagacgtgttcgtgctgcatctgttataaggtcgatgacaataaggatcctagtcgatggttaatttgtagttcggagcctactttcctgggaaactcttgtggcatgtcgcgtcatctcgagtgtgctttaaaacatgaaaagtccggtattggttaagataaacaacatgctgttcttgatgggagcttttattgagtggcatgtgggaaagcaaatgatttgcttgggtgctggagaaaacaacttatggctgcataagatacaaggaggggcgacattctctgttatcgcgtttctttagg

SEQ ID NO: 7745 - DNA, 349 bp, Gossypium hirsutum
  Clone ID: LIB3120-023-Q1-K1-E3
cccacgcgtgcggatttgaaagaaggaattttgaagttattgggattccaagccgatgatgttgagctatcagggttagattcgagggatgcacttgtgggtcattcagtggcatatgaattcgacgttgaaatcgacagaaaggtgattcctgttaaacttttggaggatgtgaatcgatgggagtacgttgatttgccctttttgagggttgaagagctagctagacccggtgttgataatgggttggtagagcagaagaggatattcgacgatgggctacccgttttggccccctttcagttggctggtcccatggagctctggattcgggatgccaaggatatac

SEQ ID NO: 7746 - DNA, 378 bp, Gossypium hirsutum
  Clone ID: LIB3120-023-Q1-K1-E4
gggcaactgtggaatgcggagcctctttttactgtaaatcgcttcacacatctgattttctggaccgccggataatccttctcgactttccgacatacttcgttgggcttttgtggcgagagacggactttcaaagttttctttccctgtttttgtttttccatggcttcagaggatgtgaagactagcgaatcggctgtgtccacgatcgtgaatctggccgaggaagcaaagctcgcgagagagggtgttaaggcccctagctatgctattcttagcatctgcaagtctctcgctgctggcggcgtcgccggtggagtgtcacgaactgctgttgctcctttggaacgtttaaaaatcttacttcaggttcaaaat

SEQ ID NO: 7747 - DNA, 417 bp, Gossypium hirsutum
  Clone ID: LIB3120-023-Q1-K1-E5
cccacgcgttcgtcaaaaaccagctctccctcccccattgccactgcttctctgtcttctcacattagctattgtgttcttcattttgcttcttgtaactatttaaagataaggagtaagttcttaagtgtttcatactttgatgtctacacctttggaacatgattacataggtttagcagcgacttcttcaatggaaagaagctctgagaagatatcttcttcttcttcctcttcaattccctgcaatattgaagacaaaaccactaacaatccttcccttggatctaaaaaaacttagcttaagcttggcttaacaaggtcttaatcacctggaaaaaaactggctctttttggcaaaaatttggaaaactatgaaaaaaccaccgctttggtggtagccctttgaaaaacttg

SEQ ID NO: 7748 - DNA, 349 bp, Gossypium hirsutum
  Clone ID: LIB3120-023-Q1-K1-E6
tgccggaaccgccgcggacaatccaggccgacccacgcgtacgacattttagcctttgaattggaaccctcaaaattgcactaaaaaatggcctccggagcttccctctacaccgccggggccaccacctctttcctccgcgggcatccggcgccgaaaaccctaaactcccttcctttcaaccaatctcttttcgggctaaaaccccaacgaaatggccgtctcaccatggcagcatacaaggtgacactgttaacacccgaaggaccccaagaattcgtgtgccccgacgacgtatacatcgttgaccaagctgaggaagaaggcattgatcttccgttctcgtgta

SEQ ID NO: 7749 - DNA, 212 bp, Gossypium hirsutum
  Clone ID: LIB3120-023-Q1-K1-E7
cgtacgcacacgcgtgcggatttgaaagaaagaatttttaagttattgggaattcaaaccaatcatgtgtgactatcaaaaataggggcgggggaataactttttggtcattcacaagcatatgaattcaacccttaaatcgacagaaaggtgaaacctgttaaacctttgaaagaaatgaaatgatgggagtacctggatttgacattatt

SEQ ID NO: 7750 - DNA, 324 bp, Gossypium hirsutum
  Clone ID: LIB3120-023-Q1-K1-E8
ttttgtttttgaaggacaaaggttgttgggatctttaaacacaaacaataacttcgtcgaatagcaagaggagtggcggtaaccaatcatctttttcttcgcactatgtggaaaataatgacaaacaatggactttattgctcattccgatgtttgctggggctaatatagctgtgtatgttgaaataatgtatgttaataacctgcctaataacactcatagatttgaatgtttgttgagtggctcagaacctctcatactttctttttatcatgagaaagaaaatcctcttttttgaccttctcctaatacatggtaaaaat

SEQ ID NO: 7751 - DNA, 410 bp, Gossypium hirsutum
  unsure (1)..(410): unsure at all n locations; Clone ID: LIB3120-023-Q1-K1-F1
cccacgcgtccggatttttctagaaagttgccaacaggtgggatagtttgaaagaagcaagtgctagacttttaaaagggagtcttattataacaagttttgagttcgcaatgggattcttggatctgttagttgtggcattggtgccaattctaaaagtgttactggtaactggtgttggtttgtttcttggcatanaaaacatcaacctgttggggccggaggcaagagactacttgaataaaattgtattctatgtattaagtccttgcctctactcagcacctgggccgaaacaatcactaacaaaagttgggttacctaatggttaatgccagccaatgtcttttaaccttttttcgttgcttaacttttgggttggttctttgcaaacttaattaaacttctta

SEQ ID NO: 7752 - DNA, 390 bp, Gossypium hirsutum
  Clone ID: LIB3120-023-Q1-K1-F11
tccacgcgtccgggcaacttctagtgttgaggaggttgcttcgacaggacccggcattcggtttttgcaactctatgtatacaaggacaggaatgtagttgcacagctcgttagaagagccgaaagggctggtttcaaggcaattgcccttacggttgatactccgagactcggtcgcagagaagctgatatcaagaacaggttcactttaccaccatttttgacattgaagaactttgaaggtttggaccttggcaagatggataaagctgatgactcgggtcttgcttcgtatgttgctggacaaatcgatcgttccctttactggaaagatgtgaaatggcttcaaacaattaccaaattgccaattcttgtgaaaggtgtactcac

SEQ ID NO: 7753 - DNA, 414 bp, Gossypium hirsutum
  Clone ID: LIB3120-023-Q1-K1-F12
tcaaaaatgagctccattgctttcaagcccttccacggcctccgccatagctccgacgtccacaggggcacttccactaccaccacgctttccaaacctgctgtcaaattccatgtgtcagccgccaaaacttctccaaaactaagcaaccgcaacctcagggtagccatcatagggggtggtccggcaggaggctcagccggcgaaactctcgcgaaggctggcatagaaacgttcctaatcgaacgaaaactggacaactgcaaaccttgcggcggagccatcccgccttgcatggtgcgtgaatttgacttgcctttggatatcatcgaccggcgagtcaccaagatgaagatgatttcgcccttcaacattgtcgtcgacatctggcaaacgttgaaaccacatgaatac

SEQ ID NO: 7754 - DNA, 429 bp, Gossypium hirsutum
  Clone ID: LIB3120-023-Q1-K1-F2
gactttttggtttttgaaggagaaatggcaagtggggatcttgaaagaggaggaggaagtagtgtgaagaacagggggaatagctataaccaatcatcttcttcttcgtactatgtggaaaataatgaaaaacaatggacttcatggcttgttccgatgtttgtagtggctaatattgctgtttttgttgtggtgatgtatgttaataactgtcctaagaacaatcagggatttgaaggtggttgtgtggctaggttccttggcaggctttcttttgaacctttgaaagaaaatcctctctttggtccttcttctaatccattggaaaaatggggagccttaaactgggaaaaggtagtgcttggcaatcaaccgtggaggctaataactggaattggcttgaacgctggggtaattaatttacttgca

SEQ ID NO: 7755 - DNA, 282 bp, Gossypium hirsutum
  Clone ID: LIB3120-023-Q1-K1-F3
gcggggaaaactattagctgctctgttttactaactttaatatcttgcttttccttgcagttttgtgctgctttagacaccataacgccatcaaaacccatcaaagaccctgaatctataatctcccatagtggagttttccgattgggattcttcacctttgctaattccagcaatcgttatgtagggatattgtaccatcaaatccccctacaaacagtcgtatgggtagcgaacagaaacaagcctctgaaggactcttctgggattctcaacatatca

SEQ ID NO: 7756 - DNA, 431 bp, Gossypium hirsutum
  Clone ID: LIB3120-023-Q1-K1-F4
cttattaaaagccaacctctcattgtttttccatttgagttactctcattgcgactctggatgatattcagcaagccttgcacaatggccaccatcacctctgccgctgtcgctatcccatctttcaccggccttaaagccggtgcaaccgcagctaaagttagcgccacagccaaggttgcagcctctccagtcccaaggggcagcatcaaggcctccctcaaagacgttggtgttgctgttggggcaactgctgcaagcgtaatccttgccagcaatgccatggccattgaagtcttgctcggcagtgccgatgggggtctggctttcattcccaaagaattcagcgtaagcccaggggagaaaatggtgttcaagaacaatgccggattcccacacaatgttgtgttcgatgaggacaaaatcccaag

SEQ ID NO: 7757 - DNA, 262 bp, Gossypium hirsutum
  Clone ID: LIB3120-023-Q1-K1-F5
cccacgcgtccggtcagacaaagcctcaatgctggatgaagcaattgagtattggaagtcacttcacttgcaagttcaggtatgtctttgcttgtacttaatgagatacatgtgaaattttgtttgatgttagctcttacaagttacaactctgtaacaaagagtggtttgactgggttactgtcctttatagcaattttgttttgttaaaacgtggagaataaaagaaacttatgtctctgttccatctagaaacatgttt

SEQ ID NO: 7758 - DNA, 148 bp, Gossypium hirsutum
  Clone ID: LIB3120-023-Q1-K1-F7
cccggaaggcccaggccgacccacgcctacagattgatatgacatacactgctacatacccacgttcagcaaagccttacaaacagggataaatggataacaaaggcggggcctggcctggacatgcaaacatagtcgattctatcac

SEQ ID NO: 7759 - DNA, 287 bp, Gossypium hirsutum
  Clone ID: LIB3120-023-Q1-K1-F8
attcacagcctatacgaaccccaagagctcctcatctctttgtttttaccttggatttgaaggcaagttcgtcgtgggtttctactctttagccatcaaagatgaccaccatggaaagcttaatcggtttagttaacaggatccaacgagcatgtacggtgctcggtgattacggtggcggcgacaacactttctcttccctttgggaagctcttacttccgttgccgtcgtcggtggtcagagttcaaggaagtcttctgtgcttgaaagcatagtcggacgtgat

SEQ ID NO: 7760 - DNA, 264 bp, Gossypium hirsutum
  Clone ID: LIB3120-023-Q1-K1-G1
attaacaaaaaattaaaatgaaatccctgcttcagagctcgatcggttgacccccaaaaccatcaatatataaaagaaaaactttggttatggctttgtatttcatggctacttcacttaatccaaaatcctgttcaaattctaatgttattgttgtttctccattgctttactcaaaatacaaacaccctttcaagctcatctcttcttcttcttcttcttgcgagaaaacttttgctcaatctgaaagaaaagatgggggag

SEQ ID NO: 7761 - DNA, 264 bp, Gossypium hirsutum
  Clone ID: LIB3120-023-Q1-K1-G11
attacacttacggacaaaaaatatgggcaccgtcacgacgcaagcctctgccgctgttttccggccatgtgcatcgaaaacacggttccttactggttcttccggtaagttaaaccgagacgtttcatttaaaccagtggcttctacatcgactagctcattcaaagttgaagcaaagaaaggggagtggttacctggtctttcttcaccagcttacctcaatggcagtctttccagggataatggctttgatcctcttggatt

SEQ ID NO: 7762 - DNA, 245 bp, Gossypium hirsutum
  Clone ID: LIB3120-023-Q1-K1-G3
gttgaaattgtatggtcatacttgcatatatcgatctcccctgttttcttctctgtaaattttataacttggaacctagacacccatggctactgtttctcaattgaataactttccatgcaagaccttcttaataaccccacaaaacagtaactttacctcaaaacttccgggtctgcctctaaactctacaaaaccaactcagaattcgatcaagaaatctcaatttttgacccagaaatcag

SEQ ID NO: 7763 - DNA, 395 bp, Gossypium hirsutum
  Clone ID: LIB3120-023-Q1-K1-G4
gaagtactgaatctctgaaacacaaatctcgctttcggaaaagcctcaaatggcagaccaaccgcagatttatgaactcaacaatggaaccgtggttgttaagattaccaactatggctgcactatcacctcattgtctgttcctgacaaaaacggtaaattagccgatgtcgtcctgggattcgacactgtcgaaccgtacgtgaaaggtgcttcaccttattttggatgcattgtgggaagggttgcaaacaggataaaaaatggcaagtttactcttaatggaacggggtactttttgccaatcaacaagcctccaaacagtctccacgggggattcaagggttttgacaaaaaaatatgggaggtggcagattttaagaaaggcgacaaac

SEQ ID NO: 7764 - DNA, 242 bp, Gossypium hirsutum
  Clone ID: LIB3120-023-Q1-K1-G5
ccggaagagccacgccgacccacgcgtaacgaataaaataacaatcctgtttaaaccctcgtcgggtgtcccccaaaacaggaaatatggaacaaaaacacgggttattactgtgtattaaatgaatacctcacttaatacaaactcctgtttaacccctcataacaatgacgtttcttcataactttactcaaaatccatacaccctttcaaacccatatataattcttctacttaatgcg

SEQ ID NO: 7765 - DNA, 303 bp, Gossypium hirsutum
  Clone ID: LIB3120-023-Q1-K1-G7
cccacgcgtacgttctttgttttccaatagttcgtaacaatggcggtctcacttgaagctgcggctaccctgatgcaaccaatcaaggttgctgcaccatcaaggaccaatgtgccgctcaggtcctcccagagcgtttctaaggccttcggtttggagcctgttggtgctaggcttacctgctctttgcaaactgacctcaaggacttggctctgaagtgtgttgatgctaccaagctcgctggtttcgctcttgctacatctgctcttgttgtctcgggagcaagcgctgaaaggagttca

SEQ ID NO: 7766 - DNA, 251 bp, Gossypium hirsutum
  Clone ID: LIB3120-023-Q1-K1-G8
tcggtccctccaatacgatacttttctacgggtacctgctggtgggacactcccatggactaagtgatttatccacagtggtacggggctatcaaacaagctcctaaagactatggctcatgctaccatattattttctttggaaaacggcctatgtttccttatataatatatgtataaacacttattcacgcgaacctgaaacgaacttctgcttcttgtgggcgcattgcatgaaaggttgaaagcaa

SEQ ID NO: 7767 - DNA, 297 bp, Gossypium hirsutum
  Clone ID: LIB3120-023-Q1-K1-G9
tgctgaccgcctcaatggacggagcattaagcagtgaataaagagatatgttacagaatcttaaattcttacaacccaccccacagctactttaacctccaacttcagctgcccctctcccacagcttcattccacttgttttcccattctgaaacagttcaaaatcttccggcgagagcttacaatttgtagcaactcctcactgcttctttctcttaggttcttaagcccttgagtctaatgcaaaggctgaagaaagttcacccaacgataatcaacagaaagaagagaatgtt

SEQ ID NO: 7768 - DNA, 341 bp, Gossypium hirsutum
  Clone ID: LIB3120-023-Q1-K1-H1
tttagctatagcatacactactagtacccactactagcaatggcttcctcaatgatctcatcggctaccattgccactgcctctgcggcacaggctaacatggtcgctcctttcaccggcctcaagtctgcctctgctttcccagtcaccaggaaggccaacaacgacattacttctctcgcaagcaatggcggcagagtgcaatgcatgcaggtgtggcctcctactggaaagaagaagttcgagactctctcatacctccccgatcttacacccgtgcacgtggctaaggaagtggattaccttcttcgctcaaaatgggttccttgctttggaattcg

SEQ ID NO: 7769 - DNA, 236 bp, Gossypium hirsutum
  Clone ID: LIB3120-023-Q1-K1-H11
atcagtgagactctttcgtatacctgtagcatatagtaatagtgagcagtcatagcaatggccttctccatgatctcatcggcaaccattgccaccgtgaaccgctcctccccggcacaggccaacatggtggccccctttaccgggctcaaatctgcctctgctttcccagtcaccacgaacgccaacaacgacatcacttctcttgcaagccacggcgggagagtgcaatgcat

SEQ ID NO: 7770 - DNA, 290 bp, Gossypium hirsutum
  Clone ID: LIB3120-023-Q1-K1-H12
atttccttggacaagagacacctttgactagcttaaaagcaattgatcagattgatctacttagggagcagcagaagattttgtctggagaggtagcacttcattcaagtgccttaaagcgtttgtctgaggaggctattagaaacccccagaatgagcaacagattcaagttgagatgaataagttgagtgatgaaataagggggaagaatgaacaaattgctttgttagaaaagcaaattgctgaatccatcttggctttacccaacaagatggagaaatcagaaata

SEQ ID NO: 7771 - DNA, 373 bp, Gossypium hirsutum
  Clone ID: LIB3120-023-Q1-K1-H2
gctttacaccattgaaatcaatggcgacagtacagcagcaacaacaagaacaagaacaacagatcaaatcaacggagaagagaaaaccagtgtttgtgaaagtggaccatttaaagccaggtaccaaaggccataccttaatcgctaaggtcttatcttcaaacatggtccttcaaaaaggtcgagctgcttctcaacatctccgtcaaacccgaatcgcagaatgccttatcggtgatgaaaccggcactgtcctcttcactgctcgtaatgatcaagttgagttgatgaagccaggtaataccgtaattcttcgtaatgcaaagatagatatgtttaaaggttcaatgaggctagctgttgacaaatgggg

SEQ ID NO: 7772 - DNA, 416 bp, Gossypium hirsutum
  Clone ID: LIB3120-023-Q1-K1-H3
caaactcccatcacccgagatcatctttccccttcagaatggcggctgcaaccatggctctctcttccccatctttcgccggaaaggccgtcaagctctctccttccgcccctaaaatccaaggcaatggccgtgtttccatgaggaaaaccgctaccaaggctgctccctctggaagtccatggtacggtcctgaccgagtcttgtacttgggtccactatctggtgagcctccatcttacttgaccggagaattccctggtgactacgggtgggacactgctggactctcggcggacccagagacatttgccaggaaccgtgagctcgaagtcattcactgtaggtgggctatgttgggtgctcttggggggggttttccctaaccttttgcctaggaatggagccaaattcgg

SEQ ID NO: 7773 - DNA, 430 bp, Gossypium hirsutum
  Clone ID: LIB3120-023-Q1-K1-H4
attattactattcctatgactaagtatttgactttcccacatcggtaaggagtttattacatgaaagaagtgtttttttgagtctgtttagatgatgtaattgagtaaatttcatttcttgggggtataagaatgattcttgttgcatgtttagtagagggtctcttttattttttagaagtttttaaattcgtgttggatacatatttggatatggaggccggcatacgaatgatgaactacttgtacacgatcctgattaatgggggtcggtagctatattatttggattggggtgtcaatgtcaaatacgggtatgcgtcgattttttcccattggaggttaaatcctaatccatgtgtcggacatgattgttggacaagggtacttctagaaaaatgaaaagtccaactaaatttcctttcttggg

SEQ ID NO: 7774 - DNA, 283 bp, Gossypium hirsutum
  Clone ID: LIB3120-023-Q1-K1-H5
ggagggaaaaaaagacgccgctccttctcattcccactacaaagaagaagacgggggcgacgacgagtaccccgacctggacgacgaggacttcgggaactatcacgatttcgatgactccgattcggatccgtacaaggaacccgaagtcgacgacaaggacgtcgtcgttttgaaggaagggaacttcagtgatttcattgagaaaaacaagttcgtgatggttgagttctacgcgccgtggtgtggccattgccaggcgttggctacggagtacgctgcg

SEQ ID NO: 7775 - DNA, 272 bp, Gossypium hirsutum
  Clone ID: LIB3120-023-Q1-K1-H6
gaccgcccgacggcccacgccacccactcttaccattgatataaatacctactgtactgctgtccttacgatgacataaacaacgcgtccatctcacttttctggcgcgaaaccagacaactccactcccataatgagtggtctctcatggactttctacaaaacttcatgttccaaagtagaatccattattagaaaacaactgcagaaggttttcaagaaagacataagccaagctgttggcttgctccgtcttcattttcatgactgct

SEQ ID NO: 7776 - DNA, 256 bp, Gossypium hirsutum
  unsure (1)..(256): unsure at all n locations; Clone ID: LIB3120-023-Q1-K1-H8
ctcggcaactttcttttgtggagatgttagtgaggaagctaggaaccttgtgaaggtaacgaaagaaagcctagataaagctatatcaatttgtgcacaaggagtggagttcaagaaaattggcaaaacaattcatgatcatgcagataatttcggttatggtgttgtccggcaatttgttggccatggggttggacgggtttttcatgctgatcctgtcgctctacacttcangaacaacgatggtggacgtatg

SEQ ID NO: 7777 - DNA, 351 bp, Gossypium hirsutum
  Clone ID: LIB3120-023-Q1-K1-H9
gaaagaaggcagcgaaaggaaaggtaaggataggatctgtagcgttcaagagggcgcttatgtatctgagaaatagcagtaattaatttttgaggaaaaaatggcggcagcagcagcatcaggtttcatgtcggccaccgtcgtcttgattccacgtgttcctgcagccgttagaacaacccactgttccggcttgccgtctgtccctactcgcgtatgcaccggtttcttttcctcgtgcgttaagctaacttcaagaatgccggagggttttcttttctccaaacaaaagcatcataagacacctttggcgattccggggagctttttgatgacttgaaagaaaaatgg

SEQ ID NO: 7778 - DNA, 302 bp, Gossypium hirsutum
  Clone ID: LIB3120-024-Q1-K1-A1
aaaccttccatcacccaagaaaagttctcacttcacaatcacaatggccgcggcaacaatggccctctcttccccatcctttgccggaaaggctgtcaagttctctccttccactcctaaaatccagggcaatgggcgtgtttccatgaggaaaactgccaccaagcctgctgcctctggaagcccatggtacggccctgacagagttttgtacttgggtccactctccggtgagcctccatcctacttgaccggagagttccctggtgactacggttgggacactgctggactttcagctg

SEQ ID NO: 7779 - DNA, 295 bp, Gossypium hirsutum
  Clone ID: LIB3120-024-Q1-K1-A10
gtttaatccttgcaaaaccaaacttaataattgtgtttttccttctatgcaatgatctccgagaagagagcagcgaatgccatgggaggcaagactgctagagcctgcgatggctgtctacgaaagcgtgctcgttggtattgttcagctgatgatgccttcctttgccaaggttgcgatacatcagtccactccgctaaccagttagccagtagacatacaagggttaggcttgaaactgcatcttccaggttcaatgcttctgttaataacaacagtgctactgatcaagatg

SEQ ID NO: 7780 - DNA, 327 bp, Gossypium hirsutum
  Clone ID: LIB3120-024-Q1-K1-A11
cccacgcgtccggtggcaatgtcgacggcttctatcaacggttggtgccttacctgctcttgggccaccactaccacctgctcggtttccgctcgtcgacgacctacattgcggccttcagtcgtcgctagccttaactcttctccttctcctccgactcttatccaagaccgcccggtttttgctgcccctattcctttgctcaccccgagagaagagatgggaaacaagtcctacgacgaagccattgaagctctcaagaaacttctcagtgagaaaggagaactgaaagctgaagcactgcagggtagatcaaatacagcagag

SEQ ID NO: 7781 - DNA, 327 bp, Gossypium hirsutum
  unsure (1)..(327): unsure at all n locations; Clone ID: LIB3120-024-Q1-K1-A12
aggaaattgaagaaaaaaagggaaaattcattgtagtatgcgagtttggtgatggattcaggcgacggagcaactacttgtcaacaatgggatcgttgaccgaagatcttcgtgagagacatcaacaagaattagaaaacttgacattaacaacacagcccttcaaaacattaaggctatttcttctggctatctttcaatattataagcgattagcattatatcttttggcaaagggtagttggcttgcgctttcaagcactctaatagcagcttttggaatttttgcttgtaacaatcganggtcctcatgaaaagcatgttgat

SEQ ID NO: 7782 - DNA, 298 bp, Gossypium hirsutum
  Clone ID: LIB3120-024-Q1-K1-A2
aagaaattggttttaccaaaagcttggggattcaatggccactttcaaacaaggtttcttcagctgttcgaccacatcagatgaggtttgagtttgctcaaggagataacgctcaaagaatgggatatgattcaatagtatcctctactttcatgcatatctcaccaccagatgctgctgaacttcagaaatccttcaatcacaacaagcaacgagtaggcaatcatttcccattcacagctgcttcttctgttcagcatgatgtacatcatgttcaacggccttatgacatgaaaat

SEQ ID NO: 7783 - DNA, 301 bp, Gossypium hirsutum
  Clone ID: LIB3120-024-Q1-K1-A3
cctgttttctcttccactgccaattgttcaaccatgtcatcagctgtgattgcaggtgcctcttcttcgtgttctgccgccttcaccagcaggaagaactactccaacaaaactacctccaccccttctcccaaggcattcaatacttcacagaaaaccgcactccaaggcttgtctcttcaagaggccaaagggggtatctcagatttcttcatagctgagaaaaagagcagtgtctgttccagtcatgtaggaagaggacttgagatcacttgcagaactggcggtgcttcaaaaacta

SEQ ID NO: 7784 - DNA, 287 bp, Gossypium hirsutum
  Clone ID: LIB3120-024-Q1-K1-A4
caacaatttaaataatgaaggaagaatacgaacagttcttgatgttggttgcggtgtcgcaagttttggagcatatcttctttcttctgatattatagcaatgtcattagcacccaatgatgtgcatcaaaaccaaatccaatttgccctggaaagaggaattcctgcatatcttggtgttctagggaccaaaaggctcccttacccgagcagatcatttgaacttgctcactgttctcgctgtaggattgattggcttcaaagggatgggattcttcttcttgagc

SEQ ID NO: 7785 - DNA, 300 bp, Gossypium hirsutum
  Clone ID: LIB3120-024-Q1-K1-A5
cggacgcgtgggcaaggtcctcaacattggcctcctgtgtactagtccactcccaatcaaccgaccatcagtgagaagggtggttaaaatgttgcaagaagctggcgctgatagcctgccaaaaactgctgctaaaagggatgggaaattgactccttactactacgaagatggctcagatcaaggaagtgtagcttgagaaaaaaaaagaaaaagaaaaggttttccttgtagatttgtcccataaacaaagagcaatagaaggattgtgcgagtgtgttacgcctctagttttttttt

SEQ ID NO: 7786 - DNA, 136 bp, Gossypium hirsutum
  Clone ID: LIB3120-024-Q1-K1-A7
tcgcggagcttcaagacatgggaggacctgctgaaggtggattcagtgttgctttcgatccgctgcgaggttccagcattgtcgatgcaaatttcaccggaagtaccatctttggtgtttggcctggtgataagtt

SEQ ID NO: 7787 - DNA, 400 bp, Gossypium hirsutum
  Clone ID: LIB3120-024-Q1-K1-A8
aagaaagaggctgcaaatggaaaggaggggtctaaaccaccagcaagtgaagaggcaccatcgaaagtcaccaaacagcgggtagaagctgcaaagcaatatattgaaaaccattacaagaagcagatgaaaagcctccaggaaagaaaggagcgacgtgatattctagaaaagaagttggctgatgctgaagtctctgaagaagaacaaaacaacttactaaagtgttttgagaagaaggaaacagaatacatgcgactccagcggcataaaatgggtgctgatgattttgagccattgaccatgataggcaaggggtgcatttggtgaggttagaatctgcaaggagaaagcaactggtcatgtttatgccatgaagaaggctaagaagtcagaaatg

SEQ ID NO: 7788 - DNA, 420 bp, Gossypium hirsutum
  Clone ID: LIB3120-024-Q1-K1-A9
gcagaaaccacaaaggatggaatcaaagttagggttatagccggtgaagccttgggaacaaagtcaccaatctacacaagaaccccaacaatgtatttggatttcactctggatcccggaactcacctccaacaaccgatacctaaaccgtggaacgcctttatttacatattagaaggagagggtatctttgggcagtcgaaatcatcggcgactgctcaccatttgcttcttctaggacatggggatgggttagaggcatggaacaagtccactaaattgttaaggttcatattagtaggaggtgagccattggatgaaccattggtgcaatttggaccatttgtgatgaacactcaagaagagattgatcaaacaatataggattttgagaactacatccatggatttgagaaagca

SEQ ID NO: 7789 - DNA, 349 bp, Gossypium hirsutum
  Clone ID: LIB3120-024-Q1-K1-B1
gctaattgagctccatttccctagtaaacagagttctttttttcacagcaatggcagccatgaactccagtgttttggcatgcaactatgctatctcaggcactggatcatctgagcttaatgccaagcttgcttcagcaccatcagttgcttccccagttatgtgcggtggtcacaagttgcctgtgatcagagcccagcaggctaaattttctgattccaaaggatcaggtgccagtgaaagaagaagagctgctatgctctacttggcagctggccttttcaccacagctgttgcttcttctgcaaatgctggggtcattgacgagtaccttgaaaagagcaaagc

SEQ ID NO: 7790 - DNA, 326 bp, Gossypium hirsutum
  unsure (1)..(326): unsure at all n locations; Clone ID: LIB3120-024-Q1-K1-B10
attatggcttcggctactgtttctgtagccaaacccaaccttcagattcaagcaaaaggaaagggtgttggttttgcagatttgtgaggcctacacaactcctctactagccttccctttgccaggaaaacctctgatgacttccattcactcgttgcttttcagacatctgctctaggaagcaataatggcgggtacaggaaagggatggcagaggcaaagctaaaggtggctataaatgggtttggtaggattggcaggaacttcataaggtgcnntgcatgccgtaaagactacccacttgatgtcattgccatcaatgacac

SEQ ID NO: 7791 - DNA, 305 bp, Gossypium hirsutum
  Clone ID: LIB3120-024-Q1-K1-B11
ctcttttctcagccctttcatggaggactacaccctttccatacctctcctagctgcccccggcggtgctcttaccaccaccggggccgctaccagctgcgcaaccaaaaaagatgatgaaaatggggttttctcatccggttccagtattatttaccgtcttcttttggtaattctcatcggaacaatctccatatgggcaaaccacgaagcatcaaaaggattcaaggtaaccataattaacgccgccgccaaagaatctccggcagggcgacggtttgatctcttttacgtatcaaacgatg

SEQ ID NO: 7792 - DNA, 316 bp, Gossypium hirsutum
  Clone ID: LIB3120-024-Q1-K1-B12
cttcaatccatttctctttctctctctatctttcaattttcccgagaaaatctcgcattttggcacccgagagaaagagccggagaatcgcatgatgaggtagtttttttaagttttccggagtgaaaagcaactggaaagtaagtttatcctccgtagattactcgttgatcggcttagacaaagtttaaaacagtatctttcttgaatgctacgatactgaaattcgctattagtttgtggaaattttgagatcagctagattagttgggttttgaaaaatgagttggaatccgaaccatggacgttcagtaca

SEQ ID NO: 7793 - DNA, 262 bp, Gossypium hirsutum
  Clone ID: LIB3120-024-Q1-K1-B2
tcgcccacgcgttcgcggacgcgtgggattttgcccatttcactgctctcccctagatcgtctccgagagagagatcttcttacagctaccgtacacattcacacacacattcactgaatgggtcgagtcatccgagctcaacgtaagggtgctggttccgtctttaaggcccacacccaccaccgcaagggtcctgctcgtttccgcagcctcgacttcggtgaacgaaatggctacctcaagggtgttgtcaccgatgtc

SEQ ID NO: 7794 - DNA, 372 bp, Gossypium hirsutum
  Clone ID: LIB3120-024-Q1-K1-B3
gttggatctttattatgccaatgggcaaatgcacttggtgccactgtcatcggaactgtctcgaccaaagagaaggcggctcaagcaaaggaagacggatgtcaccatgttataatttataaggaagaggattttgtttcccgtgtcaatgagataacatccggcaagggggtggaagttgtatacgattctgtaaggaaagatacctttgagggctcgttggcatgtttaaagccccgtggctatatggtgtgctttgggcagtcatccggtacaccacatccggttcccgtgtcttgcacttgcacccaaatcattgttcttgactaggccttccatgatgcaatacacgtcaaactcggatgagcttct

SEQ ID NO: 7795 - DNA, 367 bp, Gossypium hirsutum
  Clone ID: LIB3120-024-Q1-K1-B4
cacactctcaaattcagttaacaatttcacagttgttttcttcagtctctctctcagccatggctgcaggcatctccaccgtcgctgccgctgccgccgccaaccgagctctgggagtgtcagtcccaacctcagctttcatggggaagaaagtgagctcaagattcaacagcaccaggcaggttccttcgggaagttttaaggtgatggcggcggagaaagagatagacgaagagacacagaccgaaaaggaccgatggaaagggatggcttacgatatttcggacgaccaacaagacattactcgagggaaaaggatgggtggattccttgttccaagctcccatgaatgatggaactcactatg

SEQ ID NO: 7796 - DNA, 379 bp, Gossypium hirsutum
  unsure (1)..(379): unsure at all n locations; Clone ID: LIB3120-024-Q1-K1-B5
cctgagattattggcttgcaaagacccaatttactatggaacaagaagtatggtaagggatagagcaaggttggtttgggcagaaaacaggcaagcaaggagtgcttgcattgatagccctgatagctatgattatggagcttataaatggaccgttcagctcgttaccaacgatagtcgtctcgagaaaatactttttcctatcttttggggtcttatgactctcagcacatttgggaacttggagagcacaacagaatggctggaggttgttttcaacatcattgttcttactaggggacttcttctagtcacaatgttgattggtaacatcaaaggggtttttgcatgcaacaacgtnccagaaaacaagcaatgc

SEQ ID NO: 7797 - DNA, 306 bp, Gossypium hirsutum
  unsure (1)..(306): unsure at all n locations; Clone ID: LIB3120-024-Q1-K1-B6
cccacgcgtncggctgtttttgttgcctctacacttatggaaaatggtggtgtccctcagtctgctaccgccgaaacacttcttaaggaagcaattcatgttatcagctgtggatacgaggacaaaacagactggggaagtgagattgggtggatctatggttctgttacagaagatattcttactggattcaaaatgcatgcccgtggttggcggtcaatttactgcatgccaaaacgcccagcctttaaaggttctgctcctatcaatctttcagatcgtctgaaccaagtgcttcgatgggct

SEQ ID NO: 7798 - DNA, 296 bp, Gossypium hirsutum
  Clone ID: LIB3120-024-Q1-K1-B7
gtgagactcttttgtataactgtagcatatagtactagtaagcagtaataacaatggcctcgtccattatctcatcggcgaccgttgccaccgtgaactgctcctccccggcacaggccaacatggtggcccccttcaccggcctcaagtctgcctctgctttcccagtcactaagaaggccaacaacgacatcacttctcttgcaagcaatggtgggagagtgcaatgcatgcaagtgtggccttctcttgggaagaagaagttcgagacactctcatacctccccgatcttaca

SEQ ID NO: 7799 - DNA, 258 bp, Gossypium hirsutum
  unsure (1)..(258): unsure at all n locations; Clone ID: LIB3120-024-Q1-K1-B9
gacacacgtccgaacacgcgtccggaagaagatcaaatcctccatcaagaaaacgtttctgggcacacatgaatggattgtctgtgccnacaacatttccggcaactctaagtttgactgacttatcatgaacagaaaataatcaactcgaggagaatctcatatcaaggccgccgagccccaaagcgaacacatcttcttatgttatctgtccaataccaggtcttaccgctcctccatcatcgaacatggctgatc

SEQ ID NO: 7800 - DNA, 316 bp, Gossypium hirsutum
  unsure (1)..(316): unsure at all n locations; Clone ID: LIB3120-024-Q1-K1-C1
cggacgcgtgggataaaatctgtgcctgcccttttctctgcacacctcgggatatcactttcgactccactcatcccacgggttgagtaccgagtccatatatcgttaagttcaaggaaggaacttgggcatcatgggtcttaaggcattagactatgagacaatgaatgaaaacgtgaagaaagttcaatatgcagttagaggtgagttgtatcttctagcttctgagcttcagaaggaagggaagaagattattttcacaaatgttggcaatcctcaagctcttggacagaagccactgactntccctcgtcag

SEQ ID NO: 7801 - DNA, 353 bp, Gossypium hirsutum
  unsure (1)..(353): unsure at all n locations; Clone ID: LIB3120-024-Q1-K1-C10
ccctcccccaatcatacaacttagtgttttcttttcgtttgcagcgganccatggaagtgacgccaggcagaaagcaggtctatagcaattatatgctattgaaccctaagaaagcctctttctttgatctaatcgccctcttattttctaaaaatttaaagaagagaaaatttatcgaaaccagtatcgaaactgaggacagtttctggtatagacttgttatattcctctctactctgttacagacgtttctgcttttcataaagacgccaatggctttggctggccaaactttttgaggatatgcctcaaccttttcactaacaatggtggcttgtttggtctcataaaa

SEQ ID NO: 7802 - DNA, 87 bp, Gossypium hirsutum
  Clone ID: LIB3120-024-Q1-K1-C11
cccacgcgtccgaaaaaaaaaaaaaaaaaaaaaaaaaaaaaaaaaaaaaaaaaaagagagaaagaaaaaaaaggttgtagatcgcga

SEQ ID NO: 7803 - DNA, 321 bp, Gossypium hirsutum
  Clone ID: LIB3120-024-Q1-K1-C12
ctttagcatacactactagtacccactactagcaatggcttcctcaatgatctcgtgcggctagcattgccactgcctgtgcggcacaggctaacatggtcacccctttcaccggcctcaagtctgcctctgctttcccagtcaccaggaaggccaacaacgacattacttctctcgcaagcaatggcggcagagtgcaatgcatgcaggtgtggcctcctactggaaagaagaagttcgagactctctcatacctccccgatcttacacccgtgcagttggctaaggaagtagattaccttcttcgctcaaaatgggttc

SEQ ID NO: 7804 - DNA, 215 bp, Gossypium hirsutum
  Clone ID: LIB3120-024-Q1-K1-C2
ctgtgctccaatatattacccgggtgacgctgatacataatgcaatgaattgaatgaatgttgcatggaggtacagcttcttgcgtggaccgattgcatgacttgactcttttacaagctgtataaacccctcctcttttcttcttcttcgaaacatgtacctttgtactgatactctgtttcatcttcaagtacaaggggatgttcaagcaaca

SEQ ID NO: 7805 - DNA, 335 bp, Gossypium hirsutum
  Clone ID: LIB3120-024-Q1-K1-C4
gagaaaaaaaagagagcaaagttttcggttatggcgtttgttgcaggaatggcaactacgtcgtcgtttgctatggtgaagcttcacagcatcccttcggtttctgccaaagggaaaactggtttgaaacttatgagcgtgaaagtgagagctggttcttttaagaccggtggtgctggtgtattggaacgacctagtttcgatcaatctcagtttgacccttcttcccaagctcttgaaggtggtgatattgggcgattgtgggataagaaaggtactggcagtggagacagttataaagttttgctggttgatgatgctcgtcattctgaaaa

SEQ ID NO: 7806 - DNA, 348 bp, Gossypium hirsutum
  Clone ID: LIB3120-024-Q1-K1-C5
aaggaagggattttttaaaaatttttaaattaagaaaaatttctagaaaaaaaaaaaatccttgcttttttcctttgatttccccgtatgagatcgtaaaatattcgagaatccctttttttttcctgtaaaatttatatatctaattatcgctttgtctttgattttatttggggttgttttgagttaattaatatggggagtgaagttttacgacctcaggattgtttgatcgaacggattcggttacctccgacggcgtgtcctcgccggagatacggaaacgggagctgtaatcctagttattatcataactacaacaataacaatggaaatggtagatctaac

SEQ ID NO: 7807 - DNA, 309 bp, Gossypium hirsutum
  unsure (1)..(309): unsure at all n locations; Clone ID: LIB3120-024-Q1-K1-C6
ccctattctcaatggcaatggcaacccaagcctccctcttcactccatcaaccctctncaccggaaaatgcggcgaccgggtcggcggcgtgttacngaaacaaccaccggtcctaaccgtccctagcttcaagtccccaaaaagcatcatcgccccacgcaccatcaaagcccaagcaaccgaagagaaagccgagacaaccgccacaaaggaagcaccagtcggtttcaccccaccagagctggacccaaacaccccatcaccgatcttctgcgggagcaccggcgggcttttacgcaaagcacaat

SEQ ID NO: 7808 - DNA, 219 bp, Gossypium hirsutum
  Clone ID: LIB3120-024-Q1-K1-C7
ttcgctcttccactcgatattgaaatggcggaatcaaagtcattgatgaaacctggtcatcgcacgtcgaccaactgcgacgtggcactatttgtcacactcttactgacaaggatgtcaatgcaaagatggtattgcaaaagggtcgggctgatcgtcctcatgtgcaacaaatgcgacttgctgaatgcttggtatgagatgaaactggaatgatta

SEQ ID NO: 7809 - DNA, 361 bp, Gossypium hirsutum
  unsure (1)..(361): unsure at all n locations; Clone ID: LIB3120-024-Q1-K1-C8
aacaacactcctctttctctctgttctatccctctctatacacatggcaaaggtgaagatcggtatcaacggattcggtaggagcggtangttggtggctcgagttgctttaaaaagagacgatgttgaactcgtcgctgttaacgatccttttatcactactgattacatgacatatatgttcaagtacgacagtgttcacgggcaatggaagcatcatgaactcaaagtcaaggattcgaagacccttctgtttggcgagaagccagtcactgttttcggtattaggaacccagaggagattccatggggcgagaccggagctgaatacattgttgaatcaactggagtgttcactgac

SEQ ID NO: 7810 - DNA, 366 bp, Gossypium hirsutum
  unsure (1)..(366): unsure at all n locations; Clone ID: LIB3120-024-Q1-K1-C9
ctgaaaaaccccaaagccatagccacagccacagccaaaggcgatggccatttcttgtctgagactatccttggctggatggctggtgaaaactccaaggccaagacctcctttgaaagtaaaaccttttcgaatcatttgcactgctcagtcctctgtagtagatgaaaaggctcttccatctggacagcgtgaggaggatcatctccgggtttgtggagaacgagaagagcatggctgttttcaatggcggcgattttagggaggtaagttcctccgcgatgcaaagagttgctaagactgtagacgcatacctggcggagatagcaactgtagttgaactctncatctncaagttcaacggca

SEQ ID NO: 7811 - DNA, 290 bp, Gossypium hirsutum
  unsure (1)..(290): unsure at all n locations; Clone ID: LIB3120-024-Q1-K1-D1
cggacgcgtggggaatctttgaagagagcctcaataaattgtaaaacaaggccgctaaagtggaggattgtgtagcgtttggagcggccacatatcanaaactgcgaaaattcattgagaaatggcgacagctgcatcctcttcatcctccatggtagccaccgccgttttgattcctcgttttccggcagcctccgttagaactaccggctgcagtgccttgccgcctctccctcctcgtgtttcaaccgcttccttgtctttttcctcttcccgtaagctaatcccag

SEQ ID NO: 7812 - DNA, 51 bp, Gossypium hirsutum
  Clone ID: LIB3120-024-Q1-K1-D10
cccacgcgtccggctacacgtgcgctacacttcttgaggctcgtgagaata

SEQ ID NO: 7813 - DNA, 341 bp, Gossypium hirsutum
  Clone ID: LIB3120-024-Q1-K1-D11
gtggctcgcaagcaatggcggcagagtgcaatgcatgcacgcgtggcctcctactggaaagaagaagttcgagactctatcatacctccccgatcttacacccgtgcagctggctaaggaagctgattaccttcttcgctcaaaatgggttacttgcttggaattcgaattagaggagggattcgtgcaccgtaaatactcgagcctacccacgtactacgatggacgctactggaccatgtcgaagctgactatgttcgggtgcaccgactcggctcacgtattgaaggagcttgaggaatgcacgaaggaataccccaatgcattcattagaatcattg

SEQ ID NO: 7814 - DNA, 273 bp, Gossypium hirsutum
  Clone ID: LIB3120-024-Q1-K1-D12
ggtaaaatcactcccttagttttgaaaaacgtcttaccgattttccttgcgtaaggcattttgcattccctactctgcgactctgatcgtcttagcttcaaaaatttcttcgcagactttctttagaaagatctgttcttaactgtcttccatggatcttctgagatttgcttcttgttgaatagttccagatccttggttatgagcggcggagatatacacgcagcggcgaggtccggggacctttcaaaacttcaatcaattctggcgtct

SEQ ID NO: 7815 - DNA, 231 bp, Gossypium hirsutum
  Clone ID: LIB3120-024-Q1-K1-D2
gaagaggggaaaggttccatgtgaacggcacttgcacatgggttagtcgatcctaaaagacgggggaagcccgtccgacagcgcgtccagcgcgagcttctaaagggaatcgggttaaaattcctgaaccgggacgcggcggctgacggcaacgttagggagtccggagacgtcggcgggggcctcgggaagagttatcttttctgtttaacggcctgcccaccctggaaa

SEQ ID NO: 7816 - DNA, 254 bp, Gossypium hirsutum
  Clone ID: LIB3120-024-Q1-K1-D3
cacacttggtggcaagcaagtggccaggcatgcctgcaggaggaagcagtgaccccttggaggatttctgcaagacaaacccagctgatgaagaatgcaaagtttacgaggcttaaatgattgcaattttcattttttttaaaaaaaattgttttccatgctggtggtatagttagtggtcaagattttccagtgttcatgttatcaataagctcattttgtaataacaccagagtggatgaagagaatttatc

SEQ ID NO: 7817 - DNA, 292 bp, Gossypium hirsutum
  Clone ID: LIB3120-024-Q1-K1-D4
cccacgcgtccgcccacgcgtccggttgcaatggcacaagcaatggcatcgatgactggtttgcgtggcgcttcacaagctgtggtggaaggtagtctccaactcagcggccaaacccggttgaacgttgctagcaccaacagggtggctgtggctagacctggttttaccgttagagctcaacaggtccctgccgagcctgaaactggacgcagagctgtgctgggtcttgttgctgctggtttggctactggctcctttgttcaagctgtgcttgctgatgcacgaagca

SEQ ID NO: 7818 - DNA, 323 bp, Gossypium hirsutum
  Clone ID: LIB3120-024-Q1-K1-D5
caagacaaagcttcatattatcttttttagttccgacaaaagaaaacgaaaaaaaagaagaagagatacggtcgttttctttttggagtcgggttttagtttttggggtgaaaaaaatgttgggagtatttagcagtgcgatagtgtctccgccggacgagctggtggcggccggttgccgaactccatcacctaagataacggcggacgctctggtgaaacggttccttgagacgaactcctccggcgtgtccatgcacatcggagaccatgtccaattcgcttattctcaccataaagagtctcctttacagcccacatca

SEQ ID NO: 7819 - DNA, 272 bp, Gossypium hirsutum
  Clone ID: LIB3120-024-Q1-K1-D6
aaaccttataacaaggtttaagtcaacatgaaaatgtgtcgtttatttcttcaactattcctgggtttggttctcctaccggggcgtgctgaaccagaccctgacccacttcaagattactgcattgcagacactaaatcccctttgtacctcaatggtgcaccctgtctcaacccaactctagctctttcctcccacttcaccacctcggctctagccaaacccggtgacaccaaggctaaccaattcggcttcagtgtcaccctaaccac

SEQ ID NO: 7820 - DNA, 358 bp, Gossypium hirsutum
  Clone ID: LIB3120-024-Q1-K1-D7
atttctgaggaaatcccagtttccatgaaaattcttgggacatctcgacctttgggtctcccggtatataacaattctgctcctgtctctcatccacacttttctccttcaattttcccatcaacccattattctcacaagttttcgcaatccatggctgcttgcattgacatctcaagaacaacagactcttcccaactttcccaacgtccaaacatttctcaacctgatgaagttctttacaagtatggaagtttctgcagatccactttcccaaataatgtttcgagcgtaccctttgataaaaaccacacaaaaacccatcctacaagaaatctgttgattttctttagagaaa

SEQ ID NO: 7821 - DNA, 248 bp, Gossypium hirsutum
  Clone ID: LIB3120-024-Q1-K1-D8
gcggttctttgaaggggattgattcaccctttggttttttctactcatttctcaagttactgggactaaatattaccgacttctactactgtcttttcttctgttttgccaatacagctaggttttcctttaccaatgaccgtctagtattgggcagtagccaaataatcaagtatagagaaggcttaatgggacacacaccccacacaacattctttacaaaaggatgaaaggagtctatcatgcct

SEQ ID NO: 7822 - DNA, 345 bp, Gossypium hirsutum
  Clone ID: LIB3120-024-Q1-K1-D9
cccacgcgtccgatgatattgtgtttggaggatgggacattagtgacatgaacctagctgatgcaatggctagggccaaggttttcgacattgatctgcaaaagcaactgagaccctacatggaatccatggtcccactccctggaatctacgatcctgatttcattgctgctaaccaaggtgaacgtgccaacaatgttatcaaggggaccaagaaagaacaagttcagcaggtcatcaaagacatcaaggagttcaaagagaaaaacaaggtggacaaggttgttgtactctggactgcaaacactgagaggtacagcaatgtcatcgtggggctaaatgaca

SEQ ID NO: 7823 - DNA, 381 bp, Gossypium hirsutum
  Clone ID: LIB3120-024-Q1-K1-E1
cccacgcgtccgctcaaattcagttaacaatttcacagttgttttcttcagtctctctctcagccatgggtgcagccatctccaccgtcgctgccgctgccgccgccaaccgagctctgggagtgtcagtcccaacctcagctttcatggggaagaaagtgagctcaagattcaacagcaccaggcaggttccttcgggaagttttaaggtgatggcggcggagaaagagatagacgaagagacacagaccgaaaaggaccgatggaaagggttggcttacgatatttcggacgaccaacaggacattactcgagggaaagggatggtggattccttgttccaagctcccatgaatgatggaactcactatgctgtcatga

SEQ ID NO: 7824 - DNA, 379 bp, Gossypium hirsutum
  unsure (1)..(379): unsure at all n locations; Clone ID: LIB3120-024-Q1-K1-E10
gctttcatcatcttcaaatggctaaatcacttgtcattgttatgttatcttttctgttantagttgttttacttggggaaatccaggcatcaagcccttctcaaaaacaaagacaaggcaaccatggaaatggaatgtatggtgccacccaagggagccttcgtcctcaagagtgtggtccaagatgcacacagagatgctcagctacagcatacaaaaccatgcatgttcttctgccaaaagtgttgtgccaagtgcttgtgtgtgcctccaggcacttacggcaacaaacaatcttgcccttgctacaataattggaagaccaagagaggaggccccaaatgcccttagatccctaactatatctatggtggtctct

SEQ ID NO: 7825 - DNA, 90 bp, Gossypium hirsutum
  Clone ID: LIB3120-024-Q1-K1-E11
ctttctttctcccggaaatcatgtctgccgtcactacacaagcctcggctgccggtttccgcccatgcacgtcgaaaactaggtttctta

SEQ ID NO: 7826 - DNA, 346 bp, Gossypium hirsutum
  Clone ID: LIB3120-024-Q1-K1-E12
cccacgcgtccggttagctttagcatacactactagtacccactactagcaatggcttcctcaatgatctcatcggctgccattgccactgcctctccggcacaggctaacatggtcacccctttcaccggcctcaagtctgcctctgctttcccagtcaccaggaaggccaacaacgacattacttctctcgcaagcaatggcggcagagtgcaatgcatgcaggtgtggcctcctactggaaagaagaagttcgagactctctcatacctccccgatcttacacccgtgcagttggctaaggaagtagattaccttcttcgctcaaaatgggttccttgcttgg

SEQ ID NO: 7827 - DNA, 242 bp, Gossypium hirsutum
  unsure (1)..(242): unsure at all n locations; Clone ID: LIB3120-024-Q1-K1-E2
gccaccgtncgtaaatttattaacaatttcacagttgttttcttcagtctctctctcaggcatgggtgcagccatctccagcgtcggtgtcgctaaccccgacaaccgagctatgggagtgtcaggctcaacctcagctttcatggggaagagagtgagctcaagattcaacagcaccaggcacggtccttcgggaagctataaggtgatggcggccgacaaagagatagactaagagacac

SEQ ID NO: 7828 - DNA, 352 bp, Gossypium hirsutum
  Clone ID: LIB3120-024-Q1-K1-E3
ggctctccaagcagcttcattgctcccacccaccatctccattcacaaagaggccaaatccaatgcttgtcttaaagagacaactctgtttggtgttccattttcaacccatttcagctttcctcttcatttaactcaggaactcaggaaaaagggagtagctgccggaattgttcgagcacaaacagctgctacaacaccggcagtcgatcgggctgctccacaagggaagaagaccttgagaaagggtactgtgataataaccggtgcgtcgtccggtttaggcctagcgacagccaagggctcttgccgagacaggggaatggcatgtaatcatggcgtgtagaaattt

SEQ ID NO: 7829 - DNA, 321 bp, Gossypium hirsutum
  unsure (1)..(321): unsure at all n locations; Clone ID: LIB3120-024-Q1-K1-E4
cccacgcgtncgcaaaaatttctccaatttcctcacaaattttcatttctattttgagagatttaatttgacatcatgaaacatggagtaaatcggcctccaacccctgatggtgcagaagatcaagggaatgaacccatccttcaagaaattattaatatcaagttaattgaaagcggggaaaaagagagattaatggaaatgttaagagaaagacttatagaatgtggatggaaggatgagatgaaagctctttgcagagcatatgttaagaagaaaggaagaaataatgtcactgtggatgacctttgtcatttgatc

SEQ ID NO: 7830 - DNA, 323 bp, Gossypium hirsutum
  Clone ID: LIB3120-024-Q1-K1-E5
agatcatgaagaatttgttttcattgaagaagattatgatgttgatgataatctttcccatggggaattcattgattcctccgtgaccgattctgatgatgccgatgatgatgtatcgtttcatcgtggtgaattatccagaagaaacgtagagtcggttatccctttcactttcccttttccccctataacggaggtgaaaaagtccatcccaattcctgctccgattcaagatactgatgatcatgatccatcacatgatggatctgatgatcaagatgatgatgttgatgcatcatttcatcgtgatgaattatcgagaa

SEQ ID NO: 7831 - DNA, 338 bp, Gossypium hirsutum
  Clone ID: LIB3120-024-Q1-K1-E6
cggacgcgtgggttaaccttgtacactactattacactgccggaaaaaaatcatggccaccggcacgacgcaagcctctgccggtgttttccggccatgtgcatcgaaaacacggttccttactggttcttccggtaagttaaaccgagacgtttcatttaaaccagtggctgctacatcgactagctcattcaaagttgaagcaaagaaaggggagtggttacctggtcttccttcaccagcttacctgaatggcagtcttccaggtgataatggctttgatcctcttggattggctgaggaccctgagaacttaaaaaggtatgtacaagctgagc

SEQ ID NO: 7832 - DNA, 342 bp, Gossypium hirsutum
  unsure (1)..(342): unsure at all n locations; Clone ID: LIB3120-024-Q1-K1-E7
cggactcatgggctgacgcgtggggtggcgcctccgtatcgttgcctattcctgggggtaccgatgttggccaccggggtagcgtgtcancttattggattccttgtcaacctanaccaccttaccttgatggctcagcaccaggtgacttttggtttgacccactaagactttgtgaggtcccttagaaccttgagaggtacaaagaatctgagttgattcactgcaaatgggctatgcttgctgttccacgtatattggtaccagaagcctttaggtttggaaactggggtaaaacttaaaaaatgggcagcaatttcagggtggcaaaccacttactta

SEQ ID NO: 7833 - DNA, 323 bp, Gossypium hirsutum
  unsure (1)..(323): unsure at all n locations; Clone ID: LIB3120-024-Q1-K1-E8
ggttcctcaatctctctaatcctcgctttcttccccatcaaacacaccttccattttcccaaggttgtanaagatggcagaaggtgaggatattcagccacttgtttgtgacaatggaactggaatggttaaggctggatttgctggggatgatgctccccgagccgtattccctagcatcgttggtcggccacgtcacaccggtgtgatggttggcatgggccagaaagatgcatatgttggtgatgaagctcaatcaaagagaggtattttgactttgaaataccctattgagcatggtatttgtgagcaactggatgata

SEQ ID NO: 7834 - DNA, 366 bp, Gossypium hirsutum
  Clone ID: LIB3120-024-Q1-K1-E9
gaaggctaggcctgttaaaggccgtgatgatatcaaagctgtggcttcgatttctgctggaaatgatgaccttattggaacaatggtagctgatgctattgacaaagtcggccccgatggtgttttgtcaatcgagtcatcttcttcatttgagactaccgttgatgttgaggaaggaatggagattgacagaggttacatctcaccacaattcgtaacaaatcccgagaaattaatttgtgaattcgagaatgcgagggtgctagtaactgatcaaaagattacagctattaaggacataattcccctcttggagaagactactcagttaagagctccattgcttatatttgggaggatgtactg

SEQ ID NO: 7835 - DNA, 348 bp, Gossypium hirsutum
  unsure (1)..(348): unsure at all n locations; Clone ID: LIB3120-024-Q1-K1-F1
cggacgcgtgggcggacacgtgggcggacgcttgggcggacgcgtgggcggactcttntgcggacgcgtgggcgacattacttgtgtcgcgagcaatggcngtagaatgcaatgcatgcaggtgtggcctcctactgggaagaagaagtttgagactctctcatacctccccgatcttacacccgtgcagttggctaaggaagtagattaccttcttcgctcaaaatgggttccttgcttggaattcgaattggaggagggattcgtgcaccgtaagtactctagcttacccacgtactacgatggacgctactggaccatgtggaaggctgcccatgttcgggtgca

SEQ ID NO: 7836 - DNA, 278 bp, Gossypium hirsutum
  Clone ID: LIB3120-024-Q1-K1-F10
atttagctatagcatacactactagtacccactactagcaatggcttcctcaatgatctcatcggctaccattgccgctgcctgtccggcacaagctaacatggtcgctcctttcaccggtctcaagtctgcctctgctttcccagtcaccaggaaggccaacaacgacattacttctctcgcaagcaatggcggtagagtgcaatgcatgcaggtgtggcctcctactgggaagaagaagtttgagactctctcatacctccccgatcttacacccg

SEQ ID NO: 7837 - DNA, 441 bp, Gossypium hirsutum
  unsure (1)..(441): unsure at all n locations; Clone ID: LIB3120-024-Q1-K1-F11
gccaatcccctcaataccccatttttctggttcctttttcaagccattttacaggcacttcccagttgggagaaggggaaaatggcacagcttttagcaccctcaactcaatggcaaatgacactaccaaagacctcaacctatggaagtcccattgcaacaaaaatgtggagttctctggtactgaaacagaacaagaaaggagctgctaaaagctctggcaaggttaaagtggttgccttgtctgaaaacagcacttgtcaacaagctagagaacttactaaacaatgacgtcactccatacaccgacaagatcatcgctgaatacgtttggataggaggcagtggactcgatatgcgtagcacgtccaggacaaatatcaaagccagntaaacatcctctgagcttnccaangtgaactattatggatcaagtactga

SEQ ID NO: 7838 - DNA, 369 bp, Gossypium hirsutum
  Clone ID: LIB3120-024-Q1-K1-F12
cccacgcgtccggaaggttcagagattttagagagaacaaacaacaatggctgctgcatctggggctgtactaaatggattaggctcttcatttctttgtgggggaaagaggagccaagcccttttgggtgccagcattggggccaaaggctcgccctcccctactgctggaactagaaagttgatcgttgtggcagccgccgcacctaaaaagtcttggatccctgctgttagaggtggtggcaacttcattgaccctgaatggctcgatggatcgctccctggagactacggatttgacccactaggtcttggaaaagacccagcattcctcaaatggtaccgagaagctgagctgatccatggacg

SEQ ID NO: 7839 - DNA, 344 bp, Gossypium hirsutum
  unsure (1)..(344): unsure at all n locations; Clone ID: LIB3120-024-Q1-K1-F2
gctntaacaaaagagaagaaaaagcaaatggaacacaagcagttcaaagggcacgtgatacttgtgccatgcccaagccaaggccacatcgaccctcttctccaatttgctaaacgtttagcctctaaaggtgtcaaggcaacactagccaccacccactacacattcaattccatatgtgcagctcacattggggtcgaacctatatctgatggattcgatgaaggtggcttttctcaagctggaaatgtagacttttaccttaagtcattcaaggaagaagggtcccgatcgctgtcgcaaactaatccaaaatttaaaagactctagcacctctgttacct

SEQ ID NO: 7840 - DNA, 300 bp, Gossypium hirsutum
  Clone ID: LIB3120-024-Q1-K1-F3
gatcagtgagactcttttgtatacctgtagcatatagtaatagtaagcagtaatagcaatgggctcctccatgatctcatcggcgaccattgccaccgtgaaccgctcctccccggcacaggccaacatggtggcccccttcaccggcctcaaatctgcctctgctttcccagtcaccaggaaggccaacaacgacatcacttctcttgcaagcaacggtgggagagtgcaatgcatgcaggtgtggccgcctcttgggaagaagaagttcgagactctctcatacctgcccgatcttac

SEQ ID NO: 7841 - DNA, 179 bp, Gossypium hirsutum
  unsure (1)..(179): unsure at all n locations; Clone ID: LIB3120-024-Q1-K1-F4
ggttcctcaatctctctaatcctcactttcttccccatcaaacacaccttcgattttcccaaggttgtagaagatggcagaaggtgaggatattcanccacttgtttgtgacaatggaactggaatggttaaagctggatttgctggggatgatgctccccgagccgtattccctagca

SEQ ID NO: 7842 - DNA, 339 bp, Gossypium hirsutum
  unsure (1)..(339): unsure at all n locations; Clone ID: LIB3120-024-Q1-K1-F5
tttccctcttcaaagaaaatgcgtgagatccttcatattcaaggtggccaatgcngcaaccagatctgagccaagttctgggaaggtgtttgtgcttaccatggcatanatgcaactgggcgttaccaaggagacttggatcttcaacttgagcgaatcaatgtctactacaatgaagccagttgtggtagattcgttcctcgtgctggtctcatggatcttgaacctggaaccatggacagcatcagatctggccccgtcggtcagatttttagaccagataacttcttttttggtcagtctggtgctggtaacaactgggctaagggccattacact

SEQ ID NO: 7843 - DNA, 389 bp, Gossypium hirsutum
  unsure (1)..(389): unsure at all n locations; Clone ID: LIB3120-024-Q1-K1-F6
cccacgcgtccgctttcccagtcaccaggaaggccaacaacgacatcacttctcttgcaagcggcnntnggagagtgcaatgcaggcgcgtgtggccccctcttgggaagaagaagttcgagactctctcatacctgcccgatcttactcccgtacagttggctaaggaagtagattaccttcttcgctctaaatggattccttgcttggaattcgaattagaggagggattcgtgcaccgtaagtactcgagcttacccacgtactacgatggacgctactggaccatgtggaaactgcccatgttcgggtgcaccgactcggctcaagtgttgaaggagcttgaggaatgcaagaaggaataccccaatgcattcattaaaatcatt

SEQ ID NO: 7844 - DNA, 346 bp, Gossypium hirsutum
  unsure (1)..(346): unsure at all n locations; Clone ID: LIB3120-024-Q1-K1-F7
tgaaggaaaaaaaagtgataatcaacttgtcggaaggaagaagatatgggaagcgagtcatgggaggaagccattgcagctttggcgaancttctcagtgacaaagctgatctcgggagtgtcgccgccgcaaaaatcaagcagataacagccgagttagaggcagctgccgattccactcagttcgacccggtcaagcggctcgagaccggtttccttcacttcaagaaagaaaaatttgacaaaaaatcctgatctgtacggtgcacttgccaaagggcaaagacctaagttcttggtatttgcatgctccgactctcgggtgtgcccctcccacatcctgaat

SEQ ID NO: 7845 - DNA, 320 bp, Gossypium hirsutum
  unsure (1)..(320): unsure at all n locations; Clone ID: LIB3120-024-Q1-K1-F8
gtgagagagaagaaaatcttaagaggccgaagatgccagctggtcacggtctacggtctcgagcaagggatttgttcggcagacgctttanaaagaagggttacattcccttgtctacttacctcaggacctacaagatcggcgactacgtcgacgtcaaggtaaacggtgccgttcacaagggtatgccccacaagttctaccatggtcgtactggtcgagtttggaatgtcacaaaacgtgccatcggtgtcgaagtcaacaagcaggtgggaaacaggattatcangaagaggattcatgtacgtgttgagcatgta

SEQ ID NO: 7846 - DNA, 334 bp, Gossypium hirsutum
  unsure (1)..(334): unsure at all n locations; Clone ID: LIB3120-024-Q1-K1-F9
cccacgcgtccgcccacgcgtccgagcagaaccagatttccgttgcggcgttgcttttagccgttttaaggaaatccatggtgggctgtcntgttgatggagaagatgaagcgatgcattccgccgttaataacatggaaatcgggtggccaaccaacgtacgacacgtaagccatgttacctttgatcgcttcaatgggttcttgggtcttccccttgaattccaagttgaggtaccgggtcgggttccatctgctagtgcgagtgtgtttggcgtctcagcggaatcaatgcaatgctcattggatccaaaaggaacagcgtcccactatac

SEQ ID NO: 7847 - DNA, 319 bp, Gossypium hirsutum
  unsure (1)..(319): unsure at all n locations; Clone ID: LIB3120-024-Q1-K1-G1
ntcgccacgcgtntcgccacgcgtntcgccacgcgtnctgccacgcgtnctgccacgcgtnctgcgacgcgtggcgccacgcgtgcgcacgatgagctctgccgctgtcgctatcccatctttcaccggccttaaagccggtgcaaccgcagctaaagttagcgccacagccaaggttgcagcctctccagtcccaagggtcagcatcaaggcctccctcaaagacgtcggtgttgctgttgcggcaactgctgcaagcgcaatcctttgccacaatgccatggccattgaagtcttgctccggcagtgacgatggggg

SEQ ID NO: 7848 - DNA, 330 bp, Gossypium hirsutum
  Clone ID: LIB3120-024-Q1-K1-G10
gatttgtagcgttcaagagggcgcttatctatctcagaaatagcagtaattaatttttgaggaaaaaatggcggcaggagcaggatcagcttccatgtcggccaccgccgtcttgattccacgtgttcctgcagccgttagaacaacccactgttccgccttgccgcctgtccctcctcgcgtttccaccgcttccttttcctcgtccgttaagctaactccagaatcccggaggtttccttttctccaaacaaaagcaacagaagacacctctgtcgataccggggagctttttgatgacttgaaagaaaaatgggaataaagtgagaa

SEQ ID NO: 7849 - DNA, 100 bp, Gossypium hirsutum
  Clone ID: LIB3120-024-Q1-K1-G11
gccactcgtgccgtcaatggcttaaatcaacagggggcgccataccaactttattgcctacggcaacacctcatcttttatcggtcgtataaaacataca

SEQ ID NO: 7850 - DNA, 362 bp, Gossypium hirsutum
  Clone ID: LIB3120-024-Q1-K1-G12
gagagactgaaagaaggcttcgtttacttcaagaaagaaaaatatgaaaagaatcctgctctgtatggtgagcttgccaagggtcaaagccctaagtatatgattgttgcctgctcggactctagggtctgcccatctcatgtgctggacatgcaacctggtgaagcttttgtggtccgtaatgttgctaacatggtgccaccatatgaccagattaaatatgctggcattggatctgctattgaatatgcagttttgcatctcaaggtacaagaaattgtggtgattggacacagtgcctgtggtggaatcaaggggcttatgtctttcccatttgatggaaacaactcaactgatttcat

SEQ ID NO: 7851 - DNA, 320 bp, Gossypium hirsutum
  unsure (1)..(320): unsure at all n locations; Clone ID: LIB3120-024-Q1-K1-G2
cccacgcgtncgctgtaaatcaattcattgattagcaatcattcaacatttctctctcaaacgccattcgtttacgttcttaaattcattggtcctgcttctgtataaacccaaagaaaaagttcaaagcttttaccggaaaagaataaaaaagctaaaaaaatgggttctcttcagctttttcacagcttttcgcattcagtttctgcggcgaccaatctccaccgcccgttaaacaaagggagagtgaatgcatctctaaacatggacgtggaagcaccgaatccattgaaattgaagtcgaatggaagcaatgaagt

SEQ ID NO: 7852 - DNA, 312 bp, Gossypium hirsutum
  unsure (1)..(312): unsure at all n locations; Clone ID: LIB3120-024-Q1-K1-G3
cccacgcgtncgcccacgcgttcgcccacgcgttcgcccacgcgtccgcccacgcgttcgcagattctctgaacatcaatacccccattaccccatcaatcataccattcattttcattctttctctaagaaacaagctctcagagaagacaatggtgggttttgaacaatgaagaagaagagaaagtgtgggttatgcttgttccatggcctgccattatgcttactatgcttccttttcaccttcagtaacattgagaggctttggcgccaagaacagagaatccaggcccttttcaagtacaatctttc

SEQ ID NO: 7853 - DNA, 362 bp, Gossypium hirsutum
  unsure (1)..(362): unsure at all n locations; Clone ID: LIB3120-024-Q1-K1-G4
cgatcctcaacggtgttttgtgattaaaaaaacgaccaagattgtggcaaaacaagatggctggcctgcatgaaccatggctagtggagaacgggttgaaaggatctagcaaggagattcgccatggcaggactgcacacaacatgtcgtcttcgtcattgcggaaaaaatcggacctgacgctagtttccaaggttcggtatgcaatgcttaggcagttcctcgccaatcttcaagaggtcatattagggaccaagctctccgntctcttccctgctattccattggccattgttgctgagtgttatggatttggaagaccctgggtgtttgcattaagtttacttggacttacaccattg

SEQ ID NO: 7854 - DNA, 404 bp, Gossypium hirsutum
  Clone ID: LIB3120-024-Q1-K1-G5
cccacgcgtccgctacaaccccattttcagtctttcactccattcaccaaaaaccaatggctggcttatcggtcaacctgtgctggctgcagcacacctccatcaaccctcttatcctacgctgcacccctctgaacctacgcaccccatcccagaaaccattctccattaggtcccaagccgccccagtgctttcccaagatgatcttaaaaagcttgcagctgacaaagcagttgagtcagtcaaatcaggcatgatcctaggcctaggaacaggatcaacagcagcttttgtggtcgacaaaataggccaactcctttccacgggccaactttctaacatcgtaggtatcccaacttcgaaaagaacacaagaacaagctgcatcacttaacattccctta

SEQ ID NO: 7855 - DNA, 377 bp, Gossypium hirsutum
  unsure (1)..(377): unsure at all n locations; Clone ID: LIB3120-024-Q1-K1-G7
caaagttgggggagcaggtgaaagcagtanaagttgcaggctgtgattggatccatgtttatgtaatggatggccgatttgttgcaaacattacaattgggcctcttgtggttgatgctttacgacctgtgacggatcttccgctggatgtgcatttgatgattgtggaacctgagcaacgagttccagatttcatcaaggctggagcagatatagtcagtgttcactgtgaaacaatcttcaaccatccatttgcatcggacgcttaatcaaattaaaaggtctgggtgctaaagcttgagtagtcctaaatncgggcaaccccacttactacaatagaatatgtactagatgtgggtgatctagtcttgattatg

SEQ ID NO: 7856 - DNA, 334 bp, Gossypium hirsutum
  unsure (1)..(334): unsure at all n locations; Clone ID: LIB3120-024-Q1-K1-G8
tcgcccacgcgtncgcccaggcgtgcgcccacgcgtccggtgagactcttttgtataactgtagcgtatagtactagtgaggagtaagagcaatggcctcctccatgatctcatcggcaaccattgccaccgtgaactggttctccccggcacaagccaacatggtggcccccttcaccggcctcaagtctgcctctgctttcccagtcactaagaaggccaacaacgacatcacttctcttgcaagcaatggtgggagagtgcaatgcatgcaggtgtggccttctcttgggaagagaagttcgagacactctcatacctccccgatcttaca

SEQ ID NO: 7857 - DNA, 326 bp, Gossypium hirsutum
  unsure (1)..(326): unsure at all n locations; Clone ID: LIB3120-024-Q1-K1-G9
ttttctttttaaaaaatttacagagcccacctccccattttttcttcttttcctctgctaggtgttcaaagcctagcttgcgccgaaataaaaagaaacaaaataggttttcaatctttctctgctagggcaaaagagttagcccatccttgcagctgctccgttgtgcgcacaccaacgatggcggccggaaaaaaaatcaacggctttgaaggaagtgatgggatggagcagaggagtcaagcttcgggacgaagcgcangtggtgcgcccgagggaggagcagcggcagctcttaagctagggnttctttttttttttttttt

SEQ ID NO: 7858 - DNA, 254 bp, Gossypium hirsutum
  Clone ID: LIB3120-024-Q1-K1-H1
ctttgatcccatcatcttcacaaaaccaagctttgtaagcacaaacaagcaaattcactagccacccatgtccctattctcaatggcaatggcaacccaagcctccctcttcactccatcaaccctccgcaccccaaaatccggcgaccgcatcgccgccgtgttacggaaacaaccaccattcctaacactccctagcttcaagtccccaaaaatcatcatcgccccacgcaccatcaaagccgaagcaaccg

SEQ ID NO: 7859 - DNA, 293 bp, Gossypium hirsutum
  Clone ID: LIB3120-024-Q1-K1-H11
cccacgcgttcggctctgtgctgatcacggtccctgtgtctctggtgcgcacaacactatagtgactgcaagagctgggaaggaccttgtatccagtcttgtgtcaggtttgcttacaattggtcctcgctttggtggtgcaattgatgatgctgcacgatactttaaagatgcttacgataggggtcttacaccttatgaatttgttgaaggcatgaaaaagaaaggcatccgtgtacctggaattggtcacaggatcaagagaggggacaacagagataaagagtagagct

SEQ ID NO: 7860 - DNA, 225 bp, Gossypium hirsutum
  Clone ID: LIB3120-024-Q1-K1-H12
actgtacactgcagacattccggattaccgacgcgtccacgcatgcgtacaatcaagcgttctagagaggcctcaagagcatggctctctcttccccattatttgccggtaaggcagagaagttctccccttacacccctgaaatccagggaactggccgtgtttccatgaggaaaaccaccaagcctgttccttctggtagcccatggtacggtcctgaccgag

SEQ ID NO: 7861 - DNA, 333 bp, Gossypium hirsutum
  Clone ID: LIB3120-024-Q1-K1-H3
ctctcctctcatacttcactctaacattccctttgaggttttaggaaaacagcagagaaattgaggaatggagaccttcctatttacctcggagtctgtgaacgagggacatcccgacaagctatgtgatcagatctctgatgcagtcctagatgcctgtttggcacaggatcctgagagcaaggtggcttgcgagacctgcagcaagacaaacatggtgatggtgtttggtgagatcactaccaaagccaacgtagactacgagaagatcgtgcgtgacacctgccgtggcatcggtttcacatctgacgatgtgggtctggatgctgacaa

SEQ ID NO: 7862 - DNA, 259 bp, Gossypium hirsutum
  Clone ID: LIB3120-024-Q1-K1-H4
cattgcttaggagaaaagagaaaaaaacaatgtcaggtcctcagtgctgttcgaatccaccaacattggattctgcaagtggagctggtcacgttgagaatcttgctggtctcaacacttatgtttctgggtctcttcaatctaagcttgctgtttttcttatctctgatattttcggatatgaggctccaaactttagaaaactcgcggacaaggttgcagcctctgggttctatgtggtggctcctgacttctttta

SEQ ID NO: 7863 - DNA, 257 bp, Gossypium hirsutum
  Clone ID: LIB3120-024-Q1-K1-H5
ctgaaagcaaagaaaaaatggcaacggagatggcccttgtaaagcctatctccaaattcagtacaagcagtccaatttttagcaactcccgatatgggaagttcacgaccgtcagaatgtcatctacttcccaatcaacagcaaaggccgccgcgaagggtggcaagaaagctgccaaaaccgccatcaaagagacccttttgacaccaaggttttacaccaccgactttgatgaaatggaagcgcttttcaacact

SEQ ID NO: 7864 - DNA, 247 bp, Gossypium hirsutum
  Clone ID: LIB3120-024-Q1-K1-H6
cccacgcgtccgcccacgcgttcgggggaatcgaagtgggtctggctcacggcttcctcctggttggtgcattcgtaaaggccggccctctaaggaacactgcggtggcgggtcaagctgggtccttagccgctgccggtttggttgtgatcctcagcatttgcttgacgatgtatggtgttgcgtcgttcaaagaaggtgagccatcgatagcaccgagcctaaccctgactgggaggaagaaaga

SEQ ID NO: 7865 - DNA, 64 bp, Gossypium hirsutum
  unsure (1)..(64): unsure at all n locations; Clone ID: LIB3120-024-Q1-K1-H7
nncgccacgcctnccgtttggtttcaatttccctttggcccttttcttttttctaaggtgtaag

SEQ ID NO: 7866 - DNA, 311 bp, Gossypium hirsutum
  Clone ID: LIB3120-024-Q1-K1-H8
cttacgcgtgggctaatacccactactagcaatggcttcctcaatgatctcatcggctaccggtgccactgccggtggggcacaggctaacattgtctctcctttcaccggcctcaaatctgcctctgctttcccagtcaccaggaaagccaacaactacattacttctctctcaagcaattgcttcatagtgcaattcatgcatgtgtggccttctacttgaaataataagtttgatacttctttatacctccctcatcttacacccgttcatttggctaaagaaagtgattaccctttttttcttaaaa

SEQ ID NO: 7867 - DNA, 332 bp, Gossypium hirsutum
  Clone ID: LIB3120-024-Q1-K1-H9
gctaattgagctccatttccctagtaaacagagttctttttttcacagcaatggcagccatgaactccagtgttttggcatgcaactatgctatctcaggcactggatcatctgagcttaatgccaagcttgcttcagcaccatcagttgcttccccagttatgtgcggtggtcacaagttgcctgtgatcagagcccagcaggctaaattttctgattccaaaggatcaggtgccagtgaaggaagaagagctgctatgctctacttggcagctgggcttttcaccacagcttgtgcttcttctgcaaattgctgggtcattgacgagtac

SEQ ID NO: 7868 - DNA, 157 bp, Gossypium hirsutum
  Clone ID: LIB3120-025-Q1-K1-A1
aaaagatgggagacgtaggaacttcccatttgtgacaatggcttgtgtacaaaaatgggggctttgacgatccatgaatggcacgtggtctgcacaggtcttactacagacgcatatgaacctccctatgataaccagttgaagttttgtgccacta

SEQ ID NO: 7869 - DNA, 437 bp, Gossypium hirsutum
  Clone ID: LIB3120-025-Q1-K1-A10
cccacgcgtccgcccacgcgtccgtgttgtttggctttggtttctctgtaggagctgaggaaaaaaatgtcgggggatggaactgacaactcaacttctaagaagcctccaagtccttctcctttgagattttccaagttttttcagtccaacatgagaattcttgttactggtggagctggattcattggctcccatttagtggataaattgatggagaatgaaaagaatgaggttattgtcgtcgataactactttaccggcacaaaggacaatctcaagacatggatcggacatacgagatttgagctcattcgtcatgatgtcactgagccgttgctcattgaggttgatcagatctaccatcttgcttgcccggcttcgccaatcttttacaaatacaatcctgttaagacaataaagacgaatgcgatcgg

SEQ ID NO: 7870 - DNA, 436 bp, Gossypium hirsutum
  Clone ID: LIB3120-025-Q1-K1-A11
gaactaatcatctactaaactttaaccctttttccatttgcaacagagagtgaatacatggctacctccagcatggcatcagctgcttcagggttcttgctcacacccaatgtcgcagcgaattcaagctccacttctaagaccaccaccgtgtttttcccttcaaagaacaacaacaattccaggcttgtggtgacgagggcagctgacgaggctgctgcaccagcaccagctaccaccactgcaccatcagaaggcggtgaagcccctaaacctaagccaccaccaattggaccaaaaagaggaaccagggttaagattcttagaagagagtcctactggtacaacagctttgggtcagttgttacagtcgaccaggaccctaagactcgctatccagtggtggttcgattcaacaaagttaattacgccaatg

SEQ ID NO: 7871 - DNA, 348 bp, Gossypium hirsutum
  unsure (1)..(348): unsure at all n locations; Clone ID: LIB3120-025-Q1-K1-A12
gaactaatcatctactaaactttaaccctttttccatttgcaacananagccgatacagggctacctccagcggggcatgagcttcttcaaggttcttgctcacacccaatgtcccagcgaattcaagctccacttctaagaccaccaccgcgttttttccttcaaaaaacaacaacaattccacgcttgtggtgactaaggcaacttacgaagctgctgcaccagcaccagctaccaccactgcaccatcagaaggcggtgaagcccctaaacctaagccaccaccaattggaccaaaaaaaagaaccagggttaatattcttagaagacagtcctactggtacaac

SEQ ID NO: 7872 - DNA, 436 bp, Gossypium hirsutum
  Clone ID: LIB3120-025-Q1-K1-A2
aaaagatgggagaagtaggaacttcgcatttgtgacaatggcttctggtgaagcagctgaggctgctatcgataaactcgattctcatgaagtgtcggggagaattattagggtagagttttcaaggagactgaagaaaccttcgccgccttctttggagccaatggttccttcccgtgagacacgccataagctttatgtctctaaccttgcttggaaagctaggtctactcacctcagagaatttttctctgcctttaatccggcttcagttaggcgtgttttttctaacccgtcgggacagtctgctcggtatggctttgtttcctttgccacactggaggaagctgaagctgctgcatctactctagatgggaaggaattgatggaccgaccaatacttttaaaatcactgaaaagaaagatgatgaatctg

SEQ ID NO: 7873 - DNA, 419 bp, Gossypium hirsutum
  Clone ID: LIB3120-025-Q1-K1-A3
aaccaatggcttccacttcagcagtttcaatggctctgccactaactcgtgctacccaaaacagggtgcctgcctctgaagctttctttaagccattgccacgcaagccatcgggggcaatcccaactacaacatccaatggaaggcttcaagtcaaggctgctgcttcttcactcaaggacaaggcagtcacaggattgacagcagctgcaatcactgcatccatggtgatccctgaggtagctcaagctgctgatggagtttccccttctctcaagaactttttgcttaacattgtggctggtggtgttgtgcttgttgccattgttggagctgtaattggtgtgtccaacttcgaccctgtcaagcggacctgaatcatataagctctcagatgctactatgctatgaatcttttt

SEQ ID NO: 7874 - DNA, 297 bp, Gossypium hirsutum
  Clone ID: LIB3120-025-Q1-K1-A4
atgagcctttcttaactaacacgtgcttgccgtttcttcggtgagaaagcattaaccttggtggggcagtttggttttcaggctactcaaaataacacgatgcctggagctactgcttcatacctcgagcgaacagaccattggacattgtctgtaaattgatcttctactagacacaatgctggttaacgctgggatatgagatgctgtaacaagatctacttgatcgctgatgcggtaggcatgaagatatataggtgtatacagaatgctcgccctgacacacccatacttgat

SEQ ID NO: 7875 - DNA, 423 bp, Gossypium hirsutum
  Clone ID: LIB3120-025-Q1-K1-A5
gtttttcttcaccttcagggaagggtccttctcaacctgcccctaggtttattgggaatgtgatagcttttgtgcttaacttggtaaggactcttccgtatatacaatgcctttgttatggaaagggcaactatgcaaattattcttatagtcttcattttcttaagattggaccaaagggtccggaatttgctcgatattcacttgactaccatactataaggaactatttatatgtgaatcgcacctggggaaaacaaaggtaaattctactgaccaactaatttataatacactcaggagcagagttgtttttaattatgaaaacatcaaatgtgtgcagagttgatagacatattccttcatacgcaaagaaactcgtggatgcttacaaccagaatggtgttattgatcaaatgctta

SEQ ID NO: 7876 - DNA, 443 bp, Gossypium hirsutum
  Clone ID: LIB3120-025-Q1-K1-A6
cttacaactcagcgtctccactctctttctctcttcgcctccaaatggcttctgccaccacttccaccactttttccctcctcaaaaccaccgcctccaccacctcttcctccgcctcccgctcttctgcatccctcatccgccttccctccactcgccgccacctcaaatcctcttctctcatccacagcctaggcttctcctccgctgcttctggggactctctgctttccctccatgcctcctccaaagttcgatctttcaagggaaaagggtcaagaggggttgtttcaatggccaagaagagtgttggggacttgactgccgctgatttgaaagggaagaaagtgtttgtgagggctgacttgaatgttccattggatgatagccagaacatcactgatgacaccaggattcgtgctgctattcccaccatcaagcat

SEQ ID NO: 7877 - DNA, 419 bp, Gossypium hirsutum
  Clone ID: LIB3120-025-Q1-K1-A7
cgattcccggattcgcgccacggccccacgcgtgacggccacacgtacgaacttgccatctgcgacactggcttatggtgaagcagctggggctgctatcgataaactcgattctcatgaagtgtcggggagaattattagggtagagtttttacggagactgaagaaaccttcgccgccttctttggagccaatggttgcttcccgtgagacacgctataagctttatgtctctaaccttgcttggaaagctaggtctactcacctcagaaaatttttctctgcctttaatccaggttcaggtagggttgttgattctaaccggtccgaacagtctgctgggtatggctctgatttctttgccacaatggatgaagctgaacctgctgtttctactctagatgggaaggaattgatgg

SEQ ID NO: 7878 - DNA, 423 bp, Gossypium hirsutum
  Clone ID: LIB3120-025-Q1-K1-A8
gcgcccacgcgttcgaccacgcgttcggcaaaatccaaaaaggaaaaaaaaagaagaaaaaggtcctccaaaaatggcgacttcagctactacactcagttcactttccttcttctcttcttcccttttcctctcctatccgggctctaaactctgaacttccctttccttctctttgaaacctttttcaaatccgtctctttccatttcttcccaactttccactctacccattttgtccttcaccggcgaaaaaatcggcgaaacttatctcgacctcaaatcagcccctcccgaaaccgctagagccggcgttcaccgagcaatcatcactgacttacaaaacaagcgtcgtggcacagcttctacactcactcgtggtgaaagtccgcgtggaagaaaaaaaccttaccctcaaaagaa

SEQ ID NO: 7879 - DNA, 321 bp, Gossypium hirsutum
  Clone ID: LIB3120-025-Q1-K1-A9
cccgaattgccgcgcatccatccacacctaacgaccacgcgttcgaacactcgtacggcctctcttactaactggtcctacatggggcaaggtgccacactatggggcgctgcatatcacactgtaccacatgcaataagctgtcttcttcactgcgacataaagaggaaccatacacttttccgctcttgcattggtacccaatgataaccctatcatggcgctgacactagatagattcactatatggcagccgccccatcacgtaagtcttgccacacatgtgatgaacgatgttgctactaacttgacccatactga

SEQ ID NO: 7880 - DNA, 403 bp, Gossypium hirsutum
  Clone ID: LIB3120-025-Q1-K1-B1
aaccaagagacggtttgacaactacgggaagtacgggctgctgtgtgggtctgatggggtgcctgatttgatagtaagcggtgagcagaggcactggggtgagttcatcacgcctggtctcttgttcttgtacatcgctggatggatcgggtgggttggaaggagctacctcattgctattagcgatgataagaagcctgccatgaaggagatcatcattgatgtgcctttggctaccggtcttatatttagaggctttatttggccagtcgctgcttacagagagcttatcaatggtgaccttgctgtcaaggacgtttaatctcctcagggatcgaatggaaggacttgaactccaacgaatatctagggaagaagatgggagtgcttttagactgaatat

SEQ ID NO: 7881 - DNA, 433 bp, Gossypium hirsutum
  Clone ID: LIB3120-025-Q1-K1-B10
cccacgcgtccgctgaacgaagaccaagacctagaatttgaatctgaagaacgtgataggaatgatgaggaagatgaagaagattattatggtggttatgggagtgagaacggggaagagggaagtcctaaaaatttggattcggaggttgtcgccgaaaataccgaggttaaaaatgtgaagttacccaatctaacggttaaggaaaagaaagagctggcttcttacgctcatggtttatggaagaaattgaagtgtcaactggtgggcaaatctggtgttactgataatgtcattttctcttttcttgagactcttgaagccaatgagcttctgaagatcaaaattcaccggacctgtcctggacagctacaggatgtggtgagccaactagagcaagcaacccgttcagtcgtcgttggacaaattggtc

SEQ ID NO: 7882 - DNA, 136 bp, Gossypium hirsutum
  Clone ID: LIB3120-025-Q1-K1-B11
atccggggtgtgtgtacgttgctttgtgcttcaaaatatttctttctgggtcggtgttgcattgctttcctttcgcttttttctttttaaaaacctttaattatttggggggtgggatttagcctgggaatggccc

SEQ ID NO: 7883 - DNA, 438 bp, Gossypium hirsutum
  unsure (1)..(438): unsure at all n locations; Clone ID: LIB3120-025-Q1-K1-B12
cccacgcgtccggaaacccaatcttctctttcttttcttctgggagtgaagctgaaacgtcttgttggtgcggaggaggggtgagagatctgagtgatgggaggaggcaatggccagaaatcaaggatggctcgtgagaaacacgtggagaagaacaaggccgctaaaggtagtcagctggaatcaaataagaaagccatgacgatccaatgcaaggtttgcatgcagacattcatatgcaccacatcagaggtgaagtgcagagaacatgctgaatcaaagcacccaaaatctgacatctatgcttgtttccctcaccttaagaaatgaatgaaattatccattaaggaaaaaataacaataatagaagtagcaggttggacttgaggttccatntcttgtattntatgtcattacgtcccgcaatcgtattggatc

SEQ ID NO: 7884 - DNA, 439 bp, Gossypium hirsutum
  Clone ID: LIB3120-025-Q1-K1-B2
gagaaatcggacggttcgatgcagaacagttcgctccaaggtttcctggtaatggtgtttccctgacactcggtcttccgcactgggaaaacctttccttatctggatcccatcagaatttgatcccaaaccaaacaatgcaaatggggagaaggctagacattgatgaaccaaatgagtttggtgccataaaccttcccacacctcactcttcggctgcgtatgagagcatcaaccttcataacagaaaaaggtttgtagcccaattattaccggacttcgtcgcctgaagaacgtgattcgaaccagacaaacatatatatctttcactattttcatttctatccattagggaacaagggaaatgcatggtatagtgtaaagaagaaatttctcctagtataggctttatactttgcatagcgcaatttgagtcctt

SEQ ID NO: 7885 - DNA, 393 bp, Gossypium hirsutum
  unsure (1)..(393): unsure at all n locations; Clone ID: LIB3120-025-Q1-K1-B3
accatgttcttgatgaatcaactcagtatagcagtgatctccggccaacagcaaagcagctctggaaatcgtcaattggtgttttagaactcggaattttgaatgccgacgggctccagccaatgaaaactagggacggaaaaggtgcatctgatacatattgtgttgctaagtatggccataaatgggttcgaactcgaaccatagtaaatagcttgaatccgaaatataatgagcagtacacctgggaagtttatgatacagccacggttctcactgtgggtgtctttgataactctcagattggaggttccgataataccagagataacaaaatcgganaggtacggattcgcatatctacactgganactggtcgtgtntacacacact

SEQ ID NO: 7886 - DNA, 385 bp, Gossypium hirsutum
  unsure (1)..(385): unsure at all n locations; Clone ID: LIB3120-025-Q1-K1-B5
cccacgcgtccgcttcttgcgatgatgagacgtgagttttcggagatttatgatccaaaaaggacggtctataatgacttcgatgaaacttttaggcagcttaggagggaggcagaagctagggctgaggagttaaagaaatcaaaacagacggataagcctgtcaataataaaaagaagcaagggcaggtgcagaaagctggttctgataaaggaagtaagaagagtgagggtagcttggctactgatggtggggatggtgataaagcgaaaggtcataaattggagaatggacactccaatggtaatcatgttgagatggaagaacctanggcaggtgttgttaatggtaaagaaaatactagctccatattagtgctttgat

SEQ ID NO: 7887 - DNA, 442 bp, Gossypium hirsutum
  Clone ID: LIB3120-025-Q1-K1-B6
ggaaagactcttttctctgagtactacaaaaaccctgaactgacaagagaatctttcggggatggatggtttcatacaggagacataggccaaatgcttcctaatggaattgttaaggttattgataggaagaaaaatcttattaagctctcccagggagagtatgtcgcactagagtacttggaaaatgtttacggagtcactccaatcatcgatgatgtatgggtctatggaaacagcttcaaatcaatgctagttgcagtggttgtgctacatgaagaaaaagctaaaaaatgggctgagttgaatggttacactgtttcactctttgagctctgttctctgagtaagcttcagaattatgtcctctcagagctcaaatccacagctgataaaaacaagatgagaggttttgagtatatcaaaggagtgattttggaag

SEQ ID NO: 7888 - DNA, 418 bp, Gossypium hirsutum
  Clone ID: LIB3120-025-Q1-K1-B8
tgtccgtctcacttcaagctgcagctaccctgatgcaaccaatcaacgttgcggcaccggcaatgaccaatgtgctgctgaagtccttccagagcgtttctaacgccttcggtttggagcctgttggtgctaggctcacctgctctttgcaaactgacctcaaggacttggctcatacgtgtgttgatgctaccaagctcgctggtttcgctcttgctacatctgctcttgttgtctcgggagcaagcgctgaaggagttccaaagcggctaacctacgatgaaatccaaagcaagacatacatggaagtcaaaggaacaggaactgctaaccagtgcccaaccatcgatggtggtgtcgactcttttgccttcaagcctggcaaatactacgccaagaagttctgcttggagcccac

SEQ ID NO: 7889 - DNA, 433 bp, Gossypium hirsutum
  Clone ID: LIB3120-025-Q1-K1-B9
gaaagtttgtgtgctcttttggaatcttctggaaccaccatctcattggcgaagcgggcggcggtgctgcttgcgggccttctttctgaatttgaaggtgtagtgtcttcggcttcgttgtcctcaactcgtttgccgattcagcgtttggtggaagccttaatcgagtgtgagaatcggcatgttcaaacgaatcaagaagtggtgtacactgctaacctggtggaagatgcgccgctatcacccacggatggttcgacacgaggaggtcgttcggagctgcgtggccgtgggaggaacttccggcagcgtctccagtgtcagatctgcttccgttttggtcacgttgctcagagatgctattaccggtaccaccgtgacgattcttctccgatgcagattcaattgccaaaccctcgtgattatggggatg

SEQ ID NO: 7890 - DNA, 427 bp, Gossypium hirsutum
  Clone ID: LIB3120-025-Q1-K1-C1
cccacgcgtccgatctggagcacggaatatatgaaatggatcacaaagtatttgaactgtgattgatacttaatattcaaacctcgcggccggactcaaaaaaaaaaaattcaaagaaagagttatattatttataaatcgaaagattttttattctttcaaactctcatttagtttatgcttattttgatcaaaggacaaacctttcttttctttgcatttttatttattatatctattctattgattgaataagtgatgatccaatggttcttactcaaagaatctttggacttagtttgaaggttttattgaatcatcgcggttctggtatgaatctgaagtttcaattgattcatagggtcttaacaagagaattcctattcaaacgaaagaaaacaagaatgaagccacatttcatacaaag

SEQ ID NO: 7891 - DNA, 437 bp, Gossypium hirsutum
  unsure (1)..(437): unsure at all n locations; Clone ID: LIB3120-025-Q1-K1-C10
ttctcagtctctctgcagcaatttctgttcgacacaagttgaatcgttcaagggccgtgtctgcaaatacaccgggcaaaatttgtcatacttttcctggaaatggaagatgtcaaaggttaagtttcaagaccaaagctgcgggttcaattgaaggacatgtacttgacaaagaatcagctagtatcagtgacaagatagattatggagttgttggtattcaccatgttggaattctatgtgaaaaccttgaaagatcgcttgatttttatcagaatattttaggtcttgaaataaatgaggctaggccacatgataagcttccatacagaggtgcttggttgtgggtgggttctgagatgatacatttgatggaacttccaaatccagaccccttaattggaagacctgaacatggangccgagaccgtcatgct

SEQ ID NO: 7892 - DNA, 435 bp, Gossypium hirsutum
  Clone ID: LIB3120-025-Q1-K1-C11
cccacgcgtccgttcccatttcctagtcttccacgatgactcccctccacttgttcctggtcctcctcgtcctgctcctttcgtcagctgctttaatctccgccgccgccgccaccaccgcatatccttccatcccgggcaccgattccacaactgattgtggcctatccggaggagacgagaatccagttcccatccgtcgcgaagtctacggtaacggcaagatattcgacatcagccataggtacaccgtcgacatgccgtcttgggaatccaaggacggcgtaggacagttcctatggttgcctaaaagcatgaagaacggttccctcgctaataattcggagatgaaactcccaactcacaccggcacccaccttgacgctcccggacacgtcatcgatcggtacttcgatgccggcttcgatgtcgata

SEQ ID NO: 7893 - DNA, 338 bp, Gossypium hirsutum
  Clone ID: LIB3120-025-Q1-K1-C12
ctggagtacaggctgctaatgcagcaaaaatgagatgcatagctgtgacaacgacattgacagaagagactctaaaacctgctggtccatcaattatcagaaatgatattggaagtgtttcacttgatgatattctcagtggtggctcaggtggttatagtctgttgtcctgagaatatggtgcaaatgtcattttgtaccattaacattgtaaaatgatgatgctttttagcattctttttgttttttttatggaagcacatgatacattcgctcgtgtaatttgtctcctatgtagtggaaaattttcaattctattgataaagtccatccttgtg

SEQ ID NO: 7894 - DNA, 401 bp, Gossypium hirsutum
  Clone ID: LIB3120-025-Q1-K1-C2
cccacgcgtccgcccacgcgtccgcccacgcgtccggtgagactcttttgtataactggagcatatagtactagtaagcgggaatagcaatggcctcctccatgatctcatcggcaaccattgccaccgtgaactgctcctccccggcacaggccaacatggtggcccccttcaccggcctcaagtctgcctctgctttcccagtcactaggaaggccaacaacgacatcacttctcttgcaagcaatggtgggagagtgcaatgcatgcaagtgtggcctcctcttgggaagaagaagttcgagacactctcataccttcccgatcttacacccgtacagttggctaaggaagtagattaccttcttcgctctaaatggattccttgcttggaattcgaa

SEQ ID NO: 7895 - DNA, 375 bp, Gossypium hirsutum
  Clone ID: LIB3120-025-Q1-K1-C3
cccacgcgtccgcccacgcgtccgcccacgcgtccgcccacgcgttcgtcatttttctggggaaacaaaaaacaaaaaagagaaaaaataaagagcaagagatatggcaagcacattctcttataattcttttggattccttctcattcttgtcgcctttagttccttgataaatataagttcagctggtaggcaaattgcccctaaaactagcattgagtttatcagaacatcttgtagttcaacgacttaccctaaactttgttacgaatctctcttaacacaggctagcatgatccaaacaagcccccaactcatcgcccatgcagccctaaacgtgaccctttcaaccgccaagtcaacctcggccatgat

SEQ ID NO: 7896 - DNA, 291 bp, Gossypium hirsutum
  Clone ID: LIB3120-025-Q1-K1-C4
cccaaacaaagaaatttctatgggaaacttgtccttgttcttctaaacgacgtatcttttctttgcctctttccctgtcggcttagggtttccttttttccttttttttttaaagatttcctataccttctacacattagtcttcatcattgattttaaccccccaatctttttatacctaacagtttcaattcgtgcctaattggctaattcctgaaacttgcaatgccgccatttttatcgacctcaaaggcggtcgggtcggtaatatcccgtagaaatgtgattaac

SEQ ID NO: 7897 - DNA, 202 bp, Gossypium hirsutum
  Clone ID: LIB3120-025-Q1-K1-C5
cccacgcgtacgggaatgttcgtaaagggatatgtctactaagctgctgcaaacaaaggggatcggagatgatggagacggcatgagatggcctctctttcattctcattgagagtaatgctctatagaccctggagactactttttgttctggattgccacgtactgctagttaataaacttcttgccgatgagggtactc

SEQ ID NO: 7898 - DNA, 430 bp, Gossypium hirsutum
  unsure (1)..(430): unsure at all n locations; Clone ID: LIB3120-025-Q1-K1-C6
cccacgcgtccgcccacgcgtncgcacaactcctggagctcttcagcacctcagtggtggtattgtctttgaggaaaccctttatgaaaaaaccgcttcgggcaagcccttcgttgatgttttgaaggaaggtggtgtcctccctggcatcaaggttgacaagggtacggttgagcttaatggaacccatggcgaaactttcacccagggtctagatggccttgcacagcgatgccagaagtactatgaagctggtgcccgctttgctaaatggcgtgctgtccttaagattagtgctaatgaaccaaccgagcttgcaatccaagaaaatgccaacgggctagctatgtatgctgccatctgccagcaatgtggccttgtccccattgttgagcctgaaattcttggtgacggatcacatgacattaaa

SEQ ID NO: 7899 - DNA, 332 bp, Gossypium hirsutum
  Clone ID: LIB3120-025-Q1-K1-C7
gtcaaaccttcgctgctggaattcccttttagcaaaagctgtctcaatgatgggcacggtttccaataacactggctatcaatcacaaaatctcatctgcgctcgttacaccgaccacaattatttctatgacctcacatgcgtcaagaatggcaacacctacatttcatatatacaaagctatgataagacactacatagcatgcgggggaggtctcactactgcaaagaagaagttcgagactatatcatacataaccgatcttacacaacgacagtactttaagtgacgatataaatgtgtttgctcaaaatgacctccttgcttgcaa

SEQ ID NO: 7900 - DNA, 428 bp, Gossypium hirsutum
  unsure (1)..(428): unsure at all n locations; Clone ID: LIB3120-025-Q1-K1-C8
gtctctttctagctaaatgccttgactgtttcccaaaactcccatctccttcgcaaatgaagctacatgcaatggaggcttctagtanaaaccattttcagccaaaatttgtccttattataatctttgtcaccttagttgttctcacaataatccctgtactttaccctttgatagggtatcctttatacgtctcaaaagcctcatcttccaggcccttgcccaccaccgcatacgagtctcaacaacccgaacccctgccttcgataaagatatccgaaggagaggactgtgacatattcttgggggaatgggtgccgaaccacgccgcgccgtactacaccaacacgacgtgctgggccatacacgagcaccagaactgcatgaaatatggaaggcctgacactgagttcatgaaatggaaatgg

SEQ ID NO: 7901 - DNA, 274 bp, Gossypium hirsutum
  Clone ID: LIB3120-025-Q1-K1-C9
gccacaccatcgctaatagcatcgactgctatccaaggctaccttaatgatcggaacggatactatttgcaatggctgtttataacacacactcatgtgagctaatatcaccgcccactattatgtctgtgacctcactggcattcacaatagcaactactacctaacttttgttccatgctacgacatgacagttcaaagcatgctcttgaagtctcctacttaaaagaatatatgcagaattctatcatacataccagatcttacataaata

SEQ ID NO: 7902 - DNA, 435 bp, Gossypium hirsutum
  Clone ID: LIB3120-025-Q1-K1-D1
ctcttcctcctcctttcctccgtcgttgcttcggccgtcgtctccgacgttaatagcgacggcgatcctctcatccgtcaagttgtttccgatggtggtgtcgaggaggactccgatgaccatctccttaacgcggagcaccacttcacgctgttcaaatccaagtatgggaaaacctacgcatcccaggaggagcacgattaccgactgggagtcttcaaggctaacctgcgtcgggccaagcgtcatcagctcctggaccccagtgccgtccatggcgtcacaaagttttccgatttaactccatcggagttccgccgccagtatctatgcttgaaaccgctcaagctcccagccgatgctcaaaaggctcctatccttccgactgacaactttaccgatgactttgactggcgtgaccacggcgccgtcact

SEQ ID NO: 7903 - DNA, 434 bp, Gossypium hirsutum
  Clone ID: LIB3120-025-Q1-K1-D11
aattcttatacatgtgaatacgaatccattttcctttttctccgtaatcaatgttctcgtttaccatcaacatcggctggggtctttcttgaacgaatttttttctatggaaaaataaagtatcttggcgaagtcttttataatgattttcagaacaacctatgggtggtcaaagaccctttcatacattttattaggtatcaaggaaagtcaattctggcctcaaaggatacgtctcttctgatcaataagtggaaatattactttgtcgatttatggcaatattatttttacctgtggtctcaatcaggaagagtccgtataaatcaattatctaaatattctctcgactttctgggctatctttcaagtgtgcgattaaatccttcagtggtacggagtcaaatgctagaaaattcatttctaatagataa

SEQ ID NO: 7904 - DNA, 425 bp, Gossypium hirsutum
  Clone ID: LIB3120-025-Q1-K1-D12
gcgaaaccctagccactctctgctcaactcgccaatgggggcttataagtacgtgtcggggctatggaggaagaagcaggcggatttgatgaggtttttacagagggtgaggtgctgggaataccgccagcatccatcaattgttagggtcaaccatcctactcgccctgacaaggcacgccgcttgggttataaggccaaacaaggttatgtggtttaccgtgtccgtgttaggaggggtggtcgcaagaggcctgttcccaagggtatcgtgtatggtaagcccacaaaccagggtgtcacccaattgaagttccagcgcagcaaacggtctgttgctgaagagcgtgctggccgaaagttgggaggtctcagagttgttaactcgtactggatcaatgaggattctacttacaagtactttg

SEQ ID NO: 7905 - DNA, 436 bp, Gossypium hirsutum
  Clone ID: LIB3120-025-Q1-K1-D2
gaaaaaaaaaaagaaaaagaaaaattaaatgaaaggaccatggtctaagcatggaaaagatgagattcttctctccctccattttcagacccccttcggtctcttaacaaccaaagcccattttcctctcagttttttttctttttccttttatttgtgatttaaattcaacacattttaatactactagcaacaggaaaacagggtgagaaaaaaaaaggggggagagtgaggaaaggaaagaaatggaagaagagggagtagggttagcattagcaagagctacagagctgagattgaaaatcagcaactgcatcacaaaagccacctccggaaatcctgtttctccctacaaacaaagccaagaaggaaaacaaactgataaaaatgctagcttgaatggagacaaaccccatcaaactctcggtggagctga

SEQ ID NO: 7906 - DNA, 404 bp, Gossypium hirsutum
  Clone ID: LIB3120-025-Q1-K1-D3
acagtgttcacggtcaatggaagcaccacgagcttaaagtgaaggactcaaagactctgctctttggtgaaaagcctgtcactgtttttggcatcaaaaaccctgaggaaattccatggggtgaggctggtgctgaatatgttgttgagtctaccggtgtcttcactgacaaggacaaagctgctgctcacttgaagggtggtgcaaagaaagtgattatttctgctcccagtaaggacgcccccatgtttgttgttggtgtaaatgagaaggaatacaagcctgatcttgacattgtctccaatgctagctgcacaaccaactgccttgctccgttggctaaggtcatccacgacaaattcggtattgttgagggtcttatgaccactgtccattcaattact

SEQ ID NO: 7907 - DNA, 374 bp, Gossypium hirsutum
  Clone ID: LIB3120-025-Q1-K1-D4
cttcgtgcccttcaacatcacgaagccggattgccttggatgcctgtttcaaccacatggagaaatcttaggaaaatctgcaatttgcatattttcgctactccgaaacttgacgccaatcaatacttgaggcgcagcaaagtagaacaactccttgctggtgttcgtgaaagttccctcataggagaagcgattgagatacgtcaagctgctttcaaaactacgcttagtctcatatcaaatactattttctccattgatttagccgactctactcatacttctgaggagttccgagaaattgtgcagggtatcatggaagagttgggaaaacccaactttggtgattatttccctattgctaatcttgactt

SEQ ID NO: 7908 - DNA, 395 bp, Gossypium hirsutum
  Clone ID: LIB3120-025-Q1-K1-D5
aaaaaaaaaagaagaaaactctgaaaagagttgagggtaaaccctcggagcgccgcggggtctccgtcattgggttccctccgcgcctacgcgtcgacgcgccaccaccaacgccacccagtgcggtggccagaactcgaaaagtctcgactttctgatgtgattctaacgatctctcgcgagaaatccggtgatggaagagtcgctagcgttgatggaggcctgaagtctggtggtggtgtcgatgaggcgctgattagggaggcagagccttgagtgatggctttgattggggagctggacagacgctccccaaaccttccagaacttgttgtggcgcgaggggaaagagaggcaaaaaccctacggtttcatgcctcggtataatggtttgg

SEQ ID NO: 7909 - DNA, 352 bp, Gossypium hirsutum
  Clone ID: LIB3120-025-Q1-K1-D6
cccacgcgtccgagatcgcgagcgccgcccttttttttttttttttttttttttttttggtttcgctttttgggcaagaaactaggtttttattcattagttctcagccggtccattggaaatccaaaacaaaacaaagagaaagacccccagccaaataccttaattaaaaaagaaaaagaaaaagggggggggggtttgaggggcttaatttaagtacaactttgaaacaaatggaattcctaggagggaagtaaacaacttaatagcctttaggcttgtaggcaatgaaactaatgcactgcacttgacgaacgttgtcgaacccaatgattttaatgaatgcattggg

SEQ ID NO: 7910 - DNA, 379 bp, Gossypium hirsutum
  Clone ID: LIB3120-025-Q1-K1-D7
aggaaatattagagggcttggttactataatgcaacaatgggttcactttatgacacattgcatggaaggaagggagtttaaggggcacaaccgagagcggttcttgactggatacagagggcaagaattgctgttgatgccgcaaggagcttggaatattttgacgataaagttcaacctctgattatgcacagagataatacatatagcaatggacttctttatggagacatgaaagcgaacagttctaatggttacctataaaaaccagctcacgacatggatagctcgtcttcattctactcgagtggagggaaccttcggctatcatgcacctgagtatgcaatgaccgggcgagagacacagaagagtgatgc

SEQ ID NO: 7911 - DNA, 394 bp, Gossypium hirsutum
  Clone ID: LIB3120-025-Q1-K1-D8
cccaaccatcgtttatcatggcttcctcaactctctcccctgcagctccttggcagctatgctccagcaagagtggcatgttctgcccatcacgagcgtttcttgtgaaaccagcgaggacccatatggtcaaaaacgaaaagggaatgaggatcacatgccaggccactagcatccctgctgatagagtgccagacatgggcaagaggcagctcatgaatctgcttctgttgggggctatttcactcccctcaggtttcatgttggttccttatgcagccttctttgtgccatctgggggacggcgtaccggtggtggcaccgttgccaaggacgcaatcgggaatgatgtaattgctgaagaatggctcaagactcatggccctggggaccg

SEQ ID NO: 7912 - DNA, 385 bp, Gossypium hirsutum
  Clone ID: LIB3120-025-Q1-K1-D9
aggaaatatccgtgtgcttgcttactagtatgcaacactgggttcactttatgacatggggcatggaagggagggagttgaaggggcacaaccgagtccggttcttgactggatgcatagggtaagaattgcggttgatgcagcaaggggcttgcaatatttgcacgacaaggttcacaccttcgattatccacagagatatcagatctagcacatgtacttctttttaaagacttcaaagcgaacattgcaaattttaacctctcaaaccaagctcccgacatggatgctcgtcttcattctactcgagttttgggaaccttcggctatcatgcacctgagtatgcacatgaccgggcagttgacacagaacattgatgtttac

SEQ ID NO: 7913 - DNA, 432 bp, Gossypium hirsutum
  unsure (1)..(432): unsure at all n locations; Clone ID: LIB3120-025-Q1-K1-E1
cccacgcgtncgccaagatatcgtccccttcatctctgtctactcatcttggtcatctacaccactccttccataggactcctcaatggcaccgagctcctcaaggcggcctgcaaccaaacgtccgactacgcattctgccatgctactttaactgccgaccccaacgcaggtggcccacaagcccttgccggcgaccttgctaatgctgctttacgtttagctcaaaccaaggccacccacgcgcaatccctcatacctgtcctccttcaaaatgccaccacctctttggaccacaaccgtctccaaatgtgccaaagtagcaacaacaaagccatttctcagctctcagcggctaacaatgacttcaactccgactcactcgacaccatggtggaagagaataaacactgctgctcggctactaatgac

SEQ ID NO: 7914 - DNA, 440 bp, Gossypium hirsutum
  unsure (1)..(440): unsure at all n locations; Clone ID: LIB3120-025-Q1-K1-E10
atgagatctaagatgatgggttgtagagaggaacatcagagtactcatggttcggtggggggtgggaagcctaacgcattgtgttatttatccaccaaagtctagcattgttgctgaggaattggaaagaagaaacaatgactggtttgttaggaccaaagttgcaagtgatttaatggtgcaggttggagattttagcttttacttacacaagcttgctatggtttcgaaaagtggatatttgaatagacttgtatttgcaaaaagaagtgagggacatggacaaaatggaggcaacctcaagattgttttggatgaccttcctggtggaaccaacacctttgaatcaattgtcaacttctgctatggatttaacgtggatgtaacaactaccaccattgctccactctattgtgctgcanatttcttggaaatgagtg

SEQ ID NO: 7915 - DNA, 213 bp, Gossypium hirsutum
  Clone ID: LIB3120-025-Q1-K1-E11
tatcacacctacgaccattctttttatttttaaacatcatattactcattaacgcgccctttttacaaaaacctcgccatcgtattatttatccaccatattctaccattttttcttccccatttcaaataacaaactatctctccttttttaccaccaaatttccacctcatctaatacctcaccttctatattttaccttttacttacaca

SEQ ID NO: 7916 - DNA, 390 bp, Gossypium hirsutum
  Clone ID: LIB3120-025-Q1-K1-E12
cccacgcgtccgatttctcaaaaatgagctccattgctttcaagcccttccacggcctgcgccatagctccgccgtccacagccccacttccactaccaccaccctttccaaacctgctgtcaaattccatgtgtcagccgccaaaacttctccaaaactaagcaaccgcaacctcagggtagccatcatagggggtggtccggcaggaggctcagccgccgaaactctcgcgaaggctggcatagaaacgttcctaatcgaacgaaaactggacaactgcaaaccttgcggcggagccatcccgctttgcatggtgggtgaatttgacttgcctttggatatcatcgaccggcgagtcaccaagatgaagatgatttcgccctccaaca

SEQ ID NO: 7917 - DNA, 174 bp, Gossypium hirsutum
  Clone ID: LIB3120-025-Q1-K1-E2
ggtatatcgctgaacctatcgctgcctatcagacttcgttcaaagaatagcatcactcgggcaagggaaaaaaaattcaaggtcgcaacattctatgagactcttttgctgacacatttttcttgccaaatacgttctctctcaccatatcatcttgaataatcccattgctat

SEQ ID NO: 7918 - DNA, 371 bp, Gossypium hirsutum
  unsure (1)..(371): unsure at all n locations; Clone ID: LIB3120-025-Q1-K1-E3
cccacgcgtncggtaggcatcggacctttaatcccatcttctttcttgaactcaaatgggtccttggataattccttgagaaccgatctttttcaatccgattcaaaagattacatccaatggttagactccaaaccaaaatcggccgtcgtttacgtttccttcgggagcattgcggtgttaaccaagcaacaagtggaggaaatcgctcgagctttaatatccagccggcgaccgtttttatgggtggtgaggaactggaaagatggagtcgaagaagagaaagaagaagataaactgacttgcagggaagaattggaacagtttgggatggtggttccatggtgttcgcaagtggaagtattgtttca

SEQ ID NO: 7919 - DNA, 430 bp, Gossypium hirsutum
  unsure (1)..(430): unsure at all n locations; Clone ID: LIB3120-025-Q1-K1-E4
cccacgcgtncggttagctttagcatacactactagtacccactactagcaatggctggctcggggatctcatcggctaccattggcactgcctctccggcacaggctaacatggtcacccctttcaccggcctcaagtctgcctctgctttcccagtcaccaggaaggccaacaacgacattacttctctcgcaagcaatggcggcagagtgcaatgcatgcaggtgtggcctcctactggaaagaagaagttcgagactctctcatacctccccgatcttacacccgtgcagttggctaaggaagtagattaccttcttcgctcaaaatgggttccttgcttggagttcgaatnggaggagggattcgtgcaccgtaagtactcgagcttacccacgtactacgatggacgctactggaccatgtgga

SEQ ID NO: 7920 - DNA, 438 bp, Gossypium hirsutum
  unsure (1)..(438): unsure at all n locations; Clone ID: LIB3120-025-Q1-K1-E5
ctcaaattcagataacaatttcacagttgttttcttcactctctctctcagccatgggtgcaggcatctccaccgtcggcgccgctgccgccaaccgagctctgggagtgtcagtcccaacctcagctttcatggggaagaaagtgagctcgagattcaataacaccaggcaggttccttcgggaagttttaaggtgatggcggccgaaaaagagatagacgaagagacacagaccgaaaaggaccgatggaaagggttggcttacgatatttcggacgaccaacaagacattactcgagggaaagggatggtggattccttgttccaagctcccatgaatgatggaactcactatgctgncatgagttcctatgaatacatcagccaaggtcttaaaacgtacaatttggacaacaacatggatggtttctacatcg

SEQ ID NO: 7921 - DNA, 430 bp, Gossypium hirsutum
  unsure (1)..(430): unsure at all n locations; Clone ID: LIB3120-025-Q1-K1-E6
ggtttttaaagcccggttccaggtgggctgtggggtcgggctttcgagccccacaaggaccgaaacagaggcccagaccctacctctcggaattcggtctcgacgacggagatccgccctccgaaggcggtcacggggcgtccggtaattgatgggtggtggcagtgagtaggtggagcagagggcagacgatgggacgtgacatgcggcgcacatggtcctggcgtgcggcgttggaggagggactagggttaggatttcagttgtgttttactgaaacttagttaatgttttgggtcgtcgggctttgggcttgtaacttgggttttttaatttgggctagtattgtaatgtgaactggactattatttgggntttattattattatttgctttgattctttggccccgggcaaaaatgggtctttcc

SEQ ID NO: 7922 - DNA, 314 bp, Gossypium hirsutum
  Clone ID: LIB3120-025-Q1-K1-E7
cccacgcgtacgaccatttgttgaaagaaaagaaataactttacttacaaaagggccgggggccaaacatttggcatttgaattaattataccaatgaagttaccgtttttttatgggggtaacggataataaatgggcgaccccttgaactggcccgagtccgcttaatcaaagaaaggtagccatttggatgaagtgaaacgtatggatgatgagtacaagaagccagtggttcttcttggtggagacacgttaacgatagctgaagtgacggccatttgcaacagcgacgttacctttaaagttgaactct

SEQ ID NO: 7923 - DNA, 434 bp, Gossypium hirsutum
  Clone ID: LIB3120-025-Q1-K1-E8
cccacgcgtccgcccacgcgtccggtctctaccactgaaagcaaagaaaaaatggcaacggagatggcccttgtaaagcctatctccaaattcagtacaagcagtccaatttttagcaactcccgatatgggaagttcacgaccgtcagaatgtcatctacttcccaatcaacagcaaaggccgccgcgaagggtggcaagaaagctgccaaaaccgccatcaaagagacccttttgacaccaaggttttacaccaccgactttgatgaaatggaggcgcttttcaacactgagattaacaagaaccttaaccagtccgagtttgaggcactgctgcaagagttcaagactgattacaatcagactcactttgtaaggaacaaggagtttaaagaagctgctgataagattgatggtcctttgagacaaatctt

SEQ ID NO: 7924 - DNA, 419 bp, Gossypium hirsutum
  Clone ID: LIB3120-025-Q1-K1-E9
cccacgcgtccgtccttttcaagaaagaaaagaaaaatctttagttccaaaagggcccagacgccaaacattaggcatttgaatcaatggaaccaatggagttacagttttgtaatggcggaaacggttcgtcactgggcgaccccttgaactgggccgcgtcagctcagtcaatgaaaggtagccatctggatgaagtgaagcgcatggttgaggagtacaagaagccggtggttcgtcttggtggtgagacgttaacgatagctcaagtcacggccattgcgaaccgcgacgttcccgttcacgttgagctctccgaggcggctcggccggtcgttaaggccagcagtgattgggttatggaaggaatgaatcgaggtacggacagttatggtgtcaccactggctttggtgcaaca

SEQ ID NO: 7925 - DNA, 384 bp, Gossypium hirsutum
  Clone ID: LIB3120-025-Q1-K1-F1
cccgaagtcccacattcaggaaaactggaggattctggacttcttttcgcaccatcccgaaagcttgcacatgttcaccgtcctgtttgatgacatcggtgttccacaggattataggcacatggatggctctggtgttcatacctacacactaatcaacaaggctgggaagtcacactatgtgaaattccattggaaacccacttgtggtgtaaaatctttgttggaggatgaagccataagagtaggtggtgcgaatcacagtcatgccacacaagatctttatgactcgattgcagccggaaactaccctgaatggaaactgttcattcaaataatggatcctcttcatgaggataggtttgattttgacccacttgatgt

SEQ ID NO: 7926 - DNA, 433 bp, Gossypium hirsutum
  Clone ID: LIB3120-025-Q1-K1-F10
gtgatatttttgaacaagcaaataaaagctctcactacctaaccttcaaaacgccctcgcacctcctttgtgggggagaaaactaaagatcaaaagataggcaactaggaaacaaaaaagataagtgaaagatgtcaactgcttcttcattgtgttcatcaactcagattaatggctttggagggggacttggggttctaagaacccatgtttctcaacccaagacactttcttttacaagaaggagaatttctacggtagtgaaggcaacatctcgagttgataaattctcaaaaagcgatatcattggttctccatctattctctctgctaatttcgcaaagttgggggagcaggtgaaagcagtagaagttgctggctgtgattggatccatgttgatgtaatggatggccgatttcgtccaaacattac

SEQ ID NO: 7927 - DNA, 392 bp, Gossypium hirsutum
  Clone ID: LIB3120-025-Q1-K1-F11
ctattctcaatggcaatggcaacccaagcctccctcttcactccatcaaccctccgcgcgcccaaaatccggcgaccgcgtcgccgccgtgttacggaaacaaccaccattcctaacactccctagcttcaagtccccaaaaatcatcatcgccccacgcaccatcaaagccgaagcaaccgaagagaaagccgagacaaccgccacaaaggaagcaccagtcggtttcaccccaccagagctggacccaaacaccccatcaccgatcttcggcggcagcaccggcgggcttttacgcaaagcacaagtggaagagttttacgtcatcacatgggagtcacccaaggaacaaatcttcgagatgccaacaggtggtgcagccatcatgagac

SEQ ID NO: 7928 - DNA, 438 bp, Gossypium hirsutum
  unsure (1)..(438): unsure at all n locations; Clone ID: LIB3120-025-Q1-K1-F12
cagcattggggccaaaggctcgccctcccctactgctggaactagaaagttgatcgttggggcagccgccgcacctaaaaagtcttggatccctgctgttagaggtggtggcaacttcattgaccctgaatggctcgatggatcgctccctggagactacggatttgacccactaggtcttggaaaagacccagcattcctcaaatggtaccgagaagctgagctgatccatggacgttgggccatggctgctgtcgtcggcatcttcgtcggccaagcttggagtggcattccatggttcgaggcaggagctgacccangtgcgatagctccattctctttcggctcactccttggtactcagctcatccttatgggttgggttgaaagcaagcggtgggttgatttcttcaacccccaatcacaatcaggggaatg

SEQ ID NO: 7929 - DNA, 345 bp, Gossypium hirsutum
  Clone ID: LIB3120-025-Q1-K1-F2
aaatcaactgcttcacaatggcctcttttaccattgctctttcttccccatcattcaccggtacggcaataaaattatccgcttcgaccccttaaatccatggaactggccgtgttttcatgaggaaaaccaccaagcctgttccttctcgtagcccattgtacggtcctgaccgacttttgtacttgggtccactttcccgtgagccaccatcttacttgaccggtgagttcccttgtgactattgttgggacactgctggactctcagctgatcccgagacctttgctaggaaccgtgagctcgaagtcattcactgcaaattggccatgttgggagctcttg

SEQ ID NO: 7930 - DNA, 330 bp, Gossypium hirsutum
  Clone ID: LIB3120-025-Q1-K1-F3
aaaaaaattagtgaattttgactggattgttcttggatccaaatttttggagattacagagaaagaaagattgatttgaaaatacacaataggaataatcgcgatgggtttcaagatatttgtggtggcgatgatggtgggtttcatcgcagcggctcagatttcattagcatccaccgggcctgcttttctatgggctcctggtttctctagcgttgaatcgaaagaatctgtaaattatcagatcatgtcttcaaaggatctagctaactctgttctttctcaagggggatggtctgacttactgtgctccgagaggaaaaatgagcg

SEQ ID NO: 7931 - DNA, 384 bp, Gossypium hirsutum
  Clone ID: LIB3120-025-Q1-K1-F4
cccacgcgtccggccgccgttgtcgtccctgcagcagaacagcaaaagaagcaaagcagtggcaaggatcaaggttcatgagttgcgacagaaatcaaaaaccgatcttttggctcagttgaaagatctcaaagctgaacttgctcttcttcgcgttgctaaagttaccggtggtgcacctaacaagctttctaagataaaggtggtgaggctgtccattgctcaagttctgactgtaatctcacagaagcagaagtctgcattgagggaggcatacaagaagaagaaattcttgcctctcgatctccgtcccaagaagacccgagctatccgcagaaggcttaccaagcaccaggcatctttgaagaccgaaagggagaagaa

SEQ ID NO: 7932 - DNA, 389 bp, Gossypium hirsutum
  Clone ID: LIB3120-025-Q1-K1-F6
ggaaggccaggattgaagagataagattatagtgaaaaactaaacataataaagcccggtcgacgtgcttcattgatttgccctgtcaaagcccaagaaaaatggcttctgcttccgctactctcctcaagtcttcacctattatcgacaagtccgagtggattaagggccaaaacctccgccacccttcggtttgttttgtacggtcacaccctacatcggccgcctttgccgtccgtgctagttcatatgccgatgagcttgttaagaccgcgaaaactgttgcatctccaggtcgtggtattttggccatggatgaatcaaatgctacatgtgggaaacggcttgcctcgattggtctcgagaataccgaggcaaaccggcaagct

SEQ ID NO: 7933 - DNA, 174 bp, Gossypium hirsutum
  Clone ID: LIB3120-025-Q1-K1-F7
cccacgcgttcggacagccataggatattgctgactaactagacataaaaacgcgctgggacctcattgctgggttgaaggactgaacactcccataaaggcaagcttgaaactaataaagattagtgcaattaccgggctgctttacaattgatgtaatctaccttgatctaa

SEQ ID NO: 7934 - DNA, 428 bp, Gossypium hirsutum
  Clone ID: LIB3120-025-Q1-K1-F8
cccacgcgtccgccgattgtagacatcatctcgccaagcatccaagccacaccagtatgctccccaggctcacgagaaccattagcccttaaaaacaaggctcctagatggcatgaacagttacagtgctggtgccttaacttcaaggggcgtgtgacggtggcctctgttaagaatttccagctggtcgcagctgttgagccatcacataatgtatcacctgaagagcaagagaaggtagtcttacagtttggtaaaatcggcaaagacatcttcacaatggattatcgataccctctatctgcttttcaagcctttgcaatcagcctaagctgctttgacaccaaacctgcttgtgaatgatcaccacaggttggggatctgcatcattgatgttgccatagattatcaagtacccctctttcaat

SEQ ID NO: 7935 - DNA, 338 bp, Gossypium hirsutum
  unsure (1)..(338): unsure at all n locations; Clone ID: LIB3120-025-Q1-K1-F9
cccacgcgtgcggagatccattggtttttgcagatcaaagagatacaaatgggggtggggattccattgcgcagaggatggagagagatcaccctaaaagaaaagcttcaaaataatactattatttcaattactgggttcctttacaatgaatccatgttaccttgatctaagaagctcaaatcttaatcttatctctcaccccatagaagaaaaacagaataagaataagtaggattgacttctgagataataaagcctaacactgtgtacaaagtcgccttatttatattcctttcgttngctgacgaaggagacaacaggacggtacaaatgtc

SEQ ID NO: 7936 - DNA, 424 bp, Gossypium hirsutum
  unsure (1)..(424): unsure at all n locations; Clone ID: LIB3120-025-Q1-K1-G1
gcgcccacgcgtncgcgcacttnagacaatggctactttccattttcttcaatcttccgctcgcttcgtttctaaacccacttgtctcgctctccccaatccatccctttcccttcatttcccccttaaacgcctgggttccttccccaaacgcccggaactcaaacgcttacatgaggcagcagtggccactggctcagctcaaccagcagttgacctccaaaacgtccccgtacaggatacccagaagcaagaacaatctggcaaacttgttctttcaactaacgactcatccgatgagctccttagaattagacacacgtgtgcacatgtaatggcaatggcagttcaaaaactatacccagacgcgaaagtgacgattggaccctggatagacaatgggttttactatgattttgatatg

SEQ ID NO: 7937 - DNA, 395 bp, Gossypium hirsutum
  Clone ID: LIB3120-025-Q1-K1-G10
cccacgcgtccgggtcttggtgtgaattggggtaccatggcatcacataaacgtcccgcgaaaacagtggttgagatgggaaaagacaatggaataaagaaagttaacctttttgacgcagattcaactactatgaatgctcttgccggaagtgatatcgaagtcatggttgctattcctaatgatcaacttcttgccatgaacagctataaacgtgctaaaactgggttaggaggaatgtcacaagatataatttcgatggaggtgttaacattaagtatgtagctgttggcaacgagccgtttctcacaacttacaacggctcgttcattaacatcacgttccctgcgcttgaaaatattcaaaatgcacttaacgaagctggggttggggac

SEQ ID NO: 7938 - DNA, 356 bp, Gossypium hirsutum
  Clone ID: LIB3120-025-Q1-K1-G11
ctttctttcactattagctgaacctcagcggagctcacataaacacaataggcgaaatggcatctccaacttgtgctctaaccaattccccgttttgcccccatcttctcccccaattctctcctctacccgtcctctccttcactcacagcctcaaacctatcctgccaaagctcaagtctctgatttccctcaaaagagacaaccacccctcaaccttaaccgtcaaagcccagaccttggacttctccggctcattctttgagggtggtttcggctccgatgatgacccgccttcccaacccggttctggcataaccgccttgaaggataaagaggaaccccattgccaaccg

SEQ ID NO: 7939 - DNA, 413 bp, Gossypium hirsutum
  unsure (1)..(413): unsure at all n locations; Clone ID: LIB3120-025-Q1-K1-G12
gttttccaatagttcgtaacaatggctgtctcacttcaagctacacctaccgtgatggggccaatcaaggttggggcaccatcaangaccaatgtgcccctcatgtcctcccagaacgtttttaaagccttccccttggagcctcttggtgctaagcttacctgctctttgcaaactgacctcaaagacttggctctgaaatgtgttgatgctaccaagctcgctcgtttcgctcttgctacatctgctcttgttgtctcgggagcaagcgctgaaggactttcaaagcggctaacctacgctgaaatccaaagcaagacatacatggaagtcaaaggaacaggaactgctaaccagtgcccaaccattcatggtggtgtccactcttttgccttcaagcctggcaaatacta

SEQ ID NO: 7940 - DNA, 321 bp, Gossypium hirsutum
  Clone ID: LIB3120-025-Q1-K1-G2
ggcatacggtgtgtctgtctatcgcagccgagaagactccgtagttatacactatggccgcccaaggtcttcctcaggcactgcatatgattccaagaaaccaagtacagccatttaacccagtgaagaatcgtgggttctctgcatttctgtctcgtggcccttctccattaactacttccaagggttcggtttctgggtttcattcaaaattccctgtggggtcgagtttcagttgttttgctcgaaggggtttcgttgtgagggcagaatctaaccctgaaggtgaaggtgaagctgaagctgaaggaaatgaaaatg

SEQ ID NO: 7941 - DNA, 363 bp, Gossypium hirsutum
  Clone ID: LIB3120-025-Q1-K1-G3
ggtcctcaatctctctaatcctcactttcttcctcatcaaacacaccttcgattttcccaaggttgtagaagatggcagaaggtgaggatattcagccacttgtttgtgacaatggaactggaatggttaaggctggatttgctggggatgatgctccccgagccgtattccctagcatcgttggtcggccacgtcacaccggtgtgatggttggcatgggccaaaaagatgcatatgttggtgatgaagctcaatcaaagagaggtattttgactttgaaataccctattgagcatggtattgtgagcaactgggatgatatggaaaagatttggcatcataccttttataatgagcttcgt

SEQ ID NO: 7942 - DNA, 395 bp, Gossypium hirsutum
  Clone ID: LIB3120-025-Q1-K1-G4
aacgctcttttcttctgcttctggtcaagccaatatcaaaagacttcccttttagctcacagcgcctctcttgagtactataatgggtaaggagaaggttcacatcaacattgtggtcattggccatgtcgactccgggaagtctacaaccactggtcatttgatctacaagcttggtggtattgacaagcgtgtgattgagaggtttgagaaggaggctgctgagatgaacaaaaggtcatttaagtatgcatgggtgcttgacaagcttaaggccgaacgtgaacgtggtattactatcgatattgccctctggaagtttgagactaccaaatactactgcactgtcattgatgcccctggacaccgtgacttcatcaagaacatgattactg

SEQ ID NO: 7943 - DNA, 408 bp, Gossypium hirsutum
  Clone ID: LIB3120-025-Q1-K1-G5
gccatttcccgccgaggtttccaggaccataatggaattgtcttctatggggacccttgccactctagctcaagatgggtggcccttgggcgttggtgtaaggtttgctgtcgatgctgagggcacccctgttttgtgcttgcctcaaccttctcctgataaccgctccacccttcatgttcagttagatcaatgtgggttacggactcctcagtgtacaatacagggcagtcttaccaaaccagctgatgcaaccattttgaggtggtttgattcagtatggaagaagaggtttggagaatccgccgatgtagacaatctatatactgttgacgtacaaagagtacttcaaatggaagacttaaatgaggatggtgtatgggtcacttcatcagattataaaaatgc

SEQ ID NO: 7944 - DNA, 320 bp, Gossypium hirsutum
  Clone ID: LIB3120-025-Q1-K1-G6
atcgttcaaaaaggatgtgcaaaggtttagaacaaggagggaacagaagcagttcttggctgaaacagggtttttcatcagggttggtgaattgtgagctctgtaattccagggcttccttatattgccaagccgatgatccatatctgtgtaggaagtgtgacaaatgggttcaccaagctaattttttacttttaaggcttttaaggggtttcctttgcagtccatgtcaaaccttaacccaaaaatatctaatcggagcttcacatgaagtgatgctaccaacaatggtgacctcttctgaaacaagccactgtaat

SEQ ID NO: 7945 - DNA, 84 bp, Gossypium hirsutum
  Clone ID: LIB3120-025-Q1-K1-G7
accaacccttcatttctaggggctaatttaaaggccatgctaaaataaatacggaacgggtgaacattatatgcggcggggaaa

SEQ ID NO: 7946 - DNA, 436 bp, Gossypium hirsutum
  Clone ID: LIB3120-025-Q1-K1-G8
ggcggtcccaccaaatgtacacccatcatcactggcacccaaacctaaacacaggccaattacctacttagctcggacatccagtccgctgccaaatgtagcgtttgctcatgccaagcctccatcaaagagtgaaccaaataaagaggatcctgataggataccttcagtttcaccatcagcatcggcacctttctgtcttccaactatgcgatggctgctatctttcctattagctattattactttacatttataacaacagggtatatcaacctattctctagttacaatcacttcaaaactgtataatccaagagttttgcggacgagagcgagagcaatgccgaagggtgttggtctcgtgtttcgagtgggggggatatatgctgttttctgtgctgtaaatatgttgattaacacggcaaccattttc

SEQ ID NO: 7947 - DNA, 270 bp, Gossypium hirsutum
  Clone ID: LIB3120-025-Q1-K1-G9
atttacacttcatttctagggccttcttgaaaggctttgctaagctgactttcgaaggggtgttctttatatgcggctgagtaaacaaacgaaagaaaagtgattgaatttgaatccttttgttttttttctcggcgaccaaacagaagtttctttttttttcgtatcattttctattaaaggatctggcggctactggttccatttggggagaattttcttttaagatctttggaagaagccgcctcttttgtttgtcacagcggacac

SEQ ID NO: 7948 - DNA, 362 bp, Gossypium hirsutum
  Clone ID: LIB3120-025-Q1-K1-H1
tcgcccacgcgttcgatccaacttattctcttaaagattcaagattgcatggtagcgaggatgacacccgtaggacattggagaaccattctgagtgcagaaaccaaattccagatgcaccttccaagggttatcgattaggacacaggaggggaaagtcggaaactctgcgtgcacagtacataaacaccaaggatgtgagggtgacaataagcacttggaatgttgctggaagacttccatctgatgatcttgagattgatgattggctttgtacgaaagaaccagctgatgtttacattattggcttccaagaagtagtccctttgaatgctggaaatgtatttggagctgaggatagc

SEQ ID NO: 7949 - DNA, 422 bp, Gossypium hirsutum
  unsure (1)..(422): unsure at all n locations; Clone ID: LIB3120-025-Q1-K1-H10
cccgactcgaccgtgattcagcccgagttaacacgctcaccaccgaggtactactcggtgtcaatggggttcgcgaaactganctgaancctgttgttaccgagttagaaccagaggcgctttccacccctgttatttccggtacgagccaagggagtggggagtattttacccgggtcggagtcggtaacccggctaaacaattctacatggttcttgataccgggagtgatgttaattggatccaatgtgaaccatgtacggattgttaccaacaatccgacccgatttttgacccgtcggcgtcgtcgacttacagtccggttacttgcgagtcaaggcaatgttctcttctacgacaatcggcttgtcgtggcgggaaatgtctntaccaggtgtcctacggtgatggatcttacaca

SEQ ID NO: 7950 - DNA, 425 bp, Gossypium hirsutum
  unsure (1)..(425): unsure at all n locations; Clone ID: LIB3120-025-Q1-K1-H11
cccacgcgtccggtctccaattctttctataaaaaaaaaaatctaggaaagcatcaagaatggaggcattgaggatggaagtattttgggtgatgctgattgtgttggttgccgtatttaaggtccaaaatgtggcggcagctgaagctccggcccctagtcccacctccgatgccacaatcttcgtgccgacggtgcttgcttcccttgttgctcttgcatttgggcttcttttttaaaatgctggtgttttatgagacctataatattttttaaaattcttttttattttctacttgtgactacagttcaatgtattcatatttttgttattggtgtagtttcagtatgtaattggtgtgatttgtttcctagggacctaataaattatttcgtttcttttcatatacaagtattgnatgaaa

SEQ ID NO: 7951 - DNA, 390 bp, Gossypium hirsutum
  Clone ID: LIB3120-025-Q1-K1-H2
atggcagccatgaaaggttataaaatggttctaaccatgccttcttacacaagcatagagagaagggtcaccatgagagcatttggagctgatttaattctcacggatcccacgaaagggatgggtggaacagtgaaaaaggcttatgacctcttggagtccacaccgaatgctttcatgttgcaacaattttcaaatcctgccaacactcaggtgcattttgaaacaacaggtcctgagatatgggaggatactcttggtaaagttgacatcttcgtaatgggaataaggagtgggggtactgtttctggtgttggacagtacctcaaatcccaaaatcctaatgttcagatatacggagtggagcctgctgaaagtaatgtattaaat

SEQ ID NO: 7952 - DNA, 365 bp, Gossypium hirsutum
  Clone ID: LIB3120-025-Q1-K1-H3
ctcaaatcttcaatcattagttcatctcttcaaaaaaatggcaggttccaacgttttcattttagtagcttgtttcattttgttgggtttttcaagcatggaggtcagcctagcagctcgaaatcttcagcaagtaccattaccttcacttcctaatcctatcgttgttcttccaccacttcctaaccttccgccacttcctaatcttccaccacttcctaatcttccgccacttcctaatcttccaccacttcccaatctttcgccactttctaatctttcgccactttccagattaccaattccaccgctttctaaccctaccattgttctttcgccactccccagattaccaattccaccac

SEQ ID NO: 7953 - DNA, 386 bp, Gossypium hirsutum
  unsure (1)..(386): unsure at all n locations; Clone ID: LIB3120-025-Q1-K1-H4
gaaccggttcctcaatctctctaatcctcgctttcttccccatcaaacacaccttcgattttccgaaggttgtagaagatggcagaaggtgaggatattcagccacttgtttgtgacaatggaactggaatggttaaggctggatttgctggggatgatgctccccgagccgtattccctagcatcgttggtcggccacgtcacaccggtgtgatggttggcatgggccanaaagatgcatatgttggtgatgaagctcaatcaaagagaggtattttgactttgaaataccctattgagcatggtattgtgagcaactgggatgatatggaaaagatttggcatcataccttttataatgagcttcgtgttgccccggaagagca

SEQ ID NO: 7954 - DNA, 353 bp, Gossypium hirsutum
  Clone ID: LIB3120-025-Q1-K1-H5
cccacgcgtccgatttcgattgatggtgacactgaaattgcgtttactgagaatgttgatacacgttttgaggggctagggtggcatgttatctgggtcaagaatggaaacactggctatgatgaaattcgcgctgcaatcaaggaagcaaaggctgtcaaagacaagcccactctgatcaaggtgacaaccaccattggttatgggtctcctaacaaggcaaactcatatagtgtacatgggagtgcactgggtgccaaggaagttgatgctactaggaaaaaccttggatggccatatgagcctttccatgtaccggaagatgttaaagctcactggagtcgccatacccc

SEQ ID NO: 7955 - DNA, 384 bp, Gossypium hirsutum
  unsure (1)..(384): unsure at all n locations; Clone ID: LIB3120-025-Q1-K1-H6
ggcgagcggccgacacattaattgttgttagtcagggactgattgtcactttggttggggctccaactgttgccatgacgacaaagaaggctactgagggtgttcctggtgttgggaaagtggtgcagaagttacccaattcgatttatgcatcccttgtgacccttgccattgttttgtttcagacttcgcgtgaagaggtttagttgagcactctatcttttctgtcaaattaccgnctccgtatatgagattatatctcagtttgtataagatgtctttcgagttggcttaactatccgaagaccaacatttcttgaacttcgttatagaaatattaatttcggggaatgtctataatgaaaatgtaaatgaacgttgggg

SEQ ID NO: 7956 - DNA, 403 bp, Gossypium hirsutum
  Clone ID: LIB3120-025-Q1-K1-H7
gtctccctacctacaattcattttcatttgctacacttatctttttatcacctggtggggtaaccacaatcgatggtgggtcaacgaccatcgctgttctcaggtgcctcatcttgagttctactattttatgggtgagctgaaaccgacacagcttcaaactactaaaccatatacgatgcaacatcatcttcaacattatcatattacgactacattattatcgggaggggcaccgccgcgatatccattaactgccacattatttgaaaacacgcacctctagctcattaaacactgtagatcatgttatggtaaacctaacctaactcatatacgcaagctttggttgctgcttatcttacctttcttaggcagccgcatcacaggggttcatctccga

SEQ ID NO: 7957 - DNA, 386 bp, Gossypium hirsutum
  Clone ID: LIB3120-025-Q1-K1-H8
cggacgcgtccgcccacgcgttcgcccacgcgtccgaaagcactgaaaacgcagaaccggggcctctgcttctctcctcaagacttcaccagttttagacaagtctgagtgggttaagggtcacacccttcgccaaccttccacttctgcggtgaggtgccaccctgttgcaccctctggactaactgtgcgtgcaagctcatatgccgatgagcttgtcaagactgctaaagctattgcttctcctggccggggaattttggccatggatgagtccaacgctacctgtgggaaacgtttggcctcaatcgggctagaaaacacagaggctaaccgccaagcctacaggacgttgcttgtttcagctcctggccttggtcagtaca

SEQ ID NO: 7958 - DNA, 216 bp, Gossypium hirsutum
  Clone ID: LIB3120-025-Q1-K1-H9
gtcacgctacctacaattcattttcatttgctccacttatctttgcatcagcttgtcgggtaaccacaatcgatgttgaagcaacgaccaatgctgttctcaggtgcctcatcttcagttgaaccatactatgggtgaactgaaatcgccacagcttcaaactaataaactatatacgatgcgacatgatctccaacattatcgttttacgactac

SEQ ID NO: 7959 - DNA, 291 bp, Gossypium hirsutum
  Clone ID: LIB3120-026-Q1-K1-A1
cccacgcgtccgatatttagctatagcatacactactaggacccactactagcaatggcttccgcaatgatctcatcggctgccagtgccactggctctccggcacaggctaacatgggcgctcctttcaccggtctcaagtctgcctctgctttcccagtcaccaagaaagccaacaacgacattacttctctcgcaagcaatggcggtagagtgcaatgcatgcaagtgtggcctcctactgggaagaagaagtttgagactctctcatacctgcccgatcttacaccc

SEQ ID NO: 7960 - DNA, 391 bp, Gossypium hirsutum
  unsure (1)..(391): unsure at all n locations; Clone ID: LIB3120-026-Q1-K1-A10
cccacgcgtccgatcaattgttttattttgaataatttgtgctaaaatgggaaagagaaagagggcgagggtttcacgcgatgaagatgaggaggatgaantagttcaagaagaagagggcaatcattcttcttcaaacgaaaagagcttatatgagattcttggagtcgaaaaagcagcatctcagcaagagattaagaaagcatattataagttggcactgagacttcatcctgataagaaccctggtgatgaggaagccaaagagaaatttcagcagttgcaaaaggtcatatcgattctcagtgacgaagagaaacgggctgtctatgaccaaacacgttgcgttgatgacactgatcttgctggggatgttgttgagaatttgaaa

SEQ ID NO: 7961 - DNA, 338 bp, Gossypium hirsutum
  Clone ID: LIB3120-026-Q1-K1-A11
ggtgtcgactcttttgccttcaagcctggcaaatactacgccaagaacttctgcttggagcccacttgcttcactgtcaaggctgagggggttaacaagaatgcccctcctgagttccaaaacaccaagctcatgacccgtttaacctacacccttgacgaaatcgagggccctttcgaggtatccaccgatggcaccgtcaaattcgaggagaaagatgggattgattatgctgccgtcacagatcaactttctggtggtgagcgtgtgccttttctgttcaccatcaagcaattggttgcatcaggcaaacctgatagctttggaggagactttct

SEQ ID NO: 7962 - DNA, 365 bp, Gossypium hirsutum
  Clone ID: LIB3120-026-Q1-K1-A12
ttttcatctatcctattctgttattgatttttttcattatttttatgttcttttagataagcggttgttttcattatttaattcgttgggcatttgttgattatagtttcattgttataatcggcgttttgcatttttttgggtgcatatggcatttgaacaatttgttggataatttttattttttgcaattttctttggcttgttactgcaaatcaaatagattctttttataggcaggcagtggtagaaattcaagtgttgtgcattggtattaagtactatgtttggtgttttaattttctatatttttggattgcttgacaccaatcacttggatacatgcaggcttctttggcgtttac

SEQ ID NO: 7963 - DNA, 190 bp, Gossypium hirsutum
  Clone ID: LIB3120-026-Q1-K1-A2
acgggtaaaccaaaatacgataatggcgaccactgctgcttctatggcgactcaaatcctgaacgggtatacgtcgggtgttgcaggaggactaggtctccccaacggcatttggcgatcctcggttaaagtatcttccggtaacaccaaaaccccttgctttactgagactgctggttaatgcaacaag

SEQ ID NO: 7964 - DNA, 313 bp, Gossypium hirsutum
  unsure (1)..(313): unsure at all n locations; Clone ID: LIB3120-026-Q1-K1-A3
gccacgcgtncgcccacgcgtgcggccacgcgtccgctctcatttcaatgatggcttcggtcggaatcctaccccatctaagaaagctgtccttaccaatctgatacaggagattgaaccactggatgttagccttattcaaaaagatgtcccccccacaactgtggatgccatgaaaaggactatctcgggaatgttgggtttacttccatctgataggtttcaagtctttatcgaggcactatgggaacctctctccaaattgttggtttcttctatgatgactggttatacattgagaaatgctgaatat

SEQ ID NO: 7965 - DNA, 327 bp, Gossypium hirsutum
  unsure (1)..(327): unsure at all n locations; Clone ID: LIB3120-026-Q1-K1-A4
ctcacatctggagatgaggaagaagtgcttcaatgtctangacagctaaaggatctttgggggcggagagacatgcaccgggagggggtgatcttggagaactatatatcagttcttattcaacttcttggtggaaaaaatcgtgatataaggaatcgtgttcttgtcatacttcacattttgacaaaagatagtgatgatgcaaaggatagagtggcaaaagttgatggtgcaattgaacttgtagttcgttccttggggcgtcgcacagatgaaaggaggttagcagtggcattacttttggatttatcaaaatataacgtctta

SEQ ID NO: 7966 - DNA, 229 bp, Gossypium hirsutum
  Clone ID: LIB3120-026-Q1-K1-A5
tttagctatagcatacactactagtacccactactagcaatggcttcctcaatgatctcatcggctaccattgccactgccggtgcggcacaggctaacatggtcgctcctttacccggtctcaagtctgcctttgctttcccagccaccaggaaggccaccaccacctttctttttttggcaggcattggcggtagagtgcaatgcatgcaggtgtggcctcctactg

SEQ ID NO: 7967 - DNA, 359 bp, Gossypium hirsutum
  Clone ID: LIB3120-026-Q1-K1-A6
cagaggctagcacactgtgcaattgggttcggcaagaatgccattggtggcagaaatgggaggggttatgttggcactgactcgagtgacaatgatgccgtgaaccccacaccgggaactttacgacatgccgtgattcaagatgaaccgctgtggatcatttttgcccgggacatgaccattcgggtgaaagaggaactaatcatgaactcgctcaagaccatcaatgggcgtggagccagtgttcacattgcaaggggtgcttgtataaccatgcactatgtgaccaacattatcattcatggactcaacattcatgactgccagcgaggagggaatgctatggtgagggacttccc

SEQ ID NO: 7968 - DNA, 153 bp, Gossypium hirsutum
  Clone ID: LIB3120-026-Q1-K1-A7
cttcctttccagcacaaactaacattgtcgctcctttcaccagtctcaaatctgcctcttctttcccactcaccatgaaagccaacaacgacattacttctctcgcaagcaattgccgtaaagtgcaattcatgcaagtcctcttcttctact

SEQ ID NO: 7969 - DNA, 314 bp, Gossypium hirsutum
  Clone ID: LIB3120-026-Q1-K1-A8
agaaacttacgcgggggggcgggagcggacaattataacatcatccttgtctaaaacttttagtgttacaggatggagaattggatgggctattgctccagcttctgctgcttctgcaatccaaaacattcatatccgaattactgattcagctccagcacctttccaagaagctgccttaactgctttgagaagccccattgaatacttcgaaacgctgggaggagaatacgagttaaaaagagatttctgtatgaagttgctcggttcaatcggttttcggattcaagttaagccccaaggttccttatttc

SEQ ID NO: 7970 - DNA, 410 bp, Gossypium hirsutum
  unsure (1)..(410): unsure at all n locations; Clone ID: LIB3120-026-Q1-K1-A9
cccacgcgtncgnccacgcgtgcgctagtacccactactagcaatggcttcctcaatgatctgagcggctaccattggcactggggctgcggcacaggctaacatgggcgctcctttcaccggcctcaaatctgcctctgctttcccagtcaccaggaagggcaacaacgacattacttctctcgcaagcaatggcggcagagtgcaatgcatgcaggtgtggcctcctactggaaagaagaagttcgagactctctcatacctccccgatcttacacccgtgcagttggctaaggaagtggattaccttcttcgctcaaaatgggttccttgcttggaattcgaattagaggacggattcgtgcaccgtaaatactcgagcctacccacgtactacgatggacgctact

SEQ ID NO: 7971 - DNA, 367 bp, Gossypium hirsutum
  Clone ID: LIB3120-026-Q1-K1-B1
gagaaagacgagcacgagcctttgtatttggcatgcgagtatcgattgaaagtaaggaggttgggggaagatcaacccgcggttgataacgctcactaaatttaggcataagcattccaccaaccaatggccttctttgatgcattattctctccgctcttgcatgctgaactactggcaagtcttatgtataaacttaggaactaacctactaacacgtatgcatatttagtggctgacacttccttctatgctacattataatcgacaacaaaaactactagcgtcgtagatgtgacagctttgatacacgatgatgttcttcaacaccttcatgatgctgactaataccttgatgtttaaagac

SEQ ID NO: 7972 - DNA, 371 bp, Gossypium hirsutum
  Clone ID: LIB3120-026-Q1-K1-B10
gcgaacgacattacttctctcgcaagcaatggcggcagagtgcaatgcatgcaggtgtggcctcctgctggaaagaagaagttcgagactctctcatacctccccgatcttacacccgtgcagttggctaaggaagtagattaccttcttcgctcaaaatgggttccttgcttggaattcgaattagaggagggattcgtgcaccgtaaatactcgagcctacccacgtactacgatggacgctactggaccatgtggaagctgcctatgttcgggtgcaccgactcggctcacgtattgaaggagcttgaggaatgcaagaaggaataccccaatgcattcattagaatcattggcttcgacaacgtgcg

SEQ ID NO: 7973 - DNA, 256 bp, Gossypium hirsutum
  Clone ID: LIB3120-026-Q1-K1-B11
ttccgtttccccgatttctccgacgtctaggtgccgctccaaattccgggcaggtcgctccgccgctacttacacttcgcaacaacagaaaggatcgacgaacggttacctaagccgtcaaggaatggcgacgtgcacgtcgttgtacgaagttctagggattcccgtccgtgcttcgaacgaggaaatcaaatcggcgtaccgccgattggctagagtttgccatccagacgtggcggcaatcgatcggaaagat

SEQ ID NO: 7974 - DNA, 408 bp, Gossypium hirsutum
  unsure (1)..(408): unsure at all n locations; Clone ID: LIB3120-026-Q1-K1-B12
ccggccgaattccggtcaccagcgcgtccggacctgggcgacctggcggacctgggcttttcttcatgggcgcaccaacgcgggatgagctgtggcatcgccgccgctttcccttcagtgctttcctcttcaaaggccaagttcgccaccgctacgccgttgcctagctttggcgccaatgttggccaccgtgttagcatgtcggctgactggatgcctggtcagcctaggcctccttatcttgatggttcancacctggtgactttggatttgatccacttagacttggtgaggtgccggagaaccttgagaggtacaaggaatctgagttgattcactgcaaatgggctatgcttgctgttcctggtatattggtgccagaggcattggggtatggaaaactgggt

SEQ ID NO: 7975 - DNA, 380 bp, Gossypium hirsutum
  Clone ID: LIB3120-026-Q1-K1-B2
ggaagtgcagtgatgtatgcagctgaggcatcctaacagaccggtattgaagagataagatgggggtgtaaatttagacataataaagcccctcataacatccttcgacttgcttcattgattagccctctgaaagcccaagaaaaatggcttctgcttccgctactctcctcaagtcttcacctattatcgacaagtccgagtggattaagggccaaaacctccgccacccttcggtttgttttgtacggtcacaccctacatcggccgcctttaccgtccgtgctagttcatatgccgatgagcttggtaagaccgcgaaaactgttgcatctccaggtcgtggtattttggccatggatgaatcaaatgctacatgt

SEQ ID NO: 7976 - DNA, 246 bp, Gossypium hirsutum
  unsure (1)..(246): unsure at all n locations; Clone ID: LIB3120-026-Q1-K1-B3
aaccanccaaaaatttgtcaacctacaccttaacaattgcaccagcatcttcaacatctgtttggaaattaaatggttacagggtctgaaacttcctcacatgaatgacatgaaaatatgtcctaatcccaaccaactccaaaacaacaaagctgtcaattttgctgaacaggaaaattttcaagataatgattattacgatgattactttgatgatcattgccatcttcatcattatgattattt

SEQ ID NO: 7977 - DNA, 344 bp, Gossypium hirsutum
  Clone ID: LIB3120-026-Q1-K1-B4
ttccctttctttccttttcctgtaaaaatggagggttcctcctctgagaagctgatcattgtggcccgtgaacctgatgggatcggtactgttaccatcaatcgacccaaatctctcaactccttgacccggcccatgatggtggacttggccaaggctttcaaggctcttgcgaaagacaactcggtgcgggtcatcatcttgtctggagctggacgggctttctgttcaagcgtggatttgacggctgcacaagatgttttcaagggtgacgttaaggacccggagacggatcccggtgttcagatggagcaatgccccaaaccaatcatcggagctatcaa

SEQ ID NO: 7978 - DNA, 483 bp, Gossypium hirsutum
  unsure (1)..(483): unsure at all n locations; Clone ID: LIB3120-026-Q1-K1-B5
cccacgcgttcgcgacaattcacccatttacaggctctatggtgtggtggttcacttggatgtgatgaatgctgcattttcaggtcactatgtctgttacgttaaaaatgcccaaaacaagtggttcaagattgatgatagcaaggtaacatcctctgaacttggtaatgttctaacaaaaggcgcgtacatgcttttttacgcaaggtgctcacctagagccccaagatcgataaggagcagaagtaagtccattctatcaaaaataaattcaaagaattatgcaaagtcaagttcaactcatcctgatagttcanggagtatcgaatccttctattcgaaaatacaatcggttacaaaagattgtaggaagaggattcatcaagtgatacttcttctctgtttggcagcaattctgataatacttcttcctgtactgatagcacacaagatgactcactggattctgtatttggcgattcc

SEQ ID NO: 7979 - DNA, 391 bp, Gossypium hirsutum
  unsure (1)..(391): unsure at all n locations; Clone ID: LIB3120-026-Q1-K1-B6
aaaacgtctgtaacaagatgtgttactattttgttttatgtgtacgttttgaaatattcgatgcctctactttttaatgccgacgtctctctacttcttctgtattagcaagtatctctaactaaaagattgcgagcctttcatgtcgnaggaaaaaaaaaaaaaaaaaaaaaaaaaaaaaaaaaaaaaaaaaaaaaaaaaaaaaaaaaaaaaaagggaaaaaaattaaaaaagaaataaaaacaaaaggaaaaaggatacataaaaaaaaataatataaaaataagtggtaaaaaaattaaaaataannnggggggggggccttttaaaggaacaaattttattgggggttggagcggaagtaaatttttttttatggggcaaacaaaaa

SEQ ID NO: 7980 - DNA, 368 bp, Gossypium hirsutum
  unsure (1)..(368): unsure at all n locations; Clone ID: LIB3120-026-Q1-K1-B7
cccacgcgtccggaacgaacaagaacaagagataacaacttattaggcaaattcaaactctcgggcatgccaccagctccacgaggtgtaccgcaaatcaccgcgtgcttcgatattgacgccaacggcatcttaaacgtttcagccgaagacaaaacaaccggtcaaaagaacaaaatcaccatcacgaacgataaaggaagactttcgaaagaagagatcgaaaagatggttcaagaagctgagaaatacaaatctgaagacgaagaacacaagaagaaagtggaagcaaagaacgcattggagaattacgcttacaacatgagaaacacagtgaangatgaaaacgattggttcaaagctctcac

SEQ ID NO: 7981 - DNA, 359 bp, Gossypium hirsutum
  Clone ID: LIB3120-026-Q1-K1-B8
gttggtggtgagatttttgaacaagcaaataaaagctctcactacctaaccttcaaaccccccggcggctcctttgtggattagggaactagagatcaaaagataggcaactaggaaaaaaaaaaaaagataagtgaaagatgtcaactgcttcttcattgtgttcatcaactcacattaatggctttggagggggacttggggttctaagaacccatgtttctcaacccaagacactttctttcacaagaaggagaatttctacggtagtgaaagcaacatctcgagttgataaattctcaaaaagcgatatcattggtgctccatctattctctctgctaatttcgcaaagttgggg

SEQ ID NO: 7982 - DNA, 420 bp, Gossypium hirsutum
  Clone ID: LIB3120-026-Q1-K1-B9
cggacgcgtgggcggacgcgtgggtttagctataacatacactactagtacccactactagcggtggcgtcctcaatgatctcatcggctaccattgccactgcctatccggcacaggctaacatgggcgctcctttcaccagcctcaagtatgcctctgctttcccagtcaccaggaaggccaacaacgaccttacttctctcgcaagcaatggcggcagagtgcaatgcatgcaagtgtggcctcctactggaaagaagaagttcgagactctctcatacctccccgatcttacacccgcgcagttggctaacgaagtggattaccttcttcgctcaaaatgggttccttgcttggaattcgaattagacgagggattcgtgcaccgtaaatactccaacctacccacgtactacgat

SEQ ID NO: 7983 - DNA, 314 bp, Gossypium hirsutum
  Clone ID: LIB3120-026-Q1-K1-C1
cttataccggcggttttaaacctggctacaatcctagctacaacccttactcatatctgggtggaaccttaactactacatgagcactttcatcacaactttatttgaatttgcattctaggtgccattctagcttacatctcatcttaatgcacttttagattcatctatagaatctaacattacatgcaacagtacatacaaaatctataattatttttacaaaattttgaacagaatatggaagacaccatgaaagacgccaaaatagattgagatctgatatagaatcagattccaatgaggaatccatt

SEQ ID NO: 7984 - DNA, 415 bp, Gossypium hirsutum
  unsure (1)..(415): unsure at all n locations; Clone ID: LIB3120-026-Q1-K1-C11
cccacgcgtncgnccacgcgtccgacctgagggtcgtcttcccaatgctactganggagctgggcacttgaggcaagtgtttagtcatcaaatgggtcttagcgaccaggacattgttgctctttctggtggccacaccctgggaaggtgccacaaggagaggtctggatttgagggaccatggactaccaaccctcttatctttgacaactcttacttcaaggagctcttgactggagagaaggacggcctgttacagctgccaactgacaaagttctcctttccgaccctgttttccgtccattggtcgacaaatatgcggctgatgaggatgctttctttgctgattacacttgaagctcacctgaagctctcggagctatgatttgctgatgcataagctgatgattgcat

SEQ ID NO: 7985 - DNA, 290 bp, Gossypium hirsutum
  Clone ID: LIB3120-026-Q1-K1-C12
tcggaaaccttgtataccgaaagttggctctcactgtactcattggtgctgccggtatttggtatggggtttctcccgctgatgctggctatggttaacctgcaaatgtatttggaaagccaaaaccagacacagtattcatgccatacaatggggatggattcaagctgtggataccatcgaaatggaacccaagcaaagaggcggagttcccacgtcaaaagctcgcgtatgaagacaacttcgacaccaccaacaatttgagcgtcatgatcactcccaccgacaag

SEQ ID NO: 7986 - DNA, 370 bp, Gossypium hirsutum
  Clone ID: LIB3120-026-Q1-K1-C2
attgagcatctctcttgatcacaatgactatcctcattgatcaacccgagcttggtgttgagggaggggttaacaagctcggtgatgcagacaatgaactagtgttggatgggggatttgtggtgccacagacaaactcttttggccacacttttagagattatcatgttgaaagtgagaggcaacagggtgtggagaacttctaccggaccaatcatattaatcagacttatgactttgtcaagagaatgagaacagagtatggtaaactgaacaagatggagatgggcatatgggaatgctgtgaacttcttaacgacgtaatcgatgagagtgaccctgacttggatgaacctcagattgaacactt

SEQ ID NO: 7987 - DNA, 220 bp, Gossypium hirsutum
  Clone ID: LIB3120-026-Q1-K1-C3
gcgaaaccctagccactctctgctcaactcgccaatgggggcttataagtacgtgtcggggcgatggaggaagaagcaggcgggtgtgatgaggtttttacagagggtgaggtgctgggaataccgccagcatccatcaattgttagggtcaaccatcctactcgccctgacaaggcacgccgcttgggttataaggccaaacaaggttatgtggtttac

SEQ ID NO: 7988 - DNA, 369 bp, Gossypium hirsutum
  Clone ID: LIB3120-026-Q1-K1-C4
gtcactttcttttgcatctctcttctcgttgagcaccactggcaaccatgaaaaccggcggggcgaccgccgccacgacgaccggtctcagccgcggttacaaacgttcccccaaatccaacggcaaggtcaacggcacagctgctaagaaaaccggcgttaatcatggcaatggtggtgacatttctaacgggaaagcatcgttcatgaagtggacactcgacgacgtcgtttacgtcgctaaataccaccgcttaccctgttttttcgcggcgtggttcttgtttttcatatacgtggagtacacgctccggatggtaccggattcatccccgccgtttgatctggggttcgtcgtcacacgatctt

SEQ ID NO: 7989 - DNA, 461 bp, Gossypium hirsutum
  Clone ID: LIB3120-026-Q1-K1-C5
cactctctctttattttctgtcagatttcttttttctctctcaaaaatctataaactggtgtgctctacagtcctctgggcgtgtcttcaacttggtttattacctctaatgaaaaacccactcttggcggtactcggattaagacccgcaaacggaatatttctgcacccctggacccttcatcatttgctgatgcactaatccacatctatttggataatgctggtgacctggcttcccaatcaaacacttcttgtgtcttgcaggaacttgttgccaggagcattgaatcttcacatcttaacttctcaaaatacggtgacaccttctttgaagttgttttttctggatgccccacacaacctggcacacttaaacctgaataaagggaatgccacccttactctatcatagaatgtgaagctaaacctaatccctttttactatctgtatttacatt

SEQ ID NO: 7990 - DNA, 381 bp, Gossypium hirsutum
  Clone ID: LIB3120-026-Q1-K1-C6
gaagccttgtgtcccgtacgttggctctcactgtactcattggtgctgccgctgttggctctggggtttctcctgctgatgctgcctatggtgaagctgcaaatgtatttggaaagccaaaaacagacacagaattcatgccatacaatggggatggattcaagctgtcgataccatcgaaatggaacccaagcaaagaggtggagttcccaggtcaagtgctgaggtatgaggacaacttcgacaccaccagcaatttgagcgtcatgatcactcccaccgacaagaagtccatcaccgactacggttcccctgaggagttcctctcttcggtggattatcttcttggaaaacaagcttactttggtaaaaccgattctg

SEQ ID NO: 7991 - DNA, 448 bp, Gossypium hirsutum
  Clone ID: LIB3120-026-Q1-K1-C7
cccacgcgtccggaggaattaaggtttgcataagtcagagactttaagtaggtttttaagtttctcggggcgaattggaaacaacaatgggtctaatgattcagtggttagatgttcaaattattccaagtctagttcaagttttaatgtgagcaaaggggaaactttgttttagtttttggtttcaactttttctcttataaaaaaaaaaaagattgatagggttatgtctaaataggattgtttttatttattttattttaattagatttttaaagaaaaaaaaggggaaaaataatcccaaaaacttctttcacgttcttcctcttttattttcttttggtttccccaatttccaaatttttttatttattttctacttatttcttccggttctcaattctcctcttcttctttttacgttctacatttttggtattttttggtt

SEQ ID NO: 7992 - DNA, 366 bp, Gossypium hirsutum
  Clone ID: LIB3120-026-Q1-K1-C8
ctgaatctctatcataatcctttctaaaacgagactcgagaattggaacgcatcatccacttggactgtagcgattcacctgactgagtgaactaaaagttattgcgctaccgactcatcacttacagaaagtccttgcaatcgcatacaattgcatttcctattcctaaatcgcgtacaggaaccaactaacgcgaccaacggcgataagatgtaattcaacaaacccctggcgttactccgtgattgcaataaacactccttcttcgctaacggatgttttcgggatccgcttgcggtcgacgagcgtgcatggctggccccaaaaaatagaggatgatttctttttactatcggctggtcttg

SEQ ID NO: 7993 - DNA, 401 bp, Gossypium hirsutum
  Clone ID: LIB3120-026-Q1-K1-C9
gaaaaaattgaaatccttcttgctggttttgtgccatgggtgttgcagttctaaaaccagggggcgtggtaaaggtacctaatcccatgaaacaacctcaaaacccttggtataatactaatcccaacactaaccgcacgaatcgttcacaagggaaccgtaagaagcgttgtcccaacacctcccctgcttgtcgtaccaccgtcggtgggcccaaagctccggccaagaatctcgtcatgggtcaagtcaagatcctcaaacgcggcgaagatcttaaacaatctaagccggataagcatgtgaggttcgcgaaagaaaatgttgatgtagatctggtttccaccgactgtttgggtgcacataccgggtccgtgccgacccacatccgactcaccgag

SEQ ID NO: 7994 - DNA, 415 bp, Gossypium hirsutum
  unsure (1)..(415): unsure at all n locations; Clone ID: LIB3120-026-Q1-K1-D1
gttttccaatagttcgtaacaatgtcggtctcacttcaagctgcagctaccctgatgcggccggtcaacgttgctgcaccatcaaggaccaatgtgctgctcangtcctcccagagcgtttctaaggccttcggtttggagcctgttggtgctaggctcacctgctctttgcaaactgacctcaaggacttggctcagacgtgtgttgatgctaccaagctcgctggtttcgctcttgctacatctgctcttgttgtctcgggagcaagcgctgaaggagttccaaagcggctaacctacgatgaaatccaaagcaagacatacatggaagtcaaaggaacaggaactgctaaccagtgcccaaccatcgatggtggtgtcgactcttttgccttcaagcctggcaaatactacg

SEQ ID NO: 7995 - DNA, 267 bp, Gossypium hirsutum
  Clone ID: LIB3120-026-Q1-K1-D10
tggcgaaacctctgaaccggtcactttggtgtcttcccgatgcctttcttgtctttggtgttgcgggtggagctctgatattagtggcgttattgtggtcttttttcactccaacaccaaactttggacccactgttacccacccaccatccaagttgagcatgaatacagtcaatagctcggaaagagggttcggtgttaacttaaaatgctatcccaaagactccaccttttacgactacgcatgaatgggtgacataacttgaa

SEQ ID NO: 7996 - DNA, 385 bp, Gossypium hirsutum
  Clone ID: LIB3120-026-Q1-K1-D11
cccacgcgtccggctgctattcccaccatcaagcatttgattcagaatggagctaaaggcgattctctctagccacttggggcggccaaagggtgttactccaaaattcagcttggctcctcttgtacccaggctttctgaattacttggcattcaggttgtcaaggctgatgattgcattggtccagaagtagaaaagttagttgctgcacttcctgaaggtggtgttcttcttcttgaaaatgttagattttacaaggaagaggaaaagaatgaacctgaatttgcaaagaagcttgcttccttagctgatctctttgtcaatgatgcatttgggactgcacatcgagcacatgcttcaacagagggtgtcacaaaattcttg

SEQ ID NO: 7997 - DNA, 203 bp, Gossypium hirsutum
  Clone ID: LIB3120-026-Q1-K1-D12
gccacacgtgcgcaacaacatggacagctacatacattggtttttacatcattgacaagtgtgtggataacatcagtgagcacatcatgaagatctttatcatcaaggctaatataatcgtgcgtataatacgaggtataagtgaaggcaaatgtcaacgaaaatcgcttcaatgtgcccagatgcgtatcaacatcagtatg

SEQ ID NO: 7998 - DNA, 459 bp, Gossypium hirsutum
  Clone ID: LIB3120-026-Q1-K1-D2
gcgcccacgcgtccgaaaacatttcttgtgaagttctttcagttggtattattcttattctgggggggtcaaggtatatctgaacgcttcaccaattctctcgcataagagacattcagttgttattattattctgtgccgagctttgtttatgaattgacattcatgttaaagacttactcccaaacgacatgtcttagtcttgaaacaaaacacatgtgcttcctattaattttttgttatttttagggaacttgtaatgtgctgctattcataagcaattagctccctcagcatggaggcacttggcttttacactctttatctagatcaaatgattatacactatgtttctagacttgaagaatattaacgatgtttcatatacgaaattgtgttggttcagatataaaacccgtgtatgcttctttcataacgtgggtttttattctctttttt

SEQ ID NO: 7999 - DNA, 389 bp, Gossypium hirsutum
  Clone ID: LIB3120-026-Q1-K1-D3
caataactctccccggtgaaggggaaataatggatatgatggaagttgctgatcctgatgctggttatgctgttcgaaccttcattagaaaggagcttgcctcacaactaaaatctgagtttttaagcacagttgagaacaatagaagctcagaggagtatgtatttgaccatactaatatggcccgacgtgccctcaagaatactgctcttgcatatcttggttcccttgaagattcagagatgacggagcttgcactgcatgagtacaagactgcaacaaatatgacagaccaatttgctgctttgtctgccatttcccagaaaccaggtaaaactcatgatgacgttttggccgacttctataccaaattggcaccataactacct

SEQ ID NO: 8000 - DNA, 467 bp, Gossypium hirsutum
  Clone ID: LIB3120-026-Q1-K1-D5
cccacgcgtccgtataaactgtaattccacaaagccaacttctttttatacatagaaaaagggggatatgaaggcgtcatatattgcattgtgtgcagtgatggtgatcctcttggcagaagcagtagaggtgtcaacggcggtgacatgcagcccaacgcagctgagctcctgcgtgagcgccataacatcttcatctccaccatctcaactgtgctgtagcaagatcaaggagcagaagccatgcctttgccaatatcttaagaaccctaaccttaagaaatttattaacactggcaatgccaggaaggttgcttccacctgtgggactcctttccctaagtgctaagctagactctttgctgaaggctttctttctctctattttcactgcagaatggatagagagaaaggactataattattaatattatgtgagtggggggtgtggatataaatatatatat

SEQ ID NO: 8001 - DNA, 399 bp, Gossypium hirsutum
  Clone ID: LIB3120-026-Q1-K1-D6
ggaaaattaaaaacccatgggtgcaacacaacttaaaccatgtttggtactgatgatgaccttgtcggtacttgcttttgcttcagccgtatccagaaatagaatcaaatccttgaaccaaatcagagaggggaaccgaaaagggccatacattggccgtattacagggattgccactgaagaaggagcgtttttcgcttcatggtcttacaaacctgatcccaagttacctttcatccatctgttacgaagaagatttcggtttggaacgggtcatgggacaaaacgcttgtacgttcgatgtggggagggaatgactcatgcacaatgaggcacacaacaaatggttgacctatttgatatagacaggattatacatttcggcattggtggcaatac

SEQ ID NO: 8002 - DNA, 368 bp, Gossypium hirsutum
  unsure (1)..(368): unsure at all n locations; Clone ID: LIB3120-026-Q1-K1-D7
atcgctttggctcccaccacttatccctcctatctctgctctaacacttgctacccttcacagaggcactcaacctctcctttcttgaaccaggcatgtaggagttagattcaacagcaagtgttcagcgtctttctgcagtggcaaggagcagctaaagccatggattttggtagcgaaagcatcggaaggtgagtcccaaaccacagagcangaagagcagcagtacgaggagtatgacgtagagattgagcagccttatgggctcaaattcagaaaacgcagagatggtgggacttacattgatgctattcagcctggtggagctgctgacaaggctggggttttcacccgtggggacaaagtac

SEQ ID NO: 8003 - DNA, 398 bp, Gossypium hirsutum
  Clone ID: LIB3120-026-Q1-K1-D8
gcgtgaagcgtgatgagttgactctggagggtgttaaacaattctttgtggcggtggaaagagaggagtggaaggtcgatacactatgtgatctttatgatacattgaccatcacccaagctgtgattttctgcaatacaaaacgaaaggttgattggctaactgagaagatgcgtagcaataacttcacaggatcatcaatgcatggagatatgcctcagaaggaaagagatgcgattatggctgagtttcgtgatggtgcaacccgtgttcttatcacaacaaatgtttgggccaaggggctcgatgttcaacacgtgtccctggtgataaattatgaccttgcaaataatcgagagctttacatccacaggattggtcgttcacgtcgctttgga

SEQ ID NO: 8004 - DNA, 312 bp, Gossypium hirsutum
  Clone ID: LIB3120-026-Q1-K1-D9
gacaccccctcggtaaccaactaacatttttggaccaagagggagagcaagaagctgcaaaatcggctgcgaaattgactcattgagtgatacattcacatatacattgacatttgaatggctctgttaagtgctcttttaagttattgcagaccctatttgagactcattttgtgcataatgatttgaagctgaaattacatctatgattccaaacatgctttaaaacttggggtaacacttggcgaaacactagactaacattaatggtaccattaatcgtttgacaaagcttgcgacaaagcttgtgac

SEQ ID NO: 8005 - DNA, 363 bp, Gossypium hirsutum
  Clone ID: LIB3120-026-Q1-K1-E1
ccagtttccattgaagtgtggaacccaaatgggaaatacagagttattagcaccaaacgtatgcgtggaactcgatggatcaacctcttaatcgagcaagattgccgtgtcgaaatatgtactgagaagaaaacgattttgtccgttgaggatatcatttctttgattggcaataagtgcgatggggtgattggacagttgactgaagactggggggagactttatttgcagctttaagcagagcaggaggcaaagcatttagtaacatggctgttggttacaacaatgttgatgttaatgctgccaacaagtatggtgttgctgttggtaacactcctggtgtactcacagaaacaacggca

SEQ ID NO: 8006 - DNA, 465 bp, Gossypium hirsutum
  Clone ID: LIB3120-026-Q1-K1-E10
cccacgcgtccgcccacgcgtccgcccacgcgtccgcacttctgtttgttttttgaatgggaggtcatgtccaaggcttaggttgtctacgttcaggattttaagttcatcagaaattggagtgtcgagaagacaagtattggaacaagttgataaggagctgagcaagggagatgagagggctgctctctctcttgtcaaggacttgcaaggaaagcctggtggccttcgatgttttgctgctgctcgccaggttccccaaagactctacaccttggacgaattgagattgaatggaatagaaactgcatctcttctatcaccagttgattcaactctgggttcaatagaaaggaacctgcaacttgctgctatcttaagaggggttgcaacttggaatgcttttacttttaacccacaacaaatcctgtttatttccttgggattcttggttctttggacact

SEQ ID NO: 8007 - DNA, 451 bp, Gossypium hirsutum
  Clone ID: LIB3120-026-Q1-K1-E11
cccacgcgtccgagacgagagcccatctctctgcttcaaagctcctgtccaggtagaatgctgttcttcccttgcgttgtgttctttcctgttcaatcgccatggcttcaaagcggattttgaaagaactcaaggatttgcagaaagatccacccacttcttgcagtgctggtccagtagctgaagacatgtttcattggcaagcaacaatcatgggaccctcagatagcccttatgctggaggtgtgtttttagttactatccatttccctccagattatcctttcaagcctcctaaggttgcatttaggaccaaggtcttccatcccaacatcaacagcaatggaagcatttgtcttgatatcctcaaagaacaatggagccctgcactaaccatttgcaaagttctgctctcaatctgctcactgctgaccgatccaaaccctgatga

SEQ ID NO: 8008 - DNA, 433 bp, Gossypium hirsutum
  Clone ID: LIB3120-026-Q1-K1-E12
cccacgcgtccgcccacgcgtccgcccacgcgtccggcatacactactagtacccactgcgggcaatggcttcctcaatgatctcatcggctaccattgccactgcctctccggcacaggctaacatggtcgctcctttcaccggtctcaagtctgcctctgctttcccagtcaccaggaaggccaacaacgacattacttctctcgcaagcaatggcggtagagtgcaatgcatgcaggtgtggcctcctactgggaagaagaagtttgagactctctcatacctccccgatcttacacccgtgcagttggctaaggaagtagattaaccttcttcgctcaaaatgggttccttgcttggaactcgaattggaggagggattcgtgcaccgtaagtactcgagcttacccacgtactacgatggacgctact

SEQ ID NO: 8009 - DNA, 397 bp, Gossypium hirsutum
  Clone ID: LIB3120-026-Q1-K1-E2
atttagctatagcatacactactagtacccactactagcaatggcttcctcaatgatctggtgggctaccattgccactgcctctccggcacaggctaacatggtcgctcctttcaccggcctcaagtctgcctctgctttcccagtcaccaggaaggccaacaacgacattacttctctcgcaagcaatggcggcagagtgcaatgcatgcaggtgtggcctcctactggaaagaagaagttcgagactctctcatacctccccgatcttacacccgtgcagttggctaaggaagtggattaccttcttcgctcaaaatgggttccttgcttggaattcgaattagaagaaggattcgtgcaccgtaaatactcgagcctacccacgtactacgat

SEQ ID NO: 8010 - DNA, 386 bp, Gossypium hirsutum
  Clone ID: LIB3120-026-Q1-K1-E3
cttgagccttatccatggcggcaacaacaacagcaatagccttaaccctttcttccttgagcggtaggtctaccattccttgcaaaaccttcttcttccccaaaccctcaaaaccaatttctctccgccgcacattccgccctctttccctcacaccacaagctaaatccttcgacatcgacacttactttttcgacgatgtcaaccccgaaaaaaacatcgttttcgacccaccaacaccaccagaaagtttcaccccaccgcagtctttcgacgagggtccagaagaaacggaagacgaaatagccgcagcttacgaagaactatacgtccggcttacactggagtctctgattgggaaacgatgtgtacttcatggattcgaa

SEQ ID NO: 8011 - DNA, 63 bp, Gossypium hirsutum
  Clone ID: LIB3120-026-Q1-K1-E4
ctcagcgttcggcgcctaaagaaaaactaaactgaataattacacactcgaacttgctgactc

SEQ ID NO: 8012 - DNA, 460 bp, Gossypium hirsutum
  unsure (1)..(460): unsure at all n locations; Clone ID: LIB3120-026-Q1-K1-E5
agtgggagggacaagattatcatttccttctatgatgttttaggagtttgaagccaggaaaaggcgagttttaaggaatcctaggtcaagaggcttattggagttgaaagttgcttaagtgcattcttgtttaccattattattcctcaaaagatgggaatgtgatatgccttatgctttggttcaagtctagggtggataactgtgggcttcaataatttctttggtttaattttgttgagatttgaccatgcctggttccttgataaagcgtgtggagtttcatactttgatgaaaatcttaaactagattactgaacaaccttagtgtgccaacagaaaatagctaatacgggtgcgctttgttgtgtggccgctgggccacatggaacaaaatcacccactaacggaaaggactgttccatggatcgtaatgaaccacattggaggacanatacta

SEQ ID NO: 8013 - DNA, 450 bp, Gossypium hirsutum
  Clone ID: LIB3120-026-Q1-K1-E6
gtttgagttcttatccaaaggaggtgctggacatacccaaatcttcagacataaaatttcaaggtggttcaaagaagttggggaatcaaaatgatttaattgacattgactcaataaacacttccttaaagttttctgctggctgtgagctttttgaagcacttggaccagcctttttgaggaatggtttctatgctgatagccaggtagataatgcagaagctggagctaatattgaaatgcaagaggggatgagctgcagccagttgacttttgaatctggctcagaaaatctccttgaagctgtagtggcaaatgtttgccataatggcagtgatatgagaagttattcaattaataagtcctctctcgtggaagatagcaaacagcactgtctgaattcatcggagttatgcggatcaatgtcttcaaaagcctattcttcaacat

SEQ ID NO: 8014 - DNA, 275 bp, Gossypium hirsutum
  unsure (1)..(275): unsure at all n locations; Clone ID: LIB3120-026-Q1-K1-E7
cccacgcgtncgattgagctacattttcctattatacagaccacttcttttcacagcaatggcggcgatgaactccagtgccatggcctgcaactattctatataaggcactagatcatctgatcttaatggccagcttgctgcatcaccattaccagcttccacaaatatgaacagcgaccacacttttcttgtgatcaaaggccaccaagctcaatgctttgatgtcaaaggatctagtggcaagaaaagaagaaaaactgttatactctact

SEQ ID NO: 8015 - DNA, 375 bp, Gossypium hirsutum
  unsure (1)..(375): unsure at all n locations; Clone ID: LIB3120-026-Q1-K1-E8
ccggccggaattccggtcgccacgcgncggggatttcatccatttccgcgttatatatacacttggaagggataaaattacagagctttggtgcgttagacctatcgaaaggggattcagtgatggccactgaaatcatgaataatgaagttcgtgtgggagaaaatgaggagtcggaggcttcaaatggcattgagaaattagagatttcgaatggcactgatgaggtctccgaaaactcttcatatatgcaaaaagatgaagatggggtgacagaagttgccaaaaagaaaaagaagaaaaataaaagcgaaaaaaagaaggagcccttgaagcagactgatcctccatctattcccggtgttgagctttttc

SEQ ID NO: 8016 - DNA, 322 bp, Gossypium hirsutum
  Clone ID: LIB3120-026-Q1-K1-E9
cccacgcgttcggttgtttacgaccttatcatcgtccccaatatcaacaacggagtctattgggccggctatgccggaaggtgaggctgacgtcagtaaacagagattcgattggtgctcacagtggtatccggtgatgcctgtatgtgatttggataagaaggtgccacatggtaagaaagtattacgacttgatctagtggggtggtgggataagaacgagaatgaatggaacaggtgcgatgatacttgtcctcatagattaactcctctatctgaaggaagaattgatcaatgggggaggttacaatgtgtgtaccat

SEQ ID NO: 8017 - DNA, 326 bp, Gossypium hirsutum
  Clone ID: LIB3120-026-Q1-K1-F1
cccacgcgtccgtacaacaccaacgactggtctcccagtggtgatgtttatgttggcggtgctgccggattggcaatctgggcggttaccctagctggaattcttgccggtggtgcacttcttgtttacaatacaagtgctttggcacagtagatgtctctaaagtgatccttgcacttggttgcattataggctgtccgatgtaattgttgtaatcaaagaaccatccaacaactactttgcatatctttatgtagaatattttgccttggactgaattgagacctttgtattataacttaataatgtgctttgttttggtcttt

SEQ ID NO: 8018 - DNA, 419 bp, Gossypium hirsutum
  Clone ID: LIB3120-026-Q1-K1-F10
ggattttcaaaaaacctccattaatggctgcactaaggagcttccttaagaaaagatgtgtgacatgcaacgagctgatgatgacaaggaggctgatctgcaccgaacccataattgattcctcttcttttgctcaaagactcagagatcttcccaaggatctccctggtactaaaattaagagggaggtttcgcagctaattggaagaacaccccttgtctttcttaataaagtaaccgaaggctgcggagcgtatatcgctgtgaaacaggagatgatgcaacccacttctagcattaaagacagaccagcatttgccatgatcaatgatgcagaaaagaaaaacttaatctctcctggaaagacaactctcatagagccgacatccggtaacatggggataagtatggcattcatg

SEQ ID NO: 8019 - DNA, 140 bp, Gossypium hirsutum
  Clone ID: LIB3120-026-Q1-K1-F11
accctagcctacgatagccgtaggcaccattgtaacacctgctgtacaacaatctactgtgcggcaacacactgcaggctagcggctcaacaatctcttacgccaaaactgtgctctgaatcatagccaccaaaccatgc

SEQ ID NO: 8020 - DNA, 393 bp, Gossypium hirsutum
  Clone ID: LIB3120-026-Q1-K1-F12
atttagctatagcatacactactagtacccactactagcaatggcttcctcaatgatcgcatgggctaccattgccactggctctccggcacaagctaacatggtcgctcctttcaccggcctcaagtctgcctctgctttcccagtcaccaggaaggccaacaacgacattacttctctcgcaagcaatggcggcagagtgcaatgcatgcaggtgtggcctcctactggaaagaagaagttcgagactctctcatacctccccgatcttacacccgtgcagttggctaaggaagtggattaccttcttcgctcaaaatgggttccttgcttggaattcgaattagaagaaggattcgtgcaccgtaaatactcgagcctacccacgtacta

SEQ ID NO: 8021 - DNA, 402 bp, Gossypium hirsutum
  Clone ID: LIB3120-026-Q1-K1-F2
gtcgacggcttctatcaacgggtggtgccttacctcctcttcttccaccactaccacctggtggttttccgctcgtcgacgacctacattgcggccttcagtcgtcgctagccttaactcttctccttctcctccgactcttatccaagaccgcccgggttttgctgcccctattcctttgctcaccccgagagaagagatgggaaacaagtcctacgacgaagccattgaagctctcaagaaacttctcagtgagaaaggagaactgaaagctgaagcagctgcaagggtagatcaaataacaagcagagtgaacacagcatcagctgatggcaaaccatctgactcttcttgtgagagactgaaagaaggctcgtttacttcaagaaaaaaaatatgaaa

SEQ ID NO: 8022 - DNA, 230 bp, Gossypium hirsutum
  Clone ID: LIB3120-026-Q1-K1-F3
cccacgcgttcggacaattacctaactgttctttatagggaaccaacactttccacctctgtcgtgcattctcaaagatgacggcgttccatctcaaacatctcatgaccttttacaaccgcatgttgaatcacttgaagacaaccaaacaatagaccaggacttttggtagagttccctttctaatttcgagataagctttgatcgacttcttttggcttaattattaa

SEQ ID NO: 8023 - DNA, 453 bp, Gossypium hirsutum
  Clone ID: LIB3120-026-Q1-K1-F5
gcgacaaccaaccaagctcagaggatcagtttcagtgctgaagagctgagccaccgatctgattgagttgtctcgacccaccccaggcgctgggctagcgagtcgcacttaccgaagaaggtcatctctccgtcaaatgtttgtattccctcttcaacccaaagattctccccaaattctctcctccgtttgcattgcccgaccctccctctaattttccgattccccctttctaacttctacctaacctcttatcttcaccctctctgtctactaacgcctcgtttcttcttcttcttcttcttcttctctggtcggatagcttcaacggtttcttttggcaaatccatggcattatcttaattatggtggcgagttccagaggattcacgactcagcttgagttgaagctctccacgctcttcatctcctatggattggcgccgagtaaaa

SEQ ID NO: 8024 - DNA, 405 bp, Gossypium hirsutum
  unsure (1)..(405): unsure at all n locations; Clone ID: LIB3120-026-Q1-K1-F6
gcgcccacgcgtccgaggtcattcacacctctgacaagatacatggccagatttatatccctgaagtggagtgggtgctcatgatcctgtgcgattgctgtgactattggctttagagacacaaaacacatggggaatgcatcangattggcagtgatgactgtgatgttggtgacgacatgtctcacatccctgggtattatcctctggtggcacaaaccccctattggggctcttttctttcttcttttctttgggtctattgagttgctttacttctcagcttcactcaccaagttcactgaaggggcttggctccctattctcttggcccttttccttatgacaatcatgtttgtttggcattatgcaaccatcaagaaatatgaattcgatctccacaat

SEQ ID NO: 8025 - DNA, 363 bp, Gossypium hirsutum
  Clone ID: LIB3120-026-Q1-K1-F7
gtgaattttgccaaagttggtgtacagattttataaacgaagtggcaaacactgaaaccgcccgttgcgttttcgatcctaaggggctttatgtttttccaatggaatctctttcgagttccctctccatctccatctctaatctacgcgagacctacccaattctcaacagccacttaccatcttcttcttttagtctgatcaaagcgccaaatcaacgaattggatttctgaaattcaactctgaaacctctcagtttcataggttttatctccaagctctaccccgagaggttcctgctgatgaaggtgaagaccagctgcagcctcttacccttaataatgggtttcgcttactttctg

SEQ ID NO: 8026 - DNA, 400 bp, Gossypium hirsutum
  Clone ID: LIB3120-026-Q1-K1-F8
aaataagcgtgtgtctcagatttttgaagatggcccgtaccaagcagacagcccgtaagtcgggtggtgggaaggctccaaggaagcaacttgctaccaaggctgcccgtaaatctgccccaaccaccggtggtgtgaagaagcctcatcgctaccgtcctggaactgttgctcttcgtgaaattcgaaagtaccaaaagagtactgagcttcttatcacgaaattgcctttccagaggcttgttcgtgaaattgcccaggacttcaagactgatttgcgtttccagagccatgctgttctagctctccaggaagctgcagaggcataccttgtggggtctttttgaagacaccaacctttgtgcgatccacgccaagcgtgtcacaattatgcccaaag

SEQ ID NO: 8027 - DNA, 321 bp, Gossypium hirsutum
  Clone ID: LIB3120-026-Q1-K1-F9
gcgggaacaatataggagattaactcttgcatctttaaagagtgggacctggacacaacattatacacacgcgttcgatgttgtgtcctaacatagcttgcagaagcgtatgagataacattgtcgctcactttgaaatgcctcccacatatgggcgatgctctccgaatgctccatgttttgggattcaagcattatcaacaagaagcatccttttgtccgagttttggtgacttttttagaatgcgaaacatggaagatggggtagtctttggttaacaacggttgttatatggaacaatccaacatttgaggattagt

SEQ ID NO: 8028 - DNA, 408 bp, Gossypium hirsutum
  Clone ID: LIB3120-026-Q1-K1-G1
gaaaaagcttaaaagaggcctttaaactcgctactctatcactgtcccaaatcacccaagaagggaaaaagaaacccaacaaaattgaaagaaacattacctaatggttgagaatcacggcataaccaggccactcaagaggggtcgtaggtctaacaagatcaccgcgggtgccgacctctccgatttcctcgcttttccttcaccttctatcgccgcctccgcttccgggaagcctttccgtgacgctgttcggagcttcctctctgctaacgctcgactcacgacggcctttgctccgcctgtccttccttgccttatgacgtggcaaaatcctgtttagatttggcgactttgatccggacgccaacgatccttcgccgatcgtcgtgtcgctttatgtcatcg

SEQ ID NO: 8029 - DNA, 389 bp, Gossypium hirsutum
  unsure (1)..(389): unsure at all n locations; Clone ID: LIB3120-026-Q1-K1-G10
gtgggttgagaaatgatccgccaaccggaaatgttgtgatggaacctgaggacacacttgtatgaggggagcatatccaggggccaagttncanacgttgcagtggagtcattggttcatcctgaatcatgtttcaaagcgtggagattgtttctcgtactgatgctcccaaacgttcttacaaggatctttttggttccataaaactaacatgacgttgtttccttcaattttgtgagaacatactttttgccaaaccagacaatatcttgtgacttctcacaattgctattgaagtaatcacgagttaaattgtgagaaccaaagtttaaaaaaaaaaaaaaaaaatgaattaaatttgattacttgtttgtcttttttttttcttt

SEQ ID NO: 8030 - DNA, 307 bp, Gossypium hirsutum
  Clone ID: LIB3120-026-Q1-K1-G12
attggctctgacacaaaaagaaaaatgaaagccacacttcccacaccccatctccgggcgttgccttctccaaccccactggctttcaaactctccttcgcattccctgaaaccagaaggaaatcactaagcatcagctctactccgaagggaacaccatctccttctttggcttacgtgccactgagggtgactgccagttctcaagccgcttctgcacctactgtcaatttgacggcaattcccaccgaaatgaaggcttgggtgtacggggaatatggaggtgttgatgtgttgaagttggatg

SEQ ID NO: 8031 - DNA, 415 bp, Gossypium hirsutum
  Clone ID: LIB3120-026-Q1-K1-G2
gcagcagccgctaccgtgtcgttggcctcgtacttagccaaatttaaggatggattcacgggtgaagtttgccgtggtggtgaaaattatgggaaggacgggatcgagaggtcaagtgactcaagtgagagtcaagtttttggatgatcagaaccgttttattatgaggaacgtgaagggaccggtcagggagggagatattctcaccttgctcgagtctgagagggaagctaggaggcttcgttgatcacttcctcttatctccggtttgttactttattaatgtttatgttgcgcaagtagctagctgtttattatttctgaaacggattgcaaatttcaaatctaaacttggattttgggagactgatttacatggatgagttgtttttaagcatattcatgatgtttaatg

SEQ ID NO: 8032 - DNA, 282 bp, Gossypium hirsutum
  Clone ID: LIB3120-026-Q1-K1-G3
cccacgcgtccgcccacgcgtccgcttattctcacttcacctctctttttttttaattgggtggatcatcggaaagaaattgaagaaccaatcatgaagcttgacaccagcggactagaatcggctgcgcctgtctcgggtgctcccagtgaacttgttgatgggttttcggctgctccgtcgttcgatctcccaaacactactgattttgatgggtttcaaaaagaagctatccagatggtaaaacctgctaagggtaccaccacgcttgctttcatcttt

SEQ ID NO: 8033 - DNA, 350 bp, Gossypium hirsutum
  Clone ID: LIB3120-026-Q1-K1-G4
gcgcatttttgttctcttcaactttattgcataccaaaaaaacttacaacaatggcaactgcccgagggcctacactccacccatgggggctgctgccaccactaaccccaagaagaagaccaacaccaatgtgaattacataacaggcttgaattcttttggtgggttgaaagctcataacaaagtggtctcactaggccaacgtgtatgcaccgagctatcatttgcaaacattggtagctcactcaaagctccgacaaagggcaagacaggtagaagcggcggcggtgcactgtcttcaacctgcaatgctattggtgagatattcaggattgcagcaatcatgaat

SEQ ID NO: 8034 - DNA, 379 bp, Gossypium hirsutum
  Clone ID: LIB3120-026-Q1-K1-G5
tttggctattcaaaggaactgtctgattggaggagatgacttcaagagtgggcagaccaagatgaaatctgtcctcgtggatttccttgttggggctgggatcaagccaacatcgatagtggtacaaccatctgggaaataatgatggcatgaatctatcggcaccccaaaccttccgttccaaggagatctcaaagagcaatgttgttgatgacatggtttcaagcaatggaatcctgtatgagcctggtgaacatcctgatcatgttgtggtcatcaagtatgtgccatatgtgggagacagcaagagagccatggatgagtatacatcagagatattcatgggaagcaagaacaccattgtgttgcacaacacatg

SEQ ID NO: 8035 - DNA, 421 bp, Gossypium hirsutum
  unsure (1)..(421): unsure at all n locations; Clone ID: LIB3120-026-Q1-K1-G6
cccacgcgtccgggagcggccacatatcagaaactgcgaaaattcatttaaaaatggcgacgggtgcatcctcttcatcctccatggtggccaccgccgttttgattcctcgttttccggcagcctccgttggaactacccgctgcagtgccttgccgcctctccctcctcgcgtttcgaccgcttccttgtccttttcctcttccgttaagctaatcccagaatccaagaggttttctctactgcagacaaaagcctcagaagagacctctgttgatgctggtgaccttttcgctgacttgaangaaaagtgggataaagttgaggacaagaccacaggtgttctttacggtggtggggcattagttgctgtttggctatcatccattcttattggtgccattaactcggtccctttgct

SEQ ID NO: 8036 - DNA, 397 bp, Gossypium hirsutum
  unsure (1)..(397): unsure at all n locations; Clone ID: LIB3120-026-Q1-K1-G7
gcgcccacgcgtncgnccacgcgtncgctgattttcttcctttattttctttgctctgttaaactgtggcgtaagttatatttctttgggtttttgaagatgatccttgaaaagaatccatttttctccttcattttcactccaaaaatatctctgtttttctcgagagaatacgagttccttttcactctctttcacttgggttcttgagagagatttcgaaacattttaaagaaaaaaagcttccttttttttttttgaatctcctcaccccactatgggtcttagttaaaatctttagatctggtcttcattcttctagttttttcttatcaaaggtgtcttcctttttctcttggggagttaccttgagaaaaaacaataaacatgaattatt

SEQ ID NO: 8037 - DNA, 350 bp, Gossypium hirsutum
  Clone ID: LIB3120-026-Q1-K1-G8
gcgtgaagagataagattatagtgaaaaactaaacataataaagtccctcataacattcttcgactggcggtcattgattagcccaaggagacataaccaaaaagaaaaatggcttctgcttccgctactctcctcaagtcttcacctattatcgacaagtccgagtggattaagggtcaaaacctccgccacccttcggtttgttttgtacagtgcaaccctacatcgggcggctttaccgtccgtgctagttcatatgccgatgagcttgttaagaccgcgaaaactgttgcatctccaagtcgtgggattttggccatggatgaatcaaatgctacatgtgggaaac

SEQ ID NO: 8038 - DNA, 356 bp, Gossypium hirsutum
  Clone ID: LIB3120-026-Q1-K1-G9
ggaacggtgtcaagttcggtgaagctgtatggttcaaggccgggtctcaaatcttcagtgagggtggacttgactacttgggtaacccaagcttgatccatgctcaaagcattttggccatctgggcttgccaagttatcttgatgggagccgtcgagggctaccgtattgccggtggaccactcggtgaagtgactgacccattgtacccaggtggcagctttgacccattgggtcttgctgatgacccagaggcattcgctgagctcaaggtgaaagagatcaagaacggtaggttggctatgttctcaatgttcgggttcttcgttcaagccatcgtgaccggaaagggacca

SEQ ID NO: 8039 - DNA, 153 bp, Gossypium hirsutum
  Clone ID: LIB3120-026-Q1-K1-H1
gtaccgcgctcaccgacttttgttcttcattccacttatcggcgaaccaccatcaactgggcggtgaactgctgggaggggcacagacactgctggactctaagataatcccaatacctgctgtccgtaccgcgagcttcacttcatttactg

SEQ ID NO: 8040 - DNA, 431 bp, Gossypium hirsutum
  Clone ID: LIB3120-026-Q1-K1-H10
ttttgggaaaaaaagaaaaaaaattcccagcgtgggagtgagtgtttatgttttttttttttatgaattttgtactgtggggggttttgaatgagaactgaaatacttttgggaaattgaaaatcttcaatcggcggactagatggccaccacggagttgcagatgagtcctcagttggagcacatccatggcgaaatccgcgatcttttccgtgctctttcaaatggcttccagagactggataagatgaaagattccaataggcaaagcaaacagctggaagagcttactggcaagatgaaggaatgtaaaagattaatcaaggagtttgatcgtgaaattaaagatgaggaaagcaaaaatcctgccgaagtgaacaagcaactcaatgatgagaagcagtctatgatcaaagaactgaattcgtatg

SEQ ID NO: 8041 - DNA, 368 bp, Gossypium hirsutum
  Clone ID: LIB3120-026-Q1-K1-H11
cggacgcgtgggtttagctatagcatacactactagtacccactactagcaatggcttggtcaatgatctcatcggctagcgattgccactgcctctccggcacaggctaacatggtcgctcctttcaccggcctcaagtctgcctctgctttcccagtcaccaggaaggccaacaacgacattacttctctcgcaagcaatggcggcagagtgcaatgcatgcaagtgtggcctcctactggaaagaagaagttcgagactctctcatacctccccgatcttacacccgtgccagtggctaaagaaagggattaccttcttcgctcaaaatgggttccttgcttggaattcgaattaaaagaaggat

SEQ ID NO: 8042 - DNA, 277 bp, Gossypium hirsutum
  Clone ID: LIB3120-026-Q1-K1-H12
atttagctatagcatacactactagtacccactactagcaatggcttcctcaatgatcggatcggctaccattgccactggctctccggcacaagctaacatggtcgctcctttcaccggtctcaagtctgcctctgctttcccagtcaccaagaaagccaacaacgacattacttctctcgcaagcaatggcggtagagtgcaatgcatgcaggtgtggcctcctactgggaagaagaagtttgagactctctcatacctccccgatcttacaccc

SEQ ID NO: 8043 - DNA, 341 bp, Gossypium hirsutum
  Clone ID: LIB3120-026-Q1-K1-H2
acaatggctacttcatcatcttcttcaaagctttcccttttcttcttgttttccttcttggttgcgttccactttagctcgtgggtgcccttcaccaacaacaaaaatcctcgatgtcttagcttctttgaaacaagctcagcatattctttcctttgatcctcaaatttctaatgggttttccaaaagccaaccccttttcgtcaactcttcttcttcatcgggttctggtttttcgattccacttcattcacggggctctttgcgaaaaacccatcatgttgattataaaaacctggtccgatcccgactcgaccgtgattcagcccgagttaacacgc

SEQ ID NO: 8044 - DNA, 127 bp, Gossypium hirsutum
  Clone ID: LIB3120-026-Q1-K1-H3
gacagactctattgaataactgtaccatatactactagtaagcagcaatagcaattgccggctgcatgatctcataggccggcattggcacccttaactgctccttcgcggtacatgccaacatggt

SEQ ID NO: 8045 - DNA, 403 bp, Gossypium hirsutum
  Clone ID: LIB3120-026-Q1-K1-H4
gttagctatagcatacactactagtacccactactagcaatggcttcctcaatgatctcatcggctaccattgccactggctctgcggcacaggctaacatggtcgctcctttcaccggcctcaagtctgcctctgctttcccagtcatcaggaaggccaacaacgacattacttctctcgcaagcaatggcggcagagtgcaatgcatgcaggtgtggcctcctactggaaagaagaagttcgagactctctcatacctccccgatcttacacccgtgcagttggctaaggaagtagattaccttcttcgctcaaaatgggttccttgcttggaattcgaattagaagagggattcgtgcaccgtaaatactcgagcctacccacgtactacgatggacgct

SEQ ID NO: 8046 - DNA, 371 bp, Gossypium hirsutum
  unsure (1)..(371): unsure at all n locations; Clone ID: LIB3120-026-Q1-K1-H5
cccacgcgtncggtaataaatggctttggtgacaactgctgaagtctgtgatgcaaatccacagctgattgtgagcggtgaactgggggcccttcaaccaatattccaaatatatggtcgtcgcccagtattctccggacctatagtcacacttaaagtgtttgaggacaatgtattgatccgtgagttccttgaggagaaaagtgatggcagagttctggttgtagatgggggtggtagtttaaggtgtgccatacttggaagcaaccctgtagttcaagctcaaaacaatgggtgggctggaatagtggttaatggctgcgtaaaggatgttgatgagataaacggttgtgacattggggtgagagcgc

SEQ ID NO: 8047 - DNA, 296 bp, Gossypium hirsutum
  unsure (1)..(296): unsure at all n locations; Clone ID: LIB3120-026-Q1-K1-H6
gagactctnttgataactgtagcatatagtactagtaagcagtaatagcaatggcctccgccatgatctcatcggcgaccatgggcaccgtgaactgctcctccccggcacaagccaacatggtgggccccttcaccggcctcaagtctgcctctgctttcccaggcactaggaaggccaacaacgacatcacttctcttgcaagcaatggtgggagagtgcaatgcatgcaggtgtggcctcctcttgggaagaagaagttcgagacactctcatacctgcccgatcttacaccc

SEQ ID NO: 8048 - DNA, 406 bp, Gossypium hirsutum
  unsure (1)..(406): unsure at all n locations; Clone ID: LIB3120-026-Q1-K1-H7
gccgcagaccggccggaattccggtcgagcacgcgtncggcctccaccacgaacggggatgatatatcggagtggatcaccgtctttgataccaagatccctggcggcttatctcgtacaggcggaccagaagcagatctgaaagatctcttgtcaaaggccgcatcaaaaaagacagtcacccttgtgcttcttgcagtttgtttgtgacctttgttaacatttaaggggagttttttttgttccactccattcaactccgatatataattgataacttgtttcgaaatatctctgcctgtagaactcttcctttcataaattagttgatttctatgtttctagaatgaccataatccacaacaaaagagatgacattattctatatttcctcgactgaatgctc

SEQ ID NO: 8049 - DNA, 413 bp, Gossypium hirsutum
  unsure (1)..(413): unsure at all n locations; Clone ID: LIB3120-026-Q1-K1-H8
caaaagaaaaaggcgtctttggctcaacagttcacaggtctaagatgtccaccactctcctgatctcggttntctgtgaaaccgaagcaaacccanaaagtgggcgcttttgcttctcctatagtttcagccgtcgctgtctcaaatgcacagaccaaagataggcttgaactcaagaagatgttcgaggatgcttacgaacgctgtcgaactgctcctatggaaggcgtttcttttactgttgaggattttcaaaatgctcttgagaaatatgactttgattctgagcttggaaccaaggttaaaaggaacagttttctgcacagatggcaatggggcattgggtgatattactgccaaatcttgtggatatctaccggtccaagaggccagcattcacaaaattaaacatg

SEQ ID NO: 8050 - DNA, 293 bp, Gossypium hirsutum
  unsure (1)..(293): unsure at all n locations; Clone ID: LIB3120-026-Q1-K1-H9
ctctgggtcacttagtttctttgttttttgctcttggagtgaggaaatccatangaaacaagggcgtgtcgtctctttttaattgcgagatggctgggactggagtgttttcagacatattggatggagatgtttacaagtactatgctgatggtgaatggaagaagtcttcttctggaaaaactgttgcaattatcaaccccaccaccagaaaaactcagtataaggttcaagcttgtacacaagaagaggtgaacaaggttatggaatcagcaaaaactgcacaaaaatca

SEQ ID NO: 8051 - DNA, 438 bp, Gossypium hirsutum
  Clone ID: LIB3120-027-Q1-K1-A2
cccacgcgtccgcttttcttcactaaacccattaatggcttcttctctcagtctttcaagccacacagtggcttcattattcccttctcacacttcaaagccccaattgtcactttctaaatccatcccaattctcaccaagtcatcacagtctcaatttcacggccttaaattctctcactcttcttctctttcaatccctcgtttttccacttttaaaacctcgatttctgctaaggtgaataaaggtgcagttcctccagcatttactttgaaagatcaagatgggaaaactgtaagcctttcaaagtttatagggaagcctgttgtggtttatttttaccctgctgatgaaacccctggttgcaccaaacaggcgtgtgcttttagagattcttatgagaagtttaagaaagctggagctgaagttattgggat

SEQ ID NO: 8052 - DNA, 434 bp, Gossypium hirsutum
  Clone ID: LIB3120-027-Q1-K1-A3
gcaacttcatggttttcagtgttgcttttggtttcaattgtttttagttgtttcttggctgcatcaggtggtgatttttaccaagagtttgatctgacatggggtgacaaacgtgctgagatactcaatagtgggaggcttcttacacttagtctcgataaggcctctggttcaggtttcaggtctaaaagagagtacgtgtttggaagaatcgacatgcacatcaagcttgtctctggcaactctgccggcactgttactgctttctatctgtcttcagaagggccaaaccacgatgagatagactttgtgttcttaggtaacttaagtggagatccatacattgtgcacactaatgtctactgccaaagtcaaagggacaggggacaacaattctacctatgggtcgacccaactaagaattttcacaccta

SEQ ID NO: 8053 - DNA, 437 bp, Gossypium hirsutum
  Clone ID: LIB3120-027-Q1-K1-A4
gagcttctttctatctatatccttatcagctttcaaagatggcaggaatcgcctttggtcggtgtcgatgattccttcagtttggggtctgtcaaggcctaccttgctgagtttatctcaactttggtgtttgttttcgccggcgttggctctgccattgcttacaacaagttgacaactgatgcagccctagatcccgatgggctagtcgccattgctgtttgccacggatttgctctctttgttgcagtggctatcggtgccaacatctcaggtggccatgtcaaccctgcagtaacttttgggttagctcttggtggccaaatcaccatactcactggcatcttttactggattgcccaacttcttggatccattggtgcttgcttcttgctcaaggctgtcactggtggtttgacagttcctattcacggtct

SEQ ID NO: 8054 - DNA, 447 bp, Gossypium hirsutum
  Clone ID: LIB3120-027-Q1-K1-A5
gtattcatatacatacacacacatatgttatctttgtcggactttgcataagcagaagcgaaatccaaacaatgacgtgtttcatggaccaccgtgacttatccagagccactgcaactgggtatttgtttctcctattactcttctcttccttcatcaacatttggtcttcttgctctaatggaagttgccaggtagtggattcatgttcccactctacagattgtggtccaggtcttttttgtgggaactgccctgctttgggcaagactcaacctttttgtataagaggccaagccaccatacccacttctgttattggtggattacctttcaacaagtattcatggttggtgactcacaattcctttagcatagtgggtgctccagctttaccaggagttcaaagattcacattttacaatcaagaagacactgttactaatc

SEQ ID NO: 8055 - DNA, 397 bp, Gossypium hirsutum
  Clone ID: LIB3120-027-Q1-K1-A6
gccacgcgtcctgaacttttgcatatggctgccacagctgatggcatagatgaccgggctagctgattacgatacccaagaggaaatgagatccgacctcagataccacctgtgaaaataggggttccactggacgttggcctaagcaggggactgatagaagggctaagagtgtctctattaggctatggaagctcatttcaaagctgcttagcatctgcctctttattgtaatcgcatggcttaacgcttaccgtagcatatgcaccgttttatcagccattacatcacgcactgatacagaaactctgtagtctacacgcagtactgatcacagccgtagaaggatcaatcgctgactttggatatcatgtggcacatgatctagcacttgatg

SEQ ID NO: 8056 - DNA, 426 bp, Gossypium hirsutum
  Clone ID: LIB3120-027-Q1-K1-A7
atgaagagtacactctcactagaaacccagcacttttatcttccaaagctttcttcatgggaggcaatatcgccaacaatcctggctacaatcatcaaaacccagaaacaaaaccaacccttgtcaacatggaaacttcaagccaatgccaaaggattttccagcacgccacaggctaccgtgaaagaaaacactgccaaaaaaagctcaaataacaacaacaagaagaacgaggatgagaaaattccccaggtagtgtttgagaggatgatagcaaggattttggtatctgtgggaggtccaatggccgcgggtctggctttactgcacctatttggtgtaacgaaagagcaaaacttatgggatgcgccgttgtggctgccattcttgactacattaattacttttggggcatcaacgcttggg

SEQ ID NO: 8057 - DNA, 460 bp, Gossypium hirsutum
  Clone ID: LIB3120-027-Q1-K1-A8
cccacgcgtccgcccacgcgtccgctcagcagagcagaaaaatagaaataaaaataataaaaggaagggatttttttaatggttaaattaagaaaaatttctagaaaaaaaaatccttcctttttttcctttgatttccccttatgagatcgtaaaattttcgagaatccctttttttttgtaaattttatatatctaattatcgctttgtgtttgattttatttgggggttgtttttgggttaattaatatggggactgaagttttacgacctcaggattgtttgatcgaacggattcggttacctcctacggcgtgtcctcgccggagatacggaaacggtagctttaatcctagttattatcataactacaacaataacaatggaaatggtagatctaacaggaaacccgttcagaggaagcggatcggatcggagcaagggatttcgaagaaatac

SEQ ID NO: 8058 - DNA, 270 bp, Gossypium hirsutum
  unsure (1)..(270): unsure at all n locations; Clone ID: LIB3120-027-Q1-K1-B1
cccacgcgtncggttgatctcaaaccgaatcttcctgctgaagcagagaggattcgaaaatgggaagggggtgtatttgctcttcatgaagaacctgaaggtacccgaatttggctaccaaacaatgattcacctggccttgccatggcttgggctttcggagatttttgcctaaaggattttggcctgatcttggtgcccgaaataacttatcgggacttaacagaaaatgacgaatttgttggcttggctacagatgggatatgggat

SEQ ID NO: 8059 - DNA, 445 bp, Gossypium hirsutum
  Clone ID: LIB3120-027-Q1-K1-B2
catcaacaaaaagaaaattaaaaaaaatcgaacggcgataatctctggcgatggttcgaccgggggcggtaggcaccgcgaacagatcgtcatcagcgatgtcatccatgacaaccaccgtgacgatcgagaacacctcgggcgcgtgctcctcgtcgtcgcagccgcaagaagccctcgtcctcgaactccgccctaggaagaagaaagttacgtggaaagaaggcaccgtggacaacgaattcatgaacaagaagagttccaagatctgttgtatttaccataaagaaaagcccttcgacgaagacgacagtgatgacgacggacatgaccatcatcatcaccatcatgcatccaacggacatgattcctccaaggatggctgcaggcccagcagcagctgcagctgcagcttcagcgcctgattctgtttccaatctgtttc

SEQ ID NO: 8060 - DNA, 352 bp, Gossypium hirsutum
  Clone ID: LIB3120-027-Q1-K1-B3
gcgccaaggtgaagattcttaggagggagtcctactggtacaacagctatggatcagttgttacaggtgagcaggatcccaagactcggtacgcagttgtggttcgattcaacaaagttaattacgccaatgtatctaccaacaactacgcattggatgagattgaagaagttaaatgagtcactgtttcattttgtaataattttgggtttcaatgatcctatggctaatatatatatcgtcttcccccctctatctggctttgagcttgtttctaccaaaaacgacgtgtacaatactatcatctttctctagaggtgtctcatttattaatgccttaaaaaaaaataat

SEQ ID NO: 8061 - DNA, 377 bp, Gossypium hirsutum
  Clone ID: LIB3120-027-Q1-K1-B4
gccatctacctcaatagcaatagatgagctctcaattgttgatctgaagaaccttgctgatggggaggcggctgaatttggttgcagggagcctgagtcagagttggagatagaggaagaagagtctcgggcatctacctcaatagcaatagatgatattttctggtaacttcaaaagaattttacattcatatggttcctggtgataaggtttcccagtggacctgatgtgtataacaaaaaaaagaaaaagaaagataaaaaaaaggggaaatgtggtctgcattggactacttttaacatgtcagtgtatgtggtagtagttgtatgatgtatatgctgtacttaactgacttgttgttccatgcttcattgtg

SEQ ID NO: 8062 - DNA, 442 bp, Gossypium hirsutum
  unsure (1)..(442): unsure at all n locations; Clone ID: LIB3120-027-Q1-K1-B5
cccacgcgtccggttgctggatatgttggtgaagatcaattgaagcaagctttggagggatgggatgttgtcatcattcctgctggggtgccaagaaagcctggtatgactcgcgacgatcttttcaacatcaatgctggaatcgtcaagggtctatgtgctgctattgccaagtattgccctaatgcacttgttaatatgatcagcaaccctgtcaattcaactgttccaattgctgctgaggttttcaagaaggcagggacatatgatgagaaaaagttgtttggtgtaactacccttgatgcgggtagggctaagactttctacgctgggaaggcaaaagcgaatgttgcagatgttaatgttccagttgttggtggccatgctggaataaccattctnccactattttcccaagccacaccaaaagccaatttgcctg

SEQ ID NO: 8063 - DNA, 462 bp, Gossypium hirsutum
  Clone ID: LIB3120-027-Q1-K1-B6
ttcttcttttaactggtttttttctttccccattctcatagctttcatcatcttcaggtggcgaaatcacttgtcattgggatgggatgttttctcttagtaattgttttacttggagaaatccaggcatcaagcccttctcaaaaacaaagacaaggcaaccatggaaatggaatggtactgaaaacttatcaaacctcaaactcttcttttgtctttaaccttttgtattaattggttctgcaatgtaaaatgcagtatggtgccacccaagggagccttcgtcctcaaggtgagttaaaaacagttgtgaattatctaatttggtataagtttcaaaggagttgtaaatgttatgatataaaatcaaatttatcgaatatcattaaatttctccgcgactaagatccaaacaagatagataatttccaacaacggatcattcttacatacttgcacatg

SEQ ID NO: 8064 - DNA, 457 bp, Gossypium hirsutum
  Clone ID: LIB3120-027-Q1-K1-B7
cccacgcgtccgatttagctatagcatacactactagtacccactactagcaatggcttcctgaatgatctcatcggctaccattgccactgcctctccggcacaggctaacatggtcgctcctttcaccggcctcaagtctgcctctgctttcccagtcaccaggaaggccaacaacgacattacttctctcgcaagcaatggcggcagagtgcaatgcatgcaggtgtggcctcctactggaaagaagaagttcgagactctctcatacctccccgatcttacacccgtgcaggtggctaaggaagtggattaccttcttcgctcaaaatgggttccttgcttggaattcgaattagaggagggattcgtgcaccgtaaatactcgagcctacccacgtactacgatggacgctactggaccatgtggaagctggctaaggtcgggtgcaccgac

SEQ ID NO: 8065 - DNA, 459 bp, Gossypium hirsutum
  Clone ID: LIB3120-027-Q1-K1-B8
cccacgcgtccgaaaaaaaaagaagtaaaagaaaaatggctttggcaagcttggtgaggagaagggcataccttttgtctagaaacctgtcgaattcgcccgcagatgcgttgaaatactctttttcactcagcaatttctcgaggggtttcgcttcaggatctgaagagaacgacgtcgtcgtcatcggcggcggacccggcggctacgtggcagctatcaaggctgcacagctaggtctcaaaacaacctgtatcgagaagcgtggtaccctcggaggtacttgccttaacgttggttgcatcccatctagggcgcttcttcattcatcccacatgtaccatgaagctacgcattcatttgctggccatggtgtgaaattctcctctgttgagattgatttgcctgccatgatggcccaaaaggacaaagctgtttctaatcgtacccgtggtatcg

SEQ ID NO: 8066 - DNA, 445 bp, Gossypium hirsutum
  Clone ID: LIB3120-027-Q1-K1-C2
cccacgcgtccgcccacgcgtccggaaaaataatcccatcatcatcaacaacaacaatgcttgacattgtcctccttttctcccggatcttcacttccaccaatgtcctcgcccaggacttttgtgttgcgaacacggcttcgggaattggtaccccatcagggtacccttgcataatggaagcaaatgtaacctccgacgacttcgctttttcgggtcttggtgtcccaggtaatacgtcgaacatcataagtgcagctgtgacaccagcattcgttgggcaatatccagccgtcaacggactaggcctgtccggcgcaaggctggacttggctccgggtggtgtaatcccaatgcacactcaccctggtgccaacgagctcctttacgtggtccatggtcacatcacttgtggggtcatttcatcggctaataaaggttactt

SEQ ID NO: 8067 - DNA, 283 bp, Gossypium hirsutum
  Clone ID: LIB3120-027-Q1-K1-C3
gttagctttagcatacactactagtacccactactagcaatggcttcctcaatgatctcatgggctacgcattgccactgcctgtgcggcacaggctaacatggtcacccctttcaccggcctcaagtctgcctctgctttcccagtcaccaggaaggccaacaacgacattacttctctcgcaagcaatggcggcagagtgcaatgcatgcaggtgtggcctcctactgggaaagaagaaattcgagactctctcatacctgccccgatcttacaccccgtg

SEQ ID NO: 8068 - DNA, 467 bp, Gossypium hirsutum
  Clone ID: LIB3120-027-Q1-K1-C4
caaaaaaatggcaaaaccaagaagataaaagggtatcagcttcgccccccgagggatgctccgggcgagtggtatacaacagttggtctcaagaaaatgcaagaacatggtgctatttatctgactcccttttcacatcgtcttgctgaagaaattgacaatcccgagtatcaacggttgaggtgtagaggtaactatcacgctttgaggttcaagccaaatattatgcagttaagtgagtcaatagttgataaactccgggcacagggtcatttcatgtcgatccatcttcgttttgagatggatatgctggcagtggctgggtatggtctttttgttatcattttatatctatggtaattcattcacagttgccataggttgtctaggctatgcattcattttgcttggggctttgtgcctgaatagccttagctgtaacattaagaaatataaaatctttcatc

SEQ ID NO: 8069 - DNA, 461 bp, Gossypium hirsutum
  Clone ID: LIB3120-027-Q1-K1-C5
aaaaaaaccaaatcacaaaatctaattgcccctttcagcactcaatctccaagaacagttttgtttttagaatcatgttcttccattttagtttttatgtaagcctttttatgggtttttatcaagatcttcccaaaaaagcaagagaaaaaaaataaaaatttgaagaattgacaccattgctttttatgattctaccttttccactcaaaaacttgatcagggttttgattcctttccaaatctcttcacttttcttcaagaaagcatctttgttgttgttgctattaataatcttgttcctcggcgttcttctcctttgatttcagttcttcaaatctttgtaaaaaaaaccagaaggaacccaaatatttaataccctcaaagagcaccatgaggatccatccgttgccgaagaaaagaaacatcaccgtccaatacgagatgaacccaaggaccac

SEQ ID NO: 8070 - DNA, 462 bp, Gossypium hirsutum
  Clone ID: LIB3120-027-Q1-K1-C6
ctcaccccgagagaagagatgggaaacaagtcctacgacgaagccattgaagctctgagaagcttctcagtgagaaaggggaactgaaagctgaagcagctgcaagggtagatcaaataacagcagagttaaacacagcatcagctgatggcaaaccatctgactcttctgttgagagactgaaagaaggcttcgtttacttcaagaaagaaaaatatgaaaagaatcctgctctgtatggtgagcttgccaagggtcaaagccctaagtatatgattgttgcctgctcggactctagggtctgcccatcggatgtgctggacatgcaacctggtgaagcttttgtggtccgtaatgttgctaacatggtgccaccatatgaccagattaaatatgctggcattggatctgctattgaatatgcagttttgcatctcaaggtacaagaaattgtggtgattg

SEQ ID NO: 8071 - DNA, 432 bp, Gossypium hirsutum
  Clone ID: LIB3120-027-Q1-K1-C7
gcatacactactagtacccactactagcaatggcttcctcaatgatctcatcggctaccattggcactgcctctccggcacaggctaacatggtcgctcctttcaccggcctcaagtctgcctctgctttcccagtcaccaggaaggccaacaacgacattacttctctcgcaagcaatggcggcagagtgcaatgcatgcaggtgtggcctcctactggaaagaagaagttcgagactctctcatacctccccgatcttacacccgtgcagttggctaaggaagtggattaccttcttcgctcaaaatgggttccttgcttggaattcgaattagaggagggattcgtgcaccgtaaatactcgagcctacccacgtactacgatggacgctactggaccatgtggaagctggctatgttcgggtgcaccg

SEQ ID NO: 8072 - DNA, 394 bp, Gossypium hirsutum
  Clone ID: LIB3120-027-Q1-K1-C8
attgagctaaaaaatactgtttgtgctggctatgatagcaacttcgatgatatcaatgaaaagggtattgatcccccttccttgcatctacttcaacaagcagggatcggtgccctcagaagagcagagagaataaatatggaaaggcttgttttggcttgcggaggagaagctgtaaattctgttgatgatttaaccccagcttgtcttgtctgaaccgaacttgtctacgagcatgtccttcgggaagatacgtatacatttgtggaaaatgtgaggcatccctattcatgtacaattgttatcaaagtgcctaatgaccacacaattgcccaaattaatgatgctgatcgagatggtctgcgggctgctaagaatactattgaagatgacg

SEQ ID NO: 8073 - DNA, 264 bp, Gossypium hirsutum
  Clone ID: LIB3120-027-Q1-K1-D1
attatgcatagcgagaatgcactggctccgccttaacgtggtcactgattgtttttccgacgcgaggagatctcaagtcggatggtttatggtacaccgttggcgatcttgcgctaatggttggatcggcctgcctggatcaccctgtggactctcttggcctgcaatcttatataccgattagctcggcaagactgctaaacctattgcttcttctgagcgcggaattttagccatagatgactccaactctacctgcgggaa

SEQ ID NO: 8074 - DNA, 159 bp, Gossypium hirsutum
  Clone ID: LIB3120-027-Q1-K1-D12
catgctcgagcggcgcgtcaatgttattgaatatatgcacaaatttcagcacaactggcgggacgttactagtgctttgggacatgcataacgagtgtgcgagcggcgccttgtttctcgggctgtatacgccatgaactccgaacagggttcctgttc

SEQ ID NO: 8075 - DNA, 435 bp, Gossypium hirsutum
  Clone ID: LIB3120-027-Q1-K1-D2
ggcaattgaaactccatttctctgccacaaaaagctcccccggcccaactcccctgggatcagcaggagaattctaaacccaagggcataaaaaaatggcagcaagtgtagcaacaatggcgatgctcaatgcaaaatgcctaagcatcagctcaactaagatgagcaggccaacaaagccaaccccaaagcccttctcccttctctccatgcagaaccttcccaaaggcctcaccatctcaaaaccgggcaacaactcaaacctaccgtcttcactcgctggcagcgccattgctggagctatcttctcaaccttgagctcatgtgaccccgccttagctgcacaacagattgctgaaatagctgaaggagacaaccgtgggctagctctattgcttcccataatcccagcgatcgcttgggtcctcttcaaca

SEQ ID NO: 8076 - DNA, 419 bp, Gossypium hirsutum
  Clone ID: LIB3120-027-Q1-K1-D3
cacaaactcccatcacccgagatcatctttccccttcagaatggcggctgcaaccatggctggctctgccccatctttcgccggagagggcgtcaagctctctccttccgcccctaaaatccaaggcaatggccgtgtttccatgaggaaaaccgctaccaaggctgctccctctggaagtccatggtacggtcctgaccgagtcttgtacttgggtccactatctggtgagcctccatcttacttgaccggagaattccctggtgactacggttgggacactgctggactctcggcggacccagagacatttgccaggaaccgtgagctcgaagtcatccactgtaagtgggctatgttgggtgctcttgggtgtgttttccctgagcttttggctaagaatggagtcaaattcggtg

SEQ ID NO: 8077 - DNA, 348 bp, Gossypium hirsutum
  Clone ID: LIB3120-027-Q1-K1-D4
ccgcagtggtgaaacggaggatacttttattgctgatctttcagtcggtttggccacgggccgaatggagaccggagctccatgcagggctgagcgtttagccaagtacaatcagcttctgcgaattgaggaggagcttggtgcggaagctgtctatgctggagccagcttccgtgctccagttgcaccctattaagatgcttgtttagatgataatttgctgagactggatgcgtgcggcagagcttcagtggtttattgtgaccctaaaacatgtttcaataattttgatagcaattttgtacttggtcagaatgagaaaggaaaggaagaataaatacatattat

SEQ ID NO: 8078 - DNA, 430 bp, Gossypium hirsutum
  Clone ID: LIB3120-027-Q1-K1-D5
cccacgcgtccgctttttgtaaaaaagaaactcctttcccattcttttgctagaaaaggtgtgcaacttccttttatttctatggtcttcattttaaaattcttaatatttccacttttttttacaaaaaaaaaatttatttaaaggtttaatgctgagaaataaaggcaaattaaaatggtttctctacagattctgaaccctgtcttctcttccatttcgatttcccagtcaagttgtcctggaaaatctgatttcaggaagaaaattctcaactttaatagttgtagaagcttcaggtccttgcataggcaaagatctagaatctattgtgctactcaagaaggtgacaacaaaagcaatggggaagagcctcctgagtcgcttgttatgaaggagttgaagaggaaggggatgacgcccacttcac

SEQ ID NO: 8079 - DNA, 459 bp, Gossypium hirsutum
  Clone ID: LIB3120-027-Q1-K1-D6
cggacgcgtgggctcgctctctgtagccgccgcctgcgtctctctcttcatctctcggaaccgaaaagtctttagctttgcgctgtcgagagagaccatgttggtttaccaggatctcatctccggtgacgagcttctttctgactcattcccctacaaggaaatcgagaatgggatgctgtgggaagttgagggaaagtgggttgtgcaaggagctgtcgatgttgacattggtgccaatccttcagccgaaggtgctgatgaggatgaaggtgttgatgaccaagctgtgaaggttgttgacattgttgacactttcaggcttcaggagcaaccccctttcgacaagaagcagtttgtcgtgttcatcaagaagttcatcaagaacttgacaccaaaactggatgcggaaaagcaagagtccttcaagaaaaacattgaaggagcaaccaagttttt

SEQ ID NO: 8080 - DNA, 451 bp, Gossypium hirsutum
  Clone ID: LIB3120-027-Q1-K1-D7
gttttgaaaccaaatatatacttttctccccatcacaaacatatctcagaaattttaatcaagggctcaaacaatgctggtaatgtcaagtaccagcgtttcaaccagccatgttgtgaacttgaagagagatcaccctttactccattttcaagctcaagggttaaagcctaaaccctcctctcatttcttattcaatccacactctaacactgttgctgcttcatcatctaaagctttcaccacttttgcactcttcaaaccaaagaccaaagcagctcctaagaaggctgcacctaaaccaaagccaaaggttgaagatggaatctttggcacctctggagggattggttttaccaagcaaaatgagctctttgttggacgtgttgccatgattggctttgctgcatccttattaggtgaagcaataacagggaaaggaattctagca

SEQ ID NO: 8081 - DNA, 461 bp, Gossypium hirsutum
  Clone ID: LIB3120-027-Q1-K1-D8
aatggctaccactgcttctccaatggcgactcagctgaagagcagctttacgtcgtgggttgcgagaggactggtagtccccaggggcatttcgggatccccgttcaaagtatcttccggaaagaccaggaccccttgcttcactgtcaaagctgttcaatccgacaagtcaacatttcaagtaatccaacccatcaacggcgaccccttcattggaagcctggagactccaatcacctcaagccccttaattgcatggtacctttccaacctcccagcctataggacggcagtgaacccacttgtgaggggagtggaagtgggtctggctcacggcttcctcctggtgggtccattcgttaaggccggccctctaaggaacactgcggtggcgggtcaagctgggtccttagccgctgccggtctggttgtgatcctcagcatttgcttgacgatgtatg

SEQ ID NO: 8082 - DNA, 280 bp, Gossypium hirsutum
  Clone ID: LIB3120-027-Q1-K1-E1
cccacgcgtacattcaacaattgtgcagaataggaagcaacgagccaatataatcgtactatcaatgggacagacacaacaagtatccgagatgcactctaactaatacggcaacaacaatctggattataaaagcaacagaaacggacaaaactatatactctaggcttaatcctatcgcgattatgcaaaccctaatattctatataggactaactcataacggacacaaatcagataggatcatacataaataactacttgaaactaatgaaaatgg

SEQ ID NO: 8083 - DNA, 460 bp, Gossypium hirsutum
  Clone ID: LIB3120-027-Q1-K1-E2
cttcttatctttctttataatctccacaacattgacgtcagccggcgccgccgccgccaccagcaaagtctccctctctccctggcctgacccttcttcctcccatccttaccaaattctcaacaacttagtcacttcttctgttgcaagagcccaccacctcaaacatcccaaagccaaggccgataatactacctcttctcttctcagggctcccctattttctcacagttatgggggctacactatctccctcaaatttggaactccgcctcaaacccttcctttcgtcatggacaccgggagcagcctctcctgggtcccttgcacctctcggtacctttggtcccaatgcgcattccccaatgttgaccctgcaaaaatccccacttttgcccctaaactttcatcttccagtaagctcgtaggttgtagaaaccccaagtgtacttggcttttt

SEQ ID NO: 8084 - DNA, 108 bp, Gossypium hirsutum
  Clone ID: LIB3120-027-Q1-K1-E3
ccttaaatcaaccaccaaaggactactacattggtgcattcacaagatttacaaggactgttgtcactgcaactgcggtgttggagtattcaaactcgcaaaccgcag

SEQ ID NO: 8085 - DNA, 432 bp, Gossypium hirsutum
  Clone ID: LIB3120-027-Q1-K1-E4
atcaatttttgaggctgctcttgcatggattgtcatgcccaggttaaactggaggtgcgtacgggcagtttcggctgtgccatgggttgctttgcttattttgtatggtgttgcacccgagtctccgagatacctatgcatgaaaggtaacacaagtgatgcacttcgaattctggagaagatagcttcagtgaaccaaacaaagcttcctcctggtgtcctactttctggtagatcaaatgacaaggatgaagagtcttctccatcagaaaatactggcccattactttcctcactcagtaaaactgccacacaatcgtgatcaggcttctcatcattttttatgctgttctcttcaaaattaattagaacaacgctgctcctatgggtactattctttggagattcattttcatattatgggatcatatt

SEQ ID NO: 8086 - DNA, 456 bp, Gossypium hirsutum
  Clone ID: LIB3120-027-Q1-K1-E5
cacttatcttgccgatatcatacacttacatagccatgatggggtcaaagggactgactgaggcttcaaagatagctattctgaatgcaaactacatggcaaaacggttggagaactactaccccgttcttttccgtggtgtcaatggaacagttgctcatgaattcattgtggacttaagaggatttaagaacaccgctggaatagaacctgaagatgttgctaaacgtcttatggactatggattccatggtcctacaatgtcatggcctgttccaggcacactcatgattgaacccactgaaagtgaaagcaaggcggagctcgataggttctgtgatgctctcatctccattagggaagaaattgctcagattgagaatggaaaagctgatatccacaacaatgttctgaagggagctcctcatccaccatctttgctcatgggtgatgcat

SEQ ID NO: 8087 - DNA, 465 bp, Gossypium hirsutum
  Clone ID: LIB3120-027-Q1-K1-E6
gtgagttgataatttctgagttgtactttgatggctgttgcagcagctagctgcttgggcaggacttgcttcattactgggaggcccaatagttcaatctcaaccaccaactttcccttatctttttcttatccaatcttcaacggctgcaatgggatttcagtgaccagaattgggtctagctcaaaaacatacgccaagtttgagaaatttcaaggtgacccttcagaagctaatggtgaagatattatagtatcttctctacaaacccaggaacaaaccattgaagaagaagaagaagatgacagttgtttggcatctgacttggagggtgcagtgaggcaatcaggtgaagcaagtgccttgtttgtgtcttcaggaggaatgagagctattgttgagctcctaattcctcagttacagcttcttgatgatgaaggtgctcaagcttagctttgggaatta

SEQ ID NO: 8088 - DNA, 473 bp, Gossypium hirsutum
  Clone ID: LIB3120-027-Q1-K1-E8
caaattcagataacaatttcacagttgttttcttcactctctctctcagccatggctgcagcgatctccaccgtcgccggcggtgccgccgccaaccgagctctgggagtgtcagtcccaacctcagctttcatggggaagaaagtgagctcgagattcaacaacaccaggcaggttccttcgggaagttttaaggtgatggcggccgaaaaagagatagacgaagagacacagaccgaaaaggaccgatggaaagggttggcttacgatatttcggacgaccaacaagacattactcgagggaaagggatggtggattccttgttccaagctcccatgaatgatggaactcactatgctgtcatgagttcctatgaatacatcagccaaggtcttaaaacgtacaatttggacaacaacatggatggtttctacatcgctcctgcattcatggacaagcttgttgttcacat

SEQ ID NO: 8089 - DNA, 441 bp, Gossypium hirsutum
  Clone ID: LIB3120-027-Q1-K1-F1
ctcactttcactccctcacaaactgcaaagctgcggcaatagcagcaatggctgcccatattttcacgacaaccccgtcccacctcgctctctcttttccatcctcaactaacccttcaaacccaccggttcttctctcctcatttcgtggggtctctcttaagctccctcgtcaatccctctcccttgctgctactattcccaagaagcccttttctgtgtttgctgttaccaagaaagctgtcgctgttcttaaaggtaattcggaagttgaaggcgttgtcacgttgacccaggaaaatgatggtcctacgactgtgaatgttcgaattactggtcttactcctgggcctcatggcttccacctacatgagtatggtgacacaacgaatgggtgcatgtctacaggagcacatttcaatcctaacaatatgacacatg

SEQ ID NO: 8090 - DNA, 442 bp, Gossypium hirsutum
  Clone ID: LIB3120-027-Q1-K1-F2
ggggaatcgggcatgccctcgcacgagcttttgccaataacaactgcaaggtggtggcgacggttagggctttacgctccatgggcgatctgcaacgagatcccaggttttatcttcaagaactcgatgttctctcggagcaaagcgtgcagcatgtcatgtctaatgtaataaataagtttggtcgtgttgatgtcttggttaataatgctgggatccaatgcgttggccctcttgcagaagtccctttgccttccatggaaagtgccttcaataccaatgtttttggtgcgatgagactagtacaagctgttgtaccggacatggcatctaagaaaaagggtaagattgtgaatgttggaagtgttagtgctttggctcctgggccatggtccggggtctattttgcatctaaagcagcccttcatgcgctaactgatac

SEQ ID NO: 8091 - DNA, 437 bp, Gossypium hirsutum
  Clone ID: LIB3120-027-Q1-K1-F3
caaacataaggcataaactgttgttgttggttttttttttttttcttttccttcagcttttgggtcttgctctggtttaccccgaaaaagttgttttctgtatggagaaatcgatgaattcgacaactttagctcgaacacaatcggagcaactggtgattgagacgcaggcggcggcgacgccgacgtccaagtcaccaacgatgcaaaatgaagatgcaccgataacatcggaaaacatgggaactctgtcgcggaagtcaagccagcggatggtggtgggtgcatcgccggggcggagcatcggcggttacaacaataacacccacattaggaaggctagaagtgctcaagtgaagatggacgtggaagagttgagcaacggggctgctctcagccgcgcctctagcgctagcttgggctttatcttttccttc

SEQ ID NO: 8092 - DNA, 415 bp, Gossypium hirsutum
  Clone ID: LIB3120-027-Q1-K1-F4
cagagattttagagagaacaaacaacaatggctgctacatctggggctgtactaaatggattaggctgttcatttctttgtgggggaaagaggagccaagcccttttgggtgccagcattggggccaaaggctcgccctcccctactgctggaactagaaagttgatcgttgtggcagccgccgcacctaaaaagtcttggatccctgctgttagaggtggtggcaacttcattgaccctgaatggctcgatggatcgctccctggagactacggatttgacccactaggtcttggaaaagacccagcattcctcaaatggtaccgagaagctgagctgatccatggacgttgggccatggctgctgtcgtcggcatcttcgtcggccaagcttggagtggcattccatggttcg

SEQ ID NO: 8093 - DNA, 430 bp, Gossypium hirsutum
  Clone ID: LIB3120-027-Q1-K1-F5
gttttcagaatttggcttccttcgccgcatcagacgcataaacatggctgaagacgctgctcgcaaatccatatatcacttcagtgtcaaggacattcgtggaaatgatgtaagtttaagtgactacagcgggaaagttgttctgatagtgaatgttgcttcaaaatgtggtttaacgcaatcaaactacaaggaactcaatgttttgtatgaaaaatacaaaaaccaagggtttgagatattagcatttccttgcaaccagttcgcagggcaagaaccaggcaccaatgaacagattcaggaagttgcatgcacaatgttcaaagctgaattcccaatttttgataaggtggaagtaaatggaaagaatgctacaccactttacaagtttctaaaatcagaaaaaggtggatactttggggatgcaatc

SEQ ID NO: 8094 - DNA, 382 bp, Gossypium hirsutum
  Clone ID: LIB3120-027-Q1-K1-F6
ccaagattgacagacgatctggcaaggaactcgagaaggaacccaagttcttgaagagcggggatgcaggtatggtaaagatggttcccaccaaacccatggtggttgagactttctccgaatacccaccactcggacgttttgctgtccgtgacatgcgccagaccgttgctgtcggtgtcatcaagagtgttgagaagaaggacccaactggtgctaaggtcaccaaatctgctgccaagaagaaatgagagattattgcagagataattatatcagttttcattacagctttggacaattatcttaaatttggactttaaatttactttttgtgagacttgttgatttgctttttaaacaaattctagttttatgtttt

SEQ ID NO: 8095 - DNA, 373 bp, Gossypium hirsutum
  Clone ID: LIB3120-027-Q1-K1-F7
ctctcatattccttctttctcctgctgggggcgtccaaactatatgatgttttcccaagaggggcaccatcttctcctccttgtggggtgccgccttgctgctctttttcctcttcttctgttgctgatgattttttgctgctgttacaaccaattcatcattgttagcagcctccaaaataattatttttgttgccaaaaaatcctcctttgttgtgccctaatcatatcatctttgtcatcatctattgtggtgggctgctcttctatcaggactactctggctgccatcattccttcttttactgctgtatcatataccaccttacatcactaattacttgttgataacatcaccaaaatttttcaatag

SEQ ID NO: 8096 - DNA, 470 bp, Gossypium hirsutum
  Clone ID: LIB3120-027-Q1-K1-F8
atcttattgtgtttgatatgcttatgtaccacatatgcatatagcactggtatttcagaatgaatttggcctgcaactgacaaagaactggaaattttacgtctttgggttatagggatggactatttatgagatagtaagatatgcacctcaacacaattggagtgcttatgaagaagctttgaggacaaaccctgttttagcgaaaatggttatcagtggaattgtctattctataggggattggattgcgcaagtaagtttatgtcatcgaagaaatacttttcgatctttagttttcggtcatgagattgtgcgttacactttttcttgtctttattctttcagtgctttgaaggtaaacctctatttgagtttgatcgtattcggatgttcagatctggccttgttggctttactctacacggttccttgtctcattactattaccaattctgtgaggtaaccat

SEQ ID NO: 8097 - DNA, 438 bp, Gossypium hirsutum
  Clone ID: LIB3120-027-Q1-K1-G1
cccacgcgtccgttcaagaattgtgcagaataggaagtgaggagcaaaatgaatggtactttgttagggacaaagacaagaagtatcccacagggactcgaactaatagggcaacaaaagctgggttttggaaagcaacgggaagggacaaacctatatactcgaggcttaatcttattgggatgaggaaaaccctagtgttctataaaggaagagctcctaatggacaaaaatcagattggatcatgcatgagtatcgacttgaaactaatgaaaatggtactcctcaggaagaaggatgggtggtatgtatagtgttcaagaaacgaatgacaacagtaagaaaaatgggtgaatatgaatcttcatgttggtacgatgaccaagtctccttcatacaagaacttgaatccccaaagcgaataactcaaccttatg

SEQ ID NO: 8098 - DNA, 435 bp, Gossypium hirsutum
  unsure (1)..(435): unsure at all n locations; Clone ID: LIB3120-027-Q1-K1-G2
cccacgcgtccgctgtaatccaagcttctattcagttttgtaagagctatggctaaggacagggangtgggtggtgagttccaggccaaggactaccatgatcctccacccgctccattggtcgacgctcaggagttagccaagtggtctttttacagggctgtcatagctgagttcattgccactctcctctttctctacatcactgtcttgactgtgatcggttacaagacccagaccgaccctgctaagggcggtgaagattgtggcggcgttggcattctcggcattgcttgggcttttggtggcatgatctttattcttggttactgcactgccggtatctctgggggacacatcaacccagcagtaacctttggacttttcttggctaggaatgtgtccttgggtcgagccatattttacatgggtgct

SEQ ID NO: 8099 - DNA, 457 bp, Gossypium hirsutum
  Clone ID: LIB3120-027-Q1-K1-G3
aaatttagaaaaaaaaaaaaaaaaagcacccaaatcccaaatattttgatcttgttgctatccgacccgtcatccacccaaattcggtcattttcaattttgttcatatataaattcttttatggctgctctttactcaacttcctcttgcttttgtggtagtttgggttcttacccagttcataaatcagtaaaattgggtcatggcaaggttagagattctgggttttattttcctcatcgttttcagtgcgctactcctaaattacacgtccaagcaaaagccctttctgttgatgggttacctgaaatgatggattcttcacttgtggtttgtttcggggaaatgctgatagattttgtcccgacgatcagtggtctttcgttggcggaagctcctgcatttaaaaaggcccctgggggtgctcctgctaatgttgctgtccgcataactcgt

SEQ ID NO: 8100 - DNA, 428 bp, Gossypium hirsutum
  Clone ID: LIB3120-027-Q1-K1-G4
gtcgacggcttccatcaacggttggtgccttacctcctcttcttcctccaccaccacctcctgtttgggcgctcgtcgacgaccgacattgcggccttcggtcgtcgctagccttaactcttctccttctcctccgactcttatccaagaccgcccggttttcgctgcccctgttcctttgctcaccccgagagaagagatgggaaacaagtcctacgacgaagccattgaagctctcaagaaacttctcagtgagaaaggagaactgaaagctgaagcagctgcaagggtagatcaaataacagcagagttaaacacaacagcagctgacggcaaaccatctgactcttctgttgagagactgaaagaaggcttcggttacttcaagaaagaaaaatatgaaaagaatcctgctctgtatggtgagc

SEQ ID NO: 8101 - DNA, 459 bp, Gossypium hirsutum
  Clone ID: LIB3120-027-Q1-K1-G5
attgagctaaaaaataaggtttgtgctggcaatgatagcaactttgttgttatcaatgaaaagggtattgatcccccttgcttggatctacttcaacaagcagggattgttgccctcagaagagcaaagagaagaaatatggaaaggcttgttttggcttgcggaggagaagctgtaaattctgttgatgatttaaccccagcttgtcttggctgggcgggacttgtctacgagcatgtccttggggaagataagtatacatttgtggaaaatgtgaggcatccccattcatgtacaattttgatcaaagggcctaatgaccacacaattgcccaaattaaggatgctgttcgtgatgggctgcgggctgttaagaatactattgaagatgaggcagttatattaggtgcgggagctttcgaagttgcagctagacaacacctaattaacgaagtaaag

SEQ ID NO: 8102 - DNA, 464 bp, Gossypium hirsutum
  Clone ID: LIB3120-027-Q1-K1-G6
aaaatacgaagaaaaatgacgatgtttcacttcttcaactgtgcgatcctcactttgggtccgcacgccgtctactactggggcactcccttatcggagtatgatactcttggtacttctgttaaagctgcccttgtttatcttggaactgctttggtaaaggtttctgagaatgacggcttcgatccgtaccaggaacttttgaaggcagtgattggttttatagatgttgctggcctttattttgccttaacacagttgactcataggaacatctctcaaaatcataaatttcaagctgttggacttggatgggcgtttgctgattcggttctacatagattggcacccctttgggtgggagctagaggactagaattcacttgggatttcattctacaaggcttggaagcaaatgctaatttggtgttaagtatatctcttgctgcattgggatctttaat

SEQ ID NO: 8103 - DNA, 454 bp, Gossypium hirsutum
  Clone ID: LIB3120-027-Q1-K1-G7
cttttgccttcctatgtctaatttgttccctttaagaaaattttttaagttactaatgtcacggatatctggattgctcatgcttgcataaggcctgctcttcatccttttgtggacttggcctgatctttgtgttccttctttcccacttgtgcagaatgtctgataactagtataaactttttaaagcatttgaattctgggatggcaaccggaagtgtttttcaaaggataagattcctatttagttctttgatttttgttatagtgaaatttaatttggcttaactagcaaatggcaatgtttgttaaattgataaggggaatatatccattaaagctaagttatagttggtatttaatcccgaaatttagtgttaatccatctaatggttattatatgtgtttccttgtttagtaacaatgtcatatgtccatatgtcaggtgctctgc

SEQ ID NO: 8104 - DNA, 461 bp, Gossypium hirsutum
  unsure (1)..(461): unsure at all n locations; Clone ID: LIB3120-027-Q1-K1-G8
gctcctccccggcacaggccaacatggtggcccccttcaccggcctcaagtctgcctgtggtgtcccagtcactaggaaggccaacaacgacatcacttctcttgcaagcaatggtgggagagtgcaatgcatgcaggtacttggtgatgcataaatacaacttaaattaccccaattgtttgaacacaacaaattacataaattgaatcaaatatatatcttggcttttgagtataggtgtggcctcctcttgggaagaagaagttcgagacactctcatacctgcccgatcttacacccgtacagttggctaaggaagtagattaccttcttcgctctaaatggattccttgcttggaattcgaattagaggtgttttcgagctctaaattattccattccaacactttatttttttagtgggatatttgatttgattaaatgtgttntataagtatgt

SEQ ID NO: 8105 - DNA, 310 bp, Gossypium hirsutum
  Clone ID: LIB3120-027-Q1-K1-H1
cccacgcgtccgctaatattattcgaggcaacttatctaattgctctaccagtcgctcatacggatgagagcatcgaaagcatggaatctaggttaatgcacctaggaatgaaaattataagcattgaagatgactagcattgcctcattcctaagggcggacctcttaacattttaccccaaagagttgtggcaaatggcggaacagccttaatggtacacccgattacaggttacatggctgccagaacactatccggtgattcgatcaatgcggatgctatcgaccagtgcctagatgcgtgaaaga

SEQ ID NO: 8106 - DNA, 315 bp, Gossypium hirsutum
  Clone ID: LIB3120-027-Q1-K1-H2
ccattcttgaatgagagtgttcgacctcctgctgcatgtccaagcatcgttaatgcgaaagcgttaggtttacctgtttcaaagctataagcaccaacggtcagtccgggttgcggtccgagtagtttctcctatgaatgtgaagtttggggttgtactgagtttagtttatgctagactgaaaatggcaattaccatgtatatgttgcatggggaaagtactccttttatttacttacattttgctgtcttgtatgtaatagagaacagctttataatttcatcaaaaaaaaaagaatagtatatgtacattta

SEQ ID NO: 8107 - DNA, 455 bp, Gossypium hirsutum
  unsure (1)..(455): unsure at all n locations; Clone ID: LIB3120-027-Q1-K1-H3
cggacgcgtgggcggacgcgtggggttttgagtgaaaaaaaaatttctctggaagcaaagcaactatgagctacgtttacctcagatctgaaacccctcgtctcagatccactaaattcaccatgtcttctactttcagcggcgatgaaacggctcccttcttcggcttcctcggcgccgccgccgctctcgtcttctcctgtatgggagctgcatatgggacggctaagagcggtgtgggtgtggcttcaatgggtgtgatgaggcctgagttggtgatgaaatccattgttccagttgttatggctggtgtgttgggtatttatgggttgattattgctgntattattagtactggcatcaatccaaaggccaaatcgtattatctttttgatggctatgctcatctttcctctggtcttgcttgtggacttgctgggcttttaagctggaat

SEQ ID NO: 8108 - DNA, 282 bp, Gossypium hirsutum
  Clone ID: LIB3120-027-Q1-K1-H4
cccacgcgtccgctacaacagtcccctaggactccagaggcatgcctttgctgaagcaggcagtggcgtgaaaaaaatagaactagaaggactctctgaacacgaacatgctggtgccaagatagaggctgcaccaatcggctacgaaagttcttcactcgattgcatttgcaatttgaagttgctgatttcaattgtaaactttcttgtatttggttgcttactttaccaaccacttttttctgcctataatttaattatttgaattttgcttcttccaat

SEQ ID NO: 8109 - DNA, 460 bp, Gossypium hirsutum
  unsure (1)..(460): unsure at all n locations; Clone ID: LIB3120-027-Q1-K1-H5
cccacgcgtccgcaccaattgccttgctcctttcgtcaaggttctggaccagaagtttggtagcatcaagggcaccatgactaccactcactcgtacaccggtgaccataggcttcttgatgctagccaccgtgacctcaggcgtgctagagccgcagctctcaacatcgtcccgacttcaactggtgcggcgaaggccgtggcccttgtactccctactctcaaaggcaaacttaatggcatcgcattgcgtgtgccaacaccaaatgtgtcggtggtggacctagtggtccaggtttcaaagaagacgtttgctgaagaggtgaacgctgctttcaaagagagtgcagagaaagagctacagggtatactttcagtgtgtgaagaaccccttggttcagtggacttcaggtgctctgatgtgtcctncaccgttgatgcatcactcaccatggtcatg

SEQ ID NO: 8110 - DNA, 434 bp, Gossypium hirsutum
  Clone ID: LIB3120-027-Q1-K1-H6
ctttgggaacgttgtcccagaacacacttagcatcagcctccaatggccagttggggtgtaggagaatgtagtttaagacccttcactgccgtcaaaatccaccataaacctagaccttcattaccttcaaacaccattaatgctttcaagttcaaacctttaccatgttctgcattcaaggtcccaactttatggtctaaaggtagaaacttggggggattggggctgttgagtgtgagtgctccattgaaagtgacaataactagtgaagaagataaaggtaaagaagagagcaccactgatggtgttaataatggtgagtttgaccctggtgcagcacctccttttaagttgtctgatattaaagctgcaataccaaaacattgttgggttaaagatccatggagatctatgagttatgttgggagagatg

SEQ ID NO: 8111 - DNA, 440 bp, Gossypium hirsutum
  Clone ID: LIB3120-027-Q1-K1-H7
cccacgcgtccgcccacgcgtccgaacacaccttcgattttcccaaggttgtagaagatggcggaaggtgaggatattcagccacgttgtttgtgacaatggaactggaatggttaaggctggatttgctggggatgatgctccccgagccgtattccctagcatcgtcggtcggccacgtcacaccggtgtgatggttggcatgggccagaaagatgcatatgttggtgatgaagctcaatcaaagagaggtattttgactttgaaataccctattgagcatggtattgtgagcaacttggatgatatgtaaaagatttggcatcataccttttataacgagcttcgtgttgccccggaagagcacccagttctccttactgaggctcctcttaacccaaaagctaatcgggagaaaatgacccaaattatgttcgaga

SEQ ID NO: 8112 - DNA, 465 bp, Gossypium hirsutum
  unsure (1)..(465): unsure at all n locations; Clone ID: LIB3120-027-Q1-K1-H8
caacaacaacgtctcaaattcaacgtcgacgttgtcgaaagtgagtggggacaaggtgctaagctcgacgttttggccgggaaggtcgcggccgatcgtacgcacaccattaagggtatttgtattggtcacaacgaaaccgcgactggagttaccaacaacttggccacagtgagaaaactactagatcattacgggcacccagcactgcttctcgtcgatggagtttcctcgatttgtgctctcgatttccgtatggatgaatggggagttgacgtagccttaaccggctcgcaaaaggcgctttgtgttccaacctggatcggtattgtttgcgctagcccgaaagctctcgaggcgaccaaaaccgcgaaatcagtccgggttttcttcgattggaacgattaccttaagttttacaaattaggaacattntgggcctacactccttcaattgaactcttg

SEQ ID NO: 8113 - DNA, 259 bp, Gossypium hirsutum
  unsure (1)..(259): unsure at all n locations; Clone ID: LIB3120-028-Q1-K1-A1
tcgccgttcttcatcttccttctccttcttcatccacttcccttcctgaatctcaatcaagaatccgagagattgtatctgattcagacttgaagtttttgattgataatctggatgagaagctcgatgaggacgagaaatgggagactgtaattgataagaaaaccaactctttatcctacaaggcanaatgctgcagacctaagaataaaccactaaaatacctgagcacgactgtatttgaggggtgctctccgga

SEQ ID NO: 8114 - DNA, 273 bp, Gossypium hirsutum
  Clone ID: LIB3120-028-Q1-K1-A11
ttgaacttgtttgacgagttgaatctgacgccaatgaaatttaaacattaccaatattcggatgagatatagcatttcgaaacacttaatgaatctcaaacacccaagattatggtgattgctagtgcatattccatagtgggtccttatataatccttggcttctgaccagaggaagccttcatgattcgaaatgtatctaatcttgttccttcactagaaaatggacctttataaacttacgctggccttgaattttcagtataaactctt

SEQ ID NO: 8115 - DNA, 305 bp, Gossypium hirsutum
  Clone ID: LIB3120-028-Q1-K1-A3
tcgtccacgcgttcgtccacgcgtccggagaagttcccggagactatggatacgatccgtttggtgggagcaagaagccagaagactgtgcaaaatatcaagcatatgagttgatacacgcaaggtgggcaatgcttggtgctgcagggttcatcatccctgaagcctttaacaaatttggtgccaactgtggccccgaagccgtttggttcaagaccggagctcttctctgggacggtaacaccttgaactacttcgggaagaacatccccatcaaccttgtggtggctgtcgttgccgaagtc

SEQ ID NO: 8116 - DNA, 297 bp, Gossypium hirsutum
  Clone ID: LIB3120-028-Q1-K1-A6
tcgtccaaccactatcactaccattatggcttccgctactgtttctgtatccaaacccaaccttcagattcaggcataaggaaagggcgttgggtttgcagatgtctcaggcctacacaacttctgtactagccttacctttgccaagaaaacctgtgatgacttccattcactcattgctcttgagacatgtgctctacgatagcataatggccggtacaaaagggatcgcagaggcaaagctaaaggcggctataaacgggtttgggacgattggcaggaccttcttaagatgct

SEQ ID NO: 8117 - DNA, 357 bp, Gossypium hirsutum
  Clone ID: LIB3120-028-Q1-K1-A8
tgcttacttcatcgactacttgtaggtttcctaatcaggctcaggggaaacgctcctcacatgatacatcaggctaccatattgtaaatgtttttagtccctcacaatctgaagctacaactgatacttcagttgaatacgatatcgttcggtgatctgatgattatcatcctgctacttgggattatgattctcttcagtcacttgggctccatcacgtggaggatgaattatgcaaggatcgagcgagctatctgtaggaagaagtgaagatgatgtttgacaatgtgatgcatcctttgcagaaactcgagcttattgatgccttacatagacttggatcgtcataatactttg

SEQ ID NO: 8118 - DNA, 443 bp, Gossypium hirsutum
  Clone ID: LIB3120-028-Q1-K1-B1
gcgggaaccggcacagcttcctttgctacttctctatttaaagcctcctataaggtgttattgctctattttagtgcctattatccttttattatttttgctctctctttttttttgagatctgcgtgtttcttcaagcttcttgaaagcgtcattttggttgagaactggaaaccgctgctgtgatggctccaccaattgagactacagtcaagtcctctgactctcactgcgctccacatcctcctttgaatgaaaggatcctttcgtcaatgaccaggaggtccgtcgctgctcacccatggcatgatcttgaaattggacctggagctcctacggttttcaactgcgtgattgaaattgggaaagggagcatggtgaaatatgaacttgacaagaaaactggtttgatcaaggttgatcgtgtgctttattcatcagtt

SEQ ID NO: 8119 - DNA, 352 bp, Gossypium hirsutum
  Clone ID: LIB3120-028-Q1-K1-B10
ggtaccgggcacgcgttcgaggacgacggcatggataagcttggggataccaaaggcatgcctaattaatatttcacgaagggtcaggggtctaagcttaaataatccagaaacttcatccacatagatcaagcgttaatcgggatgcaatgttccatctcctgcaaaaggattagctagaagcttctctaccatacccgaaggaatgtcaaagtaaacattttcagtaggttcaggagggtgaggagaaactatttgcgtctactggtcggggtgaagattccccgaacaagcccatcaaaggatcatgtgccatagtaacaagtgacagcaaattttaacacactatata

SEQ ID NO: 8120 - DNA, 196 bp, Gossypium hirsutum
  Clone ID: LIB3120-028-Q1-K1-B12
taagcttggggataccataggcgtgcctaattaatatttcaagaaggcgtaagcatctaagcttaaataatccacaaacttcattcacattgattaagtggaaatcgggatgcaatgttccactctctgcaaaaggattagctagaaggttctctaccacacccgaatgtatttcaaagtatacattttcagtagg

SEQ ID NO: 8121 - DNA, 400 bp, Gossypium hirsutum
  Clone ID: LIB3120-028-Q1-K1-B2
gcgtggtgttgcaggtcttcgttacgcacttgaagttgcgaaacatggatctgttgcgagtatcaccaaggccgagcctcatgagaggaatacgaactatgcacaaggtggtgttagtgcagtcctgtgtccatctgattctgtagagagtcacatgcaggatacaatcgtagcaggagcttatctttgcgatgaggagtctgtcaaagttgactgtactgaaggacctgatagaattcgagaattgattgcaatgggggcttcgcttgaccatggtgatgatggaaatttgcatctggcaagggaaggcggtcattctcatcaccgaatcgttcatgctgctgatatgactggacgagacattgatcgggctttactagatgcacttgtcaatgatcct

SEQ ID NO: 8122 - DNA, 314 bp, Gossypium hirsutum
  Clone ID: LIB3120-028-Q1-K1-B3
cccacgcgtccgctcattcctttataccttacagacaatctcctcaataccccatgtttctgggtcctttttcaaggcattctacaggcacttccgagctgcgagaaggggaaaatggcacaacttttaacaccgtcaactaaacggcaaatgacactaccaaggacctcatcctatggaagtcccattgcagcaaaaatgtggcgttctttggtactgaaacataacatcattggacctggtaaatgctctggcacaggtaaagcggttgccttgtgtgaaaacagcactgtgaacaggctagagaactcact

SEQ ID NO: 8123 - DNA, 422 bp, Gossypium hirsutum
  Clone ID: LIB3120-028-Q1-K1-B4
cccacgcgtccgcccacgcgttcggtttgttcactgaagtcaaacaaacatggtgaaagcagtggtcggagaagaaagccaactccagctagctgaggatcgtctctcccgatcttcagaaccggctcacgttggtctggtgatagggaaactctactccgttctggaccgcggcttcatgttcgagttagtacccactcaaaacgacgccggacaaccagctagttcggctctggagccatcataagacaacatgaaaaagggatcgaaatccaaatctcagacgtctgattcttcctctaatttggtcattgacatggattgggtcgctgaacatgctcgccaagtgtcaagaatgatggtgggtggaatcaaagtatcgggtatttatgtgtgggcaagtgacgccgctttcaagaatt

SEQ ID NO: 8124 - DNA, 469 bp, Gossypium hirsutum
  Clone ID: LIB3120-028-Q1-K1-B7
tcggaaatagaaaaattaaagaaatcaaaatggctgttagtccacccttttcactagcagctattggcatcttggttctctttacaactaacccaaactactgccaagcatatagaagaattctcagctctgacacaaatacagagttcatcaaaacttcctgtgctgccaccacctaccctgacctctgtttcgccgccttttctagctacgcaaccgaaatccaagccgatcccaaaatattagctaccaagtccctcaatttgacacttaacaccacgttctcggcttccaaaaacctgacggagctctgcaaaacgcagggcataaagcctactgaggctgcgcctcttcacgattgcgtggaagaaataagtgactcggtcgatgaactaacaaagtctattcctgaaatggaagagattgaatgcaaaagccttgcttttaaaatgagggatatcccaaacat

SEQ ID NO: 8125 - DNA, 466 bp, Gossypium hirsutum
  Clone ID: LIB3120-028-Q1-K1-B8
gtgagactcttttgtatacctgtagcatatagtaatagtaagcagtaatagcaatggcctccggcatgatctcatcggcaaccattgccaccgtgaaccgctcctccccggcacaggccaacatggtggcccccttcaccggcctcaaatctgcctctgctttcccagtcaccaggaaggccaacaacgacatcacttctcttgcaagcaacggtgggagagtgcaatgcatgcaggtgtggccgcctcttgggaagaagaagttcgagactctctcatacctgcccgatcttactcccgtacagttggctaaggaagtagattaccttcttcgctctaaatggattccttgcttggaattcgaattagaggagggattcgtgcaccgtaagtactcgagcttacccacgtactacgatggacgctactggaccatgttgaaacttgccatgttcgggtgcaccga

SEQ ID NO: 8126 - DNA, 250 bp, Gossypium hirsutum
  Clone ID: LIB3120-028-Q1-K1-B9
gcgcttttcttgatcttgttcgtcaacgccttcatcacatattacttaatcaatattttcttcgggtgagtttgatcggatcatcattctggttagaatggatctcatggtcactactggtaacatgaacatcaatgctaaattagttctacttgtggatgttggatctggaatgactagatcctggtttgacttctttaaagggcaatttgatgaaattcaggaatcatccatacgtgcagcttttatt

SEQ ID NO: 8127 - DNA, 446 bp, Gossypium hirsutum
  Clone ID: LIB3120-028-Q1-K1-C1
actgcttctccaatggcgactcagctgaagagcagctttacgtcgtctgttacaagaggactggtagtccccaggggcatttcgggatccccgttcaaagtatcttccggaaagaccaggaccccttgcttcactgtcaaagctgttcaatccgacaagtcaacatttcaagtaatccaacccatcaacggcgaccccttcattggaagcctggagactccaatcacctcaagccccttaattgcatggtacctttccaacctcccagcctataggacggcagtgaacccacttctgaggggaatcgaagtgggtctggctcacggcttcctcctggtgggtccattcgttaaggccggccctctaaggaacactgcggtggcgggtcaagctgggtccttagccgctgtcggtctggttgtgatcctcagcttttgcttgacgat

SEQ ID NO: 8128 - DNA, 410 bp, Gossypium hirsutum
  Clone ID: LIB3120-028-Q1-K1-C11
cttggtttcacccaacaagatggagaaatcagaaatatctcaatctgttgctgaattggtgtggcaattaaatgagaaatcttgtgaacttgaggttaaagctgcagacaatcgaataatccaagagcagctgaacctgaagatttgtgaatgtgaaggattgcaagaaactgttgcctccttaaagcagcagctctctgatgcactagaatcacaaaatgtcagtcctatagcccctaattctcaacaatttggaggaatgaaaggtctgcagatggacaacgaagctgcggcatcaaaagatagtgatgaagatttgcttttagcacaggtggctgagattgaagaactgaagcagaaagttgttgaactaaccgagtcaaaagaacaattagaactgcggaaccaga

SEQ ID NO: 8129 - DNA, 413 bp, Gossypium hirsutum
  Clone ID: LIB3120-028-Q1-K1-C12
gcgccgtctactgttcccctgaggagttcctctcttcggtggattatcttcttggaaaacatgcggtctttggtaaaaccgattctgagggtggttttgactccggtgcggtggcgaccgcaaacatattggagagttcaagttcaacagtcggcgggaagccgtactacttcttgtcagtgttgacaagaaccgccgactgagacgaaggtgggaagcaccagctaataacagccaccgtctacaacggcaagctttacatttgcaaggcacaatctgtggacaagaggtggttcaagggagctagaaagtttgtggagagtgctgctagttccttcagtggtgcttaaacaaagcttatacatggaagagggattttattgaaacttgtggatgttgaatattaacttctg

SEQ ID NO: 8130 - DNA, 385 bp, Gossypium hirsutum
  Clone ID: LIB3120-028-Q1-K1-C2
tttcaaagtaaaaacactgctatagaagcaacagatcccggctctaaacgataatgggctccagaagaaaggagccggagagatagttcgaatttggtcttgtttatccttttcgatcgacggagaaagaaatcgatgatacttttacagtcccattcacgattccttctccagactttgctgaatcgaatacagaatcttgaaaagtgtattgaactagaccatcactgggttgagtttgatgatgttcgttaccatgttcaggtgtcaatgaagaatccccatattctactgctttcattatcattacctaccccacctctggaaactgtcttcgttggtggacttccatttggagccatagaagctattaaagcatcttatg

SEQ ID NO: 8131 - DNA, 218 bp, Gossypium hirsutum
  Clone ID: LIB3120-028-Q1-K1-C3
tcgatcactcgttcgttgaactatagcgacgcttcacactagtggacgctgcagaggctgcttcaggatcatctcaactgcagcaatcaagtgtcccgatactgcgtcacacactgcaccacttcagacatgctgagaagattccaagtccctcgaataatgccctaccaatgcgactgccgttaacgccatgatcaaaataatgcatgttatgggcc

SEQ ID NO: 8132 - DNA, 183 bp, Gossypium hirsutum
  Clone ID: LIB3120-028-Q1-K1-C5
tcggttctctaatccttttttcgggtgtagcgttgtttatacgtttggttgttgttgaagaagtgctactaccatggctacaaagaagagcgttggggacttgaaggaagctgatttgaagggaaagaaagtgtttgttagagtcgatctgaacgttccattggatgataacttcaacataac

SEQ ID NO: 8133 - DNA, 54 bp, Gossypium hirsutum
  Clone ID: LIB3120-028-Q1-K1-C6
tcggtcactgtttcaagtacggatcattcgattgatatattacgattaacaatt

SEQ ID NO: 8134 - DNA, 383 bp, Gossypium hirsutum
  Clone ID: LIB3120-028-Q1-K1-C7
cctccatccatatctccttccttcagctctaagagccttaaaacaagttcactatttggagaagcattaaaggttgttccaaaggcatcatttgaaggttcaaaaggcaaaaaccactccttaattagggccaaatggtgaaattgaaaagcctttgaaaaagttccttccaaaggcaccaccggttaaggctttgattaaaataatgatgggattgggtgaacctttaaaaccaatggcttttaaagttagaccagcttcatgtgggggtactgcttgggttaattcctttggggatgaacaacttgctgtggatctacttgccaacaagcttctttttgaggctttgacatactcgcacttttgcaaatacgcgtgctccg

SEQ ID NO: 8135 - DNA, 395 bp, Gossypium hirsutum
  Clone ID: LIB3120-028-Q1-K1-C8
gttgaatatgtcggattttagagatgaggctcactcaagttcatgggatcactccgcctttatgggaacctatgctatgtatttggatcaaagacttgaattgatgcttttcgacaggaaaagcagtggaggcagtggcgctgggggaagtagtcatggaagtgctgatgatagatatggtgggcgagataatttccgatcaccaccaccgaggccgtacgaatatgattatggggatatcagaggtgataatggatatggaaattatgggatgacaaggagaacgaggtcttatggtgatatgagtgaggcagcggggagagatgggagagatgggagagaggagaagaaagcagtgacgccattgaaggaaatgacaccagagaggatttttg

SEQ ID NO: 8136 - DNA, 286 bp, Gossypium hirsutum
  Clone ID: LIB3120-028-Q1-K1-C9
ggaaatggcaggcgtctaagcagggaatgattatgaggcgaccgctgttagaatcaccgggggaagccacgtcaagccgggtgaggagatacgaataaaagagtgtcagatggtcacacattgatcttccctacctggctttctattataaccagaagctgatgttttacaagaacgaccgcagtgttgacttcgaagacaaggtttgaaaaactcaagggaaggctgatggtggtgttagaggagctttatcaacttatgatgtaagctttggaaagatgacgat

SEQ ID NO: 8137 - DNA, 85 bp, Gossypium hirsutum
  Clone ID: LIB3120-028-Q1-K1-D1
ttccggatttagcgagtcgtccgactcgatcgatgtttcaccatcacacccaaaaaacaacgcaaatcgtgtaagatgtctgcac

SEQ ID NO: 8138 - DNA, 97 bp, Gossypium hirsutum
  Clone ID: LIB3120-028-Q1-K1-D11
gcgaaaaaaaacaaatattaatcattcttgctgtttattctctctgggactctttgagttagtggggcaggggattttggcgagaagcaggggcgta

SEQ ID NO: 8139 - DNA, 253 bp, Gossypium hirsutum
  Clone ID: LIB3120-028-Q1-K1-D2
tcgcagttatcggtttctactttgccataagagcttctgggttctggccatgaggttaccgtcttcactgttggagaagagggctctgattaaatgaataagccccccttcaacagattctctgaaattacgagtgctggtgggaaaacagtgtggagagacccttcagatgttggcaatgttgttgcaagggcaacctttgacgtggcgttggataacaacggtattgacttggacactgtcatgccattgg

SEQ ID NO: 8140 - DNA, 272 bp, Gossypium hirsutum
  Clone ID: LIB3120-028-Q1-K1-D3
ttcttgacccatttcttcaatccggatttctttgccaatcttcatccaacgtcgtaatatgacgtcccgggtcttcgcctatcatgtaaatggtttcttctttcgcaagagctttctatgctagaccatgtgcatgtgccgctgctgatctattgatgtgcttaaaagtgatgatcttgaaataaggacttcttgttcgaatatcctgtctaatgactcctattaccgattcgtctgttgaagtctcctcgctctgtctttatgacatcaaa

SEQ ID NO: 8141 - DNA, 359 bp, Gossypium hirsutum
  Clone ID: LIB3120-028-Q1-K1-D4
catgattccataattgaatcaatgctccaaactagaggaatgttatggtaaaactggcgcttgagacgatgtaggggaagagcatcgtgcgacttgaaggacatgatcagatgcggatgtcaaaacccaccactttccgttatgtataaatgaacgtgcttcttgctcgacatcctttgttctattataatccgtctttttgttgagttgcaatgtaaatcttacaggatggatctcgaagagatacatccatttttcacgggcaaggatctatggatagataatggaaatcaataatgctgaacaacttcgtaagtatatctgagatatagaaatcgaaaggatccggttcaaactat

SEQ ID NO: 8142 - DNA, 401 bp, Gossypium hirsutum
  Clone ID: LIB3120-028-Q1-K1-D5
gttgttggctttggagacgtatagctcataagttcacgtgatctcctttctttaagggttttgaatttttggtttctttctatttgactcactacatataatttctatatatctatatatatttcgtacttcattgcagatagatttacacattagcaatggattccactaaaatctcagctcttcttttcatttgcatgcttttcatttcctcagctactccagttcttggttgtcgttcatgtcgtaaagcacattccaaggctaagcctattaaaaagccccatcctgttaaacccccaatccatgttaaaccaccggttacagtccctccagtcactgttccaccagtgacagtcccttcaatagtaaaaccaccagttacaagtccaccagtgact

SEQ ID NO: 8143 - DNA, 276 bp, Gossypium hirsutum
  Clone ID: LIB3120-028-Q1-K1-D6
aaaaaaaatcagaaacattttctggtaagtgaaggaaaagcagagtcagtgaagaagatggagagcaaacccacatagattgggaggtctaagatgtttggagggtacaacaaaagatacaagcatttcagtcccaccctcgggtgttccctgactttccatatctactttcgtgcttgttcttctcctttccacaagttccctatactttactggctctctggacttacttgcactgatgagaatttcataatcaagtcaggagcacaacgtgct

SEQ ID NO: 8144 - DNA, 469 bp, Gossypium hirsutum
  Clone ID: LIB3120-028-Q1-K1-D7
ctcttcttcctccaccaccacctcctctttttccgctcgtcgacgacctacattgcggccttgggtcgtcgctagccttaactcttctccttctcctccgactcttatccaagaccgcccggttttcgctgcccctgttcctttgctcaccccgagagaagagatgggaaacaagtcctacgacgaagccattgaagctctcaagaaacttctcagtgagaaaggagaactgaaagctgaagcagctgcaagggtagatcaaataacagcagagttaaacacaacatcagctgacggcaaaccatctgactcttctgttgagagactgaaagaaggcttcgtttacttcaagaaagaaaaatatgaaaagaatcctgctctgtatggtgagcttgccaagggtcaaaccccctagtatatgattggtgcctgctcggactctatggtctggcatctcatgtgctggaca

SEQ ID NO: 8145 - DNA, 440 bp, Gossypium hirsutum
  Clone ID: LIB3120-028-Q1-K1-D8
gctaaacaatggcagcttgcccagtatacaccacccaatctctcaactcaacatgttcaatctgcaccatcaaaaacccacttcagttctcaccacatccacctagttttctacagaactagcaagagaactagcaagagaggtggcagcagctcatgtgtgataacctgctcagctggtgactcacaaacagttgtgattggtttagctgctgactcaggatgtgggaagagtaccttcatgaggaggctaacaagtgtgttcggtggtgcagctgagccaccaaagggaggcaaccctgattccaacacactgatcagcgatatgaccactgtgatatgtttagatgattatcattcacttgacagaactggaaggaaagagaagggagtgacagcacttgacccaggagccaacgactttgacctcatgtttgaaca

SEQ ID NO: 8146 - DNA, 173 bp, Gossypium hirsutum
  Clone ID: LIB3120-028-Q1-K1-E1
cccatataccaacccacttgccgtacctggttagaacacctgcgctgtcacccttggtccctcggttaggaccagtgggctcgctcatcatcgtctgtccaccaacaccgctagaggccgacatcgcgcgatactgggcttaacccctgaggaaacacgcgcacaatcctacg

SEQ ID NO: 8147 - DNA, 301 bp, Gossypium hirsutum
  Clone ID: LIB3120-028-Q1-K1-E11
gcgccttcctaatatctaccttccttttctgtctttttgctatggcaggaactgtggtggtcggtgtttatgggaacggctcaatagctggtacccacaaatcccctttctccgtcaaggttggcctatcccaaatgctccgtggtggggtgattatggatgtcttcacccctgaacaagctcgcatcgctgaagaagcttgatcctgcgccgtcatggctcttgaacgagtccccgtctacatcctatcccaatgcggcttggctcggattaatgtcccacaacttatcatagaaattat

SEQ ID NO: 8148 - DNA, 172 bp, Gossypium hirsutum
  Clone ID: LIB3120-028-Q1-K1-E2
gttcatctatacaccaccacaattccaccagttacaagctctcttttcacacaactaagccccacatgtcttcactagccggtccgtttctatgctccacaacaaactgttcttccgtgcacaacttcatctttcaagcccaattcaccggtcataacacttcctacgactt

SEQ ID NO: 8149 - DNA, 78 bp, Gossypium hirsutum
  Clone ID: LIB3120-028-Q1-K1-E4
gcgtacgtgcaacttgtgacgatcgtgtccgagtttgggggggtatctccaggatcatcggattcccagacgttgaca

SEQ ID NO: 8150 - DNA, 497 bp, Gossypium hirsutum
  Clone ID: LIB3120-028-Q1-K1-E5
tcgagcaacacataatagtcaaattagcgagcaagatgagtaagggtacgaagagagcagttctggggggatgcaactaccccaagacccaattcagcttgcatggatgcatcaatgatgtgaaagccataagaggtgtgatcctggacattgggtttaaggaaagcgatgttaatgtcctcaccgatgcgccagggtcgccggttctgcctacgggtgtaaacattaaggatgcactcaatagaatggtgaacaaggctaaagcaggagatattctatttttctacttcagtggacatggaacacgcgttccaatctttcaacctggccagcctttcaagcaagatgaagcaatcgtggcttgtgatttaaatcttgtcaccgatgtggacttcagacgtttagttaatcggctaccagaaggagcaagcttcacaatcctatcagattcgtgccacagtgggggtctcattgaaaaagagaaagaacaatttggg

SEQ ID NO: 8151 - DNA, 326 bp, Gossypium hirsutum
  Clone ID: LIB3120-028-Q1-K1-E6
tcgtccacgcgtccggtgagactctctcgtataactgtagcatatagtactagtaagcagtaataggaatggcctcctccatgatctcatcggcaaccattgccaccgtgaactgctcctccccggcacaggccaacatggtggcccccttaaccggcctaaagtctgcctctgctttcccagtcactaggaaggccaacaacgacatcacttctcttgcaagcaatggtggaaaagtgcaatgcatgcaggtgtggcctcctcttgggaagaagaagttcgagacactctcatacctccccgatcttacacccgtacagttggct

SEQ ID NO: 8152 - DNA, 307 bp, Gossypium hirsutum
  Clone ID: LIB3120-028-Q1-K1-E7
cggtccgaattccggtcgcccacgcgttcgccacgcgttcgccacgcgttcggagctctcgggcgaaattgaaataccactacttttaacgttatttacttattccgtgaatcggaggcggggcaacggccctctttttgggcccaaaggccgctttcggccggccatcccggccggaaacattggcaagtggggaggttggctggggcggcacatctggtaaaagataacgcaagggtcctaagatgagctcaacgagaacagaaatctcgcgtggaacaaaagggtaaaagctcgcttgattctg

SEQ ID NO: 8153 - DNA, 320 bp, Gossypium hirsutum
  Clone ID: LIB3120-028-Q1-K1-E8
cggacgcgtggggagatattggagattgttgctggttgtagacaatagacaaggtctttttcgggtcctgggcattatcaggagcattgctcatggcactcatcctagctgcaagctcactggctagtgattcctgcaaagccctcagaacctggctgctgctaaagttatgagagcacaagaagctgttgtcaatggcagacctttctatgagtccctggctgaagttctttacaacatcaatgagcagctccagactgaagacatacatgctcctttcacaaacgcaaagcctgtcaaaaaagttgccttgggtgttg

SEQ ID NO: 8154 - DNA, 402 bp, Gossypium hirsutum
  Clone ID: LIB3120-028-Q1-K1-F1
tcggtttcattgacggcaggactctcagactactctttcgaaccagctccaccatcacggccaaaaaacaaagcatattgtagaagatggcaacacaagcacttgtatcatcgtctcttacctactcagtggagactgcaaggcagattctaggagctaaacgacaaattgggtcttgaaggaaaggatccttaggagttaatgcagcttcaactgcacccgttaagcaaggagctgatagacctttatagattgcatctaaacaaagcctttcatacttggatggaagccttccaggcgataatggatttgaccccatgggactatcagaccctgaaggtccagtagggttcatcgagcctaaacggctagcctacggtgagatcattaacgggcgttatg

SEQ ID NO: 8155 - DNA, 203 bp, Gossypium hirsutum
  Clone ID: LIB3120-028-Q1-K1-F11
tcggagagagggaggaaaagatgcagacattcgttaaaactctaaccggcatgaccataactctggatggggtgagcatcgattccattgacaacgtcaaatccaagatccaagacaaagaatcgaatcccaccggaccaacaacgtctcatctttaccggaaaacagctcgaagatggtcgtaccttggctgactacaacat

SEQ ID NO: 8156 - DNA, 394 bp, Gossypium hirsutum
  Clone ID: LIB3120-028-Q1-K1-F3
accactcgtacgcgctattacatacacttcttggacccactactagcaatggcttcatcaatggccacatccgctaccattgccactgactctaccacacaggctaacatggccggtcctttgaccggcctcaagtctgcctctgctatgacagtcaccagcaacgccaccaacgacattacttatgtcgcaagcaatggcggcagactgcaatgcacgcatacggggactactactgggaagactatgtcagacactctctaacacatacccgatcttacacccgagcaagtggataacgaagtacattaccttcgtggctcataatgggaaccttgcttggaattcgaattggaggaccgattcttccaccgcatgcactcgagcttaccca

SEQ ID NO: 8157 - DNA, 277 bp, Gossypium hirsutum
  Clone ID: LIB3120-028-Q1-K1-F4
ccacacttaaggcacaactctcacactactactatcaaccatgtccatcataaaccccataatacaaatcccactgtacaacatagcggcacaaccacctatatcatcgtccacttacctacctaatcacagactgccaagcataatctaggatctaaacgacaaatctcatcttcaaggaaaggatactctgttgataacgcagcttataatccacccgcttaacaatgaacttatatacccttatagaccgcatctaaacaaatcccatcatact

SEQ ID NO: 8158 - DNA, 490 bp, Gossypium hirsutum
  Clone ID: LIB3120-028-Q1-K1-F5
gtgcttcttcggctattgcagctgttgccatctcattccccagttcccagaagactggatcagtagtggggacaacaaaggcttctttccttacagggaagaaacttagatctgtgagaaagtacacaaaaccagctgccggaccaacatttccagtgtgcgccgtcgtcgaccccgacagacccctttggttcccaggcagcactcctcctgcatggctggatggcagtctccctggtgactttggtttcgatcctctcggtcttgggtctgaccctgagacattgagatggaacgtacaagcagagctggttcactgcagatgggcaatgttgggagctgctggtattttcatcccagagttcttaaccaagattgggattttaaacactccatcgtggtactcaggtggaacagaggaatacttcactgacaccacaactctcttcatcgtttgagctaatcttatcggctgggcttgagggagaag

SEQ ID NO: 8159 - DNA, 397 bp, Gossypium hirsutum
  Clone ID: LIB3120-028-Q1-K1-F6
cattgaaggcaggactctcagactactctttcgaaccagctccaccatcacccccaaaaaacagagcaaattgtagaagatggcaacacaagcacttgtatcatcgtctcttacctactcagtggagactgcaaggcagattcttggagctaaacgacaaattgggtcttcaaggaaaggatcctttgttgttaaggcagcttcgactccacccgttaagcaaggagctgatagacctttatggtttgcatctaaacaaagcctttcatacttggatggcagccttccaggtgattatggatttgaccccttgggactctcagaccctgaaggtccaggagggttcatcgagcctaaatggctagcctaccgggagatcatcaacgggcgttatgct

SEQ ID NO: 8160 - DNA, 282 bp, Gossypium hirsutum
  Clone ID: LIB3120-028-Q1-K1-F7
tacactcgtccgcactcatagactccactgttgaacatagtagaccatgacgtccatttctctggtcctgttggattacatctaagaactcatacttatcatatcataatgctgctactctctgaccacttctcattcaattcatggatactcacaaaccattgcctttacatgccaaaactgctggttctataaagggcttgaacttgatcgctttttcgattggctagccatagccatagaacagtcatattggcgacacaaccagtgaatctactgaca

SEQ ID NO: 8161 - DNA, 387 bp, Gossypium hirsutum
  Clone ID: LIB3120-028-Q1-K1-F8
cccacgcgtccgctactccctgtgctatcctttgagcatcacaaagttatacacagaaatggagcgaggaatagagcagggaatggtggtgatgcctcagcaaaaccctttggatcagttgcaagctaagttcaaggaagtggagaccaggttcagaggatggctagccaagctgtccttgcccatcgaggcggctgttgtaaccaccaccagcgctgctcagggtgctgctatcggtgctttcatgggtaccctcaccaacgatgtctcctcctctctttcaactacgccttgatacaagctcggaatactgctgttatgacgggcgtgaatgcaggcatatcttgagttatgaaaagattgagaggacaggatgacgtccaatct

SEQ ID NO: 8162 - DNA, 283 bp, Gossypium hirsutum
  Clone ID: LIB3120-028-Q1-K1-F9
gcgcccacgcgttcggaagctttgatagaggttcatactgttctaacaatgttattataggatcgggcatcgggaaagattgaggcgatgacaacagatgtatgacttgattgaacatctggttgatgactccttgatgctatgtaagttaaacacatatgcacacgaagaaaataaaatataaaggccaggtcatggatgattgattgctattatagcggatagctcagagctggactacttgattaggttcttggtatttagatggcctagcaaatatcca

SEQ ID NO: 8163 - DNA, 375 bp, Gossypium hirsutum
  Clone ID: LIB3120-028-Q1-K1-G1
tttcgaagcgcgctctctctctctctgtcctatttaacactctttcaccaaacgcttcgataaccaaccctctctgaatttcatttgcctcttccgcattttgccccttcccttcattgtccattccccctctcgtctctctctcttctcttccaatggcgccctgcgctgctctccgctcctttcactattctgtaagtgctgcttcacatgcttgctgcacgcttgaaaggcccagtacattacatatgtcttctaagcgctggccaacttcctgagaatcatgtcttccaggcttgacctttggagggaagaacaatccttctacaagacgaactgtagttttagcattctatgcaaagacgcctgaatcta

SEQ ID NO: 8164 - DNA, 236 bp, Gossypium hirsutum
  Clone ID: LIB3120-028-Q1-K1-G2
gaactaaaagaggcaactgtactcgatgaaaaaggacagtaaacatagtgtcgtgaaaactatttccagtaactgctttgctttcaaaaggagtattaatgtgtaaaggcaaaagtcaatatctaccaaatccaggaggggcgtttatgcattgggatcaaaagaaccaacctatatattttgcagcagcaatcaagataagctattcttctgctacatccaagggcttttatcat

SEQ ID NO: 8165 - DNA, 210 bp, Gossypium hirsutum
  Clone ID: LIB3120-028-Q1-K1-G3
tccgtccgaattccggtcagccagcgtcgggaatagctgtggttagaccccttggttgtgtttaaaccccaagattattagctgttaacgagaaagggtatctttggttcggatactttttgcaggaaagcatgttttccttccagaattagatataggattcttaagcgttatggaagggaaagacatgaatatcttcgtgcagcactt

SEQ ID NO: 8166 - DNA, 379 bp, Gossypium hirsutum
  Clone ID: LIB3120-028-Q1-K1-G4
tcgcccacgcgtccgggccatcagactaggagttgaaatcaggctatacagaaaaagatggttgagttctacttgctgtgctgtgggggtgtctgagatgggtgctggcaacctgtttgatgatgggtccttgaaagggtctgaaaatgggtcattgttgggtgcacttggtgactcagttttaccaccatttggaacagtggatgctgaaattaccccagaaaccgttgatttctttgttagtgatgcagaatgtgatcctgactgcccttctaaaggattctcttccattgaccaatcattgaatacaatacgccaaggaaagtttgtgattgttgtatatgatgaaaatgatgattttaaagaacccttatcattg

SEQ ID NO: 8167 - DNA, 372 bp, Gossypium hirsutum
  Clone ID: LIB3120-028-Q1-K1-G5
tcgagctctgaagagggtgaaaatgacgtcttctttgattctttggattgcttgtcgatcgaagagcctgttttagcgaatcaaggattagagtgtgggaaattagagtatgaaatttggatgaatgaacctggaaatgttaaggagcggcgtgaaagatttcttctcggaatggatctagttgagtttgcaaattcatcaaggataaaggatttgcagaggatcacagagtgcagtgatgctgtcttgagttcttcgtgttcgtctgctggcaatggtgaaggaagtattgctgattgtgataggaaactgatgtgtgaagccaatttgttgctcgatgaatcaacagcatcagctctcgagagcgagaat

SEQ ID NO: 8168 - DNA, 222 bp, Gossypium hirsutum
  Clone ID: LIB3120-028-Q1-K1-G6
agctctgaagagggtgaaaatgacgtcttctttgattctttggattgcttgtcgatcgaagaggctgttttagcgaatcaaggattagagtgtgggaaattagagtatgaaatttggatgaatgaacctggaaatgttaaggagcgtcgtgaaagatttcttctcggaatggatctagttgagtttgcatattcattaaggataaaggatttgcataggatc

SEQ ID NO: 8169 - DNA, 256 bp, Gossypium hirsutum
  Clone ID: LIB3120-028-Q1-K1-G7
ggaaatagctgttggtaagaccctttggttgggtttaaaccccaagattattagctgtaaacgagaaaagggtatctttgcttctaatactttttgcaggagagcatgttttcctcctagaataagatataggattctaaagtttcatggaaggaaaagacatgaatatcttcgtccagcacttgctatatcatcagatgtggaagatgttggagtttctttccagtttgaagacttcactgttaccccttctagt

SEQ ID NO: 8170 - DNA, 456 bp, Gossypium hirsutum
  Clone ID: LIB3120-028-Q1-K1-G8
gaggatgaaagtggagcaaagggtttgcaataaggctttagaggaagtgaatggagaaagcttgtacaatagaagctgatggagagctgagcatgagccgagtgtgaaggtggtttggccttgctttgtggatatgttagtttcatctgtccttagttttgttttcattgtttttatttgaaactatggatgagttaagaaaagcagggctcctttttctccggtgtcctgatgatcaaaatgttttacttgacgacattaaaaggggattttggtatgttggttgtttgagctatccatccctcgtgtgtttgtaatgctaattttgactagtaatttataatctctgagaaagggtgttttaagagaatgaatactaatgaagatgagttgttaattggggttctatgctttgaataatttcaggtggattacggttttggttcactatgaacg

SEQ ID NO: 8171 - DNA, 430 bp, Gossypium hirsutum
  Clone ID: LIB3120-028-Q1-K1-H1
ggcaatagctgacgcttagaccctttggttgtgtttaaaccccaagattattagctgtcatcgggataagggtatctttgtttgtagtacttgttgcaggagagcatgctttcctcctagaataagatatacgattctaaagtttcatggaaggaaaagacatgaatatcttcgtccagcacttgctatatcatcagatgtggaagatgtcggagtttctttccagcttgaagacttcactgttaccccttctagtactgaatagagccgaaagctaaagataagagtcgaggtatcatgagccaaaactcgagcaatttttaatgaagcatttgacaagatgcgtgctgatgcccatccaatccctggctttagaagagtataaggaggaaaaacaccaaatatacctagagagattttggtagaagtc

SEQ ID NO: 8172 - DNA, 56 bp, Gossypium hirsutum
  Clone ID: LIB3120-028-Q1-K1-H10
accgtggtggagctccagctgctgttccattcagtgagggataatatcgagcttgg

SEQ ID NO: 8173 - DNA, 415 bp, Gossypium hirsutum
  Clone ID: LIB3120-028-Q1-K1-H2
tcgtccacgcgttcgctccaccatcacccccaattacatagcaaattgtagaagatggcaacacaggcgactcgtatcatcgactcttacctactcattggagactgcaaggcagattcttggagctaaacgacaaattgggccttcaaggtaaggatcctttggtgttaaagcagcttcgactccacccgttaagcaaggagctgattgacctttatggcttgcatctaaacaaagcctttcatacttggatggcagcctttcaggtgattatggatttgaccccttgggactcttagacccttgaagtccatgagggttcatcgagcctaaatggctagcctacggggagatcatcaacgggcgttatgctatgttgggtgcattaggtgccattgcccctgaaatacttggg

SEQ ID NO: 8174 - DNA, 379 bp, Gossypium hirsutum
  Clone ID: LIB3120-028-Q1-K1-H4
cgctccaccatcactgctaagatacagagctgatcgtagaacatggcaacacagggacttgtctcatcatgttttacctactcagtggagactgcatggcagattcttggagctaaacgactaattgggcctatcaaggaaaggatcctttagtgataaggtagcttcgactgcacccgttaagcaaggagctgatagacctttatggcttgcatctaaacatatcctttcatacttggatggcagtcttccatgtgattatggatttgaccccttgggactctgagacccttgaggtacaggagggttcatcgagcctaaattgcttcactacagtgagaccatcaacgggcgttatgctatgatgggtgcaataagt

SEQ ID NO: 8175 - DNA, 442 bp, Gossypium hirsutum
  Clone ID: LIB3120-028-Q1-K1-H5
gctttagcatacactactagtacccactactagcaatggcttcctcaatgatctcatcggctaccattgccactgcctctccggcacaggctaacatggtcacccctttcaccggcctcaagtctgcctctgctttcccagtcaccaggaaggccaacaacgacattacttctctcgcaagcaatggcggcagagtgcaatgcatgcaggtgtggcctcctactggaaagaagaagttcgagactctctcatacctccccgatcttacacccgtgcagttggctaaggaagtagattaccttcttcgctcaaaatgggttccttgcttggagttcgaattggaagagggattcgtgcaccgtaagtactcgagcttacccacgtactacgatggacgctactggaccatgtggaagcttgccatgttcgggtgcaccgactc

SEQ ID NO: 8176 - DNA, 331 bp, Gossypium hirsutum
  Clone ID: LIB3120-028-Q1-K1-H6
tcgcccacgcgttcgctccaccatcacccccaaaaaacaaagcaaattgtagaagatggcaacacaagcacttgtatcatcgtctcttacctactcagtggagactgcaaggcagattcttggagctaaacgacaaattgggccttcaaggaaaggatcctttgttgttaaggcagcttcgactccacccgttaagcaaggagctgatagacctttatggcttgcatctaaacaaagcctttcatacttggatggcagccttccaggtgattatggatttgaccccttgggactctcagaccctgatggccaggaggttcatcgagcctaa

SEQ ID NO: 8177 - DNA, 313 bp, Gossypium hirsutum
  Clone ID: LIB3120-028-Q1-K1-H7
gcacgcttttgacattttaagacaagaacaaagtggagattttataacacaaaaatagaggatgcaaatccacttaaaacacaaatggaaaacaacattcaattaagacacaaaggggggatttcctttggttgtgcccaatatagattgtgttcttcacctgtagagcttaatttcccatttagaaagctcctctcttgatagcatcgccattatcatttacaagggcaggttgactcaaatatttgtcagccaattgaaccctctgtcacattctcttgctcagcaacaagcatgcatacatattgcaaca

SEQ ID NO: 8178 - DNA, 450 bp, Gossypium hirsutum
  unsure (1)..(450): unsure at all n locations; Clone ID: LIB3120-028-Q1-K1-H8
tcgtccacgcgtccgccaagtttctccttcttgagttccctttgatcttcaatggctactacttctgcaatggcaagtcggctgaagagcagttttacatcatctcttacaagaaaactagttgtcccaaagggaatttccggagccccatttatattctcacccggcaagacccgaactccctgtttcactgtcaaagctgttcaatcagacaagccaacatttcaagtaattcaacccattaatggtgacccattcattggaagtctagagacaccaatcacatcaagtcctttaattgcttggtacttatccaaccttccagcttatagaacagcagtgaacccacttctaagaggcatagaagttggtttagcccatggtttcctcttagtaggtccatttgtcaaagctggtcctttaaggaacacagcttgtgcangtcaagct

SEQ ID NO: 8179 - DNA, 327 bp, Gossypium hirsutum
  Clone ID: LIB3120-029-Q1-K1-A10
gaagcattaaatccaccattttttttgttgaattagcagtcacctgctcaaacagtgatattggtgaagggaaactcctgccatggctactagcagcaacaactccatagattcatcactgtccagccaaagattagtggggaaagtggcattggtcactggtggagcaaccggcattggtgagagcattgtgcgtctatttcacaagcatggtgccaaagtctgcattgttgatgtgcaagacaaccttggcctccaagtttgtcaatccctcagcaacggccctaacgtatgttttttccattgcgacgtgacaatagaagaaca

SEQ ID NO: 8180 - DNA, 284 bp, Gossypium hirsutum
  Clone ID: LIB3120-029-Q1-K1-B10
gcggcactcatgggatttgcagagcacagaaggttccaagactgggccaaaccaggttcgatgggggaacagggtttcttggagttcgagaagggccttggagggtctggtgagccggcataccctggaggaccactgtttaacccacttggttttgggaaagatgagaagtcattgaatgatttgaagctgaaagaagtgaagaatgggagattggcaatgttggcaatcttgggttacttcatacaagggctcgtgacatgtgtatgaccataccagaacct

SEQ ID NO: 8181 - DNA, 343 bp, Gossypium hirsutum
  Clone ID: LIB3120-029-Q1-K1-C10
gcgctcgttcgcttttatttgcttctttcaccatgaccaagcttcaggctaactggtctccttacgacaacaggggatggtcttgcgttgcgatcgctggagctgattactgtgttatcgccgtcgatactcgaatgtcaaccggttacaatatactgacccgagagtactccaaaatctgtaaacttgcagataaatgtgtcatggcatcctcaggatttcaagctgacgtgagggctttacaaaagcaactggcagctaggcacttgatttatcagcatcagcacaacaagcaaatgagctgccctgcaatggctcaattgctttccaacacactttatta

SEQ ID NO: 8182 - DNA, 261 bp, Gossypium hirsutum
  Clone ID: LIB3120-029-Q1-K1-C9
gaaaaatggctactgcttacgctactcttcttaagtatgacaccaattatcgacaaggccgagggcaaggatgaccaaaacctggggcacacgttagttagcatcgaacggtcacaccctacataggccgcctaaggcatccgtgcaaaatcatatgccgaagagctcgaaaagaccgcgaaaactggagcatctacaagtcgtggaaactaggccatggatgaatcaaatgctacaagtaggaaacggcttgcctagatt

SEQ ID NO: 8183 - DNA, 380 bp, Gossypium hirsutum
  Clone ID: LIB3120-029-Q1-K1-D9
ctttgttgagactttaaactgagctttgctgaattttcgtgatcgtcgagaaagaaaattatgggaaggaaattcttcgttggcggcaattggaaatgcaatggaaccactgaggaagtgaataagattgtgagtactttgaatgctggagaggtgccttctcaggatgttgttgaggttgtggttagccctccatttgtgttccttcctttggtcaaaacttcactgagacccgatttccatgtcgctgcacaaaattgttgggtcaagaaaggaggtgctttcactggtgaagttagtgcagagatgcttgtcaatttgagcattccttgggttattattggtcattctgagaggagacttattttgaaagagtcaaa

SEQ ID NO: 8184 - DNA, 363 bp, Gossypium hirsutum
  Clone ID: LIB3120-029-Q1-K1-E11
gctgacgtaccggccgaattccgggtcgagcgctcgttcgcccacgcgtccgattcactttaaccttgtactctactattacactgccggaaaaaaatcatgggcaccgtgacgacgcatgcctctgccgctgttttccggccatgtgcatcgaaaacacggttccttactggttcttccggtaagttaaaccgagacgtttcatttaaaccagtggctgctacatcgactagctcattcaaagttgaagcaaagaaaggggagtggttacctggtcttccttcaccagcttacctgaatggcagtcttccaagtgataatggctttgatcctcttggattggcttgagaccctgagaactta

SEQ ID NO: 8185 - DNA, 447 bp, Gossypium hirsutum
  Clone ID: LIB3120-029-Q1-K1-F10
gcgactcgtgcgctcaaattcagataacaatttcacagatgttttcttcactctctctctcagtcatggctgcgggcatcggcaccgtcgccgtcgctgccgtcgtcaaccgagctctgggagtgttagttccaaccttagctttcatggggaagaaagtgagctcgagattcaacaacaccaggcatgttccttcgggaagttttaaggtgatggcggccgaaaaagagatagacgaagagacacagaccgataaggaccgatggaaagggttggcttacgatatttcggacgaccaacaagacattactcgagggaaagggaatggggattcctttgtccaagcttccatgaatgatggaacttacttatgctggcatggagttccaatgattacatattccatgtcttaaaacggtccaatttggacaacaacattggttggtt

SEQ ID NO: 8186 - DNA, 425 bp, Gossypium hirsutum
  Clone ID: LIB3120-030-Q1-K1-A1
atttagctatagcatacactactagtacccactactagcaatggcttcctcaatgatctcatcggctaccattgccactgcctctccggcacaggctaacatggtcgctcctttcaccggtctcaagtctgcctctgctttcccagtcaccaggaaggccaacaacgacattacttctctcgcaagcaatggcggtagagtgcaatgcatgcaggtgtggcctcctactgggaagaagaagtttgagactctctcataccttcccgatcttacacccgtgcagttggctaaggaagtagattaccttcttcgctcaaaatgggttccttgcttggaattcgaattggaggagggattcgtgcaccgtaagtactcgagcttacccacgtactacgatggacgctactggaccatgtggaagctgc

SEQ ID NO: 8187 - DNA, 319 bp, Gossypium hirsutum
  Clone ID: LIB3120-030-Q1-K1-A10
cccacgcgtccgagaagctgagatttggctgtttgtgttccgaaatcctgtcaaagttaccaagagcaacttcaggtggatgaggacaactccagaattttatatcgagagatactaaacgacaactctgcaacttttttcaagcaaccagtaaatttaggatccaaatctaaaaccagaacaccaactttaagagttgaaactcggaccatgatacaccagtacataccatcacttagttgaggtaagtggaatatgaagaagagtcagcttcagtctcccttacttcctaactctcagcaaaaatcactatcatcta

SEQ ID NO: 8188 - DNA, 343 bp, Gossypium hirsutum
  Clone ID: LIB3120-030-Q1-K1-A11
tctgttatagcctgtcttctgtcttacccaatgtcttctgtttcttccttctaccgggcttcggcactcttctcgccggttcttcttctctttattacctctctttggcgtcacaactagacttcgatcaccgatcagaaagcagcctccatctcacgtttccattcatctccatcagtgaaactatgttctgtccattggaaccgttccctgtgggtcttgtccatcgactgctaaatacaagggttagtgcatacggaagggtctgatcaacagctgttgtatacacagctgcaattctcgaatacttgactgcagaatttctataactgtcatgttaact

SEQ ID NO: 8189 - DNA, 463 bp, Gossypium hirsutum
  Clone ID: LIB3120-030-Q1-K1-A2
ccatctcccacaaaacccttcgacatccgaaccaggcggagttccgcagcgtccgtacgatttagggctttcctgagaccaacgatcacgatgtaccgtactgcagcttctcgcctccgagctctcaaaggtcgcacaagccgtatagcacctgcaaggtttgcaagttcaagcactgttgctacaacatcatcctcttcaggtggcctcttaagttggctgactgggagtcaatccaagtctgtaccatcactagatttccccctacctggtgttgccctaccaccttcattgccaggctgattcagggggccaaactcattttgctcttgcatttgaacttcctggtggttggcacaatgagaaggaagctataattttgaccggtcttcagattctaatgggaggaggtggatcattttcagctggtggccctggaaaaggaatgtattcaagattatat

SEQ ID NO: 8190 - DNA, 418 bp, Gossypium hirsutum
  Clone ID: LIB3120-030-Q1-K1-A3
caagaacgaaggaaatagaattttcctctttttttgttttgtgaattcttgagaaatggttgatgtagccgataaattggcatattttcaagccatcacgggactcgaagatcccgatttgtgtacggaaatccttcaggcccatggttgggaccttgaactcgccatctcttccttcacctcttccactcaaccctccgcttcttccactgtctctgattccgaccctcccgattcacgggcccggactgattccgccttcgcctccggtcctattaccgctcccgcaccgggcttagcctggagactcgttacattaccgatttccgtgatatccggaagtttagggttgatctctggcgctgttgggctgggtctatgggccgcgggtggagttctttcgtattcccttgggatg

SEQ ID NO: 8191 - DNA, 467 bp, Gossypium hirsutum
  Clone ID: LIB3120-030-Q1-K1-A4
ctttatttgccttttcttttttttttccccttcggagtttgcttttttgcagatcaaggaagaaagttatggcagaagaagaaactgaactgagcgacaagcaaaagaaagagatcgccaaatggttcctcctcaatgctcccgcaggcgaaatccagtacgttgccaaagatttaaaatccgttttgaataatgatgacgtctacgatgaggcggcatcggaagcatttcctgtttataacaaatctcacatgatttgcctcgaaatgcctggtagattcggagatgtgctggttacatcatatggggagcttcaaggtaatgagtatctaaaccccaagactgcccaagttgctatagttgaccatgtcaaacaagtttggacagaggttagacctgccactgatgaggaaacttccactccatatgttgaggaataccgatgtgctctggaagcagaaatgctg

SEQ ID NO: 8192 - DNA, 327 bp, Gossypium hirsutum
  Clone ID: LIB3120-030-Q1-K1-A5
gtgatgatgatgagtttggtggtggaggttggtgcggatgatgagagtggtttagccaaagagtgcagcatagatgtacagagcgcgatgacttgcttgagctttgcgcaagggaagatggagaaaccttcaatggagtgtcgcagatcggattcgagtataaaagaagaagaaccaaagtgttcgtgttatattcttgaggagacccaggcattcggggctcagaatcttaagagcatatgcgttcattaagataagcttctttaacttccttctgcttgccagttgaagaacgctagcgtcactgactgtccaaagcttcttgga

SEQ ID NO: 8193 - DNA, 470 bp, Gossypium hirsutum
  Clone ID: LIB3120-030-Q1-K1-A7
gcaaaaaagaaataaaaacagtttcatttccattctaagtttgtgtttttgatttgccttttgggggtttttttttataaaaagggtcatcaaaaatgtttattgagaattttaaggtggagagccccaatgtgaagtacacagagaatgaaattcagtctgtttacaactatgaaactacagagcttgttcatgagaacaaaaatggaacctatcaatgggttgttaaacccaaaactgtcaaatatgaattcaagactgatatccatgtccctaaattgggggtgatgcttgtgggatggggaggaaacaatggttcaaccctcaccggtggtgttatagctaacaaagagggtatctcttgggctactaaggacaaggtacaacatgctaattactttggttcattgactcaagcattaacgatccggattgggtcttacaatggagaagaggattatgctccattt

SEQ ID NO: 8194 - DNA, 456 bp, Gossypium hirsutum
  Clone ID: LIB3120-030-Q1-K1-A8
gtcaagtaccagcgtttcaaccagccatgttgtgaatttgaagagagatcaccctttactccatggtcaagctcaagggttaaagcctaaaccctcctctcatttcttattcaatccacactctaacactgttgctgcttcatcatctaaagctttcaccacttttgcactcttcaaaccaaagaccaaagcagctcctaagaaggctgcacctaaaccaaagccaaacgttgaagatggaatctttggcacctatggagggattgattttaccaagcaaaatgagctctttggtggacgtgttgccatgattggctttgctgcatccttattaggtgaagcaataacagggaaaggaattctagcacagctgaacttagagacaggaattccaatttatgaagctgaaccccttcttctcttcttcattcttttcaccctactcggagcaatcgg

SEQ ID NO: 8195 - DNA, 465 bp, Gossypium hirsutum
  unsure (1)..(465): unsure at all n locations; Clone ID: LIB3120-030-Q1-K1-A9
cacaccacaactactatactcccaaaatggctcttacaatccccactaacctctccaaatcccgtttgaagccaaagataaagtccgaactcacccccaaaggttcacgatcattggtggtatgctccaccgacaagacttcatcgccaccatcatcagcttcaccactccaagccttctcagcagctcttgctctttcttccattcttctctcagccccgcagcctgccgtagctgatattgcaggcctcacaccatgcaaagagtccaagcaattcgccaaacgtgagaagcagcagatcaagaagctggaatcgtcgttgaagctatacgcccctgacagcgctccagctctcgctatcaaagcaaccatcgagaaaaccgagagacggtttgacaactatgggaagtacgggctgntgtgtgggtctgatgggttgcctcatttgatagtgagcggtgatc

SEQ ID NO: 8196 - DNA, 378 bp, Gossypium hirsutum
  Clone ID: LIB3120-030-Q1-K1-B1
gctagagacgggattagcttactcaagatttggaatgtaaacaagtgttccggtgtggttggtgcttttaactgccaaggtgctggttggtgcaaggtcaccaagaaaacccgaattcatgatgcatcacctggtacacttacaggttctgtttgtgccaacgatgttgattcgatcgctcaggttgccggtgcggactggaacggggagagtgtggtttatgctcatagatcaggagagctggtacggttacctaaaggtgcttcagtgccggtaacacttaaggttctcgagtatgaactatttcacttctgtcccgtcaaggaaatttccaacaccatttcatttgcaccaatcgggcttcttgacatgttcaac

SEQ ID NO: 8197 - DNA, 330 bp, Gossypium hirsutum
  unsure (1)..(330): unsure at all n locations; Clone ID: LIB3120-030-Q1-K1-B10
gaactaattccccaaaatttgtttcagtaatggctgcctcagttatggcttcttcagttaccgtcaagccttcattcaatggtgagaaacctggtgtaagaggggttccttcccttgctaggtccccttcttctttcaagggtgaagccagtggtggcaagaagatcaagaccgacaagccttacggaatcaatggtggtatgagcttganggatggtgttgatgcctctggaaggaagggtaagggaaagggtgtttaccaatatgttgacaaatatggtgctaacgtcgatgggtacagtcctatctacaacaccaacgactggtctc

SEQ ID NO: 8198 - DNA, 314 bp, Gossypium hirsutum
  Clone ID: LIB3120-030-Q1-K1-B12
tcgtccacgcgtccgtctttctcttcatatataatctttattttcaaacaccctaaatttacaaccgcatattccagagaggatttttttttaaaaaatggtgatgaagttaccttatctgggttcttgtttgtttttggttttttttagtttggtttctattgttgcttctgggtctggaaaagggctcccaattctttcattcgatgaaggatataatcagttgcttggggatgataatctagttatccatagagatggtaaagctgttcacttgtctttgaacgaaagaacatggtcggggtttgtgtcac

SEQ ID NO: 8199 - DNA, 450 bp, Gossypium hirsutum
  Clone ID: LIB3120-030-Q1-K1-B2
gtcaagtaccagcgtttcaaccagccatgttgtgaatttgaagagagatcaccctttactccattgtcaagctcaagggttaaagcctaaaccctcctctcatttcttattcaatccacactctaacactgttgctgcttcatcatctaaagctttcaccacttttgcactcttcaaaccaaagaccaaagcagctcctaagaaggctgcacctaaaccaaagccaaaggttgaagatggaatctttggcacctctggagggattggttttaccaagcaaaatgagctctttgttggacgtgttgccatgattggctttgctgcatccttattaggtgaagcaataacagggaaaggaattctagcacaggtgaacttagagacaggaattccaacttatgaagctgaaccccttcttctcttcttcattcttttcaccctacttcgagc

SEQ ID NO: 8200 - DNA, 417 bp, Gossypium hirsutum
  Clone ID: LIB3120-030-Q1-K1-B3
cccacgcgtccgaaccgctgaacacccttcctttgttgggttttcttgcgcagatcgagctgggggttgattgcaccatgcatggtttatcaatccagattagttccaaccttatcaaccggcttgctgaagatgatgagaaactgaagaaaagaacaaagaaaactaaaccccgagtgcctcgagagcctcgacaaccacaaacaaaggtagatcagacacaaatacctgatgattctgaaaaacagaacaagactacaggctcaggatggccagttccacctcctatgtttctaccggtaaaccaacctccttactctgcaactgcacagttagacccgattcgagctgtcgttaaagagagtgaaaatgttgtcgagaagttgcggaagcaggaggacaacatggtgcaagaag

SEQ ID NO: 8201 - DNA, 423 bp, Gossypium hirsutum
  Clone ID: LIB3120-030-Q1-K1-B4
ctttaataatcaatagcacaacatacattctcttctacatataagacttaactgcaactattggggattccacaaatctggggaggtactatgatcctattcatcctgtataccattacttcaacattaaccttggacttcccatctgatcaatctatgaaatttacatgattaacaatcaccatgaatcaaatgtatatgatccactgtaacctaggtagcaaatacttgcatgatcctatatcatttaatgaatctcttgctcgctacttctgatcacacccaataggacttacaaattaaccattaatccatatattggacagatcatactaactcatccatatatcatgattcctaagtaatggaatatccatttacttaatgcaagctatgcttagaacttcaatggtccaaccatca

SEQ ID NO: 8202 - DNA, 217 bp, Gossypium hirsutum
  Clone ID: LIB3120-030-Q1-K1-B5
gcatacacctctccaaaattcccgtctggacacacgcgtgcgtacacgcttaatcaccttactaaactttctttttttattcatttatctcacattatactgggggttaatctaaccatgcgtggggtattaaatcacattaacttcaaccttatcaaacgattcattacctgttacacttaccttttcaatttatcccatctatctaaaccccatc

SEQ ID NO: 8203 - DNA, 454 bp, Gossypium hirsutum
  Clone ID: LIB3120-030-Q1-K1-B6
aacccccattctcccattatctgtaagagaagagaagcttttgaataggtcttcaatggctggggctacttcggtttcagtggcgggggtttaagggaagtttacggaagagttcctttaatggaggtgaagattatgccatgttggcggctaaatcgactcccaacgtcgttcgaatcggaaagccagatcgagctcaggcgatgatgaagaacgttaatgaagggaaaggggtgttcgcgccgcttgtggtggttactcgccaaatcgtcggcaaaaagaggttcaatcagcttagaggaaaagctattgccttacattctcaggtaattaacgaattttgcaaagcacttggggcagatggtaaacaaaggcaaggattgattcctttggcaaataagaatggcgagaagctaggattccttgcctgacttatggccttacacgtggactt

SEQ ID NO: 8204 - DNA, 61 bp, Gossypium hirsutum
  Clone ID: LIB3120-030-Q1-K1-B7
gcgcacacgcccgagctggaggacaccgttactttcgtcactcaagttgcgcacatctaac

SEQ ID NO: 8205 - DNA, 461 bp, Gossypium hirsutum
  Clone ID: LIB3120-030-Q1-K1-B8
agccaacatggcctcattagcagcctccaccgctgccgcctcccttggcgtctctgaaatggggggtaaccctctgaatttcagtggtggagctaggtcatcggctccaacaccatccaactcatccactttcaagaccgttgctcttttctccaagaagaaggccgctcctccaaagcccaaggctgctgctgtcgccccggccgatgaagagctggctaagtggtacggtccggacagaaggattttcttgcctgaaggtctgttagacagatcggagatcccagagtacttgaacggagaagttcccggagactatggatacgatccgtttggtctgagcaagaagccagaagactttgcaaaatatcaagcatatgagttgatacacgcaaggtgggcaatgcttggtgctgcagggttcatcatccctgaagcctttaacaaatttggtgccaact

SEQ ID NO: 8206 - DNA, 403 bp, Gossypium hirsutum
  Clone ID: LIB3120-030-Q1-K1-B9
aaaagccttctcactgtacgccctgaaactgagacacctgtcagtgctgcttccatccgaagggttctagggttccagctgatatgcctctctatgatattctgaatgagtttcaaaagggcagcagtcatatggcagctgttgtgaaggctaaaggaaaaaataagaaccttcctccgactgttgacggactgaagtctgaagaaaacaaagtctccagtgcagatacccagctgactactcctctgttatccaagctggatgagaagccagagagcattgtacttgacgttgataagttgtcaagacctaccaatacaagcaggctagatgctgtgacaaatggattgtctgtcacatcagaggacattgaagatggtgaagtgattgggattatcaccct

SEQ ID NO: 8207 - DNA, 437 bp, Gossypium hirsutum
  Clone ID: LIB3120-030-Q1-K1-C1
cccacgcgtccgctcctccacccactgccaaaaatatcactaaaccaagtctgacgccaaaacccaaaatgagtaaaaatagaaagagaaatcctccgttgaaatggcatctgcaacagcaagactcatttttcctcttcaccacttaacccaaccttgtcccaagcccaaaaaacctaatctctttcccccccataaactcctctccagaattcctcccaacatcatccaaacccatagaaaccaatcccatttcaccgttcgttccattgatgtctctaaagaagacagtcaagaaaccccaacttctgacccagaaaacaaacaatctccatcagtggaagaaacaagtgggggagaagagacgattgacaaacgcacgttagaagagaagtttgcagtgttgaacacaaggatatatgaatgcaggtcatgtg

SEQ ID NO: 8208 - DNA, 312 bp, Gossypium hirsutum
  Clone ID: LIB3120-030-Q1-K1-C10
tcggccttgacatttgatgtttctacttcaccattcttcaacaagtacttttattgcctggtgtggggtttaaggaacttgagttcactgggacaaaatcttgtcactagcacttatgtgggtgaaataatttttgtcatcattattgcaacccttggtctggttctcttttcgctgctcattggtaatatgcaaacataccttcaatctactactgtcatgttggaagaatgtagaattaggagaactgatacttatcaatggatgcgtcacaggcaactttcttctgagctaaatctatctgtatgaaaa

SEQ ID NO: 8209 - DNA, 335 bp, Gossypium hirsutum
  Clone ID: LIB3120-030-Q1-K1-C11
tatctgaaaccgtggctcctcttcttccccaagcctctaaccaccgctctaaccaccgctttagccaccaccaccttactcctaacctcccctccctcctccattgcctctgattcatacaacgtctactacggaaccgccgtcagtgccgccaactacggaggctacggtggaaactccgacaagaaagcctccgccgagtacgtctatgatgtccccgactgatggaaagagcgtttagttttcaaagttgaaaagggcaccaactggacggacagcgaattctacaacccctaaaaaagactagagaaagagttcttaacattcttggctgg

SEQ ID NO: 8210 - DNA, 283 bp, Gossypium hirsutum
  Clone ID: LIB3120-030-Q1-K1-C12
atatttagctatagcatacactactagtacccactactagcaatggcttcctcaatgatctcgggggctaccattgccactgcctctccggcacaggctaacatggtcgctcctttcaccggtctcaagtctgcctctgctttcccagtcaccaggaaggccaacaactacattacttctctcgcaagcaatggcggtagagtgcaatgcatgcacgtgtggcctcctactgggaagaagaagtttgagactctctcataccttcccgatcttacacccgtgc

SEQ ID NO: 8211 - DNA, 466 bp, Gossypium hirsutum
  Clone ID: LIB3120-030-Q1-K1-C2
gcctaaatctgcatcttcggaaattttaatcaaagaactacttgcagctggaggaatctctaggggtcaagacaatgtatcaaggagtgctattgtttctcatctgaaagagcacggtgtacgtgccagtcctggaacatcattcatagtccctgatgcagagatatttttgtacactggtatggagaatacatactatgcatgttgtgaaaaagaaagcgtggaatatatctcgtgcctgagtgaactaagcgacttgaacttgagtacttcgtttgatactaagaagtcaatctctgtaaatcatactgcgagacgactgaagaattttctccattggcctatgaagaatgaaagaaaagctactagcacagaatcgggagacactgatgatcctgtggaggttacgagtacttgtagaaactggccagacattcatattccgcttcgtgaaaagtacacgaaa

SEQ ID NO: 8212 - DNA, 411 bp, Gossypium hirsutum
  Clone ID: LIB3120-030-Q1-K1-C3
cccacgcgtccgctcagaaaccgctgaaaaactcgaaccccacccgaagacactggccatttgggggttaatttgaagctgaagggaggtgggattttttttcttcgagcctttgattcaatggctctttatttattgtacgaatcatcttctgggtatgcgctattccaagctcaagggctcgatgaaatcggtcaaaacacagaggctgttaggaactcggttgctgatctgaaccggttcggtaaggtggttcaactcactgcttttcagccttttgaatccgccattgatggtctcaaccaatgcaactctgtttctgaagggctaatgaccgatgagttaaggagttttcttgagcttaatctccctaaagttaaggaaggcaataaatccaagtttagtcttgga

SEQ ID NO: 8213 - DNA, 464 bp, Gossypium hirsutum
  unsure (1)..(464): unsure at all n locations; Clone ID: LIB3120-030-Q1-K1-C4
attttagcagggtttttaagactggaaaaggcaacctcagaacgatgtcgtatcaatgagttggaagttacaacgccgtcggttgggacattggccatccctttccctttgtacatccctgtccttccttccttccttccttgcctttaagatgacaccccagtcgtaaaagggctctaagcctcgtccgcgttttcctcttttccctttactcggtgaccgaaatttctcgactcaccgtgttcacaacctctagatctggtacttacaaggcccgatttcataatttcaagatctgcttccagcatctaaacgcgaccgttttcggaactcaactcggagcttcaatttttaaggtttggaatttggatgtgcttggcttttatttggtctactggaaatgtcggttttgcccaaaggtgattcagttcatattcgagaagtttggaacgatnatctagaag

SEQ ID NO: 8214 - DNA, 145 bp, Gossypium hirsutum
  Clone ID: LIB3120-030-Q1-K1-C5
cacacaatcacatacacagacatatttgacattaccactaatccatcatccgtccctaagtgggagctgaatacaatttcgtaggtgcttccttacttcaatatgcagtctttacaccaagtctcataaatccatttcaccactt

SEQ ID NO: 8215 - DNA, 424 bp, Gossypium hirsutum
  Clone ID: LIB3120-030-Q1-K1-C6
gtttctttttcctccttcgacgagcgatggacacgttctattcgttctttgattctcaatcgagaatccagcgtaattacaacagtctcaagaatttccgtcacatctctccaatcgttcaaacgcatcttaaaaaggtttatatgaccctatcacgtgcgcttgatgcctctgcgattggtgcttatcttcatataatttggaacattgtgggttacctcactacatttgcatgccttggatccataatttgtatccattatacccattcttgtcaagagcaaaatagggattctcttctaatggcatcacgcgtctctgaaagagcttcaattcgtcctctaaatgacttgggcattcaaattgacccaactgttctggtaactgcattccttggaacagcatttgcctttgcatgcttttc

SEQ ID NO: 8216 - DNA, 314 bp, Gossypium hirsutum
  Clone ID: LIB3120-030-Q1-K1-C7
tcgaaacagaaaactcagtttgtgctaaggccgttagactattgtcaactccaactgctctgtcgcacccaacaaagctctgggtcggctcatcacccaaacccatatcaacagcaacctccttctttcaatggacatccacgagcagagtttttacagggaaaatggtggaaaatgcatgtcttaatgtggaagaatagaatgcgaaatatactagtaaacaagaatggggcatggtgtctgctgtactttttgacatacatggctcgttgtgcaactgtgagaaccctcctataaaggctgatgcttatcgt

SEQ ID NO: 8217 - DNA, 407 bp, Gossypium hirsutum
  Clone ID: LIB3120-030-Q1-K1-C9
gcgactcgttcgtctcactccggcatcttcaataatttcttccgttgatctttgttagagattagctttttaatgtttcattatgggaaagatcaagatcggaatcaatggatttggaaggatcgggcgtttggttgctagagttgctctccaaagcgatgatattgagctcgttgctgttaacgatcctttcatcaccactgaatacatgacctacatgtttaagtacgacagtgttcacggtcaatggaagcatcatgagcttaaggtgaaggactcaaagacccttctctttggtgaaaagcctgtcacagttttcggtatcagaaaccctgaggaaatcccatgggctgaggctggagcttagtatgttgttgagtctactggtggttttactgacaaggaca

SEQ ID NO: 8218 - DNA, 457 bp, Gossypium hirsutum
  Clone ID: LIB3120-030-Q1-K1-D1
gtttgaagctccagaggaagcagaaggcgacgatgatggaatatcagaagaagagccagtagggggattttggagtgggtttatatggctagttggaatgactgttgtcatttctctcctctctgaatatgttgtagaaactattgaggatgcctcggatacttggggaatttctgtaagtttcatcagcattattctgctacccattgttggaaatgcagcagaacatgcaggagctatcatttttgcttttaaaaataagctggatatttctttaggtgttgcattagggtctgcaactcagatttccatgtttgtggtcccactctgcgtccttgtctcttggattatgggcattaacatggatcttaatttcaatctccttgaaactggctctctcgctctatccattattgcgtgtgccttcactttacaggatggcacttctcactacatg

SEQ ID NO: 8219 - DNA, 315 bp, Gossypium hirsutum
  Clone ID: LIB3120-030-Q1-K1-D10
cccacgcgtccgatttaatgttaggctatggaggacattcacggaatggtttaactgccttggagtggcagcattaatcgatgagaagattctgtgcatgcatggaggcctttctcccgatctgaataatttggatcatattcgaagtttacaacgcccgactgatgtaccagacacaggtttgctctgtgatcttctttggtcagatcccagtaaagatgttcaaggttggggaatgaacgacagaggtgtttcatttacttttggtcctgacaaagtgtcagagtttttacagaaacatgacctacatctcat

SEQ ID NO: 8220 - DNA, 392 bp, Gossypium hirsutum
  Clone ID: LIB3120-030-Q1-K1-D11
cccactcgtccgaggtaacacacctggctgttcatcatcagcttgtgtctatggcattcaatggggagactcatctttctcagttggaatctttgctaaagaaaagctcaccttgacatcaactgatgtgttcgatgactttctatttggttgtggccaaaataatcaaggtcttttcggaggggcagccggattgataggacttggccgagataaattatctctaccttcacaaaccgcctctaaatacaggaaatacttctcctactgcttgccatcatccttcagctcaacaggtttcctcagttttggctacggtggtgtatcgaaattcgtaaatttcacaacgttgaccactatctcccaaggtacatccttttacggaattgaca

SEQ ID NO: 8221 - DNA, 288 bp, Gossypium hirsutum
  Clone ID: LIB3120-030-Q1-K1-D12
cccactcgtccgtctttctcttcatatataatctttattttcaaacaccctaaatttacaacgacatattccagagaggattttgttttaaaaaatggtgatgaagttaccttatctgggttcttggttgtttttggttttttttagtttggtttctattgttgcttctgggtctggaaaagggctcccaattctttcattcgatgaaggatataatcagttgtttggggatgataatctagttatccatagagatggtaaagctgttcacttgtctttgaacgaaag

SEQ ID NO: 8222 - DNA, 465 bp, Gossypium hirsutum
  unsure (1)..(465): unsure at all n locations; Clone ID: LIB3120-030-Q1-K1-D2
ttgggttgcaatggcacaagcaatggcatcgatgactggtttacgtggctcttcacaagctgggttggaaggtagtctccaactgagcggccaaactcggttgaacgttgctagcaccaacaggttggctgtggctagacccggttttaccgttagagctcaacaggtccctgccgagcctgaaactggacgcagagctgtgctgggtcttgttgctgctggtttggctactggctcctttgttcaagctgtgcttgctgatgcacgaagcatcaaggttggcccgccttcaccggcctccggtggattgcccggaactttgaattccgatgagccaagagaccttgatctgccgtacaaagatcggctnttccttcaaccattgacttcggcacaagcggctcagagggcaaaggaatcagccaaagacatccttggtggcaagaccttgatcgacaaaaagca

SEQ ID NO: 8223 - DNA, 423 bp, Gossypium hirsutum
  Clone ID: LIB3120-030-Q1-K1-D3
gaagaagatgttaagctaggagcaaacaagttctcatagagacaacctattgggacatcaggggagacagacaaggactacaaggagccaccagcagcacccttctttgagcctggtgaactcaaatcatggtctttttacagagctggtattgccgagtttgtagccaccttcttgatcctttacatcaccgtcttgacatgcatgggtgtgtctcaatctaaaaccaaatgtgcaaccgatggtattcaaggcattgcttgggcttttggtggcatgatctttggccttgcttactgtactgccggcatttcaggtggtcatattaaccctgctgtgacctttggattgtttctagcaaggaaactgtcacttacaaaggcattgatctatatgatcatgcaatgcctgggtgctatctgt

SEQ ID NO: 8224 - DNA, 449 bp, Gossypium hirsutum
  unsure (1)..(449): unsure at all n locations; Clone ID: LIB3120-030-Q1-K1-D4
cccacgcgtccgctctgtatagattcttctagttccgaccaaaaaaacaattgctcatctttcgcttcanagaatatttgttttgagtgaaaaaaaaaatgttgggagtattcagcggagcgatagtgtccccgccggacgagctggtggcggccggttgcaggacgccgtcgcctaagataacggcggacgctcttgtgaaacggttcatcgaggcaaacccctccaccgtgtccttgcagatcggagatcatgtccaattcgcgtattctcaccgtaacgagtctgctttacttcccaggtcattcgcggtgaaagatgaaatattctgcatgtttgagggggcacttgataacttagggagtttaaagcagcaatatggacttggtaagtcagcaacagaggtggtgttggtgatagaagcttacaaggctcttcgtgacagagca

SEQ ID NO: 8225 - DNA, 446 bp, Gossypium hirsutum
  Clone ID: LIB3120-030-Q1-K1-D8
attgctctcaattggtgttactgctactgaaagaatttgcccttgagttccaaaggaataggatcaatggccatgaatgtcagcagtgcctgtttctcagttttgagttgcaagaaacccaaccgaataagagcggatgcttccgaggattttgccactaccgctgctctcaaaacagatacagaagacaaattgaggttaggaggatcggagctcaaagtgacaaggctcggaatcggagcttggtcttggggtgacaccagttactggaacaactttcaatgggatgatcaaaaattgaatgctgctaatgctgctttcaatggaagtcttgattgcggaattacgttcttcgatacagctgaactttatggctctccgctcgccttacgtgctgaaaattctgaaactctactgagaagatttataaaggaaagagaaaatga

SEQ ID NO: 8226 - DNA, 404 bp, Gossypium hirsutum
  Clone ID: LIB3120-030-Q1-K1-D9
gcgactcgttcgaatgaatcatcccaatattgtgaatcttaatgaggtcattagggaaaatgacattgtgtactgtgtgtttgaatatatggaatgcaacctataccaacttatgaaagacagggaaaagcttttttcagaacttgacattagaaattggtgcttccaagtctttcaaggtcttgcatacatgcaccatcgtggttattttcatcgtgacctaaagcctgataatttgttggttactaaagatataatcaaaatatctgattttcgtcttgctcgtgaaataatctcacgttcaccgtacacctgatatgtctcaacacgcttgtatcgtgcccctgaagtacttcttcaatcatacctattcactttaaaaattgatattgtggccattggtt

SEQ ID NO: 8227 - DNA, 430 bp, Gossypium hirsutum
  Clone ID: LIB3120-030-Q1-K1-E1
gccattgctgtttgccacggatttgctctctttgcagtggctatcggtgccaacatctcaggtggccatgtcaaccctgcagtaacttttgggttagctcttggtggccaaatcaccatactcactggcatcttttactggattgcccaacttcttggatccattgttgcttgcttcttgctcaaggctgtcactggtggtttgacagttcctatccacggtcttggagctggagttggagctattcaaggagtggtgatggagatcatcatcacatttgcattggtttacacagtgtatgcaaccgcagctgacccaaagaagggatcactcgggaccattgcacccattgccatcggcttcattggtggtgccaacatcttggccgctggtccattctctggtggatccatgaacccagctcgctcct

SEQ ID NO: 8228 - DNA, 307 bp, Gossypium hirsutum
  Clone ID: LIB3120-030-Q1-K1-E11
tcgcttcttcgaaactcagctgaaatgtctactttaacaatgagcttcaatttggcgggggcatgggggcgtctttctctagcatcaagctcgacgtcggcctttatgaaaggcgaagtgggctccattcacaaaacggcagtctgttcgttcccgaggtagtctcctttccctttgacgatcgaatctgcgcacaaaaaatgagccggtagttctaaatactgtcgcgattcataggttcaactactctgcttcaaaatctacggcgaccagttcgtcaatcccctgccttattatacgttatggt

SEQ ID NO: 8229 - DNA, 253 bp, Gossypium hirsutum
  Clone ID: LIB3120-030-Q1-K1-E12
tcggcccaacacactgtgaaagaaaaaagctctcacaggaaacagcgccaatggctacttgtaccggccaccttcatcatcggggaggataacatacgccgtcgcatctactgtacacgcccaagccctcacttcttccgttctatccttcaagtccaacaagcctaccttttctattaacccacttgctctcaagacttctatagacagaaaatccggcatcaaatgggctaatctatgtgcccagagagat

SEQ ID NO: 8230 - DNA, 429 bp, Gossypium hirsutum
  Clone ID: LIB3120-030-Q1-K1-E2
ttagtctcccctccatccacatctccttccttcagctctaagagccttaaaacaagttcactggttggagaatcattaagggttggtccaaggtcatcattgaaggtttcaaaggcaaagcacactacttcactagtgacaaaatgtgaaattggagagtctttggaagagtttctcacaaaggcaacaacagataaggcattgattagattaatgatgtgtatgggtgaagcattaagaacaattgcttttaaagttagaacagcttcatgtggtggtactgcttgtgttaattcctttggtgatgaacaacttgctgttgatctacttgccaacaagcttctttttgaggctttgacatactcgcacttttgcaaatacgcgtgctccgaagaaattcccgagctttaagacatgggaggacctgct

SEQ ID NO: 8231 - DNA, 375 bp, Gossypium hirsutum
  Clone ID: LIB3120-030-Q1-K1-E4
tcgcttttcgactcaactctctgtgattgggctcagcgaagggcttattacattcacgcgaattgggtctccggaggctgcttgcgaggttatagaggcagagaggcactctcatgtcttttacgaggcagagccagatatgtggatgggtatgatagtggagaaaagtaaggagccggaagccatatggcggattgatgcattaagataggttctcaaggaaattcactctcttttcatgatgtttcatggatctattagagctttgcttgacaaagaacctggcggaggactaactcgtgctcatttataccctttcatcatggattatctaagagattttctggttgggaagaaactcctgttgccatcatt

SEQ ID NO: 8232 - DNA, 231 bp, Gossypium hirsutum
  Clone ID: LIB3120-030-Q1-K1-E5
cccacgcgttcggtccgtctcacttcaagctgcagctaccctgatgcaaccaatcaagacgggggcaccatcaacgaccaatgtgctgctcaggtcctcccagagcgcatataacgcctctcacttgcatcctgtactggctaggcgcacctgctgtatgcatactgacctgaaggactctactcagacgcacgtttatgctaccaagctctatggcctcgctcttgctac

SEQ ID NO: 8233 - DNA, 443 bp, Gossypium hirsutum
  Clone ID: LIB3120-030-Q1-K1-F1
cccacgcgtccgctttgaattgaaaccctcaaaattccacttaaaaaatggcctccacagcttccctctccaccgccgtagccaccacctctttcctccgcggccacccggccccgaaaaccctaagctcccttcctttcaaccaatctcttttcgggctaaaaccccaacgaaatggccgtctcaccatggctgcatacaaagtgacactgttaacacccgaaggaccccaagaattcgtgtgccccgacgacgtttacatcgttgaccaagctgaggaagaaggcattgatcttccgttctcgtgtagggctgggtcttgttcttcgtgtgccggaatgattaagcaaggctccgtcgatcaatccgacggtaatttccttgatgatgaccagattgctgcaagttttgtcctcacttgtgttgcttaccctcagagtgat

SEQ ID NO: 8234 - DNA, 255 bp, Gossypium hirsutum
  Clone ID: LIB3120-030-Q1-K1-F10
agataagaaagcaaaatggcttacacaattttgtcacctgtactccactctctttcggtccggggtgttcgcgacgcgctccccggacgatccatcaaggcgcatgtcagtaaacctgcgccgacggtttctctccctaaccggatgcagcttctgttctttctgacggcaactacggcattgacagttaaagacccttcttctaaagcggaggacaattcattgttcggtttgaggaataagttgaagaaagct

SEQ ID NO: 8235 - DNA, 299 bp, Gossypium hirsutum
  Clone ID: LIB3120-030-Q1-K1-F12
cccacgcgtccgggttcttctgacttcattatcatagatacaagaagattattgtcatacatgcgaaagaatgtgcataagaaagaaacttcgctcgatgtaccaattgtcgtctacactacacctgcttttgataatggatgggacaggctgggaagaatgcaatatatgtcaaagtctgcaattgagcatagctaccggtaaagtgtcaaacattgacaataaatgcaaaccagttctttcaggcaatatatgctaaagtctgtgaaatgatcatagctaccgggaaagtgctaaca

SEQ ID NO: 8236 - DNA, 89 bp, Gossypium hirsutum
  Clone ID: LIB3120-030-Q1-K1-F2
tttctttctcccggaaatcatgtctgccgtcactacacaagcctcggctgccgttttccgccgatgcacgtcgaaaactagggtgctta

SEQ ID NO: 8237 - DNA, 323 bp, Gossypium hirsutum
  Clone ID: LIB3120-030-Q1-K1-F3
attgcattttctcaaaaatgtcgctcctgcaatcttacgtgtatcctccgtcaacacttcgtgggtcgccgtcactgtcatgcacagcggcacaccccatcggctgctcccatagagttccttccacttcgaattccttcgtcgcgttagaatcgtcatcgttaaagaccggtaactctatttcgagcgctaagaacgatagtatgaaaggcgttgtcggagaggtgaggtcgagcctggagacggcggagcaactggggggcacgtgacggacgttacaaaggacaccttttggcccatctgttacgccgcgggggataaaa

SEQ ID NO: 8238 - DNA, 296 bp, Gossypium hirsutum
  Clone ID: LIB3120-030-Q1-K1-F4
gtgctaagttctgttatggtatcacaatcactctcatcgcctataacatcgtatctgcacgaggtgcggctgaatacttgcgggtgaccgaagatgtggcgaaggggactttagtttacaagctccaagtcatcttcaattcctgcatcttacatggctggagggactatattgtgactcttcacaccaccaaagcctttcctttatgggctgaagaccttacgattacgagcagatgtatcgaaaccattgctttgaacgcgtgcacacactcttgcaaggtgaacttgtcacat

SEQ ID NO: 8239 - DNA, 271 bp, Gossypium hirsutum
  unsure (1)..(271): unsure at all n locations; Clone ID: LIB3120-030-Q1-K1-F6
gtgctaagttctgttatggtatcacaatcactctcatcgcctataacatcgtatctcacgagctcggctgaaacttgggaggaccgaatatgtggcnaaggggaatttagtttacaagctcgaagtcatcttaaatatctgcatcttacatggttggagggactctattgtgactcttcacaccaacaaagcctttcctttatggtctgaagaccttaggattacgagcagatctatcgaaaccattgctttgaaaacttgcaaacactct

SEQ ID NO: 8240 - DNA, 367 bp, Gossypium hirsutum
  Clone ID: LIB3120-030-Q1-K1-F7
gcggtgagactctgatgtataactgtagcatatagttctagtaagctgtaatagcaatggccttcggcatgatctcatcggcaaccagtgccaccgtgaactgctcctccccggctcaggccaacatggtggcccccttcaccggcctgaaatctgcctctgctttcccagtcactaggaaggcctacaacgacatcactaatcttgcaagcgatggtgggagagtgcaatgcatgcagagtgtagcctcctctagggaagaagaaggtcgagacactctcatacctgcccgatcttacacccgtacactttgctaatgaagtagattaccttcttcgctctaaatggattccttgcttgcaattcg

SEQ ID NO: 8241 - DNA, 415 bp, Gossypium hirsutum
  unsure (1)..(415): unsure at all n locations; Clone ID: LIB3120-030-Q1-K1-G1
gtgagactcttttgtataactgtagcatatagtactagtaagcagtaatagcaatggcctnctgcatgatctcatcggcaaccattgccaccgtgaactgctcctccccggcacaggccaacatggtggcccccttcaccggcctcaagtctgcctctgctttcccagtcactaggaaggccaacaacgacatcacttctcttgcaagcaatggtgggagagtgcaatgcatgcaggtgtggcctcctcttgggaagaagaagttcgagacactctcataccttcccgatcttacacccgtacagttggctaaggaagtagattaccttcttcgctctaaatggattccttgcttggaattcgaattagaggagggattcgtgcaccgtaagtactcgagcttacccacgtacta

SEQ ID NO: 8242 - DNA, 322 bp, Gossypium hirsutum
  Clone ID: LIB3120-030-Q1-K1-G12
gtcgaccgactcgttcgccctctcttccgaccacgcgtccttactgtttatatgtggatgaagcgagtccgatggttagggaaccctctccccctcgctatggctcattccttctctgctactacacttttcttgttttcccccttactctctcttttccttcacttgttttaaaccgccttacctcatttccttaccttcttcctatggtcctcgctccatttcaatttccaccccctcttgctgctcttctgcttcctcactacttttcctcccagaaaaccatgattttcctgatggtgaacgttgccaatcctataca

SEQ ID NO: 8243 - DNA, 458 bp, Gossypium hirsutum
  Clone ID: LIB3120-030-Q1-K1-G2
cccacgcgtccgatgaggtagatgctagggattagggagggggcttagaggtggaagaactggggtaccttctctttctttttatgctgctgattcatacgctgcttcttcttttctctctcttgagataaaccagatttaataggctctagaagattcgtcggtcactcttcccggtcggtcaccgaatcgtgatcgctggagactagacgagttagagtgtttctttatctttgtttggtagtgtaagatgaaagtgtgcgtgtttggattgataagaggaaaagagaaaatgaatgggaatagcaatggatttgggaatgccggttcggtagcggcgactgagtttttaaggagacgtcatcgacatgatactggataaaatcagtgtagttctggcgtcgtcaagcggatcaaagctcctggtcctctcgtttgggctctggtgaggccatttg

SEQ ID NO: 8244 - DNA, 390 bp, Gossypium hirsutum
  Clone ID: LIB3120-030-Q1-K1-G4
cccacgcgtccgcccacgcgtccgcccacgcgtccgaacaaaatcagttgcttcacaatggggtctacaaccatggctctttcttccccatcattcgccggtaaggcagtgaagttctccccttccacccctgaaatccggggaactggccgtgtttccatgaggaaaaccaccaagcctgttccttctggtagcccatggtacggtcctgaccgagttttgtacttgggtccactttccggtgagccaccatcttacttgaccggtgagttccctggtgactatggttgggacactgctggactctcagctgatcccgagacctttgctatgaaccgtgagctcgaagtcattcactgcaaatgggccatgttgggagctctggggtgt

SEQ ID NO: 8245 - DNA, 140 bp, Gossypium hirsutum
  Clone ID: LIB3120-030-Q1-K1-G6
gcgcccacacgtacgaccacgcgtacgatcacgctttctgtcaaaattaggtgcttcacagtggcgggtacaaccatggctctttcttggccatcattctatagtctggcagtgaatttctcccctttcacccatgaaat

SEQ ID NO: 8246 - DNA, 472 bp, Gossypium hirsutum
  Clone ID: LIB3120-030-Q1-K1-H1
agaacattagcttcactgtttgggatgttggtggtcaggacaagattcgacctttgtggaggcactatttccaaaacactcaggggctaatctttgttgttgatagcaatgaccgtgaccgtgtggttgaggccagggatgagcttcatcgtatgctaaatgaggacgagctgagggatgctgtgcttcttgtgtttgcaaacaagcaagatctgccgaatgctatgaatgctgctgagattactgataagcttggccttcactcccttcgtcagcgccactggtatatccagagtacttgtgccacctttggcgaagggctgtatgagggactggactggctttccaacaacattgctaacaagggttgagggttggttgaattccagtcatatcttcaggcagctatcctattattttctgggtccttttttaagttttacaggaaatgtatcagattgtgttatataat

SEQ ID NO: 8247 - DNA, 331 bp, Gossypium hirsutum
  Clone ID: LIB3120-030-Q1-K1-H11
cccactcgtccggaggagttgtgcaagcactacaccaaagattttggaatcgagtgtcgtatgggaaggtttcacaacatttatggtccttttggaacatggaaaggtggaagggagaaggctccagctgccttttgcaggaaagctattacttccattgacaagtttgagatgtggggagacggtcttcagacccgatctttcaccttcattgatgaatgtgtcgaaggtgtacttagattgacaaagtcagatttccgcgaacctgtgaacattggaagtgatgagatggtcagcatgaatgagatggcagagattgttcttagctttg

SEQ ID NO: 8248 - DNA, 314 bp, Gossypium hirsutum
  Clone ID: LIB3120-030-Q1-K1-H2
aacgacattacttctctcgcaagcaatggcggtagagtgcaatgcatgcaggtgtggcctcgtactgggaagaagaagtttgagactctctcatacctccccgatcttacacccgtgcagttggctaaggaagtagattaccttcttcgctcaaaatgggttccttgcttggaattcgaattggaggagggattcgtgcaccgtaagtactcgagcttacccacgtactacgatggacgctactggaccatgtggaagctgcccatgttcggttgcaccgactcggttaaggtgttgaaggagcttgaggaatg

SEQ ID NO: 8249 - DNA, 458 bp, Gossypium hirsutum
  Clone ID: LIB3120-030-Q1-K1-H3
cccacgcgtacgggcggcagagtgcaatgcatgcaggtgtggactactactggaaagaagaagggggagactctctcatacctccgcgatcttacacccgtgcagttggctaaggaagtagattaccttcttcgctcaaaatgggttccttgcttggagttcgaattggaggacggattcgtgcaccgtaagtactcgagcttacccacgtactacgatggacgctactggaccatgtggaagctgcccatgttcgggtgcaccgactcggctcaagcgttggaggagcttgaggaatgcaagaacgcataccccaatgcattcattagaatcattggcttcgacaacgtgcgtcaagtgcagtgcattagttgcattggctacaagcctccaagcttctaagctctttattaacttagtctctacattcgattgaatttggactcaaaaaaaccatg

SEQ ID NO: 8250 - DNA, 475 bp, Gossypium hirsutum
  Clone ID: LIB3120-030-Q1-K1-H4
cccacgcgtccggcaaacctccaatcttttcagcgtcctatggcataagccaagctccattgccatggattggtactcttggttgtcaaaaactgcccttgagccctcactaatctatgactatggccttgccttctcccgtaatgagcttcaaaaagaggatttagcctacttcaatcatgagtttcttcagagcatgggcatatcagttgccaagcataggcttgagattctcaagcttgctaggaaggaagttggagaaacccctaatagcctgtccaagataattttggcaatcaacaaaaccagaaagagctttaacaagtatgttaacaagttggttcaccatgagaataactcgattaagctgctgccggagccgggtcgttatcgagatcagtggagaggaggattgacaaggaagtgcaacagtgagaatgaggtgaacattgagcaaccagtgcggagaaccaag

SEQ ID NO: 8251 - DNA, 258 bp, Gossypium hirsutum
  Clone ID: LIB3120-030-Q1-K1-H5
cttacacacgtgcatctcattaacgcagcacattaccttcgaacgctaaaaagggttcctcgcttgcatgaccaatagaagcatgaattcgtgcaccctacttactatagctaccgcgctactactatagacgctactgtaccatgtgcaaactatccaagctcgagtgcgccacctatgctcatcagtagtaggagcttgagaaatccaataatgcataccccaatgcattcattagaatcatttgctttgacaacg

SEQ ID NO: 8252 - DNA, 358 bp, Gossypium hirsutum
  Clone ID: LIB3120-030-Q1-K1-H6
accacacgtacggcaaacctacaatctttgcagcgtactatggcataagccaagctccactgccatggattggaactcttggaggacaaaaactgcccttgagcccttactaatctatgactatggccttgccttctcccgtaatgagcttcaaaaagaggatctagcctactacaatcatgagattcttcatagcatcgccatatgaactgccaaccatacgcttgatactatcaaccctgctaggaccaaagttagctaaaccagtaatagcccgcccaacataattctggcaatcaacaaaaccagagaaagctttaacacatatgtcaacacgttcattcaccatgataattac

SEQ ID NO: 8253 - DNA, 428 bp, Gossypium hirsutum
  Clone ID: LIB3120-030-Q1-K1-H7
cccacgcgtccgggcggctgagtgcagtgcatgcaggtgaggcctactactggaaagaagatgggggagactctctcatacgtgggcgatcttacacccgtgcagttggctaaggaagcatattaccttcttcggtcaaaatgggttccttgcttggagttcgaattggaggagggattcgtgcaccgtaagtactcgagcttacccacgtactacgatggacgctactggaccatgtggaagctgcccatgttcgggtgcaccgactcggctcaagtgttggaggagcttgaggaatgcaagaacgcgtaccccaatgcattcattagaatcattggctttgacaacgtgcgtcaagtgcagtgcattagtttcattggctacaagcctccaagcttctaagcttcgtattaactttgtctctccat

SEQ ID NO: 8254 - DNA, 431 bp, Gossypium hirsutum
  Clone ID: LIB3120-030-Q1-K1-H8
cccacgcgtccggcaaacctccaatcttttcagcgtcctatggcataagccaagctccattggcatggattggtactcttggttgtcaaaaactgcccttgagccctcactaatctatgactatggccttgccttctcccgtaatgagcttcaaaaagaggatttagcctacttcaatcatgagtttcttcagagcatgggcatatcagttgccaagcataggcttgagattctcaagcttgctaggaaggaagttggaaaaacccctaatagcctgtccaagataattttggcaatcaacaaatccataaagagctttaacaagtatgttaacaagttggttcaccatgagaataactcgattaagctgctgccggagccgggtcgttatcgagatcagtggataggatgattgacaaggaagtgcaaca

SEQ ID NO: 8255 - DNA, 385 bp, Gossypium hirsutum
  unsure (1)..(385): unsure at all n locations; Clone ID: LIB3120-030-Q1-K1-H9
catcattttccttctgctaccttctctcaacccaaacacatatttcccaggaaaaagaaaaaggttgagcgaacaagaaaatggccgatcagcttaccgacgatcagatctctgaattcaaggaggcctttagcctgttcgacaaggatggagatggttgcattactaccaaggagttgggaactgtgatgcgatcacttgggcagaaccccactgaggcagaactgcaagatatgattaatgaagtcgatgctgatggaaatgggaccattgattttcctgaattccttaacctgatggcaagaaaaatgaaggatacagactctgaggaggagcttaaagaggcattcanggtgtttgacaaggatcagaatgggttcatttc

SEQ ID NO: 8256 - DNA, 410 bp, Gossypium hirsutum
  Clone ID: LIB3120-031-Q1-K1-A1
cggacgcgtggggtcgcggaagtcaagccagcggatggtggtgggtgcatcgccggggcggagcgagcggcggtaacaacaataacacccacattaggaaggctagaagtgctcaggtgaagatggacgtggaagagttgagcaacggggctgctctcagccgcgcctctagcgctagcttgggcttatctttttccttcactggcttcaccgtcccacctgatgaaatcactgattccaaacccttcagcgacgacgatattcctgaagacattgaagctggcacctgtaagccgaaatttcagacagaacctactttgccaatatatctaaagttcagtgatgtgacttacaaggtgatcaccaaaggaatgacaacttctgaagagagggatatattgaatggaatc

SEQ ID NO: 8257 - DNA, 446 bp, Gossypium hirsutum
  Clone ID: LIB3120-031-Q1-K1-A10
cccacgcgtccggtgctaattgccttatggatgaattgaagagacaagtggaatcccaggagcttgatttccctgaatcagatttggttcagtttatcacctttctgttgctaacgttggagagagatgccttgccactttttaacatgttgaagatgaattacaagtctagcatagacagagaaccggcattcaatgagttgctagatgaaattgcagaaaagttctatggtatacagcgtagaaatccgcttcaagggatgtttggcgacttattcaagatgatgtgatgaggaaaaacatggcagcaacctgaatttgttggaatttgtcagtgtcttggcagacctgaactgctaattttcattatgtcttcggcttgatggcaaattcctttttatgccaaaattgtttaatatacttttgtaatatgctttcccatttga

SEQ ID NO: 8258 - DNA, 259 bp, Gossypium hirsutum
  Clone ID: LIB3120-031-Q1-K1-A12
gcctgctttgaccgacatctttggagatgattccgtactacaattcggtggaagaactttaggggactcttggggaaatgcaccgggtgccgtaactaatcgagtagctttagaagcatgtgtacaagctcgtaatgagggacgtgaccttgtccgcgagggtaatgaaattattcgcgaggctagcaaatggagtcctgaactagctgctgcttgtgaagtatggaaagggatcaaacttgaattctacgcagtggat

SEQ ID NO: 8259 - DNA, 459 bp, Gossypium hirsutum
  Clone ID: LIB3120-031-Q1-K1-A2
cttttgtataactgtagcatatagtactagtaagcagtaatagcaatggcctcctccatgatctcatcggcgaccattgccaccgtgaactgctcctccccggcacaggccaacatggtggcccccttcaccggcctcaagtctgcctctgctttcccagtcactaggaaggccaacaacgacatcacttctcttgcaagcaatggtgggagagtgcaatgcatgcaggtgtggcctcctcttgggaagaagaagttcgagacactctcatacctccccgatcttacacccgtacagttggctaaggaagtagattaccttcttcgctctaaatggattccttgcttggaattcgaattagaggagggattcgtgcaccgtaagtactcgagcttacccacgtactacgatggacgctactggaccatgtggaaactgcccatgtttgggtgcactgac

SEQ ID NO: 8260 - DNA, 266 bp, Gossypium hirsutum
  Clone ID: LIB3120-031-Q1-K1-A3
ctataacatacactactagtacccactactagcactggcttcctcaccgatctcatcggctaccagtgccactgactggccggcagaggctaacatggccgctcctttcaccggacaaaactgggtctttgctttcatagtcaccaggaaggccagcaacgacattacttcgttggcatgcaatggctggcgagtgcaatgcatgcaggtgtgggcttgtactagaaacatgaacctcgagacgctattatacctcctcgatggta

SEQ ID NO: 8261 - DNA, 340 bp, Gossypium hirsutum
  Clone ID: LIB3120-031-Q1-K1-A4
gaaagaagaaaaaaaaaacagcaacagcagctgcgggaaaagatggtttcggggtcagggatctgcgccaaaagggtggtggtagatgcaaggcatcacatgttgggaaggttagcgtcgacattggctaaggaattgttgaatgggcaaaaagttgtggttgtaagatgcgaagaaatttgcatgtcgggtggattggtgaggcagaaaatgaagtacatgaagttcttgaggaagcggatgaacactaaaccttctcatggtcctatccattttcgtgctcctgctaacatcctatggcgtaccattcgtggaatgattcctcataagactaagcgcg

SEQ ID NO: 8262 - DNA, 384 bp, Gossypium hirsutum
  Clone ID: LIB3120-031-Q1-K1-A5
acgaaagccaatttaaggtcactcaacaagtgcgcatcgccttttctatcggtaaatatcaagacgaagtcgtgtgcgacgtagtacctattcaagcctgccatttattgctaggagaaccatggcaactggatcgaaaagtcactcacgatggtcgtaccaataggtattccttcaagcatcaaggaaagaaacttaccttagtgccgctcactccggaacaagtccatgagggccaaatcaaactgagaaattctgttaaaacaagtgaggaaaaagaaaaaaagaatgaaaaagagcaaaaagagattgagagtgaaaaggaatgtgaaacagaaaagaaatttgaaaaagaagttgaagaaagaagagaaaatgagttag

SEQ ID NO: 8263 - DNA, 402 bp, Gossypium hirsutum
  Clone ID: LIB3120-031-Q1-K1-A6
caccaacaaaatcagttgcttcacaatggcctctacaaccatggctctttcttccccatcattcgccggtaaggcagtgaagttctgcccttccacccctgaaatccggggaactggccgtgtttccatgaggaaaaccaccaagcctgttccttctggtagcccatggtacggtcctgaccgagttttgtacttgggtccactttccggtgagccaccatcttacttgaccggtgagttccctggtgactatggttgggacactgctggactctcagctgatcccgagacctttgctaggaaccgtgagctcgaagtcattcactgcagatgggccatgttgggagctcttgggtgtgtttttcctgagcttgtggctaggaacggtgtcaagtttcgtga

SEQ ID NO: 8264 - DNA, 446 bp, Gossypium hirsutum
  unsure (1)..(446): unsure at all n locations; Clone ID: LIB3120-031-Q1-K1-A7
tttatttctaaaaaaaataaaaaaaatgctctgtcctatatcaaaccaaaccctagacaaccgggtttttgaggcagtgtttactaactggtcagtttaaggtaagggctcacttcttttactctttgtttctgttactttttttttcaaagttttaattgtgtattttttaggttataatagttgaaacaagagaagaaaaaaaaaggttgaattttaaggatttgcagtagaaaagaaaaaaaaatgagggattttccatcttgttttggtgaaatggagtgcaagtggctgattcgtcatcatcatcatcaaatagtagcaaaaatgcacagaatttggttacttgtgtttatcaatgtcgaattcggcgtaggcctcgtttaataactgttacttggaccaagaacttgatggggcaaggcttaagtgtanggattgatgat

SEQ ID NO: 8265 - DNA, 401 bp, Gossypium hirsutum
  Clone ID: LIB3120-031-Q1-K1-A8
ccacgcgttcgcccacgcgttcgcccacgcgtccgctgctctggttcatcagtggctcaaccaatgcgcaaggtcctgtcaagaaaagggcattcatatatgggacggtaacgcgtccagggagtttcttgacagtatccggttgactgatagggaggagggtgacttgggacctgtgtatgggttccaatggagacattttggtgccaggtatactgacatgcatgctgactacaccggacaaggatttgatcagttgttggatgttattgacaagattaagaataatccaaatgataaaaggattatactctcaacctggaatccttttgatcttaaactgatggcgctttcaccttgccacatgtttgcttaattctatgtagcaaaatggggagtta

SEQ ID NO: 8266 - DNA, 464 bp, Gossypium hirsutum
  Clone ID: LIB3120-031-Q1-K1-A9
caaatttctaacttctttgaagtgcttttggccaaatgaaaacgcagaaatttttagctttttcagctaaaaaagtgcttttaggctgctcttttacctttttagccacacacacaacactggttctttgctctcatctcttctcccatcgctggttctttgttcctctgctggctctttgttcttctgctggtgctggttctttgttcctctgctggtgctagttctttgttcctctactggttatttgttcctttgctggtgctggttctttattcctctgctgcttctttgttcctcttttccaccaccgtagatgagtacttcggcggttgaagttagtgacgaaaaattaaaagcaatgtgggataagagattgacagaaatattttgtgatatttgtattaaagagatattgaaggcaataggcctggtactcatttcataggagatgaatggctgaa

SEQ ID NO: 8267 - DNA, 420 bp, Gossypium hirsutum
  Clone ID: LIB3120-031-Q1-K1-B1
agtagagcttctttctatctatatccttatcagctttcaaagatggcaggaatcgcctttggtcgcttcgatgattccttcagtttggggtctgtcaaggcctaccttgctgagtttatctcaactttggtgtttgttttcgccggcgttggctctgccattgcttacaacaagttgacaactgatgcagccctagatcccgatgggctagtcgccattgctgtttgccacggatttgctctctttgttgcagtggctatcggtgccaacatctcaggtggccatgtcaaccctgcagtaacttttgggttagctcttggtggccaaatcaccatactcactggcatcttttactggattgcccaacttcttggatccattgttgcttgcttcttgctcaaggctgtcactggtggtttg

SEQ ID NO: 8268 - DNA, 463 bp, Gossypium hirsutum
  Clone ID: LIB3120-031-Q1-K1-B10
ctttcgtgtggaattcttttggtactatagctgcactcattcaggagatagtttcaatttatcctgttctctcacctccaaatctgactccagctcaatcaaatcgagtttgtaatgctcttgctctgcttcagtgtgtagcttctcatccagacacaaggatgttattcctgaatgctcatatacccttgtatctgtatcctttccttaatacgaccagtaagtcaaggccgtttgagtatttgaggcttactagcttacgtgtcattggtgccttggtgaaggttgatgatactgaagttatcagcttcctcctgtccactgagataatcccattatgtctgcgcacaatggagatgggcagtgaactgtcgaaaacagttgctacttttatagttcagaagattctactagatgatgttggcttggactatatttgcaccactgcagagcggttttttgc

SEQ ID NO: 8269 - DNA, 421 bp, Gossypium hirsutum
  Clone ID: LIB3120-031-Q1-K1-B11
tgaaaattcacctcttttttaaaggaaaaaaaaccagaaaaacaatgaagtgagctcctctctttttttttaataataaaagtcccttcaaccccccgcagtcccaattgaaaatggatcctaacctaatgcaaaagtttcaagccatcaagcaatccaagaagtgtaagaagcagcagcttctggacaagcttttactctatacatgcatagcagtgacttgttgtgtcttctgttccacccctttttggctcccttacttgaagaattttctcttcatttcattaccaaaaatgggttcaatcatgtacaaccctaaactactgttctttgtaaggaacctcatcggtgtggttctcattggaagattcaagatttttgcttatttttcaagttcttggggagtgtactatgttgatca

SEQ ID NO: 8270 - DNA, 425 bp, Gossypium hirsutum
  Clone ID: LIB3120-031-Q1-K1-B2
ctttaactagaaaaaaaaataaaaataaaacatcaatcaattcccagccatggaaggagacttacgagattgggaggtgctccacaactcggattctgactctaattctatcctggttaactcgccgcagttgaggaatcttgagggaatcgaaggtgatactggagggatgataaggtctgattacttttctcttgataatcagagtatgtatgcgaaggaaggggatgcaagtgaagaaggctctattgagtcagataatccgagttggattgatcccaagccggagactcagtttaggaggaataattcgggtgatttttggtccgattcgggtagtgatcggtcagatgatcgtaaattaagtgatttctctgtgaaaaaagacttggagtccgctgagaatgacgtttgtttacaaagga

SEQ ID NO: 8271 - DNA, 381 bp, Gossypium hirsutum
  Clone ID: LIB3120-031-Q1-K1-B3
tttatgcgtgtggatacccgtgcgtgcaatctaaccaccactacactgcgcgaggggagcttaggaggtacgagcggttgtccatactggatactagtaacatctttggggtttttgcacaacagtgtgaccaaatgaggggcgtgcatcttatcctggagacaggcacgaaaacgagaggtgctattttatctctggatgcatacattgaacatgatatacagcgcgggtaggttaatggattcgagacaaaacctacgagagttgaagcacatgcaccgatagaacataccgggtgataaaaccatccagagtgcggatcgggatattatagacagtgtttacaaccttcgggagccgactattgatcttgctcttctt

SEQ ID NO: 8272 - DNA, 342 bp, Gossypium hirsutum
  Clone ID: LIB3120-031-Q1-K1-B4
catcaacttatgtttaacataaaaaaaagacctcacctttagcctcgccatgatatgctttaacggcccaagggagtatttttatgggttgcattttcattactaaaccttgtagaagaacaaagcaataaaactctttgatggagcgcgcaaggaaggtggttaacagggcaatcctgaaacgtttggttaatgaattcatgcaagcacgcattggagaaatgagtgttagatcacctgtttcctacactttcatcaaagtatgtgtcttcattgttacctttcggtgtcaagaatcatagcacatcagattcatttggtgcttggaatgtgtcgaacaat

SEQ ID NO: 8273 - DNA, 290 bp, Gossypium hirsutum
  Clone ID: LIB3120-031-Q1-K1-B5
agcggatcgagcgaaggaaaattatggtaattggagcggttggattagtctcctgctctctatgattcttgcaacggagaaattgagatggcaatggctgcctcttctggatttactgatatgccagcacttaggggaaaggattatgggaagaccaaaatgcggtatccagattacactgaaacagtatcaggtcttcagtacaaggacttgcgggtgggggatggccctacaccgaagatgggagatacagttgtggttgattgggatggctacactatttggtatta

SEQ ID NO: 8274 - DNA, 63 bp, Gossypium hirsutum
  Clone ID: LIB3120-031-Q1-K1-B6
gcgagccgatctagcgaaggaaaattatggtaatttgagcggttgcattaatctcctagcttt

SEQ ID NO: 8275 - DNA, 373 bp, Gossypium hirsutum
  Clone ID: LIB3120-031-Q1-K1-B7
aagacattcaatgaagctttggattctacccttaccatcatctggaatggaccaacgggagtgggtgaatttgagaaagttgcagttggaactgaagctattgcaaagaaactagctgaacttagtggcaagggagtgacaacaatcattggaggtggagactctgatgctgctgtaaaaaaggttggagttgctgatgtcatgagccacatatcaactggtggtggtgccagtgtagaattgttggaagggaaggagcttacaggtatgattgtcctggatgacgctgtttcagttgctgtgtaagatcgaatcaaatttttcacatcctcactgcgtagtgatttattcacacaataaatgctttatgatg

SEQ ID NO: 8276 - DNA, 469 bp, Gossypium hirsutum
  unsure (1)..(469): unsure at all n locations; Clone ID: LIB3120-031-Q1-K1-B8
atggactaaagttcctcatggtaaagagcaaaattagaggactttgaattaatctttaagatcatacttttttgaggaattaaccatgacaaatagttttttttataggttgttattatctagttgatgctggatacataaattgtgagggatttcttgcaccttttagaggacaaagatatcatttgaatgagtggcgtcagggttactagccaagtactccggaagaatttttcaatataaaacatgcttcagcacgtaatgttattgaaagatgctttgagatattaaaacttagatggagaatacttaggagtccatcattctatcttgtgagggtgcacaatagaattattattgcatgttgtttgcttcataatttgatagatgacgatgaatcgaatatcgtaaatattcatctatcggatgcatgagctacttngaggatgaaactagccaaccaaatgtt

SEQ ID NO: 8277 - DNA, 456 bp, Gossypium hirsutum
  Clone ID: LIB3120-031-Q1-K1-B9
aattcagttaacaatttcacagttgttttcttcagtctctctctcagccatggctgcagccatctccaccgtcgctgccgctgccgccgccaaccgagctctgggagtgtcagtcccaacctcagctttcatggggaagaaagtgagctcaagattcaacagcaccaggcaggttccttcgggaagttttaaggtgatggcggcggagaaagagatagacgaagagacacagaccgaaaaggaccgatggaaagggttggcttacgatatttcggacgaccaacaggacattactcgagggaaagggatggtggattccttgttccaagctcccatgaatgatggaactcactatgctgtcatgagttcctatgaatacctcagccaaggtcttaaaacgtacaatttggacaacaacatggatggtttctacattgctcctgcattcatggacaa

SEQ ID NO: 8278 - DNA, 384 bp, Gossypium hirsutum
  Clone ID: LIB3120-031-Q1-K1-C10
ctcaaagcaaagcaaaaggcaattaagccatgtcaaagctggtggtgttgcagccgagaaagcagcctcccatctcccgcctctcttcctctctttcccacttcaatggcaccaagctctgccaaatccagtacaagagaaaggtatatcagccaaaaggtgcattgcatattgcagcatccagcaccaagaagattctcataatgggaggcactaagttcattggtgtgtttttatcaagactccttgtaaaagagggtcatcaagttactttgtttactagaggtaaagcaccagttactcaacaattgcctggtggatcagacagtgactacgctgagtttaaatccaagattttgcatttgaaaggagatagaatggact

SEQ ID NO: 8279 - DNA, 334 bp, Gossypium hirsutum
  Clone ID: LIB3120-031-Q1-K1-C11
ctcaaaagaaccccaaaaacattttcctctatttgttcaaaggcagatgatgatagtgacaaaagtccaaacgggtcttcgagggggaaaccaaagctcgttactaaggaaaagtcctctgcaccgactacatctgcgttcaaggagaaaaccagccagagggcttgtaaggggtatgacaaagctaaaaaacaaaaactgaattcgagggatcatgaactaaaggatacactttggaaaagccttaacgaagtggacttcaatacgggtacattcactgacatagtgaagcttcttgcgcaacatttgaatactgacctctcccccagggagt

SEQ ID NO: 8280 - DNA, 432 bp, Gossypium hirsutum
  Clone ID: LIB3120-031-Q1-K1-C12
atgatttgttctagcaaccgaggccagttgtttgttcttcatgcaactccaaggggcacgttgaatgccagtggtgtagaggtacaggcttctttatccttggggataatatgctctgccaagttccttctaggaataccacttgcgtgatttgtgctgggaagggatcaacgtgcttctctgactgcaaaggaactggatttcgggctaagtggttgggtgaacctcctctttccaatagtatataatttctctgttattgtctgttgccaaatgttgtaagttgtaaaaccaccataaaatttatttgttttgcccgttgaatagcgtaccttctttgtctccaaattgtaatcacaccatgtattcgtacaatcttatctccttataaatgagagaagaaacaacaattgttacttattgattgaaaaa

SEQ ID NO: 8281 - DNA, 460 bp, Gossypium hirsutum
  unsure (1)..(460): unsure at all n locations; Clone ID: LIB3120-031-Q1-K1-C2
gtgagctcaagattcaacagcaccaggcaggttccttcgggaagttttaaggtgatggcggcggagaaagagatagacgaagagacacagaccgaaaaggaccgatggaaagggttggcttacgatatttcggacgaccaacaggacattactcgagggaaagggatggtggattccttgttccaagctcccatgaatgatggaactcactatgctgtcatgagttcctatgaatacctcagccaaagtcttaaaacgtacaatttggacaacaacatggatggtttctacattgctcctgcattcatggacaagcttgttgttcacatcaccaagaacttcatgtccctccctaacattaaagttcctctaatcttgggtatttggggaggcaaaggtcaaggaaaatcnttccaatgtgagcttgtgtttccaagatgggtatcaaccccatcatgat

SEQ ID NO: 8282 - DNA, 414 bp, Gossypium hirsutum
  Clone ID: LIB3120-031-Q1-K1-C3
ggaggttgttgtgagccctccatttgtgttccttacccttgtcaaaagtctgttgcggtctgattttcacgtcgcctctcagaactgctgggttagcaagggtggtgcttttaccggagaagttagtgcagagatgcttgttaatctaggcattccttgggttattattggtcactccgagagaagggctctcttgaatgagtccaatgagtttgttggagataaagtagcgtatgcgctttctcaaggcttgaaagtgattgcttgcattggagagactcttgaacagcgagaatcaggctctaccatggcttgtcgtgctgcacagaccaaagcaattgctgataaagtaacaacatgggataatgttgttttggcttatgaacctgtgtgggccattggtactgggaaagt

SEQ ID NO: 8283 - DNA, 328 bp, Gossypium hirsutum
  Clone ID: LIB3120-031-Q1-K1-C4
cccacgcgtccggctcttcagtacctcagtggtgttattctcttcgaggaaaccctttatcaaaaaaccgcttcgggcaagcccttcgttgatgttttgaaggaaggtggtgtcctccctggcatcaaggtcgacaagggtaccgttgagcttaacggaaccaaccgcgagactttcacccacggtctggatggccttgcacagcgatgccagaagtactatgaagctggtgctcgctttgctaaatggcgtgctgtccttaagatcagtgctaatgagccaaccgagcttgcaattcaagaaaatgccaacgggctagctatgtatg

SEQ ID NO: 8284 - DNA, 408 bp, Gossypium hirsutum
  Clone ID: LIB3120-031-Q1-K1-C5
gccacgcgtccggctcttcagtacctcagtgttgttattctcttcgaggaaaccctttatcaaggaaccgcttcgggcaagcccttggttgatgttttgaaggaaggtggtgtcctccctggcatcaaggtcgacaagggtaccgttgagcttaacggaaccaaccgcgagactttcacccagggtctggatggccttgcacagcgatgccagaagtactatgaagctggtgctcgctttgctaaatggcgtgctggccttaagatcagtgctaatgagccaaccgagcttgcaatccaagaaaatgccaacgggctagctatgtatgctgccatctgccagcaatgtggccttgatccaatcgtcgaacctgaaattcttgttgacggatcacatgacattcaaaag

SEQ ID NO: 8285 - DNA, 385 bp, Gossypium hirsutum
  Clone ID: LIB3120-031-Q1-K1-C8
ctcaaacctgcctctgctcttccagtcaccatgaaggccaacaacgacatcacttggcttgcaggcaacggtgggagagggcaatgcatgcacatattgccaactcttgggaagaagaagtgcgagactctcttatacctggccgatcttactcccgtacaggcggcataaagaagtatattaccttcatcgatctaaatggattacttgctaggaattcgaattagaggaggagatcgtgcaccgaaaatattcgagcttacccacgtactactgaggacgctactggaccatgtatgaactgcccatgttcgagtgcaccgactcggctcacgtgtttaaagatctcgaggaatgcaggaaggaataccgcattgcattcatt

SEQ ID NO: 8286 - DNA, 427 bp, Gossypium hirsutum
  Clone ID: LIB3120-031-Q1-K1-C9
ccaacattttcataacaatggctgccatcacaaacgccgctgctacatcctccttgagggggacactcttccccgacgggtacacaagttcagggagattcgtcgccaggtttggctttggcggcaaaaaagcagctcccaagaaagtctcgaaacgaaccccagaccgccctctatggtacccaggagcagtggcgcctgattggctcgatggaagtttggtgggtgattacgggttcgacccgttcgggttaaggaaaccggcggagtacttgcaatatgatttggattctttggaccacaacctggctaagaattcggctggtgagataattggaactaggaccgaagttgccgacgtgaaggcgacgccgtttcagccttacagcgaggtttttggtctacagacgttaagggagtgtgagtt

SEQ ID NO: 8287 - DNA, 433 bp, Gossypium hirsutum
  Clone ID: LIB3120-031-Q1-K1-D1
tccaaattcaatcaataaatctgaagttttggatgtaaaaccagtgcgtaccttggttcctatattcccggagccatacgagggtcctccatttgtttgcgtgcctcctaacggccctttcccatctggattttccccatttttcccatttagtggatcaaacccaaatcctaatcctaaccaaaacgatatcaatccaactcctgccccggttcggccatttacagctgaaacttccaatggccaaaatgtgtcaccgatgggtacacatgttaatcaaggacaaaaaccggctccttcgtatcctgtcaagaaaaggggaaggggaagaccgaggacctcgtttccttagaaaccacaatcggttagtttcaatcctggaattagtttgtctgaacaataaagatgttaacatgggattaagtagaaaaat

SEQ ID NO: 8288 - DNA, 390 bp, Gossypium hirsutum
  Clone ID: LIB3120-031-Q1-K1-D10
attctctcatttgggttggggtttctggtttacattgagggatcttaaacttgctacgaaccggttttcaaaggaaaatgttcttggagagggtggatatggcgttgtttatcggggtcatttgatcaacggaacgccagtggctgttaagaaaatactcaacaacttaggccaagcggagaaagaatttcgagtcgaagtggaagccattgggcatgttcgtcacaagaatttggtccgccttttaggttactgtattgaaggaacacacaagatgttggtttacgagtatgtcaacaatggaaacttagaacaatggcttcacggagctatgcgtcaacatggatatcttacctgggaagctcgcataaaggttctactttgaacagc

SEQ ID NO: 8289 - DNA, 465 bp, Gossypium hirsutum
  unsure (1)..(465): unsure at all n locations; Clone ID: LIB3120-031-Q1-K1-D11
gcaattgttatgtcgcgtggtgctccattttctgaccaggttgtagaattagattttctatatcctagtgaaggtattcatcggaggtgggatagtggctatcgcatcacttcaaccgctgcaacttgggatcaagctgcttttgtccttagtgttccaagaagaaaacctgcagatgaaactcaagaaacccttcgaacgtctgcttttccaagcacacatgtaaaggagaaatgggcaaagaatctctatattgcatcagtttgctatggtcgaactgtttcatgaactgcctaagttttgttcagattcagatgcaactcattttgttcgatcctgcactngtacaatgagggacgactttactgcttcaatttaaggaactaagctctttagtcagattgattgatcacagcattagagaggtgatgtatgcaaaattctactttatttgcaccatgatgt

SEQ ID NO: 8290 - DNA, 323 bp, Gossypium hirsutum
  Clone ID: LIB3120-031-Q1-K1-D12
cccacgcgtccggtgagactcttttgtatacctgtagcatatagtaatagtaagcagtaatagcaatggcctcctccatgatctcatcggcaaccattgccaccgtgaaccgctcctccccggcacaggccaacatggtggcccccttcaccggcctcaaatctgcctctgctttcccagtcaccaggaaggccaacaacgacatcacttctcttgcaagcaacggtgggagagtgcaatgcatgcacgtgtggccgcctcttgggaagaagaagttcgagactctctcatacctgcccgatcttactcccgtacagttggct

SEQ ID NO: 8291 - DNA, 421 bp, Gossypium hirsutum
  Clone ID: LIB3120-031-Q1-K1-D2
cccacgcgtacgcccgatcttacacccgtacagttggctaaggaagtagattaccttcttcgctctaaatggattccttgcttggaattcgaattagaggagggattcgtgcaccgtaagtactcgagcttacccacgtactacgatggacgctactggaccatgtggaaactgcccatgtttgggtgcactgactcggctcacgtgttggaggagcttgagaattgcaagaaggaataccccaatgcattcattagaatcattgggttcgacaacgttcgtcaagtgcagggcattagtttcattgcctacaagcctaaaagctactaagttgtttacttcccttctaggaattccatttgtttcaaagttgtacttaaattaagcccctcaaaccccccccccccttttctttttcttt

SEQ ID NO: 8292 - DNA, 320 bp, Gossypium hirsutum
  Clone ID: LIB3120-031-Q1-K1-D4
aaacgtttcacgtgatccatacaagacattgtttgttgctagacttaattatgagacatccgagagtagaattaaaagggagtttgagtcttatggaccgattaagcgggttcggttggttactgataaatccacaaataaaccaagaggctatgctttcatcgagtacatgcatactcgggatatgaaagctgcttataaacaagctgatgggaggaagattgatggcagaagggttcttgtggatgttgagcgcggtaagacagtccctaattggcgccctcgtaggctaggtggtggacttggaactaccaagattg

SEQ ID NO: 8293 - DNA, 319 bp, Gossypium hirsutum
  Clone ID: LIB3120-031-Q1-K1-D5
aaaatggcatccatcaccatgacaacattattttttagtaccactaacctcacaaagggttctgcaaaaaggacccagcggagacgggtggtggccaatgctgctaatggagctcaagtggagagtgtccatattagcattgagaggaaaacagagggcaacaatggaaggagggagatgatgtttgcagctgcagctgctgctatttgctcgggtgcgggggttgcaacggctgagcctaaacgtggtatcgcataggccaagaaggcgtatgctcctgtttgtgttactatgccaactgctaagatctgtcgcaact

SEQ ID NO: 8294 - DNA, 273 bp, Gossypium hirsutum
  Clone ID: LIB3120-031-Q1-K1-D6
gcggtacgctctcccaacttggggagaccatatgtaagcaccttttccaagtgcaatggaagtcacgaccctaggccatggaacttagggggcagggattgaccccatccacgtaagtatgctgtaaggcagcaccttgccttatatttatatatttagcgtcttgctccactgccatcacccggcggtgtggcatttatcatctcaacagacactaaccctcttccctcttttgtaggcatactctaaatgcattccgtctttctttctatt

SEQ ID NO: 8295 - DNA, 474 bp, Gossypium hirsutum
  unsure (1)..(474): unsure at all n locations; Clone ID: LIB3120-031-Q1-K1-D7
tgtcgacggcttccatcaacggttggtgccttacctcctcttcttcctccaccaccacctcctctttttccgctcgtcgacgacctacattgcggccttcggtcgtcgctagccttaactcttctccttctcctccgactcttatccaagaccgcccggttttcgctgcccctgttcctttgctcaccccgagagaagagatgggaaacaagtcctacgacgaagccattgaagctctcaagaaacttctcagtgagaaaggagaactgaaagctgaagcagctgcaagggtagatcaaataacagcagagttaaacacaacatcagctgacggcaaaccatctgactcttctgttgagagactgaaagaaggcttcgtttacttcaagaaagaaaaatatgaaaagaatcctgctctgtatggtgagctngccaagggtcaaagccctaagtatatgatcggtgcctgctcgg

SEQ ID NO: 8296 - DNA, 340 bp, Gossypium hirsutum
  unsure (1)..(340): unsure at all n locations; Clone ID: LIB3120-031-Q1-K1-D8
gaaaagcataataaaagattaaaaaaatattgcattcagacaatcatacaatatggggcagttggaattcttatcgaggccttctcttcctaaattatttatttatttcatataccatatacaaggaaattgatttcatatagaaagtatacatagattactatgtatcgactgaaccaatgactattcatgattccataattgaatcaatgctccacactagaggaatgttatcgtaaaacttcctttgaaacgatgtggtagaaagcaacgtgcgacttgaaggacatgatcagctgtggatgtcaaaacccaccactttccgntatgtagaaatgaa

SEQ ID NO: 8297 - DNA, 402 bp, Gossypium hirsutum
  Clone ID: LIB3120-031-Q1-K1-E1
ataaattgtagatttcttcggtgccttgagggctcgggtttacgatgacgaagtgaggaaatggatcagtgaggtcggagtcgcaagcgtagggaagaagttagtgaactcaagggaaggacctccaacatttgagcagccaaaaatgaccattgaaaagctattggaatatggaaacatgcttgttgctgagcaagagaatgttaagagagtccaattggctgacaaatacttgagtgaagctgccctcggtgaagctaatgaagattccatcaatagaggaactttctatggcaaagcagcacaacaagttggggttccagttcccgaagggtgcactgatccaaatgctgataactttgatccaacggctagaagtgatgatggaacttgcacttacaa

SEQ ID NO: 8298 - DNA, 383 bp, Gossypium hirsutum
  Clone ID: LIB3120-031-Q1-K1-E11
catcattttgcgtggcaatgtcgacggctttcatcaacggttggtgccttacctgctcttcttgctccaccaccacctcctctttttccgctcgtcgacgacctacattgcggccttcggtcgtcgctagccttaactcttctccttctcctccgactcttatccaagaccgcccggttttcgctgcccctgttcctttgctcaccccgagagaagagatgggaaacaagtcctacgacgaagccattgaagctctcaagaaacttctcagtgagaaaggagaactgaaagctgaagcagctgcaagggtagatcaaataacagcagagttaaacacaacatcagctgacggcaaaccatctgactcttctgttgagagactg

SEQ ID NO: 8299 - DNA, 321 bp, Gossypium hirsutum
  Clone ID: LIB3120-031-Q1-K1-E12
tcgcacaatcgtacgcgcacacgttctttcacgcgttcggacagaagacttattggcgtgcacttgaggagggatgtggtgagccaggggccaaactaacgaatacatggactatacacatagggtagccgaacgtatctgtccaaatcaaagatcagaccttggacattgagcatgctctatcgagcctagtacttttatgttaggtggagcgctatagagaaaaggagttgactgaactcataatacttgcaaatgatatactgcaattcaaacttcgtgaccggttgcattctatgctcgtttgattttctggaatta

SEQ ID NO: 8300 - DNA, 364 bp, Gossypium hirsutum
  Clone ID: LIB3120-031-Q1-K1-E3
aaaaaaccacccagagcctaaaatcaccctgttctttaaatcaagatgcagtcaaccaacggttctgatctgagctcaaagcaccaaaaacagcagcccccaccgccgccgcagccacagcagcctcaatggatgccgaaccaatggatgggagctatgcaatacccggcggctgctatggcaatgatgcaacaacaacagatgatgatgatgtatcctcctcatcattacatggcttataataaccctcattttcattatcaacaacagtatcaacaactacagttgcataaacaacaacaaggatctaattcagatgaggttaaaacgatctgggttggagacctttttcattggatggatg

SEQ ID NO: 8301 - DNA, 330 bp, Gossypium hirsutum
  unsure (1)..(330): unsure at all n locations; Clone ID: LIB3120-031-Q1-K1-E4
tgagcgcccaagttgtgataagcgtcagcactgctctcttccttttcttgggtagatttgtgttcttcaacttccaaagagagaacgttgccaagcaagtgcctgagcaaaatgggttgacccactttgaggctggggacgcacgagccaaggagtatgttagccttctcaagtccaacgaccctgtgggattcaacatcgttgatgttcttcttggggatctattggccatattggtgcttactacatcttggccaccacaagcaatggctatgatcccaaattttttggctgaacatcagcttcgncttcttaattattctctatttt

SEQ ID NO: 8302 - DNA, 247 bp, Gossypium hirsutum
  Clone ID: LIB3120-031-Q1-K1-E5
ccataccccaaaatatggcagccacttgtgcttgcccatttaccgacgagggcctcggtggcggcgccaccgctatgtcatccgcggcgatgaaaacccacctctcttcaggggtgttgaaatctggggtgaccgctaggaaccctttcaggctggctggggcttgtgggggcaagtttacttgcttcgagagagactggctactaagggactttaacgatatatgattcggactgattgggtggat

SEQ ID NO: 8303 - DNA, 270 bp, Gossypium hirsutum
  Clone ID: LIB3120-031-Q1-K1-E6
gttaaaatgcctgaaccgggacgcggtggctgacggcgacgcatagggaggaccggaaactgtctgcggcggctctcgggaagagagatgttttctgtttaacaggcactgcccaccctggaaacgtgctcaaccggagtgtacggtgcagcggctggatgagcaccgcacgtcatgtggtgttccgtgcgcctccggcggaccttgataattctgacgaccgagtgccgtacgcgctcggacgtactcataaccgcatcatgtcttcaa

SEQ ID NO: 8304 - DNA, 339 bp, Gossypium hirsutum
  Clone ID: LIB3120-031-Q1-K1-E7
ccaccgcccccgtgtcagcgctggtttgcttttatccccttcaccaatatcctacggtcttgcgtcgaccctttccttcctccgcggaatcgcctccaaaacatcatactccgccgtttctcaacagcaacagcagcagcagcaacaaaagctgatgaaagagcttttgctgaaggagcttgaagaaaccgaaaccctggcgcaaaagatagggaaagccattaagcaccctggctttccttctaagtctagggtttacgccgatgtcaatgttattcgtcctaaagagtactgggattacgagtcccttattgtccaatggggggaacaagatgatta

SEQ ID NO: 8305 - DNA, 253 bp, Gossypium hirsutum
  Clone ID: LIB3120-031-Q1-K1-E8
attattgtgaaatcaatggaagcatttgtgtttaaagcagagttggtattgccaacgcgtgtgagtttcaagaggatgaggcgtgtgagaaatacccaaagggccaatcgaaagtgaaatggatacagttcaagcaaatccttcaagctgaaaattgccagaattactcttctgatgaacccaattatgctaatattgaatcaccgccttcgatgcaaccgtgcaaaataatttgggatataacgggcatttg

SEQ ID NO: 8306 - DNA, 51 bp, Gossypium hirsutum
  Clone ID: LIB3120-031-Q1-K1-E9
attaaatctaattgacgggcagttgttgtgttttaaaaacactctgcattc

SEQ ID NO: 8307 - DNA, 466 bp, Gossypium hirsutum
  Clone ID: LIB3120-031-Q1-K1-F1
gcccacactctcaaattcagttaacaatttcacagttgttttcttcagtctctctctcagccatggctgcagccatctccaccgtcgctgccgctgccgccgccaaccgagctctgggagtgtcagtcccaacctcagctttcatggggaagaaagtgagctcaagattcaacagcaccaggcaggttccttcgggaagttttaaggtgatggcggcggagaaagagatagacgaagagacacagaccgaaaaggaccgatggaaagggttggcttacgatatttcggacgaccaacaggacattactcgagggaaagggatggtggattccttgttccaagctcccatgaatgatggaactcactatgctgtcatgagttcctatgaatacctcagccaaggtcttaaaacgtacaatttggacaacaacatggatggtttctacattgctcctgcattcatgga

SEQ ID NO: 8308 - DNA, 350 bp, Gossypium hirsutum
  Clone ID: LIB3120-031-Q1-K1-F11
cattttcctctgccaacccaaactaaacctttctaattccctttccttttcgacgaggagagaaatccttcacgttcaaggaggccaatgtgggaaccaaattggatccaagttttgggaagtgatctgcggggaacacggcgttgattctactggaaggtacaatgctgatggtgaatcattcgataaccacctggagcggatcaatgtgtattataatgagtcttccggtggaaggtacgtttctcgtgcgggtctcatggatcttgaaccgggtactatgaatagtttcagatcttggccctacggtcagatctttaagccctgtaatttcgtcttttggacaattt

SEQ ID NO: 8309 - DNA, 328 bp, Gossypium hirsutum
  Clone ID: LIB3120-031-Q1-K1-F2
gcttaacacacaatatgacttgctccttcagcaacgagctgcaacaaaagtaacattccctcttgtctggacacacacctggtgcagccatcctttatatcaggaatccgagctctatttgtgagaatacatcttgcggtgaggaatgctgtccaaaggaagcttttgagctagctccggattcctgctgaaaacgttcctgttgatcagctcggcccactgagccgcatgctatacaaggcaccttcttaccgtaagtggcgcgaacatgaacttgattacctactattcattgtccgagatgttaatgttcattcaaaccctgatg

SEQ ID NO: 8310 - DNA, 348 bp, Gossypium hirsutum
  Clone ID: LIB3120-031-Q1-K1-F3
ggcacaagcaatggcatcgatgactggtttacgtggctcttcacaagctgcgttggaaggtagtgtccaactcaacggccaaactcggttgaacgttgctagcaccaacaggttggctgtggctagacccggttttaccgttagagctcaacagggccctgtcgagcctgaaactggacgcacagctgtgctgggtcttgttgctgctggtttggctactggctcctttgttcaagctgagcttgctgatgcacgaagcatcaagggtgggccgcctccaccgccctacggtggattggccggtactttgaattccgatgagccaagagaccttgatcttgcgtacaa

SEQ ID NO: 8311 - DNA, 334 bp, Gossypium hirsutum
  Clone ID: LIB3120-031-Q1-K1-F4
cccacgcgtccggaaaccctcaaaattccactaaaaaatggcctccacagcttccctctccaccgccgtagccaccacctctttcgtccgcggccatccggcgccgaaaaccctaaactcccttcctttcaaccaatctcttttcgggctaaaaccccaacgaaatggccgtctcaccatggcagcatacaaggtgacactgttaacacccgaaggaccccaagaattcgtgtgccccgacgacgtatacatcgttgaccaagctgaggaagaaggcattgatcttccgttctcgtgtagggctgggtcttgttcttcgtgtgccggagtgatt

SEQ ID NO: 8312 - DNA, 340 bp, Gossypium hirsutum
  Clone ID: LIB3120-031-Q1-K1-F5
atccatcgccaccaagaggaaaaaagtaaaatatccctactgacgatgttccggcaagcgtcacgcctcttggctcgaactaccagcccatggaggagaagtcgagcattttcgtcagatctaccagccacacccgctcaagattcgaacttcatcgaatcatggtccaaagtcatacccaacatagacccttccaagacaccatcttcttttatgacccctcgccccgccaccccttctgctatcccttctaaactcactggtaactttgttcttccttatgcatctgaactcttcgctaaaaggttgacatgggtatagtttcagcaacaactggaca

SEQ ID NO: 8313 - DNA, 333 bp, Gossypium hirsutum
  Clone ID: LIB3120-031-Q1-K1-F6
cggacgcgtgggcttttattgatgaagcaccttcaccggctccagcactagttccttcaacatgggctgacccgacatccattcgggcggacccgtacccgaccgatcccggcgatacatcggactgcattttcgatgtaaccgcatatggtgcggtcggcgacggttctttatacgatacggcggcgtttagggaaacatggaaagctgtttgtactggtgaatcagccaccattttggtaccatctgataacattttcaccatcacttctactatcttttcagggccatgcaaacctggacttgtgctacaagttaatgggggtcttaatg

SEQ ID NO: 8314 - DNA, 208 bp, Gossypium hirsutum
  Clone ID: LIB3120-031-Q1-K1-F7
ttagaaatttatcttaaatggctactgcatctattatcttcaaatatctcctagcgggtatagggctatctctagcagccatctcgacttactcctttatgaaacgataatgtgattccattcacaaaacgaccaacgtttccgtaccgaagaaggctgcctacccttttactatcgaatcggcgcacaaaaaaggaactctgtatac

SEQ ID NO: 8315 - DNA, 413 bp, Gossypium hirsutum
  Clone ID: LIB3120-031-Q1-K1-F8
ctcaaagcaaagcaaaaggcaaaatatgccatgtcaaagctggtggtgttgcagccaggaaagcagcctcccatctcccggctctcttcctctctttcccacttcaatggcaccaagctctgccaaatccagtacaaaagaaaggtatatcagccaaaaggtgcattgcatgttgcagcatccagcaccaagaagattctcataatgggtggcactaggttcattggtgtgtttttatcaagactccttgtaaaagagggtcatcaggttactttgtttactagaggtaaagcaccacgtactcaacaattgcctggtgaatcatacagtgactacgctgagtttaaatccaagattttgcatttgaaaggagatagaatggacttcgattttgtgaaatccagtctttctgc

SEQ ID NO: 8316 - DNA, 221 bp, Gossypium hirsutum
  unsure (1)..(221): unsure at all n locations; Clone ID: LIB3120-031-Q1-K1-F9
tctcctacgctttcgatgcgcaagacatactgtttttgaatgactcaantactgctggagggaatgcgacacatgctgctcgtcgaatacatcaaatgttcaagatgcaatcctttcattgtaaacagttgaaagagttcattgtttctttgtctgatgaacattttatttcacttctaacttcttagacacgcaagccatttttaagtgatgtggtatct

SEQ ID NO: 8317 - DNA, 350 bp, Gossypium hirsutum
  Clone ID: LIB3120-031-Q1-K1-G1
cggacgcgtgggcggacgcgtggggttagaatcatagctgatattgatccttcaaaagatttttggtgtgtttgtaaggacaattaaaggagcattgatagaagctgaacttaaggtttctgcattgaataattactatgactagaataggaaagaggtaaagattggatctgtatctgatttggcctacaaaggatggatagttcatttccttactagttacaacatttaataattcaagcaactcgtatgtatctttgcttgagaaacaaaacaatgtaactaattaatgccaattccgttcatttctctatggtatgtaggttaaaattaccagcaacatgattgaa

SEQ ID NO: 8318 - DNA, 336 bp, Gossypium hirsutum
  Clone ID: LIB3120-031-Q1-K1-G10
cccacgcgtccgcgttttcaaaggaaactcattcttcaagttcgctgtttggcaggggacggtggtcaaaaggagccaatgccaggagcaagaacgccggaacctaagcagagccctccacggatatcacccaaagtgagcacgaaattctccgatgtgtttgcctttagtgggcctgcaccggataggatcaacggcaggttggcgatggtttggtttgtggcagcgcttgcaattggaagtattcaatgggcaagatgtgttgacccaaatattcaacggggggatccctgtgttcgttgggactaagatttgggtatcgcttgcattcttttg

SEQ ID NO: 8319 - DNA, 170 bp, Gossypium hirsutum
  Clone ID: LIB3120-031-Q1-K1-G11
gtttctgtttgccacaattttggtagaaaaggtacaattaaatgggaatcgtcgaggaagctcggaacttgaatggacggggttcaggcgatcgagtcatcgttttggctcatgggttcggtacggaccaatcggtttggaagcacttggtccctcacttagtcgacgat

SEQ ID NO: 8320 - DNA, 334 bp, Gossypium hirsutum
  unsure (1)..(334): unsure at all n locations; Clone ID: LIB3120-031-Q1-K1-G2
tttcatatctacatttcttcacactctccgacgaaggaaaccagagaaaaatgaccaagtgttacccaaccgttagcgaggagtaccaaaacgccgttcaaaaggctaagaggaagctaagaggtctcatcgctgagaagaactgtgctccactcatgctccgtctagcgtggcactcagctggaacttttgatgtcaagaccaagaccggaggtccattcggaaccatgaagcaacctgctgagctcgctcatgctgctaacaacggtctcgatattgcagtcaggcttctcgagccgatcaaggagcagntccctattctttcatacgctga

SEQ ID NO: 8321 - DNA, 468 bp, Gossypium hirsutum
  Clone ID: LIB3120-031-Q1-K1-G3
cccacgcgttcgcactgctgaagatacaaggatagcaatacaggctggagcagccggtatcatcggcttcaaccacggagctcggcgactcgattatgttcctgccactatcatggccttggaagaggttgtcaaagctgctcaaggtcgggttcctgtcttcttggacggcggtgttcggcgtggaaccgacgtttttaaagcttaggcattgggagcctctggtatatttattgggcgaccagtggtgttctcattagctgctgaacgacaagctggcgtgaggaaagtgctttctatgctgcatgaagagtttgagctaaccatggccttcagcggctgtcgttctcttaaaaaaatcactcgtgaccacaatatgacagaatgggacagttcttatcctcgttcgggcccgagactgtatagccttatatattatgggcttggaactttagcctatcaaatcgc

SEQ ID NO: 8322 - DNA, 219 bp, Gossypium hirsutum
  Clone ID: LIB3120-031-Q1-K1-G4
gttctacatcgcgagcggctgcccttcattttttttttttttatggctggagcagccggtatcatcggcgtcaaccacggagctcggcggctcgattatgttcctgccactatcatggccttggaagaggatgtcaaagctgctcaaggacgggtgcttgactactaggacgggggtgttcggcgtgaaaccgacgttttaaagctttagcatttggag

SEQ ID NO: 8323 - DNA, 211 bp, Gossypium hirsutum
  Clone ID: LIB3120-031-Q1-K1-G6
atcccggtcgacccggcgtgcgggcaacatcctcagacatggagactagagtctcgtgctattctcgtgggatcgttcttcctggggtctctggtaagcactcctgggcattagtgtcccctccatccatatcttcttccttcagctctaagagccttaaaacatgttcactatttggagaatcattaagggttgttccaaggtcattatt

SEQ ID NO: 8324 - DNA, 185 bp, Gossypium hirsutum
  Clone ID: LIB3120-031-Q1-K1-G9
cccacgcgtccggtggatttagtttctcacgccttctgtctgggatctctttctgcgcatctgggatagatcggggggggaccttttctctacctcactacaaattcagctcttactcgtttgctcgggacgggtatgttggtacccttgtgtaacctgtcgtagttgacttgttttgagctttt

SEQ ID NO: 8325 - DNA, 473 bp, Gossypium hirsutum
  Clone ID: LIB3120-031-Q1-K1-H1
cctactttcagtttgcttctgcttcagcttttcgcatctctttccttttctttctctttttttaacttttaccatttccactcctaaacttccaattgtggccaccccgaccaactacgccaccactaaaacatggtctctcccaccgccaccaccaccctatgatcaccaccccaccaacatgttaggcctccataacatcttccttatagctccaccaccacaggaaaaccaacaacaacaagccccaccaccgccgccgccaccaccacaaccctttaaccaaaactacaacttgactgacacaaatctttggacttcaaagagaagcaccgcccaagaatcaataccagttttccaaaagaaagatggaaccttgaataatgttgaagaagaagatgatgatgaaagtggtgctgctggtggttgcttcaaggtgtgtagaggatgtgggaaataggcaaagaaggagt

SEQ ID NO: 8326 - DNA, 302 bp, Gossypium hirsutum
  Clone ID: LIB3120-031-Q1-K1-H10
gctccatagtcttggaacccaaggacagaagactcttttaacatttcaccgcaaagatggagataacaaatgtgagcgagtatcaagaaattgcgaagcaaaagttgccaaagatggtgtatgactactacgcatctggtgctgaggaccaatggacattgcaagagaatagatttgctttcactaagatactgtttcgtcctcgtattctcatcgatgtaagcaagatagacatgaccacaactgtgttgggtttcaagatatcaatgcctatcatgattgccccaactggcatgcaaaaa

SEQ ID NO: 8327 - DNA, 224 bp, Gossypium hirsutum
  Clone ID: LIB3120-031-Q1-K1-H11
atgcgtaaaacggctactgcaacaggcgttcttcaatttggtgggagcatttatgggtcttgctttagcggcaagctcgacgtgggcctttatgaaatgagaagtgggttccattcacaaaacggcagtcctttcgttccctaggaagttttcgttccctttgacgatcgaatcggctcacaaaaaaggagccggtattactaaaaacggtcgctattcaaaag

SEQ ID NO: 8328 - DNA, 148 bp, Gossypium hirsutum
  Clone ID: LIB3120-031-Q1-K1-H12
taagaatggagtcaaattcggtgtggctgtgttgttcaaggccggatctcacatcgttatctgaggtgggcttgaccacttgggaaacccaagcttgatccactctcaaagcattatggccatctgggctttccaagttatcttgatg

SEQ ID NO: 8329 - DNA, 216 bp, Gossypium hirsutum
  Clone ID: LIB3120-031-Q1-K1-H4
gcggctctggcggttcacttgttccttactacctttaaaagactgcaaactgggggctggacgtaggcaatctgggtgaatcaattggacaggctcgcattaaaggaataactgtgagagcaatggaaattattaaccctgggaaccctactggtcagcatcttactgtagctaatttaagagaaatattgaattttcgattccaagaaaacttgg

SEQ ID NO: 8330 - DNA, 254 bp, Gossypium hirsutum
  Clone ID: LIB3120-031-Q1-K1-H5
gcggtaaatggctaccactgcttcttcaatggcgactcagctttagagcagctttaggtcgtctggggcaagaggactggtagtccccaggggcattgcagcatccccgtttaaagtatcttccggaaagaccaggaccccttgcttcactgtcaaagctgttcaatccgacaagtcaacatttcaagtaatccaacccatcaacggcgaccccttcattggaagcctggagacttcaatcaccttaaggccct

SEQ ID NO: 8331 - DNA, 246 bp, Gossypium hirsutum
  Clone ID: LIB3120-031-Q1-K1-H6
ctggggttaatggattattgatgttgattctttctgaagtgccaaagggtaattaggttggtcagagcggggagctttgaattgatctgttgatgggtattttttagattctgatttggaatcaggaacttgaaggtgaactttttgtttgtggatttccttttgtggtttcagctggattttggggataaaatctggggtcttgggcaaattctttaatggcttctttggattttggttctcaaa

SEQ ID NO: 8332 - DNA, 363 bp, Gossypium hirsutum
  Clone ID: LIB3120-031-Q1-K1-H9
gaatatgggggagggtcgcacccatcgacaacctttcacttctgtggtgaggtgccaccctgttgcaccctccggactaactgtgcgtgcaagctcatatgccgatgagcttgacaagactgctaaagctattgcttctcctggccgagaaattttggccatggatgagtccaacgctacctaggggaaaccgtatggcctcaatcgggctagaaaacactgaggctaaaccccaaacctacaagacgttgcttgtttcagctcctggccttggtcaagacattttaagtgccatccctctttgaggaaaccctctaataaaccacaattgatggccaaaagatggttgatgttcttggtgaa

SEQ ID NO: 8333 - DNA, 458 bp, Gossypium hirsutum
  Clone ID: LIB3120-032-Q1-K1-A1
tcttatccaagaccgcccggtttttgctgcccctattcctttgctcaccccgagagaagagatgggaaacaagtcctacgacgaagccattgaagctctcaagaaacttctcagtgagaaaggagaactgaaagctgaagcagctgcaagggtagatcaaataacagcagagttaaacacagcatcagctgatggcaaaccatctgactcttctgttgagagactgaaagaaggcttcgtttacttcaagaaagaaaaatatgaaaagaatcctgctctgtatggtgagcttgccaagggtcaaagccctaagtatatgattgttgcctgctcggactctaaggtctgcccatctcatgtgctggacatgcaacctggggaagcttttgcggtccgtaatgttgctaacatggtgccaccatatgaccagattaaatatgctggcattggatctggta

SEQ ID NO: 8334 - DNA, 289 bp, Gossypium hirsutum
  Clone ID: LIB3120-032-Q1-K1-A2
tctttctcttgctctctttagagtaaatttctcttgcaatcctttgtagagatccgggatccattgtcaccatgtcttgctcaaatctgacaatgtgggtgtcctcaaaaccctctctttctgacacttcttcactctctttccgttctttcatcagcccttttcagctcccgtctcagagctcaacccccggtaacccttccaggtcctcatctgtaaccccagttcactgtggtcttcgtgagcttagagaccgtattgattcagtaaaaaacacgcagaacatcac

SEQ ID NO: 8335 - DNA, 437 bp, Gossypium hirsutum
  Clone ID: LIB3120-032-Q1-K1-A3
cgaaaacccattttcctcccatggccgccaccaacacattgatgagctgtggcatcgccaccggtgtcccttcagtgctttcctcttcaaagtccaagttctccaccgctacgccgttgcctagctttggcgccaatgttggtcaccgcgttagcatgtcggctgactggatgcctggtcagcctaagcctccttatcttgatgggtcagcacctggtgactttggatttgatccacttagacttggtgaggtgccggagaaccttgagagatacaaggaatctgagttgattcactgcaaatgggctatgcttgctgttcctggtatattggagccagaggcattggggtatggaaactgggtaaaggcacaagaatgggcagtcgttcctggggggcaagccacttacttaggcaaccctgttccatggggaact

SEQ ID NO: 8336 - DNA, 458 bp, Gossypium hirsutum
  Clone ID: LIB3120-032-Q1-K1-A4
cttcaaatgggaatctaaatttccagatttaaagtgatttttcaagtagtcgtcgccaaaaatttgacaattatagacaacgaaattaaggcattgatctcaacaaacaatgatacaaacaaaacgagtgttttttttttttttttaaattaactaacatactgtttctcaagaaggcttccacagaatgccaaatcgaaccgttcctctggtggatctccaatgcaatcgaacactgcatcggcattcaagaagtcttcatcggctgtataaccgctcttatagtttttgtgtacaggcaaaaacacttcttttttcttttttatctaccaatgatagctctgagtccgaccagacagtttggaaaattttggccttaaaacttagaagccaatgttgttaatctcttgtccagctgcaaacatcttaatattatagtaactgatgttttaatgaaa

SEQ ID NO: 8337 - DNA, 463 bp, Gossypium hirsutum
  Clone ID: LIB3120-032-Q1-K1-A5
gtatggtgagcagaatatccgtcgtgcagttcctttggctcttggtcttctttgtatatcaaacccaaaggttaatgttatggacacattaagcaggcttagtcatgattcggattcagaagttgcaatggctgcagttatctccttgggtttaataggtgctggaaccaataatgctcgcattgctggcatgcttcgcaatctttcaagttattactacaaggatgctagccttctcttttgtgtgcgaattgctcaaggtttagttcatttggggaagggtctattgactcttaatccatatcattctgaccgctttttgctatcaccgactgcacttgctggtttgtttacaatgttgcacgcatgcctcgatatgaaagctatggtactgggaaaataccattatgtcctctacttcattgttctggcaatgcagcccaagatgttgatgaccgtcgac

SEQ ID NO: 8338 - DNA, 475 bp, Gossypium hirsutum
  Clone ID: LIB3120-032-Q1-K1-A6
cccacgcgtccgaaaaaaccactgtaattgctcacctcatgcgatgcctaaatagaaacaacgaagaacacgaaggagtaggtttcgttgttgatggatttgactgaaggtgtcggagagagctcatcgccgccgagaagctttggcagcttcaacagctacgatgtcagaaacgacgttttcaatcgcttagtcgaatctggccacgaacaagctatttctaatcctgactttcgcgactttttagattctcacttcaatcgcttgcctgctagctatggacttgatgttaatatggatagagtggaagatgttttgttacatcacaagctgcttgcattggccaaggatccggagaggcggccagtttatcatatccgcttcttggagaacctttgcaccaaagcagatgctattgatgataaacaatatataaattctttatctccccagtcttttgatgatcgagatagtg

SEQ ID NO: 8339 - DNA, 478 bp, Gossypium hirsutum
  Clone ID: LIB3120-032-Q1-K1-A7
ccagcatttttcttttcacagatggatgagcttcaccacttctgatgcttcaataatgaggtggataagatgattgcaagtgggaaaaacaccaattttctgacaagacaagacgaagacgacgacaaaagaaacgaaaccaacaaaggtctatcgagttcttcttcttcttcacaatggttaaggttaaaagatccgagaatcgtacgtgtttcaagggccttcgggggtaaagacaggcacagcaaagtttacacgatacgaggattaagagactgaagggtaaggctgtcggttcctactgccattcaattatatgatctttaagacaggcttggtcttaatcaacctataaaagacgctgactgggtgcttaatgctgctaaacatgaaatcgatgaactccaacctctgccgatgccctcaccgccggcgaactttccgattttcgatgcattttggagaactaaatcgaaag

SEQ ID NO: 8340 - DNA, 479 bp, Gossypium hirsutum
  Clone ID: LIB3120-032-Q1-K1-A8
cccacgcgtccgcccacgcgtccgcgatgctggtgccggtcgtatgggaggaaccacccaatacaccgtcaacaaccagatggttaatgctaccctcatgaacatcgccgataaccccaccaacgtccagctccccggtatgtacaacaaggaagagaacccccgtgtccccattatcgtcactggtaacgatttctccacactgtatgctcctctcatccgtgacggtcgtatggagaaattttactgggcaccaactagggacgaccgtgtcggtgtttgcaaaggtattttcaggaccgacggcatcccagatgaagacattgttaagctcgtcgacaccttccccggccaatccatcgatttcttcggtgccttgagggctcgggtttacgatgacgaagtgaggaaatggatcagtgatgtcggagttgcaggcgtatggaagaagttagtgaactcaagggacggacctccaa

SEQ ID NO: 8341 - DNA, 374 bp, Gossypium hirsutum
  Clone ID: LIB3120-032-Q1-K1-B1
tttttgattttgatgtattgctgtccttttctcttaaccacctctccgatctccttcgcttcacagctctctcatctccccatttctttccattcaagcgttctgtcatttctcactcattgaatgctatatttctctctaactttgccttcgtccgccagctaagtaagatcttctttcttcttcttaaaacaagattgttgaattcttttcttttgggaatccgggtctgtctttcttgagatttgggaaacccttttgtttcattggccactgatgcgaaatgggttgttatgtacatcatagctttcagcttgaatttttgaaaaagctgtaatttgagtgttaaatatgcatagatgtgttggctttct

SEQ ID NO: 8342 - DNA, 482 bp, Gossypium hirsutum
  Clone ID: LIB3120-032-Q1-K1-B2
aaataagaaaattaagaggccggatttcaaaaccctttctctttaaaatatagagaaaagagggaccaaagtgaaagaaaatcgaagtatagatttgattttcaatctgcattttcagggtgtggaacaatgggtgcaggtggcagaatgtcggttcctccaagtcaaaggaaacaagaatcgggctcaatgaaaagagcccctatatctaaaccaccatttactctcagtgaaataaaaaaagccatcccaccacactgtttccaacgctcacttatccgttcattttcctatctcgtttacgacttcattttagtctctatcttttactacgtagccaccacttacttccgcaacctccctcagccactatctttcgtcgcctggccaatttattgggctcttcaaggttcagtcctcactggcgtttgggttatcgcccatgaatgcggtcaccacgcttttagcgattaccaatggat

SEQ ID NO: 8343 - DNA, 315 bp, Gossypium hirsutum
  Clone ID: LIB3120-032-Q1-K1-B3
ggatggtgccttacactaccgtgcttcctacatctttacctcctctttgtacgctcgacaacgggggggatttcggacttggggcggggctaaccttaactctaatccttatcctacgactctaaaccaagaccggccggatttagctgcccctgtgcctttgctcacccagagagaagagatgggaaacaagtcctactactaatcccttgaagctctcaagaaacttcttaatgagaaaggagaactgaaaactgtagcatctgcgagggtagatcaaataacagacgaatttaacacaacatcaggttgacg

SEQ ID NO: 8344 - DNA, 203 bp, Gossypium hirsutum
  Clone ID: LIB3120-032-Q1-K1-B4
accataatcaatggctgccgatttacaaacattttcttgctttcatggcacgttccaactcttgggtgtgccacgactttacggggtcttccctttcttggcccgggcgcttccatctaacagacgcttcctgttcgcgcatgttaagggggcggggttatctttgttcaccaccacctttcaagaagggatagtggagtttt

SEQ ID NO: 8345 - DNA, 480 bp, Gossypium hirsutum
  Clone ID: LIB3120-032-Q1-K1-B5
ctttttctttttcatttgcttaaaactatagagccacggtttagcagagagagagagatggggagctgcagcggcatggcatcggctgcctcggggttcttgttaatgcccagtctcaccggcactgctgcttctaagaccaataacatcagcatgctcttttccccttccagaaacaactactacaatggctcaaggctcgtcgtaagggcggctgaggaggaggcttcgccaccagcaccaccaccagcagccaccactgcgccaccagaaggtggtgaagcccctaagcctaagccaccaccgattggaccaaaaagaggaaccaaggtgaagatccttagaagggagtcgtattggtacaatggctatggatccgttgttacagttgaccaggaccccaagactcggtacccagtggtggttcgattcaacacaggaaccatgccaatgtatctactaacaactatgccatggatg

SEQ ID NO: 8346 - DNA, 478 bp, Gossypium hirsutum
  unsure (1)..(478): unsure at all n locations; Clone ID: LIB3120-032-Q1-K1-B7
ctgtcatctgtctgtctctctgttttactcttcaaccactatcactaccattatggcttcggctactgtttctgtagccaaacccaaccttcagattcaggcaaaaggaaagggtgttggttttgcagatttctcaggcctacacaactcctctactagccttccctttgccaggaaaacctctgatgacttccattcactcgttgcttttcagacatctgctctaggaagcaataatggcgggtacaggaaagggatggcagaggcaaagctaaaggtggctataaatgggtttggtaggattggcaggaacttcttaaggtgctggcatggccgtaaagactccccacttgatgtcattgccatcaatgacactggtggtgttaagcangcttctcaccttctcaaatatgattccacccttggcatcttcgctgccgatgtcaagcctgtcggcactgatggcatttctgttgat

SEQ ID NO: 8347 - DNA, 466 bp, Gossypium hirsutum
  Clone ID: LIB3120-032-Q1-K1-B8
ggttccggctgatggacctaatcatgttcagttattgcacgagccgataggtgttgcaggacggataattccatggaactgtcgtgtacttatgtttgcttggaaggttgggcctgcattggcttgaggaaataccatatttttgaagactggtgagcaaactcctttgactgctctctatgtgactaagctgatccatgaggctggtcttcctccacgtgttctgaatgtagtttcggactatggtccgacagctggtgctgctcttgccaaccacattgatggtgacaaggatgcattcaccggatcaaccaataccggtaagattgtacttgaattagacgcaaaatgcatatcttaagccggtgacgttagaacttggagggaaatcgtctttcataatatgcgaagatgctgatgttgacaaagccgtggagcttgctcattttgctttgatctttaatca

SEQ ID NO: 8348 - DNA, 476 bp, Gossypium hirsutum
  Clone ID: LIB3120-032-Q1-K1-C1
cggacgcgtgggggcagttgtttgaagctccagatgaagcagaaggcgacgacgatggaatatgagaagaagagccagtaattggattttggagtgggtttatatggctagttggaatgactgttgtcatttctctcctctctgaatatgttgtagaaactattgaggatgcctcagatacttggggaatttctgtaagtttcatcagcattattctgctacccattgttggaaatgcagcagaacatgcaggagcaatcatttttgcttttaaaaataagctggatatttctttacgtgttgcattagggtctgcaactcagatttccatgtttgtggtcccactctgcgtccttgtctcttggattatgggcattaacatggatcttaatttcaatctccttgaaactggctctctcgctctatccattattgctgttgccttcactttacaggatggcacttctcactacatg

SEQ ID NO: 8349 - DNA, 406 bp, Gossypium hirsutum
  Clone ID: LIB3120-032-Q1-K1-C2
tttagctatagcatacactactagtacccactactagcaatggcttcctcaatgatctcatcggctaccattgccactgcctctgcggcacaggctaacatggtcgctcctttcaccggcctcaagtctgcctctgctttcccagtcaccaggaaggccaacaacgacattacttctctcgcaagcaatggcggcagagtgcaatgcatgcaggtgtggcctcctactggaaagaagaagttcgagactctctcatacctccccgatcttacacccgtgcagttggctaaggaaagggattaccttcttcgctcaaaatgggttccttgcttggaattcgaattaaaagaaggattcgtgcaccgtaaatactcgagcctacccacgtactacgatggacgctact

SEQ ID NO: 8350 - DNA, 393 bp, Gossypium hirsutum
  Clone ID: LIB3120-032-Q1-K1-C3
gacgaaagacggataaacaaacaagaaaatatgttaagacccttcgatataagaatctgtatgggatctactaaattcaacggggtggcataaaaagaaagcgaataaataaacgaaagaaaataaacaaatgaaagaagggggaaaggagggagaaagggggaaggaggggcatcctaatgagatcctaatctcaagacacaaaaggggatatggcgaaattggtagacgctacggacttaattggattgagccttggtatggaaacctactaagtgataactgtcaaattcagagaaaccctggaatgaaaaaagggcaattctgagccaaatactattattgtattatttgacgaaaataaacatgaacaaaggttcagcaagcgagaat

SEQ ID NO: 8351 - DNA, 466 bp, Gossypium hirsutum
  Clone ID: LIB3120-032-Q1-K1-C4
actcccctctcactgcaacactcatagcacactatccacacttgctttctttgctttgccttccagtacagccccattttaaagccttggaaagcagacagacagcattaaggaatctcgaatctcaactgggtatggcaattactgcaacggctatgactatgactgtcactacgggattacagtttgctggttctctcaatcataaacagacttcttttttaggagttcccttgaggctgtcaatgtcaaaccctcagccatctttaccctctgtcttcctcaatgttcaagccaaagctcgcacccgaacagaagatcgtgaggcccgccattctcgcattatgaagaagattgaagggacaccagatagaccaagactgtgtgtcttccgttccaacaagcatctttatgtccaagtcattgatgactcaaagatgcacacactagcttttgctttaacaat

SEQ ID NO: 8352 - DNA, 480 bp, Gossypium hirsutum
  Clone ID: LIB3120-032-Q1-K1-D1
gttcatctcacatcttttctgggtgggaatgttctaccatctctataatcagttggctaccaatactctggagcgggtggcaccactgacccatgcagtgggcaacgtgctgaaacgtgtatttgtcattggcttctcaatcattgtctttggaaacaagatttcaactcagactggtataggaacagccgtagcaattgctggagtggccgcctactctttcatcaaggccaagatggaagaagagaaacgacaaatgaaagcagcatgagaataaaaaaggaggcaaggaaattggaggaagtcctgatgaagaccaaatttgattttaccttgctgttattgtgaagtttttatttttccctctttcttctcttatcatttcattttattttttcttttaaaattcagagaacaacctatttataactgtggatcagccagtgttgactctgaaataatgtgtactgctattactta

SEQ ID NO: 8353 - DNA, 459 bp, Gossypium hirsutum
  Clone ID: LIB3120-032-Q1-K1-D2
cccacgcgtccgattcagtcatccaccaattaccttacttactactctgctctgctctcttctgcttattcaatctaaaacctctgtcatctgtctgtctctctgttttactccacaaccactatcactaccattatggcttcggctactgtttctgtagccaaacccaaccttcagattcaggcaaaaggaaagggtgttggttttgcagatttctcaagcctacacaactcctctactagccttccctttgccaggaaaacctctgatgacttccattcactcgttgcttttcagacatctgctctaggaagcaataatggcgggtacaggaaagggatggcagaggcaaagctaaaggtggctataaatgggtttggtaggattggcaagaacttcttaaagtgctggcatggccgtaaagactccccacttgatgtcattgccatcaatgacact

SEQ ID NO: 8354 - DNA, 401 bp, Gossypium hirsutum
  Clone ID: LIB3120-032-Q1-K1-D3
tgcactggtgggaaaatgaatcatgccacctgtttttatgagaaaatgtgtgaaatcggcattgcgcctattttgactacttatgagacactgatatggggatatggtgaagcaaaacactcatgggaagctgaaaaactcctgctgattatggaagagaagggaatctctgctgagaggagcaccatacagctcgttgcggatgcttgacgtgccatcgggttactacatgaagcacggaaaacaataaaaaatgtggatctgggaattggattgactactaataatgacataccggcggatggcatggtgaagacgtacaagacacaaagcctaagtgcttcttattgtaatgatctgcatatgcctgtggtatccatgaaagaacaaaacggatcatc

SEQ ID NO: 8355 - DNA, 379 bp, Gossypium hirsutum
  Clone ID: LIB3120-032-Q1-K1-D4
aaagagacaggagtcgttgttgatttcactcatccttcagcagtttatgacaacgtaaaacaggcaacagcattcggtctgagaagtgtggttcatgtgcctcggattacgggtgacacaatatcagcattatctgcattttgcgagaaagccagcatgggttgcctagttgcaccaactctgtccataggatctattctcctccagcaagctgccatttcagcttccttccactacaacaatgtagaaattgttgaatcaagggcgcatgcaacacatcttccctcaccagatgccatccagattgccaacaacctcttcaaccttggccagatctacaacagagaagacctttcaacagatgtttcggcaaggggtc

SEQ ID NO: 8356 - DNA, 472 bp, Gossypium hirsutum
  unsure (1)..(472): unsure at all n locations; Clone ID: LIB3120-032-Q1-K1-D5
cccacgcgtccggcatgataaagatgttggtgctgttgttgttggatttgatcgatacttgaggtactacaaagtccagtatgggacactttgtatccgtgaaaatcctggttgtcttttcattgcgacaaatcgtgatgctgtcactcatctcacagatgctcaggaatgggcaggtggtggttctatggttggtgccatctgtggatctactcaacgtgagccacttgttgtgggaaagccctcaacttttatgatggactacctcgcaaacaaatttggcatcctcaagtcacagatatgcatggttggggacagattagatactgacattctgtttgggcaaaacggtggctgcaaaactcttcttgttctctcangcgtgacaagtttgtcaatgcttcaaagccccagcaattccattcaacctgatttctacaccaataacatctcagattttctgtctatcaag

SEQ ID NO: 8357 - DNA, 480 bp, Gossypium hirsutum
  Clone ID: LIB3120-032-Q1-K1-D8
aataaattattgagttttaacagattatttgttatccgcccttcaccatttcaaaccctcgcgggctgtaacttatctggggcggaagttctactgtacctggtgatcatgcaattccccatgggaatgcagtgatttcttcgaaaaaggaacaaatatttcaccaagaggcagctctagggagagccaaccttcaagaaactgtggtgaatgctaaatcctcaaatggtagagtaatgcttattgatggctcatcagtcatttatagggcctactacatacttctagcaaaactgcaccatgggtacctatcacatgctgatggcaactgtgactgggctgtaactatatttacagcttgatcacttataattgatgttctggaatttgttcctttacatgtaggggtcggtgtttgaccatgattgaattccatgtggtcatacatctatttgttcaatagaaaatgtgttgggaaat

SEQ ID NO: 8358 - DNA, 326 bp, Gossypium hirsutum
  Clone ID: LIB3120-032-Q1-K1-E1
ctcgcgatgttcgccatgctcggtttttatctctttcaccttcagcaaagcagcctggtctggatccttggctaaaggtgaaagagataaaaaacggtagactcgcgatgttcgccatgctcggtttcttcttacaagcttatgtgaccggagaaggtccggtggagaacctttcgaagcacctgagcgatccttttggcaacaacttgctcacggtcattgctggaactgctgaaagagctcccaccctctgattttaatatctttgttttctgattttcgccgctacttgttattgcgtttatgcattttgttgtacatcaaac

SEQ ID NO: 8359 - DNA, 473 bp, Gossypium hirsutum
  Clone ID: LIB3120-032-Q1-K1-E2
ccttaacttacctaccaaccaccatctgcccattcaggaggacccaagtcttactcttcgtgctatgttgaaatgctgatgtcctatgtttatgccatttatgctttgatataaaaggcatcaccactctttaatttctcatttcacttacaaactcaaccatctttgccctttcattgcttccttgcctgccttaaacctccttcaagcataaccatgactactgaaatggtaatggttgatgaaatcccttttactacacaaatcacaactaccaaaccactatctcttttgggtcatggaattaccgacattgagattcactttttgcaaatcaacttcacagcaattggggtttaccttgaaccagaagttgttggacatttgcaacaatggaaagggaagcctgggaacgtgctagctgaaaatgatgacttctttcaagctcttattaatgcttcagcggagaactt

SEQ ID NO: 8360 - DNA, 461 bp, Gossypium hirsutum
  Clone ID: LIB3120-032-Q1-K1-E3
ggtggatctgctgagttaactcggtctgccttgtttaatctcccccacccccaatcaaatccgcggaacaagaaagtcaaaaaagagggcagtgaaaaaatatggattttgatgaacatgatgaccaagaagaagaaatgggtatggctgttccaccaggctacgattcactgggtaccttatcggaaacttggtcgaaaccgggacctaccaccaccggcggtggtgatggcttggcgagaaaagtggggttcaccactgtaaggtatcgagagtgtctgaagaaccacgccgtgagtatcgtctgccacacggtggatggttgctgcgagttcataacggccggtgatgaagggaccgtcgaggcctttgaaatgcgccgcctttaactgccataggaattttcatcggaaggaaacccagggggaaaagaatgtttatatgctataacccttactacc

SEQ ID NO: 8361 - DNA, 450 bp, Gossypium hirsutum
  Clone ID: LIB3120-032-Q1-K1-E4
cggacgcgtgggtttgctttggggtctgacttttgattttagtgaatggatttctggcatggggagcatgtaaataatggggtttttctgtgatctaacacttccaattcgaacttagttttttttcttcttcttctgataacactagcagttgaaacttgaaactcaaccttaaaaaactgtcttgttcccttggtttcttgttttctctctggtgaagttcaaaataataatgggaatgagaagaagagaaatgggtttttattttttggctttcttatggttttgggttcctataaacggattgctttctcctaaaggggtaaactatgaagtgcaagctttaatggctataaaggatgctttgcatgatcctcatggcgttcttgataattgggatgccgatgctggtgatccatgtacgtgggcaatgggtacttggtcacctga

SEQ ID NO: 8362 - DNA, 452 bp, Gossypium hirsutum
  Clone ID: LIB3120-032-Q1-K1-F1
cggacgcgtgggcggacgcgtgggtgggatttgttttatgatacaaagttggtgggggaccaggcggggaatgactggacccaagttacccacgtggtgctttcgacccacttggactggctgatgatcctgacgcgttcgcagaattgaaggttaaggagatcaagaatgggcgccttgcaatgttctccatgtttggattctttgtccacgctattgtcacaggaaagggtgccattgagaacctctttgaccaccttgccgattcggtggccaacaacgcatgggcttatgccactaactttgtccccgggaaatgaacttaaattatagatatgtctctgaaagctgtaacattaatttgctatgtagcatctggtggtgtgtactgatgtaattcaactgctagcttttgagctggtggatcattacatacatatacctttttcctg

SEQ ID NO: 8363 - DNA, 446 bp, Gossypium hirsutum
  Clone ID: LIB3120-032-Q1-K1-F3
ccaggattgaagagataagattatagtgaaaaacttaacataataaagccccttcgacttgcttcattgatttgccctctcaaagcccaagaaaaatggcttctgcttccgctactctcctcaagtcttcacctattatcgacaagtccgagtggattaagggccaaaacctccgccacccttcggtttgttttgtacggtcacaccctacatcggccgcctttgccgtccgtgctagttcatatgccgatgagcttgttaagaccgcgaaaactgttgcatctccaggtcgtggtattttggccatggatgaatcaaatgctacatgtgggaaacggcttgccttgattggtctcgagaataccgaagcaaaaccggcaagcttaccgtacccttctcgtgtctggccctggcctcggtgactacatctcgggagctattctttt

SEQ ID NO: 8364 - DNA, 482 bp, Gossypium hirsutum
  Clone ID: LIB3120-032-Q1-K1-F5
cgtccgcccacgcgtccgcccacgcgtccggaaaatttgcttctgcttccgctactctcctcaagtgttgacctattatcgacgagtgcgagtggattaagggccaaaacctccgccacccttcggtttgttttgtacggtcacaccctacatcggccgcctttgccgaccgtgctagttcatatgccgatgagcttgttaagaccgcgaaaactgttgcatctccaggtcgtggtattttggccatggatgaatcaaatgctacatgtgggaaacggcttgcctcgattggtctcgagaataccgaggcaaaccggcaagcttaccgtacccttctcgtgtctgcccctggcctcggtgactacatcttgggagctatccttttcgaggagactctctaccaatctaccatcgatgggaaaaagatggtcgatgttcttgttgagcaaaagattgtccttggtatcaaagttgacaagggt

SEQ ID NO: 8365 - DNA, 240 bp, Gossypium hirsutum
  Clone ID: LIB3120-032-Q1-K1-F8
gcgggcgggcgtccgaatcccagctcttacagatggagaaaagtgcttacttgcgcggttgtgccgatatactaggggggatcgacagaagacttgcggggggcaatcaaataagatcatgaactataccaatgctatgactcaaaacggctgtaacaagatgtgtgactatagacgggtatgggtacgatgggaaatagacaagtcctctactttgtaatgccaaaaacaaaaaacaaa

SEQ ID NO: 8366 - DNA, 429 bp, Gossypium hirsutum
  Clone ID: LIB3120-032-Q1-K1-G1
cgcatctttgtttgttcataaaataatagtatagttttcttagaaaaaccagagtgaaagaaaaaaaaaagaagtaaaagaaaaatggctttggcaagcttggtgagaagaaaggcataccttttgtctagaaacctgtcgaattcgcccgcagatgcgttgaaatactctttttcactcagcaatttctcgaggggtttcgcttcaggatctgaagagaacgacgtcgtcgtcatcggcggcggacccggcggctacgtggcagctatcaaggctgcacagctaggtctcaaaacaacctgtatcgagaagcgtggtaccctcggtggtacttgccttaaacgtggttgcattcccatctaaggcgcttcttcattcatcccacatgtaccatgaagctacgcattcatttgcttggcatggtgtgaa

SEQ ID NO: 8367 - DNA, 245 bp, Gossypium hirsutum
  Clone ID: LIB3120-032-Q1-K1-G2
gggatttgtcttgtttatgttcactttccggtgaccaccttgctgacccagtcaacaacaatgctggggcctatgccaccaactttgttcccggaaagtgaacttagagagtgagaagggatttgtcttgtttatgtttttatttggtggtgtgaatttaaatttgttgcacaatcaatgaaagtataatgtgaattttgtgtgctcaaacaaaatataactatgtatatgtatttatacttaaa

SEQ ID NO: 8368 - DNA, 416 bp, Gossypium hirsutum
  Clone ID: LIB3120-032-Q1-K1-G4
ctttgttttccaatagttcgtaacaatggcggtctcacttcaagctgcagctaccctgatgcagccgatcaaggttgctgcaccatcaaggaccaatgtgccgctcaggtcctcccagagcgtttctaaggccttcggtttggagcctgttggtgctaggcttacctgctctttgcaaactgacctcaaggacttggctctgaagtgtgttgatgctaccaagctcgctggtttcgctcttgctacatctgctcttggtgtctcgggagcaagcgctgaatgagtttcaaagcggctaacctacgctgaaaatcaaagcaagacatacatggaagtcaaaggaacaggaactgcttaccagtgcccaaccatcgatggtggggtcgactcttttgcctttaagcctggcaaatact

SEQ ID NO: 8369 - DNA, 475 bp, Gossypium hirsutum
  unsure (1)..(475): unsure at all n locations; Clone ID: LIB3120-032-Q1-K1-G6
gtcgagaaagaaaatgatgggaaggaaattcttcgtcggcggaaattggaaatgcaatggaacgcactgaggaagtgaataagattgtgagtactttgaatgctggagaggtgccttctccggatgttgttgaggttgtggttagccctccatttttgttccttcctttggtaaaaacttcactgagacctgagttccaagtcgctgcacaaaattgttgggtcaagaaaggaggtgctttcactggtgaagttagtgcggagatgcttgtcaatttgagcattccttgggttattattggtcattctgagaggagacttattttgatggagtcaaatgagttcgttgcggataaggttgcttatgcactttctcaaggcttgaaggtgatagcttgtattggggaaacacttgagcaacgtgaagcangatctactgtggcggttgttgctgaacaaactaaaacaattgcagc

SEQ ID NO: 8370 - DNA, 254 bp, Gossypium hirsutum
  unsure (1)..(254): unsure at all n locations; Clone ID: LIB3120-032-Q1-K1-H1
cacctcanatgttcccacattttctttccctttctgctttaatttgagtgacaaagaccattgtcccaaatttctcttcttaagtaaaagaaaatgtcactttgtttatctttcaatgccttcactgttcactcaccaaagtcccgaactcacaaaacacgtttcagttctcagttcatcaatcaaatccaggtaaaaccagctagttttacttcaaaatcaataccctttaatgtaaaaagggttaaacttgt

SEQ ID NO: 8371 - DNA, 478 bp, Gossypium hirsutum
  Clone ID: LIB3120-032-Q1-K1-H2
gtttttcagtgacaagtttcaatggcaaaaccagtttccattgaagtgtggaacccaaatgggaaatacagagttattagcaccaaacctatgcctggaactcgatggatcaacctcttaatcgagcaagattgccgtgtcgaaatatgtactgagaagaaaacgattttgtccgttgaggatatcatttctttgattggcaataagtgcgatggggtgattggacagttgactgaagactggggggagactttatttgcagctttaagcagagcaggaggcaaagcatttagtaacatggctgttggttacaacaatgttgatgttaatgctgccaacaagtatggtgttgctggtggtaacactcctggtgtactcacagaaacaacggcagagctagcggcttctctttctttggcagctgctaaaagaattgttgaagcagatgagttcatgagggctggcttatatgatggat

SEQ ID NO: 8372 - DNA, 396 bp, Gossypium hirsutum
  Clone ID: LIB3120-032-Q1-K1-H3
cccacgcagtcgcttttctttcctaattcccttttttttctcagcctgtctcaacctgatctgggatgctatacccgaaaaactcgactagtctctcattctttttaatacgaatgaggtaagcctaagctctcatctgttagacttagggctgattgataatcctcctcttatcaagtgctttgattccatcctaaaatatcatcactctcactctttttagtggtgcatttctcaaatgcttatgcacccttatgacctctttggattccccctgatcgtatggcgaatctatctactgctgctctgtattcgatgatgaatttaaaccgtaagaaatagtttggcttcgctgtaaaaacattgcatttggagatctcaattcttcaatccccg

SEQ ID NO: 8373 - DNA, 420 bp, Gossypium hirsutum
  Clone ID: LIB3120-032-Q1-K1-H4
caccaccaacatagtccaacattttcataacaatggctgcagtcacaaacgccgctgctacatcctgcttcatggggacacgcttccgggacgtctacacaagttcagggagattcgtcgccaggtttggttttggcggcaaaaaagcagctcccaagaaagcctcgaaacaaacctccgaccgccctctatggtacccaggagcggtggctcctgattggctcgatggaagcttggtgggtgattacgggttcgacccgttcgggttagggaaaccagcggagtacttgcaatatgatttggattctttggaccagaacctggctaagaatatggctggtgagatcattggaactaggaccgaagttgccgacgtgaatgcgacgccgtttcaaccttacagcgacgtttttggtctac

SEQ ID NO: 8374 - DNA, 473 bp, Gossypium hirsutum
  Clone ID: LIB3120-032-Q1-K1-H6
cccacgcgttcgcccacgcgttcgatgctttatatgagcagtgtgattttcaagcaatatgtggaagtggtataaaaggaaaagcaggactatctgctgacaatttggcagaagatcttgggcctctctttgagtctataatcagatgcatacctggtccacatattgacaaagatggtgcactgcaaatgcttgctacaaatattgagtatgatgaacataaaggacgaatagctattgggcgcttgcatgctggggtacttcggaaaggaatggaagtaaaggtttgcacctcagaagattcgggtagatatgcaagaatttctgaactttatgtctatgagaaatttagtaagaccgctgttgagagagtagaaactggtgacatttgtgctgtttgtggaattgaagatattcagattggagaaactattgcagataaagcatttgggaaagccattacctggccatta

SEQ ID NO: 8375 - DNA, 306 bp, Gossypium hirsutum
  Clone ID: LIB3120-033-P1-K1-A1
agccgtacagataggattgtgtttaagttatttggtaaggaaccaaatgattttcctctgggcttgcgagcacagattcttgactggctatcacatagtcccactgacatcgagagctatattaggcctggctgcattgttctgacaatttaccttcgtcaagctgaggctgcatgggatgaacttcgctatgatctgagtttcagtttgagtcggcttctgcattggtcggatgacactttctggaggactggatggatatgtataagggtgctagatcaaatagcattcatttataatggtcag

SEQ ID NO: 8376 - DNA, 425 bp, Gossypium hirsutum
  Clone ID: LIB3120-033-P1-K1-A2
cgcaagcaatggcggcagagtgcaatgcatgcaggtgtggccttctactggaaagaagaagtgcgagactctctcatacctccccgatcttacacccgtgcagttggctaaggaagtggattaccttcttcgctcaaaatgggttccttgcttggaattcgaattagaggagggattcgtgcaccgtaaatactcgagcctacccacgtactacgatggacgctactggaccatgtggaagctgcctatgttcgggtgcaccgactcggctcaggtattgaaggagcttgaggaatgcaagaaggaataccccaatgcattcattagaatcattggctttgacaacgtgcgttaagtgcagtgcattattttcattgtctacaagccttcaggcttttaagctttttataaactttgtttcttca

SEQ ID NO: 8377 - DNA, 430 bp, Gossypium hirsutum
  Clone ID: LIB3120-033-P1-K1-A3
gttccttgcttggagttcgaattggaggagggattcgtgcaccgtaagtactcgagcttacgcacgtactacgatggacgctgctggaccatgtggaagctgcccatgttcgggtgcaccgactcggctcaggtgttggaggagcttgaggaatgcaagaaggcataccccaatgcattcattagaatcattggcttcgacaacgtgcgtcaagtgcagtgcattagtttcattgcctacaagcctccaggcttctaagctttttattaactttgtctctccatttgtttgaatttgtactcagaaaaaccatgtgctttacctttgcttttttctttctttgagttattggcctttgtttcttgatttctggggtttaaatccttttttggattttcggtgggaaaaaaggctgggaactaatgaataa

SEQ ID NO: 8378 - DNA, 316 bp, Gossypium hirsutum
  unsure (1)..(316): unsure at all n locations; Clone ID: LIB3120-033-P1-K1-A4
aaaaaacaaaaacaaaaaccacacaagaagagcgagcgatagacaaaacaaaaaaaaaaaggggggaacacagggggaaacaaggacaccaacaaaaanacaaaagaaaaaaagaaaagaagacaaaacgagaccaaaaaaagagacacaacccagagcaaaacaaaaacaaagagcacaccagccaaaaaaacgagagcaaaaaaaagcaacaaacaagaaacaagacaaacaacggacaagaaaagaaaaaaaggaagaagaaaacaaataaagcacaaacaagaccaagcaagcagaccgagaaaggcgaagg

SEQ ID NO: 8379 - DNA, 137 bp, Gossypium hirsutum
  Clone ID: LIB3120-033-P1-K1-A7
gttccttgtactctgtactaattacactaatttttacagcactttcattactcgtcctaacggcaccactaaaaggcacactggttcaccatataaaaactaatcatatatttctccacccacttttattactattt

SEQ ID NO: 8380 - DNA, 230 bp, Gossypium hirsutum
  Clone ID: LIB3120-033-P1-K1-A8
accgatccttcctggcacaggccatcatggtgggcctcaaaaccggccttaaataagccaatgcctatccattcaccaatgaggccaacaacgacatcacttcttctttcaagcaacactaagagagtgcaatgcatgcacgagatgcctactattgtgaaaaacaagtacgagactctttaatacatcccatatcttactctcgaacaactgtctaaagaagtatatta

SEQ ID NO: 8381 - DNA, 439 bp, Gossypium hirsutum
  Clone ID: LIB3120-033-P1-K1-B1
ggttgttgtactctggactgcaaacactgagaggtacagcaatgtcatcgtggggctaaatgacaccgtggaaagccttatgggttctttggagaagaatgaatcagagatttctccttccactttgtatgctattgcttgtgttcttgaaaatgttcctttcatcaatggcagcccacaaaacacctttgttccagggttgattgatttggctattcaaaggaactgtctgattggaggagatgacttcaagagtggccagaccaagatgaaatctgtcctcgtggatttcctttggggctgggatcaagccaacatcgatagtggagtacaaccatctgggaaataatgatggcatgaatctattcggaccccaaaccttttcgttccaaggagatctcaaagagcaatgtggttgatgacaatggttcaagcaatg

SEQ ID NO: 8382 - DNA, 255 bp, Gossypium hirsutum
  unsure (1)..(255): unsure at all n locations; Clone ID: LIB3120-033-P1-K1-B12
ttcatcacactttctgtcgctactaatttataccgggccacgtcgaaatacaggggacgactcacaaaataaaccanaactaccancacgacatgatagccaacattctcaatcaggcccatcacattcataccaccattacaagcatgtataagangaacttcatcaccttgcagatggcacagaccactgttnctatggtagccaagatgaagaacatgttgctcgacattccctaattgctggacaacatct

SEQ ID NO: 8383 - DNA, 461 bp, Gossypium hirsutum
  Clone ID: LIB3120-033-P1-K1-B2
atcagtgagactcttttgtatacctgtagcatatagtaatagtaagcagtaatagcaatggggtcctccatgatctcatcggcagccattgccaccgtgaaccgctcctccccggcacaggccaacatggtggcccccttcaccggcctcaaatctgcctctgctttcccagtcaccaggaaggccaacaacgacatcacttctcttgcaagcaacggtgggagagtgcaatgcatgcaggtgtggccgcctcttgggaagaagaagttcgagactctctcatacctgcccgatcttactcccgtacagttggctaaagaagtagattaccttcttcgctctaaatggattccttgcttggaattcgaattagaggagggattcgtgcaccgtaagtactcgagcttacccacgtactacgatggacgctactggaccatgtggaaactgcccatgttcgg

SEQ ID NO: 8384 - DNA, 277 bp, Gossypium hirsutum
  Clone ID: LIB3120-033-P1-K1-B3
atcagtcagactcttatgcatacctgtaccctttcgtaatatttatcaggaatagccatgggcttcttcatgagcttattggcggccattgcctccgtgaaccgttcctacccggcacatgcctacatggtggccccctttaccggtctcaaatcagcctgtgcttttccaggcaccactatggccaacaaagacatcactttttttgcaagcaaccgtgtgagagtgcagagcatgcatgtgtggccgactcttgtgaagaagaagttccagacat

SEQ ID NO: 8385 - DNA, 469 bp, Gossypium hirsutum
  unsure (1)..(469): unsure at all n locations; Clone ID: LIB3120-033-P1-K1-B4
gcggacgcccacgcgaacggcgaacaagaacgacacagacggnggnncccccggagggggggaagccggggaaaaggcggaggncaaaaaccagaaaagggctgacaccaagaacgagagcaagggagagcgccacacccccaaaacggaaaacaaccaggcaggaaggcaaacaaacaggggcaccacaaacaagggccgcgaaaacaacaacgcgcggcaaaacaacacgaaagaacgggcggcgacggagcacaacgaaacagagccggagcaaacacagaagcagctcccccaccgaaagaagggatgaaaaacaaacacagccagagggaaacaaagggggggcaagccaacaaagggcagcaaaaaaagaaaaaacggcaccacacattcaaaggcctccctaaaagccttagaaaccaggggaaggagggggccgggaaccacaacaatccccgattaacag

SEQ ID NO: 8386 - DNA, 371 bp, Gossypium hirsutum
  Clone ID: LIB3120-033-P1-K1-B5
cccacgcgtccgcccacgcgttcgtgagatcatcactccaaactactaccggggaaaagaaagagccatgctgcttcccaactgtcttttccacatgggtggcgccgcaatcctcttgtcgaaccgtctttcctagaggtggcgtgccacgtatcgtctctgtgcatgttgttcgaacccataaaggtgcagatgataaagcctatctatgcgtgttcgaagaagaagacaaagaaagcaatgttgggatatctttatctaaagatctcatggctattgcttggagaggctttaaaaatttaacattaccacttatttggtccctttactttctttcctgcaattctgaagcaacttcctaattttttttt

SEQ ID NO: 8387 - DNA, 304 bp, Gossypium hirsutum
  Clone ID: LIB3120-033-P1-K1-B6
tcgatcagagagactcttttgtatacctgtagcatatattaatagttagcagcaatagcaatggggtccttcatgagctcatcggcggccattgtcaccccgaaccgctcctccccggcacaggccaacatgggggccccctttaccggccccaaatcttcctctgctttcccagtcaccaggaaggcctacaactacatcacttttcttgcaagcaacagtgggagagtgcactgcacgcacgtgtggcctcctctcgtgaataataaatactagactctctcatacctcccccatcttactc

SEQ ID NO: 8388 - DNA, 207 bp, Gossypium hirsutum
  Clone ID: LIB3120-033-P1-K1-B7
ctcaggccgtaatgcacttttgtgctctttgatttgattatctccgagaagaaccctcgggaggaagccgtaaatttcaacggatcaaagactgagcttgtgctttggtaagcctctcagttcaaactacgtctcatgtcagagcttgacatgcaaactgctactcgctttgacccctctgcagatgcaaatgctgaggactcaggt

SEQ ID NO: 8389 - DNA, 320 bp, Gossypium hirsutum
  Clone ID: LIB3120-033-P1-K1-B8
ccgggtcgagcgacgcgtccggtgagactctttagtatacctgtagcatatatttatagtaattagtaatagcaaatggcctagtgcatcatctgattggcaaccgggggtcaccgtgaaccgctccttccctgcacaggccaacatggaggaccccttcaccggcctcaaatctgactctgcttttccagtcaccaggaaggccaacaacgacatcacttcttttgcaagcaacggtgggagagtgcaatgcatgcatgtgtgggcgtctcttgtgaagaagaagatcgagacttttttatacctgtccgatcttactt

SEQ ID NO: 8390 - DNA, 389 bp, Gossypium hirsutum
  Clone ID: LIB3120-033-P1-K1-C1
ggtttttagggcttttctaacttttctgattattttttgataatccggagttcaatcatctgaaagaagccctaaaatccttgaatcaggtctgagcttgtggtttgttaggcctctttgatcaaactaagtttcatgtctgatcttgacgttcaaattcctactgcctttgatccctttgctgatgcaaatgctgaggactcaggtgcgggtgcaaaggagtatgtgcatattcgtattcagcaaaggaatggtcgcaaaagcctgacaactgtccaggggttgaagaaagaattcagctataacaagatacttaaagacctgaagaaggagttttgctgcaatgggaccgtggtccaggaccctgaattaagacaggtgattcaact

SEQ ID NO: 8391 - DNA, 463 bp, Gossypium hirsutum
  Clone ID: LIB3120-033-P1-K1-C2
gtgagactcttttgtatacctgtagcatatagtaatagtaagcagtaatagcaatggcctcctccatgatctcatcggcaaccattgccaccgtgaaccgctcctccccggcacaggccaacatggtggcccccttcaccggcctcaaatctgcctctgctttcccagtcaccaggaaggccaacaacgacatcacttctcttgcaagcaacggtgggagagtgcaatgcatgcacgtgtggccgcctcttgggaagaagaagttcgagactctctcatacctgcccgatcttactcccgtacagttggctaaggaagtagattaccttcttcgctctaaatggattccttgcttggaattcgaattagaggagggattcgtgcaccgtaagtactcgagcttacccacgtactacgatggacgctactggaccatgtggaaactgcccatgttcgggtgcac

SEQ ID NO: 8392 - DNA, 345 bp, Gossypium hirsutum
  Clone ID: LIB3120-033-P1-K1-C3
cccacgcgtccgtttagctatagcatacactattagtacccactactagcaatggcttcctgagcgatctcatcggctaccattgccactgcctctccggcacaggctaacatggtcgctcctttcaccggcctcaagtctgcctctgctttcccagtcaccaggaaggccaacaacgacattactcctttcgcaagcaatggcggcagagtgcaatgcatgcaggtgtggcctcctactggaaagaagaagttctagactctttcatacctttccgatcttacacccgtgcagttggctattgaagtggattacctttctttgttcaaaatggggtcctttgct

SEQ ID NO: 8393 - DNA, 412 bp, Gossypium hirsutum
  Clone ID: LIB3120-033-P1-K1-C4
ctcttttgtataactgtagcatatagtactttttagcagtaatagcaatggcctcctccatgggctcatcggcaaccattgccgccgtgaactgctcctccccggcacaggccaacatggtggcccccttcaccggcctcaagtctgcctctgctttcccagtcactaggaaggccaacaacgacatcacttctcttgcaagcaatggtgggagagtgcaatgcatgcacgtgtggcctcctcttgggaagaagaagttcgagacactctcatacctcccccatcttacaccctgacagttggctaaggaagtagattaccttcttcgctctaaatggattccttgcttggaattcgaattagaggagggattcgtgcaccgtaagtactcgagcttacccacgtactacga

SEQ ID NO: 8394 - DNA, 320 bp, Gossypium hirsutum
  Clone ID: LIB3120-033-P1-K1-C5
cggactcaggccttttctaactggttagattttttattcgattattcggagttcaatcatctgggagaatccgtaaaatccttgagtcacgtctgatcttgtacgtcgttaggcctctttgatcaaactaagtttcatgtttgatcttgacgttcaaattcctactgcctttgatccctttgctgatgcatatgctgaggactcatgtgcgtgtgcaaagtgagatgtgcatatttcttttcatcataggaatggtcgcaaatagcctgacatctgtccatgggttgaagaaagaattcatctttaacaagatacttaaa

SEQ ID NO: 8395 - DNA, 304 bp, Gossypium hirsutum
  unsure (1)..(304): unsure at all n locations; Clone ID: LIB3120-033-P1-K1-C6
aaccgggncgagcgacacgtccggagagactcttttttatacctgtagcatattttaatagtaagcagtaatagcaaaggcctccgccatcatctgataggcaaccggggccaccaagaacctctcctctcacacacagaacaacaaagtgggccccttcaccggcctcaaataagtctttgctttcccagtcaccaggaaggccaacaacaacatcacttttcttttaagcaacagtgggagaaagcaaagcatgtcaatgtggtcgcctctttggaagaagaaaaaagagacattcttatac

SEQ ID NO: 8396 - DNA, 372 bp, Gossypium hirsutum
  Clone ID: LIB3120-033-P1-K1-C8
gttagctttagcatacactactagtacccacttctagcaatgtcttcctcaatgatctcatcgtctaccattgacactgcctgtccggcacaagctaacatggtcacccctttcaccggcctcaagtctgcctctgctttcccagtcaccaggaaggccaacaacgacattacttctctcgcaagcaacggcagcagagtgcaatgcatgcaggtgtggcctcctactggaaagaagaatttcgagactctctcatacctccccgatcttacacccttgcacttggctaaggaagtagattaccttcttctctcaaaatgggctccttgcttggcgttcgaattggaggagggattcttgcaccgtaagtac

SEQ ID NO: 8397 - DNA, 147 bp, Gossypium hirsutum
  unsure (1)..(147): unsure at all n locations; Clone ID: LIB3120-033-P1-K1-D10
ctgnnnctccttttttttctctcttttaacaattttggctttaggccataaaatcaggagcgggtgttctaagctgatctttctttctagactttctcgtcagtctcatgatgctaagactctttcatcattgccctgccaaatcat

SEQ ID NO: 8398 - DNA, 124 bp, Gossypium hirsutum
  Clone ID: LIB3120-033-P1-K1-D12
tgctcgtggcgctgcggaatattattaaattgaaatcaattataacggagcctgccccgacaccggggctcataagcttttcgaaattgtggaccagcacaaacttcgcatcttctatgaaaag

SEQ ID NO: 8399 - DNA, 439 bp, Gossypium hirsutum
  Clone ID: LIB3120-033-P1-K1-D2
gttagctttagcatacactactagtacccactactagcaatggcttcctcaatgatctcatgggctaccattgccactgcctcggcggcacaggctaacatggtcacccctttcaccggcctcaagtctgcctctgctttcccagtcaccaggaaggccaacaacgacattacttctctcgcaagcaatggcggcagagtgcaatgcatgcaggtgtggcctcctactggaaagaagaagttcgagactctctcatacctccccgatcttacacccgtgcagttggctaaggaagtagattaccttcttcgctcaaaatgggttccttgcttggagttcgaattggaggagggattcgtgcaccgtaagtactcgagcttacccacgtactacgatggacgctactggaccatgtggaagctgcccatgttcgggtgca

SEQ ID NO: 8400 - DNA, 442 bp, Gossypium hirsutum
  Clone ID: LIB3120-033-P1-K1-D3
cccacgcgtccgcccacgcgtccgggatctgatgtttgagttgtcaatgtggcgttgcagggatgagcttcgtgttcgtgcaggcgaacttcatacatcttcaaggagagatgctaaacactacatagagttctggaaaaaagttcctccaaatgaaccctaccgcgttattcttggtgatgttagggacaagctgtatcagacacgtgaaaggtctcgccaaatgttgtctcatggtatctctgacattccagaggaggaaactttcaccaacattgagcagttttttggaaccgcttgaactatgttataggtcactttgctcttgtggtgaccggccaattgctgatggaagtcttcttgatttcttgaggcaagtgtcaacttttggcctctcacttgtcagacttgacattcggcaagagtctgaccgccacaccga

SEQ ID NO: 8401 - DNA, 311 bp, Gossypium hirsutum
  Clone ID: LIB3120-033-P1-K1-D4
gagaagccgaagctatttctgtaagattccaagtccaatgctatgcgaagcatgtggaaaaggatttgatggcggtaaaaaaccgacggcaaattatatgcaaaatttgaggtgaaagtggttttggatgggatgatatcatgaaaatgatcacatgtgatagagcgacatatgttgcatcagtgatggcacacaatatgtttgaaccatttctgaataaaatcatcgatcattatgatgaaatggcttttgttgttggcaaagatattgtgtaacagggagttttgccagaacattttctgacatatatt

SEQ ID NO: 8402 - DNA, 282 bp, Gossypium hirsutum
  Clone ID: LIB3120-033-P1-K1-D5
gcttacgtccacgcgtacgggatctgttgttagagttgtcaatgtggcgtttcaaaggtgatcttgcggtgcgtgcagagcgaacttatacatctttaatgagagatgctaaacactacatagaggtctggaaaaaagatccttcaaatgaaccctaccgtgttattcttgtgataggtagggacaagcagtattatacacgtgaaaggttttgccaaatgtatgactcaaggtaactttgacattccagaggaggaaacttttaccaacatataacatttt

SEQ ID NO: 8403 - DNA, 407 bp, Gossypium hirsutum
  Clone ID: LIB3120-033-P1-K1-D6
gtgagctttagcatacactactagtacccactactagcaatggcttcctcaatgatctcatggggctaccattgacactgcctgggcggcacaagctaacatggtcacccctttcaccggcctcaagtctgtctttgctttcccagtcaccaggaaggccaacaacgacattacttctctcgcaagcaatggcggcagagtgcaatgcatgcacgtgtggcctcctactggaaagaagaagatcgagactctttcataccatcccgatcttacacccgtgcagttggcttaggaagtagattaccttcttctctcataaagggttccttgcttggagttcttattggaggagggattcttgcaccggaagtactttagcttacccacgtactactatggacgcttct

SEQ ID NO: 8404 - DNA, 397 bp, Gossypium hirsutum
  unsure (1)..(397): unsure at all n locations; Clone ID: LIB3120-033-P1-K1-D7
tcggccacgcgtccggccacgcgttcgggatctgttgtttgagtttttaatgtggcttttcaggcgtgagctncgggttcgtgcagaggaacttcatacatcttcaaggagagatgcttaacactacatagagttctggaaaaaagttccttcaaatgaaccctaccgtgttattcttggtgatgttagggacaagctgtatcatacacgtgaaaggtctcgccaaatgttgactcatggtatctctgacattccatgaggaggaaacttttaccaacattgagcagctttttggaaccgcttgaactatgttataagtcactttgttcttgtggggaccggccaactgctggaggaagtctttcttgtttttttgaggcaagagtcaactttttgt

SEQ ID NO: 8405 - DNA, 434 bp, Gossypium hirsutum
  Clone ID: LIB3120-033-P1-K1-D8
gagctcaacccccggtaacccttccaggaccttatctgtaatttcagttcactgtggtcttggggagcttagagaccgtattgggtcagttaagaacacgcataatatcactgaagccatgaaacttgtggctgctgctaaagttaggagagcacatgaagctgtcgtcaatggcagacctttctctgagtccctggatgaagttctctacaacatcaatgaacagctccagactgaagacatagatgctcctcttacaaacgtcaggcctgtcaaataagttgctttggttgttgttactggtgatcgttgtttttgtggaggatttaacattgctatcattaataaagcttaatctttaattgcttaatttgaacatcttggacttgattatacaaatatcattgtggttaaaaatgtggattttatatttt

SEQ ID NO: 8406 - DNA, 334 bp, Gossypium hirsutum
  Clone ID: LIB3120-033-P1-K1-E1
acaacaccaactgcagaacactggcctgtacaaccatggcttttctttccccatcattcgccagggcggcagggaagttctgccctgtccaccccggaaatccacggaactggccgggtttacatgaggcaaaccaccaaacctgatcctcttgctagaccatgcaacggaactgaccgcaatacaaccattgggcctcttactcagaagacaccatcttactttgacgcgggagcatcttgttgctcatggctggccaagcccttatctttgatgtcagcccatgctctttctttggaacggcttgctacccttactgttctagggcttgggc

SEQ ID NO: 8407 - DNA, 308 bp, Gossypium hirsutum
  unsure (1)..(308): unsure at all n locations; Clone ID: LIB3120-033-P1-K1-E10
ccnccncatccgtccatattggcatttctgttctcacttaatatatggtctgaagtgcgcattgcatggtatgtggggaggatgatgaaccancctcaaaacgtatgaaactatcctcttaagaattgagacgtctttcaaacggttcaactattaaagagcctgtagctgtgtcttcgngtgacctgatggctcggcccctacagtctgaatggtgcgaagaacttgctggttcaaaaggagtaataaataaggtagaatttgtccgaataatatcanaagcattatactctcttggttatataaag

SEQ ID NO: 8408 - DNA, 466 bp, Gossypium hirsutum
  Clone ID: LIB3120-033-P1-K1-E2
gagctcaacccccggtaacccttccaggtcctcatctgtaaccccagttcactgtggtcttcgtgagcttagagaccgtattgattcagtaaagaacacgcagaagatcactgaagccatgaaacttgtggctgctgctaaagttaggagagcacaagaagctgtcgtcaatggcagacctttctctgagtccctggttgaagttctttacaacatcaatgaacagctccagactgaagacatagatgctcctctcacaaacgtcaggcctgtcaaaaaagttgctttggttgttgttactggtgatcgtggtctctgtggaggttttaacaatgctatcatcaagaaagctgaagctagaattgcagaattgaagcagcttggacttgattatacaataatcagtgtggggaaaaagggtaattcatatttcatccgcaggccctacattccagtggacaaattt

SEQ ID NO: 8409 - DNA, 254 bp, Gossypium hirsutum
  Clone ID: LIB3120-033-P1-K1-E3
cgtttggggttcttcaacttatcttttcatatattcatccatggcttctaggcgtcttttgattgctggattggctcttgatctcattgcttttggtttagctgttgcagctgagcaaagaagaagcactgccaagattgtgccggataatgaaattcaatacaactattgtgtgtattacttagacatagcaaccggctatggtgttggggcattttttgtttctcatggctagcccagcccttataatggtt

SEQ ID NO: 8410 - DNA, 436 bp, Gossypium hirsutum
  Clone ID: LIB3120-033-P1-K1-E4
cgccattctacctgctttttccaggaaaccaaacgccattcttcctcacctcattgtcaactgttacaaggtgaattgaagcatggctgcaaaatttaaaaagtgcatgatgttgttcggcaaaggtctcgaaggaagaagatatgggaagcgagtcatacgaggaagccattgcagctttgtcgaagcttctcagtgacaaagctgatctcgggagtgtcgccgccgcaaaaatcaagcagataacagccgagttagaggcagctgccgattccactcagttcgacccggtcaagcggctcgagaccggtttccttcacttcaagaaagaaaaatttgacaaaaattctgatctgtacggtgcacttgccaaagggcaaagacctaaattcttggtatttgcatgctccgactctcgggttgccccttccaattc

SEQ ID NO: 8411 - DNA, 416 bp, Gossypium hirsutum
  Clone ID: LIB3120-033-P1-K1-E5
gaagaagcctttgtttggggttcttcaacttagctttccatatattcatccatggcttctaagcttcttttgattgctgtatttgttcttgatctcattgcttttggtttagctgttgcagctgagcaaagaagaagcactgccaagattgtgcaggataatgaaattcaatacaactattgtgtatataactcagacatagcaactggctatggtgttggtgcatttttgttcctcatggctagccaagcccttataatggttgccagccgatgcttttgctgtggaaaggctttgaaccctagtggttcaagggcttgggcagtcatccttttcattgtttgctggttatttttcctaatagccgagatatgtttgttggcggcatcagtacggaatgcataccacacaaaata

SEQ ID NO: 8412 - DNA, 394 bp, Gossypium hirsutum
  Clone ID: LIB3120-033-P1-K1-E6
gtgctcaacccccggtaacccttccagggcctcatctgtaaccccacttcactgtggtcttggtgagcttagagaccgtattgattcagtatagaacactcagaacatcactgaagccatgaaacttgtggctgctgctaaagttaggagagcacaagaagctgtcgttaatggcagacctttctctgtgtccctggttgaagttctttacaacatcaatgaacagctcctgactgaagacatatatgcttctctcacaaacagtaggcctgtcaaaaaagttgctttggttgttgttactggtgatcgtggtctctgtggaggttttaacaatgctttcattataaaagctgaatctagaattgcatattttaagcagcttggactttgttta

SEQ ID NO: 8413 - DNA, 218 bp, Gossypium hirsutum
  unsure (1)..(218): unsure at all n locations; Clone ID: LIB3120-033-P1-K1-F10
ttccatcacactgccggccgttactagtggatatcgggagccgggctaacgcaggaccaacaagcagcttaccttcttctggatggaaggcaggaaaaggtcgatggagtcctgcatagactcctgctagacgtcgagcacattataggagctgttcnacgctagaatccatgctacggcggtcttgcaaatatantatgccgttccggtgccggact

SEQ ID NO: 8414 - DNA, 363 bp, Gossypium hirsutum
  Clone ID: LIB3120-033-P1-K1-F2
tccacgcgttcgaccacgcgtccgggctgctgtcgtggcctatgtgggtcaatgcatatggggtctaaggaacacaatctgctgggggggtttgcttttattggtgaaggaattcccgttgccacgggggcggcttttacctacaaatataagcgggagattctaaaagaagcggattgtgatcatgataccttggcgtttttcggcgatggatcttgtaacaatgggcagttctttgagtgttagaatattgcgggcttgtggaaggtgcccattgtgtgtgttgttgagaacaatatgtgggctacttgtatgtctcatttgagggctacatctgatcctcatatttataagaaaggacct

SEQ ID NO: 8415 - DNA, 464 bp, Gossypium hirsutum
  Clone ID: LIB3120-033-P1-K1-F3
tcgctccagcgttttggcatgcaactatgctatcttaggcactgtatcatctgagcttaatgccgggcttgcttgagcgccattagttgcttccccagttatgtgcggtggtcgcaagttgcctgtgatcagagcccatcatgcttaattttttgattccaaaggatcaggtgtcagtgaaggaagaagagcttctgtgctttacttggcagatggcctttttaccacagttggtgctttttctgtaaaagcttgggtcatttgacgagttccttgaaaagagcaaagcttacaatgaattttatgtcatgaagaacgtggcaacaattggagcaaactttttcagatcaatacactggttaatgttgtactttcaaatttcctgagaactttactggttgtcatgatcttgctaagcaaaaagaaagtccatttatttactgatgattttgtctttgaatgtg

SEQ ID NO: 8416 - DNA, 243 bp, Gossypium hirsutum
  Clone ID: LIB3120-033-P1-K1-F8
gtggacaatccgagtgcgaatcagccctaaacttgaacgcaatgaaccaatctccaaacccatggcacttttctttctcgtatgccagagcttttcataacacttgctagtatacatgtggaggcagaccctataacgttaaggttgctaaggatactctcctcgaactttccaaaatcaactcactctcatatctagggaaattcacccgcttgggagaatcattaaatgcctagtaaggaa

SEQ ID NO: 8417 - DNA, 428 bp, Gossypium hirsutum
  Clone ID: LIB3120-033-P1-K1-G2
ctccacaggagaatccccccagctgttcctggaatcatgttcttgtctggtggacaatccgaggttgaagcaaccctcaacttgaacgcaatgaaccaatctccaaacccatggcacgtctcgttctcgtatgccagagctctccagaacacttgcttgaagacatggggaggcagacccgagaacgttaaggctgctcaggatacgctccttgtccgtgccaaagccaactcactcgctcagctcgggaaatacaccggcgagggagaatcagaagaggccaagaaaggaatgttcgttaagggctacgtctactaagctgctgcaagcaaagctttagctgagatgatggagatttcatgatatggtttctttccctttgtggtgattgttttataggctctggagactactttttgttctggatt

SEQ ID NO: 8418 - DNA, 257 bp, Gossypium hirsutum
  unsure (1)..(257): unsure at all n locations; Clone ID: LIB3120-033-P1-K1-G3
agctaatcctncactttgtaggttactatttatatacttttttttgcttatcgtgataaacgggaattaccgatattttgtttgtagcttatttgcaacatctgcagttgaattcgttcatctgaactttgggattttagtcttgaaataaaatgagtctatgtgagagtgattttgtcctgttcttaaacatacaaagcagctagatattcatgggaaacgtcttatcctttagaagaggagaattcatgtgaaaa

SEQ ID NO: 8419 - DNA, 428 bp, Gossypium hirsutum
  Clone ID: LIB3120-033-P1-K1-G4
ctacgctcgtgggattgttcttcctggtgtctcttctaagcactcctcggcattagtctcccctccatccacatctccttccttcagctctaagagccttaaaacaagttcactatttggagaatcattaagggttgttccaaggtcatcattgaaggtttcaaaggcaaagcacactacttcactagtgacaaaatgtgaaattggagagtctttggaagagtttctcacaaaggcaacaacagataaggcattgattagattaatgatgtgtatgggtgaagcattaagaacaattgcttttaaagttagaacagcttcatgtggtggtactgcttgtgttaattcctttggtgatgaacaactttgctgttgatctacttgccaacaagcttctttttgaagctttgacatactcgcacttttgc

SEQ ID NO: 8420 - DNA, 375 bp, Gossypium hirsutum
  Clone ID: LIB3120-033-P1-K1-H3
cgcgtccgcccacgcgtccgcccacgcgtccgacaaaattaactgctttattttggcctctacaaccatgggtctttcttgcccatcattcggcggtaaggcagtgaatttctccccttccacccctgaaattcagggaactggccgtgtttccatgaggaaaaccaccaagcctgttccttctggtagcccatggtacggtcctgaccgagttttgtacttgggtccactttccggtgagccaccatcttacttgaccggtgagtttcctggtgactatggttgggacactgttggactctcagctgattccgagacctttgctaggaaccgtgagctcgaagtcatacactgtcaatgggccatgttgggagc

SEQ ID NO: 8421 - DNA, 415 bp, Gossypium hirsutum
  Clone ID: LIB3120-033-P1-K1-H4
atttagctatagcatacactactagtacccactactagcaatggcttcctcaatgatctcatcggctaccattgccactgcctctccggcacaggctaacatggtcgctcctttcaccggcctcaagtctgcctctgctttcccagtcaccaggaaggccaacaacgacattacttctctcgcaagcaatggcggcagagtgcaatgcatgcaggtgtggcctcctactggaaagaagaagttcgagactctttcatacctccccgatcttacacccgtgcagttggctaaagaagtggattaccttcttcgctcaaaatgggttccttgcttggaattcgaattagaggagggattcttgcacctgaaatactcgagcctacccacgtactacgaaggacgctactggaccatg

SEQ ID NO: 8422 - DNA, 254 bp, Gossypium hirsutum
  Clone ID: LIB3120-033-P1-K1-H5
ggctttcatcaacggttggtgccttacctcctcttcttccttttccaccacctactctttttgcgctcgtcggcgacctacattgcggccttcggacgtcgctagccttaactcttcttcttctcctccgactcttatccaataccgctcggttttcgctgtccctgttcctttgctcaccccgagagaagagatgtgaatcaagttctactacgtatccattgaagctttttagaatcttttcatagagaaag

SEQ ID NO: 8423 - DNA, 309 bp, Gossypium hirsutum
  Clone ID: LIB3120-033-P1-K1-H8
aggtagcattctgcactctgttcagggtctctctaataccgattgattggctcatgctgagaaacgacttggctggtgactcaacaagccagacaatgtaattgttgatcactacacatatgttatcttgggagatgggtgtaaactggagggtattttaaaagaagcttgttcacttgctggacactggtgactcgtaaagcttatagctttctatgatgacaaccacatttctattgaatgtgacactgaaattgcgtttactgataatgtcgatacacgctttgagggagctaggggtggcattgt

SEQ ID NO: 8424 - DNA, 284 bp, Gossypium hirsutum
  unsure (1)..(284): unsure at all n locations; Clone ID: LIB3120-033-P1-K1-H9
ctctagatcgcatcgctccagcggcccncanactcatggatatatccagacttccatcacactgtcgctcgttactaatggatcgggcaatatcacatcaccactttgaaatctaactcctactcaatcaaccaagtctccattaactaatgcactcactaatctcccatctgctcgcttcagtacattagtcaatgccttgngccctttctacttcaccaacaccaccgatgtattctacatcgtctcctctttcatcccagacattgttgttcacatcacca

SEQ ID NO: 8425 - DNA, 279 bp, Gossypium hirsutum
  unsure (1)..(279): unsure at all n locations; Clone ID: LIB3120-034-Q1-K1-A1
cccacgcgtncgcccacgcgtncggtttgtggatttcgaggtgttgtgcagataaaggatgagtacactggatgcaactagagcagaacttgctcttgtagttttgtatttgaataaggctgaagcaagggataagatatgcagggctatacaatatggctcgaaattcttaagtgatgggcagcctggcacagcacaaaatgttgacaaatcaaccagcttggcacggaaagttttccgcctttttaagtttgtgaacgatttgcatggtcttattag

SEQ ID NO: 8426 - DNA, 377 bp, Gossypium hirsutum
  Clone ID: LIB3120-034-Q1-K1-A10
aacttccttctcaaagttctcttctctcagagtcaggttgccactttccaccttttctgtttatcattttatgtttctggactttgtttttattcttttatgttttgctttgacattcaagacttttttttttggactgtgaatcgggaattttacaggaattgaagggttgaataacaatgggattttgctctttttgttgtttagcatcttaggcattcaggacactgaggccaggtttagaatttagaaattcaataacactcgccaataagcttgttatagacattgaatactactggaaatgaacaaggaaagtattttcttattaagataatttcttgtaaaacttgaaaagttattaatttcatttcaaa

SEQ ID NO: 8427 - DNA, 446 bp, Gossypium hirsutum
  Clone ID: LIB3120-034-Q1-K1-A11
cccacgcgtccgtatcacccagaaatgtttaataacagaaagtagcagaatgaaaattcaagtacgaaaatggctatgctgggagcaagtccaattaggttctcaagctttccaccgtcttcttcatatctcacttccaccttcaaacccacctcctcttccacactatcatttgttgtggtggggaaatcaattatctatcgtcgatgtgtcgcctgctccgctgttcaggaatcttctactcctacagccactgctgaaaccaagggaaccactccaccatcagccggcgttgctggtggtgaggaggaagtgaaggcagccccaaaagcagctgcagcaaagcctaaacctgctgcaaaggctcctgccaaatctttgccggagttgatgtcggaggatgtcatcccttcattgaaaacaatacttcaagctcaagatgatat

SEQ ID NO: 8428 - DNA, 272 bp, Gossypium hirsutum
  Clone ID: LIB3120-034-Q1-K1-A12
cccacgcgtccgtatcacccataaatgtttaataacagaaagtatcacaagggaaattcaagtacgaaaatggcgatgctgcgagcaagtccaattaggttctcaagctttccaccgtcttcttcatatctcacttccaccttcaaacccacctcctcttccacactatcatttgttgtggcggggaaatcaattatctatcgtctatgcgtcgcctgcttcgctgatcaggaatcttctactcctacagccactgctgaaaccaagggaac

SEQ ID NO: 8429 - DNA, 232 bp, Gossypium hirsutum
  Clone ID: LIB3120-034-Q1-K1-A2
tgcttttgcagcgcttgatggaagcagctcaagttgtgaacagtaatggcaatgccgatggtgactaccagtacgaaattatcagttggttcgatagtgtatcgaagaacgccgccatggtccagacggagacacttggccagattcttcatctcaactatggtgtggagtacctgaaaaaatggtttggggacatgaagatccaagacatggatgcttgtgcattggaatc

SEQ ID NO: 8430 - DNA, 384 bp, Gossypium hirsutum
  Clone ID: LIB3120-034-Q1-K1-A3
cggacgcgtggggaccgcgttacctccctccaccgtcaccccaacgtcccctgctctggtccaccaccaaaccaaccaccatctccacctctttcacccacaaaaacctcaccgctcttcctatcttccccaaccccacctcacttctcccttcatcatcccttcatgtccatcgaacccctgccaccggctacgccgcagctctattagacacagctcaatccaccggttcacttcacgaagtccgacgagacgtacgaaagctctcgagactactccaaaacagtcaaattcaagctttgttgaatgaccccgttttgcgtgatcaaaagaagggaaaagcatgaaggaattgctaaaaagggaagttaacaacatctttta

SEQ ID NO: 8431 - DNA, 338 bp, Gossypium hirsutum
  Clone ID: LIB3120-034-Q1-K1-A4
aattaggaacattttggccttacactccttcaattcaactcttgtatggactaagagcagctttggaccttatttttgaggaaggacttgacaatgtcattgaaaggcatagtcgtttaggcaaagcaacaaggcttgcagtggaagcatggggcttgaagaattgcacacaaaaggaggaatggttcagtgacacggtgacggcggtgcttgttccaccatatattgatagttcggaaatcgttaaacgggcatggaagagatacaatttgagcttaggtcttggccttaacaaagtggcaagaaaagttttcagaataggacatctttgaaaccta

SEQ ID NO: 8432 - DNA, 226 bp, Gossypium hirsutum
  Clone ID: LIB3120-034-Q1-K1-A5
caaccactatcactaccattatggcttcggctactgtttctgtagccaaacccaaccttcagattcaggcaaaaggaaagggtgttggttttgcagatttctcaggcctacacaactcctctactagccttccctttgccaggaaaacctctgatgacttccattcactcgttgcttttcagacatctgctctaggaagcaataatggcgggtacaggaaagggat

SEQ ID NO: 8433 - DNA, 386 bp, Gossypium hirsutum
  Clone ID: LIB3120-034-Q1-K1-A6
ttttgcctgaaaaagccaaacaccttcgagaaaaaccgaaaatttctttaaacatagaaaagaaaaggcgtattttctcggataattaatgggaagagcgtttgtgtatgtaattcttggaggaggtgtagcagctggatatgcagctcttgaatttacgagaaaaggggtttctcctggtgaactttgcattatttctgaagaacctgttgccccatatgagaggcctgctttaagcaaaggctttttacttcccgaatctcctgcacgccttccatcattccacacatgcgttggtgctaatgaggaaaggttaactcctaaatggtacaaggaacatgggattgaattggtccctggaactcgagttaagtcttgtgatgtca

SEQ ID NO: 8434 - DNA, 446 bp, Gossypium hirsutum
  Clone ID: LIB3120-034-Q1-K1-A7
cccacgcgtgcgctcacaccttaactcctcaactcccacacgtttacgagtgaatttggtagcagcatggctggttcaagtgccatgcttgtgcagctcactctgatgcttgctttactctcatgttcaatggctcaaagtccatcggcatcacccacaatgtcaccaagttcaagcaccaccccctctcccgttgccactccaccaccaaccaccatgacccctcccccagccatgactccaatgtcagcacccgcaccgtcaatccccatggctcctaccccttcaactactccaatggccccaaccccatcctctgtcccagaggcaccaaccccatcaatgaacagttcaccaccggcaccttcacctgtgacgcctccatctatgacgcctaattcagaacctacagctacagcttcaccttcagccatgacccctgggga

SEQ ID NO: 8435 - DNA, 298 bp, Gossypium hirsutum
  Clone ID: LIB3120-034-Q1-K1-A8
attatcttccttccttttcattccttttgctatggcaggaactggggtgggggctgtttatgggaacggcgcggtagctgaaacccacaaatcccctttctccgtcaaggttggcctagcccaaatgctccgtggcggggtgattatggatgtcgtcacccctgaccaagctcgcatcgctgaagaagctggagcctgcgccgtcatggctcttgaacgagtccccgccgacatccgagcccaaggtggcgtggcgcggatgaatgacccacaacttatcaaagaaattaagcaagct

SEQ ID NO: 8436 - DNA, 259 bp, Gossypium hirsutum
  Clone ID: LIB3120-034-Q1-K1-B1
actcactatgctgtcatgagttcctatgaatacctcagccaaggtcttaaaacgtacaatttggacaacaacatggatggtttctacattgctcctgcattcatggacaagcttgttgttcacatcaccaagaacttcatgtccctccctaacattaaggttcctctaatcttgggtatttggggaggcaaaggtcaaggaaaatctttccaatgtgagcttgtgtttgccaagatgggtatcaaccccatcatgatga

SEQ ID NO: 8437 - DNA, 93 bp, Gossypium hirsutum
  Clone ID: LIB3120-034-Q1-K1-B10
tcgcctgcagtccggccggattccggtcgcccagcgtcgagctactgcttttgggtcaggctgtatgacacacatgtcagagagtcgaaaacc

SEQ ID NO: 8438 - DNA, 381 bp, Gossypium hirsutum
  unsure (1)..(381): unsure at all n locations; Clone ID: LIB3120-034-Q1-K1-B11
cccacgcgtccgcccacgcgtccgcccacgcgtccgtaaattcatgacaatcctcggagcctttcacgattccactttgttctaaagatggaaaatatgaaggttttttcagttaaggtggaggatggaagggaaggacgagatgggaagccatcagttggtcccgtgtaccgtaacctactcgccaagcaaggataccctccacctgatcctgagatgtctaccacatggactcttttcagggatgtcgggttgggatttatggagcaaactgcccgcagtggattatggcaatggaggcctgcggtgcccacagtttggtttgtgtgcctctctatgatacactagggtctggagctgtaaattntatcatagaccatg

SEQ ID NO: 8439 - DNA, 415 bp, Gossypium hirsutum
  Clone ID: LIB3120-034-Q1-K1-B12
gtgagactcttttgtatacctgtagcatatagtaatagtaagcagtaatagcaatggcctcctccatgatctcatcggcaaccattgccaccgtgaaccgctcctccccggcacaggccaacatggtggcccccttcaccggcctcaaatctgcctctgctttcccagtcaccaggaaggccaacaacgacatcacttctcttgcaagcaacggtgggagagtgcaatgcatgcaggtgtggccgcctcttgggaagaagaagttcgagactctctcatacctgcccgatcttactcccgtacagttggctaaggaagtagattaccttcttcgctctaaatggattccttgcttggaattcgaattagaggagggattcgtgcaccgtaagtactcgagcttacccacgtacta

SEQ ID NO: 8440 - DNA, 381 bp, Gossypium hirsutum
  Clone ID: LIB3120-034-Q1-K1-B4
atttgatttggttagttgcttaactacgttcttttgttttagttgttaaattttctcgtattatctgttgttctcaaaaaaatgaaaaaaaaagtggaaaaaaatgcatttatgttgattattactagttctatatttttgagcttaagtagttaattttatattctaagaagaagctcgtgttattctttaataatttggattgatgtaatttttcagtattagtttatttttctagttaggtaatttatcaattcgatctcgattctaaccttcttttttagcctttatctacacctttaacccaagccctgttacaacccttttaaagacctttttattttgtgtatcatatcattttgtagtggtggatatttgatt

SEQ ID NO: 8441 - DNA, 110 bp, Gossypium hirsutum
  Clone ID: LIB3120-034-Q1-K1-B5
agtaaaaatatactttatgaacaacaatctaaaatacggaaaaagaatgataggaaaatggggctgggaaaaagggaaacggggatgggtggacacgaatgaaaccccaa

SEQ ID NO: 8442 - DNA, 290 bp, Gossypium hirsutum
  Clone ID: LIB3120-034-Q1-K1-B6
caaactcccatcacccgagatcatcttttcccttcagaatggcggctgcaaccatggctctctcgtccccatctttcgccggaaaggccgtcaagctctctccttccgcccctaaaatccaaggcaatggccgtgtttccatgaggaaaaccgctaccaaggctgcttcctctggaagtacatgggacggtcctgaccgagtcttgtacttgggtccactatctggtgagcctccatcttacttgaccggagaattccctggtgactacgcgtgggacactgctggactc

SEQ ID NO: 8443 - DNA, 410 bp, Gossypium hirsutum
  Clone ID: LIB3120-034-Q1-K1-B7
ggaatattcttcttcctttttttttttttttcatgcactccaggtgtttaggaaaagtccgatattgtttttggttctaagctgtggaggttgggtatttggttaaagtagttttgaaggggtttcgaattctgggtttaattcgtcttggtggggggtagtacccaggtttagacaaattgtggacatcacggctatacacggagtttctcgggatcttattcatgtccgtactgtacgacgtaagggttgtgtgaacgaaagcaacccttcgccgcacggtgggcgtggagctttgccttctgaaggtggtagtccttccgatctcctcttccttgctggtggtggaattgtcttttagagtttcagctgtatatatatagatatcttttaatcctccatagatatat

SEQ ID NO: 8444 - DNA, 415 bp, Gossypium hirsutum
  Clone ID: LIB3120-034-Q1-K1-B8
atttcattttgctttcacaaatctaagaccagagctccaaaagattgaatttttaacccctcaaattaaaatgcttcctttttcgcgttttcggttgaaaatttgtataaaaaagagggtgatttagaaacaatggatgctgattcatggagtgctcgtctttcttcagcttctaagagatatcaatcggctcttcaattacgatctgatatgcttatggggtttgaagaaattgatggagaagatgaaataagagaggagtttcgatgccctttttgttcagagtatttcgacatcgttggcttgtgttgtcacattgatgatgagcatccagtggaggctaaaaatggggtttgtccagtctgtgcaaatgaggtgggcgttgatatggttgcgcatataaccctacaacatg

SEQ ID NO: 8445 - DNA, 351 bp, Gossypium hirsutum
  Clone ID: LIB3120-034-Q1-K1-C1
caagctgctattttgatgaacggccaaaatgcaaagaccaatttccccaaggctgctgaccctggtgaacaaaatgctcgtggtggtggtggtggcggtgatgatgatgatgatgatgatcggtctccattgccccctaaggccttggccgagcttttgaatgctaagctgaggaagtgttgcaaagaccaatctccttctttgacttgcctcaggctcgataccgataatgctcatataggtgtgtggcaaaagcgtgcagggaatcgatcgagttccaattgggtcatgagggttgagcttgggaataagaaggttgataccccggcgtcccgagacagaaggacactg

SEQ ID NO: 8446 - DNA, 402 bp, Gossypium hirsutum
  Clone ID: LIB3120-034-Q1-K1-C10
gaaaaaacactgatcaacgaaggatttctagggttttttttcggtatcagcgggcgatggcaatggctgctctcagacgcgaaaggaggcgtttcgcccctctgatctctccccgtccaattactgctgtccgatcctctcctatcgttcccactcacgaagatgagggtccgattggtgttcgttatatttcaacccaagtcgctagaaaccggatgaagagtgttaagaatattcagaaaattacaaaggctatgaagatggttgctgcctcaaagctgagagcagttcagactaaagctgagaattcccgaggcctctggcagccatttactgcacttcttggtgatcttcccagtgttgatgtcaagaagaacgtttgtgtaaccatctcttctgaca

SEQ ID NO: 8447 - DNA, 386 bp, Gossypium hirsutum
  Clone ID: LIB3120-034-Q1-K1-C11
cccacgcgtccgcaaattttcatcacccatcaagcttttcatcaatggcttggcttcggcaagcttcaatctgtcttcaacccaagcttctttcatcttctcaacaccccagatcccttccctctctcaacctctctttttcagccactttcccttccctcaaactctccaccactcgccctcttcatggcggtgccaaaatgtcagcctccgccgctttcagctacgccaccgctttagccgatgtagccaagtccaacaacacccttgatgccaccagctccgacgttgaaaaagtcgagacaatcttctccgacccacaagtcctcgaattcttcaccaaccccaccattgatgtcctcaaaaaacgtcaggttttggatgag

SEQ ID NO: 8448 - DNA, 387 bp, Gossypium hirsutum
  unsure (1)..(387): unsure at all n locations; Clone ID: LIB3120-034-Q1-K1-C12
cccacgcgtccggccaatctttcatactctcgatctgtggctcaacttgcgcggagcgagaaaattagctagtttcttttagacagtagcgattagcgaatcctagctttcccctgccttcctctgctttgcttattgacctctttaatcaaacgagttcttgccactgacttcttgcattcaaaagaagggggaagttaacaagtgtggtttcagtcagtgatacacactaagctgagagcagatgtatttctttctttaggcagngttgatgatgttcttgggtctgagtacactcagacatgccaatttcatgtttaatgactaacagtcttgtgactgatgcttaacgaatgatctttgggaagcaaatgagaaagggcatga

SEQ ID NO: 8449 - DNA, 354 bp, Gossypium hirsutum
  unsure (1)..(354): unsure at all n locations; Clone ID: LIB3120-034-Q1-K1-C2
cccacgcgtncgcccacgcgtccgcccacgcgttcgcccacgcgtncgcacggctttggtctccggcttctgcctcacttccaactccacctctccttctaactcactccggcaacccacattgcggcggccgtctatcgtcgccaacctcaactcttccacttctcctcctactctcattcgaaatcaacccgttttcgcagcacctactcctttgctcactccttccaattggaaagaaaacatgggagaccagtcatacgaggaagccattgaagctctcaagaaactgctcaatgagaaaggagaattgaagagtgcagcgacggcaaaggtagagcaagtgacagctga

SEQ ID NO: 8450 - DNA, 353 bp, Gossypium hirsutum
  Clone ID: LIB3120-034-Q1-K1-C3
cccacgcgtccgaattttttttcactctctaaaccctagtttcatccctaattttcatgtccaaatctttccttaaatgcgttaaatctcaatatttgctcgaatttcaagcagaatttgaattttcgaatcggagtttcgcccttgaccgaacgtgttcggtttcgaattgactttttctttcgcgagcttattttgcttgggattcgaagaacttttatccgagtaagtttcgtattttttggtggtgttggagcttctcggagtttagctattggaagagattcgttgaattttattggtctcgcagcttgtttgaagtgaattttggttgaaaattgagaaatgtttgt

SEQ ID NO: 8451 - DNA, 331 bp, Gossypium hirsutum
  Clone ID: LIB3120-034-Q1-K1-C4
aacaatggcggtctcacttcaagctgcagctaccctgatgcaaccaatcaaggttgctgcaccatcaaggaccaatgtgccgctcaggtcctcccagagcgtttctaaggccttcggtttggagcctgttggtgctaggcttacctgctctttgcaaactgacctcaaggacttggctctgaagtgtgttgatgctaccaagctcgctggtttcgctcttgctacatctgctcttgttgtctcgggagcaagcgctgaaggagtttcaaagcggctaacctacgctgaaattcaaagcaagacatacatggaagtcaaaggaacaggaact

SEQ ID NO: 8452 - DNA, 375 bp, Gossypium hirsutum
  Clone ID: LIB3120-034-Q1-K1-C6
caaagaaccaatttctctgaacatcaattctccacattaccccatcaatcataccattcattttcattctttctctaagaaacaagctctcagagaagacaatggtgggttttgaacaatgaagaagaagagaaagtgtgggttatgcttgttccatggcctgccattatgcttactatgcttccttttcaccttcagtaacattgagaggctttggtgccaagaacagagaacccaggccttttcaagtacatctttcttccattagcagtcctgttagagcctcctacaatacccttgtctctgaggctgcaaggcttttggttcctacagcaattttcgaagcttcaaaactcaaagttgtctttatgggag

SEQ ID NO: 8453 - DNA, 318 bp, Gossypium hirsutum
  Clone ID: LIB3120-034-Q1-K1-C7
cccacgcgtccggtggggagcttgctccaacagtcatggcttggccatcaggttaaactcgagggcatagcggatatttgacattcgcaaggaagtttttcttgattctttgttatgacacattcctgagtattcactttacagattttcatcctatttttggcctggtttaaaattactgttgtgagtttaacattgtcgaagttcaggtcggaccaggcctacaggtatcatagtgtcttttgataattaaatgatacattaaacagcttctgacgtctctctaaatccttgatgagagatccttctttctcctgt

SEQ ID NO: 8454 - DNA, 399 bp, Gossypium hirsutum
  Clone ID: LIB3120-034-Q1-K1-C8
cccacgcgtccggaaaaatcatttcatttttttagttagaattttaggcgggtctcgaaaaaagatagcgaagaaaattatccctagagtagatactaagaggaatgtataaaccaatgcttccataaattcgatcgtggtttacaattatagcttccgtacctgtttatttggaatcatctcccgaataaagaaagaacaagaatcaaagaaaaggcagcgattaaaatcaagatttttccagcagcctatggcaaatcacaaatagaagtagaagcaaaaaataacaaagcaatcttgcatcagactacttgtcttcttgtagttggatctccaagttttttgaatgctccaaattccacttgagcatccaaatctggatcaatactcggcaaaaca

SEQ ID NO: 8455 - DNA, 387 bp, Gossypium hirsutum
  Clone ID: LIB3120-034-Q1-K1-C9
cacattatacaaccctaacttctacattagggaagaagctcctaaggtttgagagagatggcttcaaaaagatcggcatcggttgccctcttttttgcactcaacattctcttcttttcacttgtcagtgctaattgttcttgcccttcccccaaacccaaaccaaaccccactccctccccaactcctgctgcggaaggaaaatgccccataaatacccttaaactaggtgtatgtgctgaggtgcttggtttagtcaatgtaactgttgggtcacccccagttcaaccttgctgcacccttatcaaaggccttgctgatcttgaagcagctgtttgcctttgcacagcgatcaaaagcaacattttgcgtatcaatcttaaatat

SEQ ID NO: 8456 - DNA, 127 bp, Gossypium hirsutum
  Clone ID: LIB3120-034-Q1-K1-D1
tccaggcttctaagctttttataaactttgtctctccatcgtttttctgaggacaaaggcaaacggatggagagacagagggtataaaaagcttataagcctggaggcccgcgtgcctcgactcttg

SEQ ID NO: 8457 - DNA, 444 bp, Gossypium hirsutum
  Clone ID: LIB3120-034-Q1-K1-D10
gtagaagtcctgcacaaagtgccagtggaggatctcttgaagatcatccaggcatgaatagcagagcttcttgtcctgtgctttcagagaaacatgagcaattacatcgtaacatgaaggagaaaagtgagagttatagggcaaatgttgccactgatgtgaataccgaatcttggcagagcaatgacttcaaagatgtgctgactgggtctgatgagggagatggttcacctgcagctgttcatgatgaggaaaactgtaggactggagaagatgctaggaaaacaactgaagttacaaaaactgcttcctcatcttctggaaatgaacttaaatcagggaaactgcaagatgcttcttttagttccataaatgctctaattgatagttgtgctaagtacgccgaagcaaatgagtgcttgccagttggggatgatgctggaa

SEQ ID NO: 8458 - DNA, 425 bp, Gossypium hirsutum
  unsure (1)..(425): unsure at all n locations; Clone ID: LIB3120-034-Q1-K1-D11
gcattaccaacacccggtgcacctgaaccggaagggatccggttcattcctgctgttaatttcaccgaaaaaccagtattttcgttttcgtttcctttctttctcttcctgaaaacaaaatccaaaggaaacctgatttttgtaaaatacagaggaagagaggagactacaacttttaaacgacaccgtcaagaccaagttccaatttttattacttctgtgtgtttcctttgaaattcaccctcccaaataaattccccaactcgtccgagctcctgaaacagctgagaatccgatggactctttgggtccgaatcgctttgatatctttgacatntaccggcacatttgtgaacttagaagaggagatactttatgttgtggcgaagaaggttaccgacangatgaggaatcacaaagagcta

SEQ ID NO: 8459 - DNA, 379 bp, Gossypium hirsutum
  Clone ID: LIB3120-034-Q1-K1-D12
aagctcactgcctttctggggtacaaggctggtatgacacacattgtcagagaggtcgaaaaacccggatctaagcttcacaagaaggagacatgtgaagctgttacaatcattgaaacccctcctatggtgattgttggggtggttggatatgtgaagacaccacgtggccttcgctccttgaacaccgtctgggctcagcatctgagtgaggaagtcaagcgccggttctacaagcactggtgcaagtccaagaagaaagcttttgtcaagtactcaaagcagtatgaaagtgaagaagggaagaagagtatccaagcacagttggaaaagatgaagaaatatgcaactgttattagggtcttggctcacactcaga

SEQ ID NO: 8460 - DNA, 390 bp, Gossypium hirsutum
  Clone ID: LIB3120-034-Q1-K1-D2
gaggaactggtattggtggagggaatgatgagagagagcaaactcttaaccagctttggaccgaaatggatggtttcgagggtaacaccggtatcatcgtaattgcagcaactaacagagctgacattcttgattccgctttgttgaggccaggacggtttgatagacaggtcactgttgatgttccggatatcagaggcagaactgagatactaaaggttcatggtagcaacaagaagtttgaaactgatgtatcatttgatgttatagccatgagaacgcctggttttagtggagcagatctagcaaatctattaaacgaagctgctatgttggcttgtcggcgtggcaagaccgcatcttcatctaaagaaatcgatgattcaattg

SEQ ID NO: 8461 - DNA, 353 bp, Gossypium hirsutum
  unsure (1)..(353): unsure at all n locations; Clone ID: LIB3120-034-Q1-K1-D3
cccacgcgtncgcccacgcgtccgcccacgcgtgcgtaaccatgaaggaggttccaagcggcgcgtggcgctgtgccgagattatctccggcaacggccacacttactgcgtcaagtatggttggtttccgatcactggcgaggcggcgttggtcgagagagtcccgaggaaagcgattaggccttgccctcctcctataaatgggaccgacgattgggttcctggcgacgtcgtggaggtgttcgacgagttgtgttggaaaccagcggtgatcgttagagttttcggtggaaacaacatgttttctgtcaggattcttggatcgaagagcccaactcaagcacatcaatct

SEQ ID NO: 8462 - DNA, 332 bp, Gossypium hirsutum
  Clone ID: LIB3120-034-Q1-K1-D4
catacacctatggaactttattggaactacatagatctatggaatcggttaatatatgctgaatcgcacaagagaaatgaaaaaactgcgaatattgtgggattagcttcgtcggagacaaaaatatagaatgtgagtaggcaagacaagattgagtcaaaagaattccttttttttaagtaaagatctatatgtgtcatagggcgatatgaatggtatatcacacgcactagaccggttatacgagatctatggtgagggaggaggccaacacttctattggcatatagcaggtttacaagtccatgcccaagtgcttattacctcttggg

SEQ ID NO: 8463 - DNA, 297 bp, Gossypium hirsutum
  Clone ID: LIB3120-034-Q1-K1-D5
cgtaattctatactttctgtcttctttctaatttacggaaaaggaatgtttggaaatgaggctaggagagtagtagcatggatgaatgggtgcgaaggagaccccaaactccctataggcagcatagagacgcgcacattaactgtcgttccatctccatcaaaggcgatggagaggttgagtgtagccattagagagttgaaatgcagccctcctcctcttacctctggcattcttcgacttcaggtaccgatcgaggagcaaatcgaagcaatcgagtggctccatgctcaacat

SEQ ID NO: 8464 - DNA, 372 bp, Gossypium hirsutum
  Clone ID: LIB3120-034-Q1-K1-D6
cccacgcgtccgggaagggcttcttcaagctggttcttcatatttttattacaagtaagttcaattcttgactatttcttgaaatttttgtatttttatgacttttacaactaggcccacttgttaaatccattagtttttgattttatgaaagaagttgaaagttgatatgaatatgtgctggaagtatatgatgatttagcatgaaattagagctttaaattgttcatatgctgattttattgaaagaattgaatagaaagtgaatgtttgggacctaatagtaaaagagtttgaagatagagttatatgtggaaattctgaatttcaatagttgtgtaacaacttataatgtctagtaaagtactaatt

SEQ ID NO: 8465 - DNA, 379 bp, Gossypium hirsutum
  Clone ID: LIB3120-034-Q1-K1-D7
cccacgcgtccgcaatgtcgacggcttctatcaacggttggtgccttacctgctcttcttccaccactaccagctcctctttttccgctcgtcgacgacctacattgcggccttcagtcgtcgctagccttaactcttctccttctcctccgactcttatccaagaccgcccggcttttgctgcccctattcctttgctcaccccgagagaagagatgggaaacaagtcctacgacgaagccattgaagctctcaagaaacttctcagtgagaaaggagaactgaaagctgaagcagctgcaagggtagatcaaataacagcagagttaaacacagcatcagctgatggcaaaccatctgactcttcttgtgagagact

SEQ ID NO: 8466 - DNA, 374 bp, Gossypium hirsutum
  Clone ID: LIB3120-034-Q1-K1-D8
cccacgcgtccgcccacgcgtccgaacaaaatcagttgcttcacaatggccgctacaaccatggctctttctgccccatcattcgccggtaaggcagtgaagttctccccttccacccctgaaatccggggaactggccgtgtttccatgaggaaaaccaccaagcctgttccttctggtagcccatggtacggtcctgaccgagttttgtacttgggtccactttccggtgagccaccatcttacttgaccggtgagttccctggtgactatggttgggacactgctggactctcagctgatcccgagacctttgctaggaaccgtgagctcgaagtcattcactgcagatgggccatgttgggagctcttgg

SEQ ID NO: 8467 - DNA, 424 bp, Gossypium hirsutum
  Clone ID: LIB3120-034-Q1-K1-D9
cggtaattaagtctagcttcttatagttgttttttgtttccatggcggtaggcttatgcgccgccgtaactcgtaaacccttccgctcatttccgctgctgaagcctgctccaattttccatcctttactgcacctcccaaaaataacaacctacggagctcgaagaaagaaaagctttgctgtttgtttcgtggtggatgaagaacagaagcagagcgctcctacccagatcgtggaacaaggattcgaggaagttagagatcgtcagatcttaataccggcgcgtctgtcggagaaattagctagaaagagatccgaaaggtttacttacctcgttgccgctgtcatgtctagctttggaattacatccatgtctggtatggcccgttattacaggttttggtggcaaatggagggaggaga

SEQ ID NO: 8468 - DNA, 384 bp, Gossypium hirsutum
  unsure (1)..(384): unsure at all n locations; Clone ID: LIB3120-034-Q1-K1-E1
gcggtggcgggtcaagctgggtccttagccgctgccggtttggttgtgatcctcancgtttgcttgaccatgtatggtgttgcgtcgttcaaagaaggtgagccatcgatagcaccgagcctaaccctgactgggaggaagaaagagccagaccagttgcaaacggcggatggatgggctaagttcactggagggttcttctttggtggaatctctggtgtcacttgggcttacttcctcctgtatgtccttgaccttccttactactttaagtagatcatcatttgatctatgttttacctgggtccctttttaatgtannatcttgtattcaggatgatccttttggaacgaatatcaattatatcaagtgaatgtcactct

SEQ ID NO: 8469 - DNA, 402 bp, Gossypium hirsutum
  Clone ID: LIB3120-034-Q1-K1-E10
cccacgcgtccgcccacgcgtccgttattttggttttaaatacaggctgaagggccattgctcttttttcctgcaaaagctgaagtgatgcctcaaccacttggtgttgttctcattttctcatcttggaatttccctttcacactggcattggacccattgatcggagcaatatctgccggcaacacggttcttttaaaaccatctgatctggcaccggcatgcatgtcgtttctcgtcgagaccatccctaaatacttggacaataaagccgttaaggtccttgccggtggagcagatataggtgaacgactgctccagctaaaatgggacaaaatattcttcactgggagtccacgagtgggtcgcttggttatggctgccgctgcaaagcatttgacg

SEQ ID NO: 8470 - DNA, 425 bp, Gossypium hirsutum
  Clone ID: LIB3120-034-Q1-K1-E11
gagaaagcactgaaaacgcaaaaccatggcctctgcttctctcctcaagacgtcaccagttttagacaagtctgagtgggttaagggtcacacccttcgccaaccttccacttctgcggtgaggtgccaccctgttgcaccctctggactaactgtgcgtgcaagctcatatgccgatgagcttgtcaagactgctaaagctattgcttctcctggccgtggaattttggccatggatgagtccaacgctacctgtgggaaacgtttggcctcaatcgggctagaaaacacagaggctaaccgccaagcctacaggacgttgcttgtttcagctcctggccttggtcagtacatctctggtgccatcctctttgaggaaaccctctatcaaaccacaattgatggcaagaagatggttgatgttc

SEQ ID NO: 8471 - DNA, 424 bp, Gossypium hirsutum
  Clone ID: LIB3120-034-Q1-K1-E12
cccacgcgtccgtttcattattcctaaatattccaaacttctctcgaagagagtacccaagcggataggcaaaccagtttctcgattccagcaactaaattttcccagaaagtgagcaacaattacaacaggcaagtagttagcagcctaaacgatctttgagggggaactggaaaaggtttttaagtacccagaaagggaggagggaagcaattatgccatcaggttctaagaagagaaaagctgctaagaaaaataaggaacaagcagccaaaaatgaaaattcatcaactaataacaatccacatggaaatgatgacagtaaaagccaagatgaaggggacacttatggtggtgatgttggctaccctgcatcccaggatgaccataatcaccaccatcggttcaatcaccgtgaagaaga

SEQ ID NO: 8472 - DNA, 328 bp, Gossypium hirsutum
  unsure (1)..(328): unsure at all n locations; Clone ID: LIB3120-034-Q1-K1-E2
cccacgcgtccgcccacgcgtncgnggacgcgtgggcggacgcgtgggcttccccccggtcaggggccatttgtattgggaaaaaaaatgcatccacttaacacatggggcaactcctcccttgaatccgtcgacccagaaatgcatgacctcatcgagaaagagaagcgtcgtcaatgccgcggcatcgagctcatcgcttccgagaacttcacttccttcgccgttatcgaagccctcggcagtgccctcaccaacaagtactccgagggcatgcccggtaaccgttactacggtggcaacgaattcatcgacgagatcgagaatc

SEQ ID NO: 8473 - DNA, 299 bp, Gossypium hirsutum
  Clone ID: LIB3120-034-Q1-K1-E3
gtaaaagcgaaaccctagccactctctgttcaactcgccaatgggggcttataagtacgtgtcggagctatggaggaagaagcagtcggatgtgatgaggtttttacagagggtgaggtgctgggaataccgccagcatccgtcaattgttagggtcaaccatcctactcgccctgacaaggcacgccgcttgggttataaggccaaacaaggttatgtggtttaccgtgtccgtgttaggaggggtggtcgcaagaggcctgttcctaagggtatcgtgtatggtaagcccacaaacc

SEQ ID NO: 8474 - DNA, 378 bp, Gossypium hirsutum
  unsure (1)..(378): unsure at all n locations; Clone ID: LIB3120-034-Q1-K1-E4
cccacgcgtccgagaactttccactatgtcgacgaaatccttccgttcagttttggtggggctgatctgcctattgacgatattgctgcagttttccttctggtatactttggagtttcaacgttgcttgatgctgcttcaagtgataatcaaaaagcagaagatgaacaaaaggaggcagaattagcagtttcagaattttcaggaaatggagctggaatcttagctgctgccaacactgttattagcactttcttcttggttttcgttgctgagtggggtgataaatcattcttttccacaattgcactagcggcagcatcttctcctctcggagtcattgcangtgcactggctggtcatgggtgtgctactctg

SEQ ID NO: 8475 - DNA, 389 bp, Gossypium hirsutum
  Clone ID: LIB3120-034-Q1-K1-E5
cccacgcgtccgagcagctttacaggttgcattggctcaaatggaataccaattgccgcgtcttactaaaatgtggactgaccttgagcgtcaagctggaggcaaggtgaagggtatgggtgagaaacaaattgaagtggacaaacgtatcttacgtactcaaattggagttcttaaaaaagagcttgaatctgtcagaaaacatcgaaagcaatatagaaaccgccggttttctgttcccgttcctgtagtatctttggttgggtacacaaatgcgggcaagagtacacttttaaatcaattgactggagctaatgttctttcagaggaccgactgtttgctacccttgatccaacaacaagaaaggttcagatgaaaaatgggaagt

SEQ ID NO: 8476 - DNA, 441 bp, Gossypium hirsutum
  Clone ID: LIB3120-034-Q1-K1-E6
cccacgcgtccggttgctcatgtctagccatgcagtgagcttgaagagagatcacccgttactccatttccaagctcaaggactcaagcctaaacctgcctctcatctcttcttcaatccattgtctaatggtgtccatacttcacccaaagctttcaccactttagctgtctttaaatcaaagaccaaagcagctcccaagagggttgagccaaagccaaaggttgaagatgggatctttggcacctctggagggattggttttaccaagcaaaatgagctctttgtgggacgtgttgccatgcttggttttgctgcatcattgctaggcgaagcaataacagggaaaagaatcctagcacagctgaatttggagactggaatcccatttatgaagctgaacccccctctctcttcttcattctcttcacactccttgga

SEQ ID NO: 8477 - DNA, 426 bp, Gossypium hirsutum
  Clone ID: LIB3120-034-Q1-K1-E7
tggtgttgcaggtcttcgttacgcacttgaagttgcgaaacatggatctggggcgattatcaccaaggccgagcctcatgagagtaatacgaactatgcacaaggtggtgttagtgcagtcctgtgtccatctgattctgtagagagtcacatgcaggatacaattgtagcaggagcttatctttgcgatgaggagtctgtcaaagttgtctgtactgaaggacctgatagaatccgagaattgattgcaatgggggcttcgtttgaccatggtgatgatggaaatttgcatctggcaagggaagggggtcattctcatcaccgaattgttcatgctgctgatatgactggacgagagattgaacgggctttactcgaagcagttgtcaatgatcctaatatttctgtgttaaacaccatttcgca

SEQ ID NO: 8478 - DNA, 441 bp, Gossypium hirsutum
  unsure (1)..(441): unsure at all n locations; Clone ID: LIB3120-034-Q1-K1-E8
gaaaaatcataaaagaaaaaaatgcacccattgtcttcaattcgacagcttcgccattcttctacttcagtattgcttcaacgctttagcatcttcaattgggtgtttcgagcttcttccaaccgccctgcttttctcggaggttcaaagagtttcagtgctggtgcacattcttctgagaatgttggaactccggagaagaattttgatcaacagacaatgaaggataatgtctctgctacacgtgcttcaactttccagaaatttttttggtcctttaggtgcacaatctactggtcaaacagatttcaggtcaggcgggaattacaggtctatggatgttttgagggaagcaatagatgcagatagaatggcaaactttaggggttctcaatttcggcaagaccatatcgagcaaaacanacattttgcacacataaa

SEQ ID NO: 8479 - DNA, 394 bp, Gossypium hirsutum
  Clone ID: LIB3120-034-Q1-K1-E9
ggaattttggccatggatgagtccaacgctacctgtgggaaacgtttggcctcaatcgggctagaaaacacggaggctaaccgccaagcctacaggacgttgcttgtttcagctcctggccttggtcagtacatctcaggtgccatcctctttgaggaaaccctctatcaaaccacaattgatggcaagaagatggttgatgttcttgttgagcagaacatagtccctggtatcaaggttgacaagggtcttgttccactggctggttcaaacaacgagtcatggtgccaaggtcttgatggcctcgctccacgttcagctgcatactaccaacaaggagctcgttttgcaaaatggcgtactgtggtaagcattcccaatggaccaaccgaac

SEQ ID NO: 8480 - DNA, 243 bp, Gossypium hirsutum
  Clone ID: LIB3120-034-Q1-K1-F1
ggaatgcagcaagatgtgtttgcacgctttgaattcttcatctgaaccccataagggggtctgggtttctgaatcggggatggggattctccttgatcttggatactctacaacagagaagcacttcatgtcccatctcgaaatgcatgaccttgttgaagacggttgatttccgttgtatataagataatagtacatctcagcgtgataaggttgttcaaagaatggaaactaatgggaaaa

SEQ ID NO: 8481 - DNA, 418 bp, Gossypium hirsutum
  Clone ID: LIB3120-034-Q1-K1-F10
cccacgcgtccggtagacaccatctccccaagcatccgagccacaccagtgttctccccaggctcacgagaaccattagcccttaaaaacaaggctcctagatggcatgaacagttacagtgctggtgccttaacttcaaggggcgtgtgacggtggcctctgttaagaatttccagctggtcgcagctgttgagccatcacataatgtatcacctgaagagcaagagaaggttgggaatctgcatcattgatgttgccatagattatcaagtacccctctttcaatgccatcgcaatctacaaagtagctttacgcgagctggcatatggatgccagtatctcggtaggagataaatatctttctcctctagattgcttcctgaatttagtactgtatttatggttgtaatggaagc

SEQ ID NO: 8482 - DNA, 439 bp, Gossypium hirsutum
  Clone ID: LIB3120-034-Q1-K1-F11
atgaggctcatcagttctggcgacaccagctccctgatgacattaccccagactttaaggttattaatgaggatgattctcaaagtatggagcctgggagcctctccttagcaggtttgtccttgcatgatggtagcgaagcttcaagggttcctgcttctgctgctggtggatatgtatttggggatcagcaggaactactgcatcagtatggtaatggtaataactcggatgaaaaatttagatatccttcttcatcctatggagaggagcctatatcagctagttttttgaacttaccactcaaaccttgggatgagcaactcgttaacagtgatcggttgattggcaatgggagggaaggacaactgtatgatggaaattctaggcatgcatttgccagtgatattttggtgagcacacatatatccatgatact

SEQ ID NO: 8483 - DNA, 374 bp, Gossypium hirsutum
  Clone ID: LIB3120-034-Q1-K1-F12
cgccattctacctgctttttccaggaaaccaaacgccattcttcctcacctgactgtcaactcttacaaggtgaattgaagcatggctacaaaatttaaaaagtgcatgatgttatgttgttcggcaaaggtctcgaaggaagaagatatgggaagcgagtcatacgaggaagccattgcagctttgtcgaagcttcttagtgacaaagctgatctcgggagtgtcgccgccgcaaaaatcaagcagataacagacgagttagaggcagctgccgagtccactcagttcgacccggtcaagcggctcgagaccggtttccttcacttcaagaaagaaaaatttgacaaaaatcctgatctgtacggtgcacttg

SEQ ID NO: 8484 - DNA, 396 bp, Gossypium hirsutum
  unsure (1)..(396): unsure at all n locations; Clone ID: LIB3120-034-Q1-K1-F2
agtataaagatgatgaaggtgacaaggttctactcaccaatgatactgatcttgttgctgcggttaacagtgctagatccataggaaagaaggtgttaagattgcatctggatttttccgagtcagctgagcaattacaatcagaaccaattgcaagtgccaagagaagcagcgcaggggtacctttgcacttgggtttattggcaggtactgttgtcctgaccagcatcggcgtacttgtctacttaaagcgttcagaattgtgaggttatgctaatttatctaccaaaaacaacantatatgaatcgtagcattgattaattagggcaggcaatgaaagttaatctggggtagaaagtacgaacttaagttctttatacagtccacagaaatca

SEQ ID NO: 8485 - DNA, 388 bp, Gossypium hirsutum
  Clone ID: LIB3120-034-Q1-K1-F3
cggacgcgtgggcgccaagtttgagaaatttcaaggtgacccttcagaagctaatggggaagatattatagtatcttctgtacaaacccaggaacaaaccattgaagaagaagaagaagatgacagttgtttgccatctgacttggagggtgcagtgaggcaatcaggtgaagcaagtgccttgtttgtgtcttcaggaggaatgagagctattgttgagctcctaattcctcagttacagtttcttgatgatgaaggtgctcaagctgagctttgggaattatccagaattttctttgatacacttatgcaagaaactggatgtcagaaattaaagctatattttctgatgctggagctgctgcatactgaaatatcgatggaagat

SEQ ID NO: 8486 - DNA, 401 bp, Gossypium hirsutum
  unsure (1)..(401): unsure at all n locations; Clone ID: LIB3120-034-Q1-K1-F4
ttttcttcactgaaagcagcagctaaacaagggccgctctctttgcctcgcttatccgtaccctgtcagtgcctgcgtcagctcaaagcagagatgggagaaggaaagggctcaacccttgtgcaccttctggtggtagtccttagcttggtcgcatttgggtttgccattgcagccgagagaagaagaagcgttggcactgttgttaaagatgacataacaaattctacatattgtgtctacaactcggatgttgccactggctatggagtaggtgctttcttggttcttctttctggtgaatcgcttgtgatgggagttacgaagtgcatgtgttttgggaggccattagcaccgggtagtgatcgagcttggtctatcatatantttgtctcatcatg

SEQ ID NO: 8487 - DNA, 379 bp, Gossypium hirsutum
  Clone ID: LIB3120-034-Q1-K1-F5
gtaatcgccgatatgctcatattggtgacgttattgttgctgtgatcaaggaagcagtgccaaatacacctctagaaagatcagaagtgatcagagctgtaattgtacgtactcgtaaagaactcaaacgcgacaacgggatgataatacgatatgatgacaatgctgccgttgtcattgatcaagaaggaaatccaaaaggaactcgaatttttggtgcgatcgcccgggaattgagacagttaaatttcactaaaatagtttcattagctcccgaggtattataagacgagacccaagtatagttagagtatttagagtatttaaatggcatagattaattagtagattgtgtctcacgtatatacctttactaagt

SEQ ID NO: 8488 - DNA, 362 bp, Gossypium hirsutum
  Clone ID: LIB3120-034-Q1-K1-F6
cccacgcgtccggttctcaagcactttgattggcctgaaggaaaggctgatgcattaagagaggcagcttttgaataccaggacctaatgaagttggagaagctggtctcttcctttgttgatgatccaaaccttccatgtgaagctgctctgaagaagatgtacaagttgcttgagaaagtggaacaaagtgtatatgccctcttgcgtacaagagatatggctatttcacgatacagggagtttggaattccagtgaattggttattagattctgggattgttggcaagatcaagctttcatctgtacaattggcaaggaaatatatgaaacgtgtagcatcagaacttgatgcactgag

SEQ ID NO: 8489 - DNA, 407 bp, Gossypium hirsutum
  Clone ID: LIB3120-034-Q1-K1-F7
atggaggtttacagcagaaggctgatgtttctagtgtttgcatttgcattagtaagtatagggtatgcacaagagtcggactcgaccactctggttccagcaatactgacttttggtgactcagtggtagatgtgggcaataatgattatctccccaccatcttcagggctaattaccctccttatgggagggacttcaccaaccaaaagcctaccgggaggttttgtaatggaaagttggccactgacatcactgctgaaactctggggtttactacttatccaccagcatatttaagccctgaagcatcagggaacaaccttcttattggagccaattttgcttctgctggatctggctatgacgacagagctgcctctttgaatcatgctatcacgttgagtca

SEQ ID NO: 8490 - DNA, 428 bp, Gossypium hirsutum
  Clone ID: LIB3120-034-Q1-K1-F8
cccacgcgtccgcccacgcgtccgagtaaacagagttctttttttcacagcgatggcagccatgaactccagggttttggcatgcaactatgctatctcaggcactggatcatctgagcttaatgccaagcttgcttcagcaccatcagttgcttccccagttatgtgcggtggtcacaagttgcctgtgatcagagcccagcaggctaaattttctgattccaaaggatcaggtgccagtgaaggaagaagagctgctatgctctacttggcagctggccttttcaccacagcttgtgcttcttctgcaaatgctggggtcattgacgagtaccttgaaaagagcaaagctaacaaggaattgaatgacaagaagaggttggcaacaagtggaaaacttttccagagcatacactgttcaatttggc

SEQ ID NO: 8491 - DNA, 419 bp, Gossypium hirsutum
  Clone ID: LIB3120-034-Q1-K1-F9
cccacgcgtccgctcctctatttcttaacaaacctcaacttcaaagatcggcgaaacatgctaggaactgagcgtgatttgaacttcaatgagaccgagctgtgtctcggccttcctggtggaagtggtggaggaggaggagctgcagccgccggtggtggtggtaaaaatgaagtggaaagttccccaaagaccaccgggaaaagaggctactccgagactgttgatttgaagcttaatcttcagtctaaagaaggttgcatggatctgaaccagaacctagaaaatggttcaaaagaaaagaatcatctccctgcaaaaccaccagccaaggcacaagtattgggttggccaccagttcgatcttataggaagaacattatggctaaccagaagaacaacagtgacgaaatcagtga

SEQ ID NO: 8492 - DNA, 287 bp, Gossypium hirsutum
  Clone ID: LIB3120-034-Q1-K1-G1
cccacgcgtccgaagaaatccaagtccacccacagtctcctaattacgaaagaggaaggattggaattatacgaagatatgatactaggaagagcatttgaagatatgtgtgctcagatgtattacagaggcaaaatgtttggttttgttcatctttacaacggccaagaagctgtttcaactttttattaagctcttaaagcagcaagattctgtcgtaagcacataccgtgatcacgtgcacgccttgagcaaaggagtccccgcacgcgccgtcatgagtgagc

SEQ ID NO: 8493 - DNA, 440 bp, Gossypium hirsutum
  unsure (1)..(440): unsure at all n locations; Clone ID: LIB3120-034-Q1-K1-G10
ggaattggcagcttggtccttgacacaattggtcacactatcagtcaaaagtaccacagcagggttattcaagtagtacctctcttctgttttcatgtatttgacttcagttcatgatgaccatgtctaaatcacttcatagatatgtgttaactattattagtctttcatactgcggaaagactgaaactgatatccacagaaaccaattacttattgtataccgacttcggtgcagcatgaagctggtcatttcttgatcgcgtacctggtgggcatccttcctagaggatatacattaactagtttggaagctntaaagaaagaaggatcactcaatattcaagcaggaacagcctttgtggattttgagtttctcgaagaagtcaatgcagggaaagtatcagctacgacactgaacagattcttatgcatagccc

SEQ ID NO: 8494 - DNA, 402 bp, Gossypium hirsutum
  unsure (1)..(402): unsure at all n locations; Clone ID: LIB3120-034-Q1-K1-G11
ccgaccaggaccgatggaagggtcttgcttatgatatctccgatgaccaacgggacattaccagagggaaaggtatggtcgactcattgttccaagctcccatgaacgatggtactcactatgctgtcatgagctcctatgagtacattagccaaggccttcgcacatacgacttggacaacaacatggatggattctacattgccccagctttcatggacaagcttgttgttcacatcaccaagaactacatgacccttcctaacattaaggttcctcttatcttgggtatttggggaggcaaaggtcaaggaaaatctttccaatgtgagctcgtctttgccaagatgggaatcaaccccattatgatgagtgccngagaattgaaaagtggaacgccgg

SEQ ID NO: 8495 - DNA, 320 bp, Gossypium hirsutum
  Clone ID: LIB3120-034-Q1-K1-G12
cccacgcgtacgtcaccaccaccaccatagtccaacattttcataacaatgggtgccatcacaaacgccgctggtacatgctccttcatggggacactcttccccgacgtctacacaagttcagggagattcgtcgccaggtttggctttggcggcaaaaaagcagctcccaagaaagtctcgaaacgaaccccagaccgccctctatggtacccaagagcagtggcgcctgattggctcgatggaagttcggtgggtgattacgggttcgacccgttcgggttagggaaactcgcggagtacttgcaatatgatttgga

SEQ ID NO: 8496 - DNA, 382 bp, Gossypium hirsutum
  unsure (1)..(382): unsure at all n locations; Clone ID: LIB3120-034-Q1-K1-G2
atttattttattcccttcacattcacactcattccatctatttcctcccagtgtttcacaacgtaattctatactttctgttttctttctgctaacccatcatatttacaatataatttacggaaaaggaatgtttggaaatgaagctaggagagcagtagcatggatgaatgggtgcgaaggagaccccaaactccctgtaggcagcatagagacacgcacattaactgtcgttccatctccatcaaggcgatggagaggttgaatgtagccattagagagttgaaatgcagccctcctcctcttacctctggcattcttcgacttcaggtaccgatcgaggagcanatcgaagcaatcgagtggcttcatgctcaacatg

SEQ ID NO: 8497 - DNA, 294 bp, Gossypium hirsutum
  Clone ID: LIB3120-034-Q1-K1-G3
cagagttggtgtcatcttttcaatactactagatttcttctctcataatctcaaaaccggaggaggcgttcgatcccacacctgttctgaaaaaaaatcatcttcaaaaacgaaaaatattataaaattctcgttctgaaattccaaaaaaagaaagaaaaagggatcaatggcgtggtgcgatagcctgagcgacaagaacgcggttttcagaaagctgaaagcaaaatcagaaaacaagatgtgttttgattgtaatgcgaaaaatacaacatgggcgtccgtcacgtatgg

SEQ ID NO: 8498 - DNA, 399 bp, Gossypium hirsutum
  Clone ID: LIB3120-034-Q1-K1-G4
ctactccatcttcactccccctcctcacccaaaccctacaaaatggccgccgccgcgcgccctcttgtcttcgtccaaaccatagagtccgacatggctactgatgccactccaaccgttcctctcgctgatgtgatgaaagcctcgattcgacccgacatcgtcaccttcgttcacgacaatatatccaaaaacagccgtcaaccctatgccgtctccaaacgcgctggtcaccaaacttcagctgaatcctggggtaccggtcgtgccgtctcacgtatccctcgtgttcctggtgggggtactcaccgtgcaggccaaggtgctttcggaaacatgtgtcgcggtggacgcatgtttgtcctaccagatctgcgccgctgcaccggaaatcaacgt

SEQ ID NO: 8499 - DNA, 316 bp, Gossypium hirsutum
  unsure (1)..(316): unsure at all n locations; Clone ID: LIB3120-034-Q1-K1-G5
gttctagatcgcgagcgcccccttttttttttttttttttttttttttttttngaaagcggttgggagggaacagtgagaaatggcgggaggaaatatccgtaaacaggagggttctttagtgatcaataatacgaacgttttcgcggctcttgaaactctcaggaggaagaagaaatctgataaggaccgaggttctttgaagaaatcttctttcaagtctcagcagcagccggaaaaagaagccgagccgcaggtcttttggtctccggcgccgcttacgggcaaatcgtgggccgatgttgatgatgaccatg

SEQ ID NO: 8500 - DNA, 342 bp, Gossypium hirsutum
  Clone ID: LIB3120-034-Q1-K1-G6
caacttttctctttcaatcaatttttacaacaaagatggtcacgctcaatacggtccgaccgtcgatttcttgttgttctttttcttccggtttcgatgccggaccgccggtaccggttcccaaagttggtttctttaagttaccaaggtcaaacggcggtaaccatgccaagttgagcttagttcaggcgacggaggaatccaccgttgcgacgacgaatggtcgtgttgctgcagtttccggtgaaaatgcccatcagatggccactaatggaaaggcagggaacatagtatggcacaaaagttcagttgataaagttcatcggcaagagttacttcagc

SEQ ID NO: 8501 - DNA, 351 bp, Gossypium hirsutum
  unsure (1)..(351): unsure at all n locations; Clone ID: LIB3120-034-Q1-K1-G7
ctggacttcttttcgcaccatcccgaaagcttgcacatgttcaccttcctggttgatgacatcggtgttccacaggattataggcacatggatggctctggtgttcatacctacacactaatcaacaaggctgggaagtcacactatgtgaaattccattggaaacccacttgtggtgtaaaatctttgttggaggatgaagccataagagtaggtggtgcgaatcacagtcatgccacacaagatctttatgactcgattgcagccggaaactaccctgaatggaaactgttcattcaaataatggatcctcttcatgaggataggtttgattntgacccacttgatgta

SEQ ID NO: 8502 - DNA, 438 bp, Gossypium hirsutum
  unsure (1)..(438): unsure at all n locations; Clone ID: LIB3120-034-Q1-K1-G8
gcaaagctgggggatgaagagtaagtgaagggcatggccgtggctgtactagctactgaagctttgctctgcgaaacccattgccgggctcttccaagaccaacacccttcagttccaaccctcctccacagcccagccgctacccctgcaaacatcacggcgaaacatggcccacaacctccttttctatcctccattccacgcccattgtttgccgcgcgtcccgccgcaagtccaccgccttgagctccagctcggaagaaagcgatcaggatggtcctcttcggcgagtccttcacctgagtctgtgggccgctgaggctgcttatatcttggggctctttttgctttcctatgctcctggagaccctgtatgggccatcagttccaacacaataaacgaactcatcggnctttctctcaacttcttcttcatt

SEQ ID NO: 8503 - DNA, 446 bp, Gossypium hirsutum
  unsure (1)..(446): unsure at all n locations; Clone ID: LIB3120-034-Q1-K1-G9
aagctctcgataccatcgaaatggaacccaagcaaagaggtggagttcccaggtcaagtgctgaggtacgaggacaacttcgacaccaccagcaatttgagcgtcatgatcactcccacggacaagaagtccatcaccgactacggttcccctgaggagttcctctcttcggtggattatcttcttggaaaacaagcttactttggtaaaactgatgctgagggtggttttgactccggtgcggtggcgaccgcaaacatattggagagttcaagttcaacagtcggcgggaagccgtactacttcttgtcagtgttgacaagaaccgccgacggagacgaaggcgggaagcaccagctaataacagccaccgtcaacaactgcaagctttacatttgcaaggcacaagctggggacagangtggttcaagggagctagaaagttt

SEQ ID NO: 8504 - DNA, 398 bp, Gossypium hirsutum
  unsure (1)..(398): unsure at all n locations; Clone ID: LIB3120-034-Q1-K1-H1
cccacgcgtncgaaagattctctcaaaacagtgagggagtagtagttcgagttatcgaggacgttttttttcaacacgaaaaaaaatggattacttttatggaccagggaggaaccatctcttcgttccgggtccggttaacataccggaacccgttattcgagccatgaaccggaataacgaggattaccgttccccggctattccggcaatgacaaaaacccttctcgaagatgttaagaagatattcaagactacgaccgggactccttttatgatcccaacaacaagaaccggcgcatgggagagtgcacttactaatacgttatcccccgtgaccgaatcgtatcgnntctcattggacaantcagtcttctttggatcgatcaacaacaacg

SEQ ID NO: 8505 - DNA, 404 bp, Gossypium hirsutum
  unsure (1)..(404): unsure at all n locations; Clone ID: LIB3120-034-Q1-K1-H10
aaaactcaaaagagtctgtcatttcccttacttcctcaaaccagaagccatggccagcatgataatggcttcctcaaagcctgtaatctccattgctgcttcatcatccttcttttccaaacccaaactcaaacaaatcccacaactttccctcccaaaactccccactccaaagttcttgaaaacccaacaaatcccctcactctcgtccaccactctcaaatctatctccctcttcacagtcaccactttatcctttgccccaccttctgttgctgcagaaatagaaaaggccgctcttttcgatttcaacttaaccctccccatcatgatggtccagntcttgttcctcatgtttgctcttgacaaggtctactttaccccactcgggaaattcatggatg

SEQ ID NO: 8506 - DNA, 393 bp, Gossypium hirsutum
  Clone ID: LIB3120-034-Q1-K1-H11
acgaaagcctatcaaagaagatttctaccagaattgggctcatggaaaatccttcgttaaaggggatgttcttgggttcaaatccggtcttgaaaaatctgaaaaagttgcagaggtaacggaaaaggcttacgatctgtgcgaaattgccaatactatatcatccgccatccccataccgataaatattactcttaacaggaccggagcttattacttcatttctactatcgccgataactgttggaacgggcaaaagctcaacatcacagtcggagatgagagcaaccctactgctgctgttcccgcagctggaccgagtctcaccacctcgcctggaacttcaattcctcctcttgtgaccaactcagcttcttccctttgttctactct

SEQ ID NO: 8507 - DNA, 349 bp, Gossypium hirsutum
  Clone ID: LIB3120-034-Q1-K1-H12
acgcagaggacaagcaatggagccagcgcgggaagcagcagagcaagaagctggaatcgctggatgaagcgtatacgcccccgatagcgcgaccggctctcgccatcaaagccaccatcgagaaaaccaagagacggttcgacaactacggcaagtacggcttgctctgcggctccgatgggttgcctcatttgatagtgagcggcgatcagaggcactggggtgagttcatcacgcccggcctgttgttcttgtacatcgctggatggatcgggtgggtcggaaggagctaccttattgctataagcgatgacaagaagccagccatgaagggagatcatcatcggat

SEQ ID NO: 8508 - DNA, 222 bp, Gossypium hirsutum
  Clone ID: LIB3120-034-Q1-K1-H2
gggtttgtttttttttttttgggagacaagaacaaagtggagattttataacacaaaaatagaggatgcaaatccacttaaaacacaaaaggaaaacaacattcaattaagacacaaaggggggatttcctttgtttgtgcccaatatagatttttttcttcccttagagcttaatttcccatttagaaagctcctctcttgatagcatcgtcattagcatt

SEQ ID NO: 8509 - DNA, 268 bp, Gossypium hirsutum
  Clone ID: LIB3120-034-Q1-K1-H3
atctcttttacaagttcattattttttctgcatcttttatatagcgtattacgtgaatgtttatgggttctctttcctttaagaactgcatcactatcttcttttaaaaacttttcctttcttctaggtctttatttcttttttgatttccttctttttttcccacttattatgtcccttgaaaaggtttgaaattcaagcaagtttgtatctttatactttcattataatttcttttccgcattgattttaataaaattaacttttt

SEQ ID NO: 8510 - DNA, 403 bp, Gossypium hirsutum
  Clone ID: LIB3120-034-Q1-K1-H4
gtctcataacatttgaagccaagcaaagttcagattaggatttagggttttttgtttggttttctttttgtgaaaggcaaaatggatctggatatgaacgtgaacgcccctcactcaatgggcacaacaatcatcggagtcacctacaatggtggtgtcgtcctcggcgccgactctcgtaccagcaccgggatgtatgttgctaatcgggcatctgacaaaattacacagctcactgataacgtctacgtttgccgttctggatccgctgctgattctcagattgtttctgactacgtccgttatttccttcatcaacatacgatacaacttgggcagcctgcaactgtcaaagtttctgctaaccttatcaggctactatcctacaataacaagaacatgc

SEQ ID NO: 8511 - DNA, 420 bp, Gossypium hirsutum
  unsure (1)..(420): unsure at all n locations; Clone ID: LIB3120-034-Q1-K1-H5
aaaggcctatcaacgaagagttctaccagaaatgggctcaggtgcaagatcaggtaagcggggccattctagtgatcttgcattacctctcaatcgaactcataacggatttgcgtctggccttatggtcctgttcgagcaacttcatcatgcttctcgtagtcaagatgctcctcttctctccctccgtattgtaggcccgacctctcttactgttccatcatcggcaactccaaataacaaagttgaagctaaaaagacttgcacctggctttgtggaactatcctncatgtctaaaactaaggccatgaatggtctttccactattattccacaagaagaaactgcaacagtattaaccccaaagcactttgctacaatgtggcctcttgcttcaatcaatggttccaatgctaatt

SEQ ID NO: 8512 - DNA, 338 bp, Gossypium hirsutum
  Clone ID: LIB3120-034-Q1-K1-H6
agaggacaagcaatggagccagcgcgagaagcagcagagcaagaagctggaatcctggatgaagctttacgcccccgatagcgcgaccggctctcgccatcaaagccaccatcgagaaaaccaagagacggttcgacaactacggcaagtacggcttgctctgcggctccgatgggttgcctcatttgatagtgagcggcgatcagaggcactggggtgagttcatcacgcccggcctgttgttcttgtacatcgctggatggatcaggtgggtcggaaggagctaccttattgctataagcgatgacaagaagccaaccatgaaggagatcatcatc

SEQ ID NO: 8513 - DNA, 421 bp, Gossypium hirsutum
  Clone ID: LIB3120-034-Q1-K1-H7
attttaatatataaaatataaattttaaatatttttaaacaataaatattagttatttataaaatttaattagaatatataaactatattttaaatatttaaatataactattaaatatttgtaattagtattttaaaaaatattttttatttttaattaatgattttaatacatttataattaagtaccaagaaaaaaaaaaggaagcattatgttattggaggggtgaaaaagtaattaagcactaaaaatgctttttgtagagaaaaagttaaaaaatttagcttttctttttcaaaagtgcttgaaaaactaaaaatttcagccaaaagcaacttgttgttctgcatagcttttttttccaaaaatgcttttgaaagcatagtttttttttttccaaaaatgtttttgaaaagcaat

SEQ ID NO: 8514 - DNA, 317 bp, Gossypium hirsutum
  Clone ID: LIB3120-034-Q1-K1-H8
cccacgcgtccgtcatttttctttctgttcatggcgttttcgagtccttctgctgttcattcggctacaccagatatggtttccaatgtcgctgatggtttcgacactcagttcttttctattaaaaagattagtgtgcttcttgacgatgataattatcttctatggcgacaaccagtactgcttgtgatcaagacttataaactgagcgctttctggacacccgcactgttcctcctcctcaaatgcttccagaagctgatggggttcctcaagaaaatcttgagttcactcgctttgagcaacaagatagtgcg

SEQ ID NO: 8515 - DNA, 291 bp, Gossypium hirsutum
  Clone ID: LIB3120-034-Q1-K1-H9
catagatctatggaacttttttggaactacatagatctatggaatcggttaatatatcctgaatcgcacaaaagagatgaaaaaactgtgaatattgtgtgattagcttcgtcggtgtcaaaaatatagaatttgagtaggcaagagaagattgaatcaaaataattccttttttttaagtaaagttctatttctgtcagagggcaatatgaatggtatatcaaacgcactaaacgggttatacgatatctctggtgtggaagtaggccaacatttctattggcaaatagc

SEQ ID NO: 8516 - DNA, 414 bp, Gossypium hirsutum
  Clone ID: LIB3120-036-Q1-K1-A1
gacacattctcttttagagcttactcatcacttaatcaaattcatccatggcttcttttgctactttcaatattgtcggtctgagatttggtgagccagtctattggattcattccaatgcagaaaccaggcggcttggtgggtctgtccctgagtcggatcatacccaccagccattgctgttctaataccacaatggccctgttctaactagcaacatatttgttgacttcatttggtatggaaatttcaagccttctcaacgagccatttgttcccattgtatcaattccctcgcctcttctaagcttgtttcaacttaaccatctgttgctacatagaggaaagccatggatacatactataaccctaccaacaaatcttctttccttgtcaatagcttgggatcacaaa

SEQ ID NO: 8517 - DNA, 127 bp, Gossypium hirsutum
  Clone ID: LIB3120-036-Q1-K1-A10
aaatcaactgcttcacaatggcctctacaaccatggctctttcttccccatcattccccggtaaggcattaaagttctccccttccacccctaaaacccagggacctggccgggtttccatgaggaa

SEQ ID NO: 8518 - DNA, 462 bp, Gossypium hirsutum
  Clone ID: LIB3120-036-Q1-K1-A11
aaaataaagaacacacaacaatggccgccaacacactaatgagctgtggcatagccaccacatttccttcacttctttcctcatcaaagtccaagttcagtggcgccgccgtatcgttgcctagtgctgttggtaccaatgttggccaccgtgttagcatgtcagctgattggatgcctggtcaacctagaccaccttaccttgatggctcagcaccaggtgactttgggtttgacccactaagacttggtgaggtccctgagaaccttgagaggtacaaagaatctgagttgattcactgcagatgggctatgcttgctgttccaggtatattggtaccagaggccttagggttgggaaactgggtaaaagctcaagaatgggcagcaattccaggtggccaagccacttacttagggaacccagtcccatggggtaccctccccaccatcttggtcattg

SEQ ID NO: 8519 - DNA, 403 bp, Gossypium hirsutum
  Clone ID: LIB3120-036-Q1-K1-A12
cccacgcgtccggtttgcacaggtattttcaggaccgacaatgttcccgttgatgaccttggtaagcttgttgacaccttcccgggccaatccattgactttttcggtgctctgagggccagagtttacgatgacgaagtgaggaaatggatcggagaggtcggagtcaatggtgtcgggaaaaagctcgtgaactcgagggaagggccaccatctttcgagcaaccgaagatgaccattgagaagctgttggaatatggatacatgcttgttgctgagcaagagaatgtgaagagggttcaattggctgacaaatatttgagtgaagctgcccttggaaatgctaatgacgatgctatcaagagaggagctttctaaatgggaaattaagctctaagggaag

SEQ ID NO: 8520 - DNA, 438 bp, Gossypium hirsutum
  Clone ID: LIB3120-036-Q1-K1-A2
cccacgcgtccgtagaatgcgcatcattgactttggaagttcaatagatgggtttacagtgaagcatttatacggatcagctggaccttctagatctgagcaaactcatgattatagtccacctgaagctcttcttaatgctagttggtatcaagggcccacgagcacttctttgaaatatgatatgtggagcgtaggtgttgtgatcttagagatgatcttggggacaccaaatgtatttcagataagtgctctgacacgcactcttctagatcatcatatcgagggttggaacgaagacttgaaggagcttgcttataagcttagatccttcatggaattgtgcattctaatcactgggagttcctccaaacatcatcatgcgatgaaccaagctggcatgtcacctgcttcttggaaatgctcttgagaattttt

SEQ ID NO: 8521 - DNA, 442 bp, Gossypium hirsutum
  Clone ID: LIB3120-036-Q1-K1-A3
gctatagcatacactactagtacccactactagcaatggcttcctcaatgatctcatcggctaccattgccactgcctgtccggcacaggctaacatggtcgctcctttcaccggcctcaagtctgcctctgctttcccagtcatcaggaaggccaacaacgacattacttctctcgcaagcaatggcggcagagtgcaatgcatgcaggtgtggcctcctactggaaagaagaagttcgagactctctcatacctccccgatcttacacccgtgcagttggctaaggaagtagattaccttcttcgctcaaaatgggttccttgcttggaattcgaattagaggagggattcgtgcaccgtaaatactcgagcctacccacgtactacgatggacgctactggaccatgtggaagctgcctatgtgtcggtgcaccgactc

SEQ ID NO: 8522 - DNA, 430 bp, Gossypium hirsutum
  unsure (1)..(430): unsure at all n locations; Clone ID: LIB3120-036-Q1-K1-A5
caaaaccatggctgccactcactctcttagaacccttccccaccaccatcagttcctctgccttcaaacgcctctccacccctcctcctcctcctcctccaccctcctccttcttcctcaaacccccctcctccttcacctccacctccaccacaaacactctttcctctctctcctctaccaccaccttgtctcttccttcttccaccacatccaccactacttgccaagctatctcctttgacaccctccaacaccacctttccaatcaaaacttccgccaggccgacgaagaaacccgccgtctgctcatccttctagccggcgaagcagctcanaagcgaggctacgtcttcttctccgaagtccaatttatctcccaaaatgacctcaaagccattgacgaactttggaaaaaacacagcgacaa

SEQ ID NO: 8523 - DNA, 446 bp, Gossypium hirsutum
  Clone ID: LIB3120-036-Q1-K1-A6
gtgagactcttttgtatacctgtagcatatagtaatagtaagcagtaatagcaatggcgctcctccatgatctcatcggcgaccattgccaccgtgaaccgctcctccccggcacaggccaacatggtggcccccttcaccggcctcaaatctgcctctgctttcccagtcaccaggaaggccaacaacgacatcacttctcttgcaagcaacggtgggagagtgcaatgcatgcaggtgtggccgcctcttgggaagaagaaattcgagactctctcatacctgcccgaacttactcccgtacagttggctaaggaaggagattaccttcttcgctctaaatggattccttgcttggaattcgaattagaggaaggattcgtgcaccgtaagtactcgagcttacccacgtactacgatggacgctactggaccatgtggaaact

SEQ ID NO: 8524 - DNA, 448 bp, Gossypium hirsutum
  Clone ID: LIB3120-036-Q1-K1-A7
attccctccaacacctctctttctctctcgccaacgcaattgactgcttgatggcctgaatacttgaaccacaaagctatctcaccttgttatcaagctctctgagtgcgcgtctatcaatggcgaaaaccaatattgggtcattcttcaataagttcctttctcttttcatccttcttctccaccttggttgcttcgttttcaccgccgctaaagacaaccataaagcaaccaagaaacgcaaatcctcacctctttctcctaactctcacaaacaccgcaaagctctttcctccacatggacttttctcaaacgcattttttcttctaaagccaactgcataaacaccatccaggccgcacaccctccaacatcagcaaccacacccgcgttaacctttgcaagaaactcccaacattcccttgtctccatgtccatgatcaatcc

SEQ ID NO: 8525 - DNA, 340 bp, Gossypium hirsutum
  unsure (1)..(340): unsure at all n locations; Clone ID: LIB3120-036-Q1-K1-A8
aaaaaaaaaaacctgagcagccttttttttttctctcagcctccccacctccggcctgggcactggcgagcctgcgctgggatgagcacgtatatgagtcncttggttccaaaatctaatttcagcatgttgttatttagtggacaagccattaaagctgaagttttacgcttaagagaacaaacggtgttggttgatgcatggattgggagccctaggatttgtacccaagacgagaccacattaaccagatcggaaatcaatcgatttgaggataaggtgggattcttcgataaaggagtgggcggcggtgaatcactggtgagaaagcggcttttgg

SEQ ID NO: 8526 - DNA, 442 bp, Gossypium hirsutum
  Clone ID: LIB3120-036-Q1-K1-A9
catttccctgcagtaaattcagaatctgctccaagtctctcacacgcatctgcaaactggttatagagctcatctgctcaggtaaagttggcagtgaataactctgtacctctagcacgaatttttctggaggttcaagtatctgaatactaaaagcaggagataatgggcgtcccacaacttgaacatgtgacacactgcattgatgccccacatactgcattattagaggggcatggcaaaatggtcatagaaaaactaaagatacctagatatgtatattatgattgaaatttatggcaaatctatactcataactctactgcaatgtactagtagagaaggggtgcatttgaccgtaccagatatagaacaagccatctatttcctgtctctggaccctactcaacagctcaatctgtaatattccaccaatggcaaa

SEQ ID NO: 8527 - DNA, 422 bp, Gossypium hirsutum
  Clone ID: LIB3120-036-Q1-K1-B1
ccaggaaccagttaccgccactcaaacagaaaactcagtttgtgctatggccgtgagactattgtcaactccaactgctctgtctcacccaacaaagctctccttcttctcatcacccaaacccatatcaacagcaacctccttctttcaatggagatccaagtgcagagtttttacagggaaaatggtggtaaaggcatgtgttaaggtggaagaaaagaatgtgaaagaaactagtaaacaagaatggggcaaggtgtctgctgtactttttgacatggatggagtgttgtgcaatagtgagaacccttctagaaaggctgctgttgatgtttttgcagagatgggtgtccaagtcactgcggaggactttgctcctttcactggaatgggtgaagcaaactttttaggaggcgttgctt

SEQ ID NO: 8528 - DNA, 443 bp, Gossypium hirsutum
  Clone ID: LIB3120-036-Q1-K1-B11
cccacgcgtccgattttaggataacgcgtattttatatgtgactttcttcgaaaatcctaggaaaagtgtattgtagattgttgctgcaaattgccacttcctctgtttccaataactttgcagtatacattttttatggtttgtgcaagaatgacagctgaacattgttgctgcaaatcctaacaatgtatgagcaggaagtacagttttgtcttacgtatatatggtctgcgctactttgcgccactcgattccaaagtccattgtttattgtcaagtccgtgaagctaaaagaagcctgcttgactttttctacacggaattgggtaaactggagcaaaaacaattatcggcattactgaatgaggatccagcaatcatggaatgccgatccgctcttgcgaagagactgaaattatatatgagtgcacaagctgaaatc

SEQ ID NO: 8529 - DNA, 447 bp, Gossypium hirsutum
  Clone ID: LIB3120-036-Q1-K1-B12
ccaagcttctattcagttttgtaagagctatggctaaggacattgaggttggtggtgagttccaggccaaggactaccatgatcctccacccgctccattggtagacgctcaggagttagccaagtggtctttttacagggctgtcatagctgagttcattgccactctcctctttctctacatcactgtcttgactgtgatcggttacaagacccagaccgaccttgctaagggcggtgaagattgtggaggcgttggcattctcggcattgcttgggcttttggtggcatgatttttatccttgtttactgcactgccggtatctctgggggacacatcaacccagcagtgacctttggacttttcttgggtaggaaggtgtcgttagttcgagccatattttacatgggtgctcagtgtttgggagccatatgtggatgtgggc

SEQ ID NO: 8530 - DNA, 453 bp, Gossypium hirsutum
  unsure (1)..(453): unsure at all n locations; Clone ID: LIB3120-036-Q1-K1-B2
gcgcccacgcgtccgatcatctcccttgtcttgattctctccatctttctaattatagtaaggcttcgtggacttaaatctggcaagaaacatggcagttgtaaagaaaatagtggcatccataatacaagcagcaggttcattgctcctactaccatagacttaaacgctagtccagatgtgaaagggaactgtttatatggaggtagtatgcgtaaacctgcaagtgcatacagaggggtgcaagtttttacttacaaggagctggaatttgccactgataacttcagtgaagctaatgtgattggcaatggtgggtctagtgtggtgtacaaaggagtccttgctgatggtactgtggcagccatcaagaggcttcaccgtgacagaaagcaaggggagcgtgctttcaggatggaggtggatctgctaantcgcttgaactctccttac

SEQ ID NO: 8531 - DNA, 456 bp, Gossypium hirsutum
  Clone ID: LIB3120-036-Q1-K1-B3
cccacgcgtccgcccacgcgtccgcccacgcgtccgcccacgcgtccgtttagctataggatacacgactagtacccacgactagcaatggcttcctcaatgatctcatcggctaccattgccactgcctctccggcacaggctaacatggtcgctcctttcaccggtctcaagtctgcctctgctttcccagtcaccaggaaggccaacaacgacattacttctctcgcaagcaatggcggtagagtgcaatgcatgcaggtgtggcctcctactgggaagaagaagtttgagactctctcatacctccccgatcttacacccgtgcagttggctaaggaagtagattaccttcttcgctcaaaatgggttccttgcttggaattcgaattggaggagggattcgtgcaccgtaagtactcgagcttacccacgtactacgatggacgctactgg

SEQ ID NO: 8532 - DNA, 449 bp, Gossypium hirsutum
  Clone ID: LIB3120-036-Q1-K1-B4
cgaagggactcgccttccttcacagtgcggaaacaagagttatatatcgagacttcaagacttccaacatcttgctcgatacgaactacaatgcaaagctctctgattttgggttggccaaagatgggccaacaggtgataagagccatgtttctacccgagttatggggacttacggatatgctgccccggagtatcttgccacaggtcatttgtctgcaaggagtgatgtgtatagttttggagttgtgctgctggagatgttatctggccggagagtagttgacaagaatcgaccatctggagaacataaactggtggaatgggccaaaccttaccttgccaacaaacgcaaaatatttcgtgtcctaaataatcgccttgaaggccagtatacaatcgaaggagcctttaaggctgctacccttgctttgcgatgcctgtcgatc

SEQ ID NO: 8533 - DNA, 408 bp, Gossypium hirsutum
  Clone ID: LIB3120-036-Q1-K1-B5
cccaccagacgactccaaagaaattttaaggaaaaaaaagaaagagagaaagaattagaggaagaagagcaggcattgatggcggagggaaaacaggagaagaacacgacaagcgaagagagcgttaagctgttcgtcggtcaagtgccgaagcacatgacagaagctcaagttcttgcaatcttcgaagagttcgctttggtcgacgaagtcaacatcatcaaagacaaggctactctttcctctagaggttgttgctttgttatatgcccgtcgagagaagaggccgataaggcggtcgatgcctgtcacaataagaagactttgcctggggcatctagtccattgcaagtgaagtatgcagatggcgagttggaaagattagagcacaaactttttgttggcatg

SEQ ID NO: 8534 - DNA, 424 bp, Gossypium hirsutum
  Clone ID: LIB3120-036-Q1-K1-B6
ctcattgcgactctggatacattcagcaagccttgcacaatggccaccatcacctctggcgctgtcgctatcccatctttcaccggccttaaagccggtgcaaccgcagctaaagttagcgccacagccaaggttgcagcctctccagtcccaagggtcagcatcaaggcctccctcaaagacgtcggtgttgctgttgcggcaactgctgcaagcgcaatccttgccaacaatgccatggccattgaagtcttgctcggcagtgacgatgggggtctggctttcattcccaaagaattcagcgtaagcccaggggagaagattgtgttcaagaacaatgccggattcccacacaatgttgtgttcgatgaggacgaaatcccaagcggcgtcgacgtatccaaaatctccatgcctgaagaag

SEQ ID NO: 8535 - DNA, 389 bp, Gossypium hirsutum
  Clone ID: LIB3120-036-Q1-K1-B7
gaggaaaatcatgggtgccaaagttcttttcttctttgctttgctttccttttcagcggtctcggcatttgcacaggatgaggaagaccaaggtcttgttatgaacttctacaaggattcttgtcctcaggctgaagacattatcaaggagcaagttaagctactgtacaagcgacacaaaaacactgctttttcttggctgataaacattttccatgactgtgctgtccagtcatgtgatgcttcactgctgctggactccacaagaaggagcttgtctgataaggagacagacaggagctttggcctaaggaatttcaggtacattgagaccatcaaagaagctgtagaaagggaatgtcctggagttgtttcttgtgctgatatcc

SEQ ID NO: 8536 - DNA, 444 bp, Gossypium hirsutum
  Clone ID: LIB3120-036-Q1-K1-B8
aaaaaaaaaggcagttaggaaccagaaaccaaggcaatggcttctcttgcaaccttaggtggtgttcaaccaacgaccgtgaagggccttggtggcatctctctcaatggaaccaagctcttggtgaagtcaactcgccagagtttcaaacccaaaaactacagggctggtgctgtggtagcaaagtatggtgataagagtatatactttgatttggaggatattggcaacacaactgggcaatgggacttgtatggatccgatgcaccttcaccgtacaacccactccagagcaagttctttgagacatttgcagctccatttaccaagagaggattgttgctcacgttcctgatctttggaggcggttccctcggtctttacctcattgccactgcttccgatgaccttctaccgatcaagaaagggtcgcaactcccaccc

SEQ ID NO: 8537 - DNA, 356 bp, Gossypium hirsutum
  Clone ID: LIB3120-036-Q1-K1-B9
tcgctctgtgccctctttctgctcttcactcttcttttacactcaacattcaccactgcttgcaagtcatgcaaaccggaacctggaccatgcccttcacctttttgccctaaggacacattgaagctcggtgtctgtgctgacgtgcttggactagtcaacgtgattgttggaaccccttcttccaacaaatgctgtgctttgcttcaaggattggctgatttggaagctggcctttgcctttgtactgccattaaagccaatgtacttggaatcaacctaaacattccaggttatattagtctaatccttattgcatgtcagaaggaggttactccaggcttcaaacgtttata

SEQ ID NO: 8538 - DNA, 411 bp, Gossypium hirsutum
  Clone ID: LIB3120-036-Q1-K1-C1
cccacgcgtccgcccacgcgtccgctctttctcccaattgaaaggaaaatggcaaccatatctactaccaccttcacctcatcaatcacccctgcactcaagccatcagcaagggttgcatccccagtcgctattgggtttcctgcaattgcaaagaaggggaaagtgatgtgctccatggagaagaagggttcaggagaggagaatgggttaaccatgggcatgagagcatcactattggcagcagcagcagcctgtgcagcaacggtgtcaagcccctcatccatgggtctggtggacgagagaatgtccacagaagggaccggacttccctttggtttgagcaacaaccttcttgtgtggatactattaggcgtattcggcttgatttgggcactttattttgttaca

SEQ ID NO: 8539 - DNA, 372 bp, Gossypium hirsutum
  Clone ID: LIB3120-036-Q1-K1-C10
aaaaaagggaataattttcgtcttcattcaatctttctgctgctgaccattctttcctaaggggttcatcatgtgcaatttgaagacccaaatcagaatatgctattgttataagattaattattaagaattggtgttggatattatctgtttttgaatagtttggttagtttaatctttgttgatataaaatttaagttatggaagcggaaggtggttcacacggtggtgtctagaaccgaaatagagttgataggttttggatgcttgagtcatgctatatatatatatctcttccttgaccggtccaacgttatataggtgttgaaccgatgggaagttattatcagagtcatggagggtcttaacctt

SEQ ID NO: 8540 - DNA, 446 bp, Gossypium hirsutum
  unsure (1)..(446): unsure at all n locations; Clone ID: LIB3120-036-Q1-K1-C11
cttaggagaaaagagaagaaaacaatgtcaggtcctcagtgctgttcgaatccaccaacattggattctgcaagtggggctggtcacgttgagaatcttgctggtctcaacacttatgtttctgggtctcttcaatctaagcttgctgtttttcttatctctgatattttcggatatgaggctccaaactttagaaagctcgcggacaaggttgcagccgctgggttctatgtggtggctcctgacttcttttatggagaaccctatgaccctaataaccctgatagacctctatctgtttggataaaggatcatggaccggataaaggttacgaggatgcaaagctcgtaattgacgctttgaaaagtaaaggggtttcatccattggagctgctgggttctgttggggtgctaaagttgtggctggactggctaangatcccct

SEQ ID NO: 8541 - DNA, 425 bp, Gossypium hirsutum
  Clone ID: LIB3120-036-Q1-K1-C12
cccacgcgtccgcccacgcgtccgcatagtactactacttacaaagtctcaaacaacaagcagaaaaaagaaaagaaaatggtgtgtttgtggtactaataaaaaaaaaatggagtctttgaggtacaagatgaagaagaggctaagtctttcatggtaggagtgttgttttttttttatttagaaagtttatcaataggaaagttttgggttttgggtgtgttttattttttggttgttttagatgaaggccatgcccgtatcctttgaggaatttcaagggaagggggctttagatttttcttctataacatcatcgtgttcagattcatcactgttattacaacaccagcgattactctcccaaaaaaaagggaagtgggagaacaagggaggagattgttgctatgtgggcagtgagccca

SEQ ID NO: 8542 - DNA, 433 bp, Gossypium hirsutum
  unsure (1)..(433): unsure at all n locations; Clone ID: LIB3120-036-Q1-K1-C2
gtgagactcttttgtatacctgtagcatatagtaatagtaagcagtaatagcaatggcctcctccatgatctcatcgggagccattgccaccgtgaaccgctcctccccggcacaggccaacatggtggcccccttcaccggcctcaaatctgcctctgctttcccagtcaccaggaaggccaacaacgacatcacttctcttgcaagcaacggtgggagagtgcaatgcatgcatgtgtggccgcctcttgggaagaagaagttcgagactctctcatacctgcccgatcttactcccgtacaggnggctaaggaagtagattaccttcttcgctctaaatggattccttgcttggaattcgaattagaggagggattcgtgcaccgtaagtactcgagcttacccacgtactacgatggacgctactggac

SEQ ID NO: 8543 - DNA, 437 bp, Gossypium hirsutum
  unsure (1)..(437): unsure at all n locations; Clone ID: LIB3120-036-Q1-K1-C3
ccactatctgtccatctttcagtaagagaaaggaaatggagtttagttcagacgctaaccagcgcattgccaggctcgcagcccatctccaacctcagatggacgaaagttctattttgaggcgagctgactgtanagcgaaaggagggtcaccagggttcaaagttgctatcttaggagcagctggaggcattggccagcctcttgcaatgttaatgaagatgaatcctctcgtctcggttcttcatctttacgatgttgtgaactctcctggtgtcacagctgacctcagtcacatggatactggtgctgtggtacgtggtttcctagggcagccgcagcttgagagtgcgttgaccggcatggaccttgtgatcatacctgctggtgttccaaggaagcctggaatgacgagggatgaccttttcaacatcaat

SEQ ID NO: 8544 - DNA, 420 bp, Gossypium hirsutum
  Clone ID: LIB3120-036-Q1-K1-C4
actggacatctgtgagaccagtctacatatatggacctttgaattataaccctgttggagaatggttcttccaccgattgaaagccggtcgccctattccaattcccaactctggagtgcaaataacccaacttggtcatgtcaaggacttggcaacggctttcattgcggttcttggtaatgaaaaagccagcaagcaggtgttcaacatttcgggagaaaagtacgtgaccttcgatggattagcaaaggcgtgcgccaaggctggtggatttcccgaacctgagattgttcactacaacccaaaggagtttgacttcggtaaaaagaaggcattcccgttccgagatcagcatttcttcgcatcagtcgagaaagcaaagcatgtgctaggatggaaaccggaatttggcctggtcg

SEQ ID NO: 8545 - DNA, 303 bp, Gossypium hirsutum
  Clone ID: LIB3120-036-Q1-K1-C5
cacgaacaaagtgcgactcgtccaaccggttacaccataaccctcaaaaaacgaagcaaatgaaaaaatagggctgcacatgcacttgaattatcctctcaaacatacttatttacaactgaatggtagatctttgcttgtaaactacaaagctaacccttgatgaaatgattctactttgaccatgaacatataattacggaatgatacctatgatcttttagaccataactggtaataattaaacacagacattgatacatatattggaggcatccacgtgaacatagatgtgaccccttg

SEQ ID NO: 8546 - DNA, 437 bp, Gossypium hirsutum
  Clone ID: LIB3120-036-Q1-K1-C6
aagcaggcttctcaccttctcaaatatgattccacccttggcatcttcgctgccgatgtcaagcctgtcggcactgatggcatctctgttgatggcaaggttatcaaggttgtttctgaccgcaacccttccaacctcccatggggggacctatgaatagatctagtcatcgaaggaaccggtgtgttcgtcgatagagaaggtgcaggtaagcacattcaagcaggagccaagaaagtgctgattactgctccaggtaagggtgacatccccacctatgttgttggagtgaatgctgacacctacaactcagatgagcctatcatcagcaatgcttcttgcaccaccaattgccttgctcctttcgtcaaggttctggaccagaaggttggtatcatcaagggcaccatgactaccactcactcgtacaccggtga

SEQ ID NO: 8547 - DNA, 444 bp, Gossypium hirsutum
  Clone ID: LIB3120-036-Q1-K1-C7
atcttacttgaccggagaattccctggtgactacggttgggacactgctggactctcggcggacccagagacatttgccaggaaccgtgagctcgaagtcatccactgtaggtgggctatgttgggtgctcttgggtgtgttttccctgagcttttggctaggaatggagtcaaattcggtgaggctgtgtggttcaaggccggatctcacatcttcagcgaaggtgggcttgactacttgggaaacccaagcttgatccacgctcaaagcatcttggccatctgggcttgccaagttatcttgatgggagctgttgagggttaccgtattgctggcgggcctctcggtgaggtgaccgaccccttgtacccaggtggcagcttcgacccattgggtcttgctgacgacccagaggcattcgctgagcttaaggtgaaagagat

SEQ ID NO: 8548 - DNA, 448 bp, Gossypium hirsutum
  Clone ID: LIB3120-036-Q1-K1-C8
cccacgcgtccgcccacgcgtccgaacgcttttgccaaaaaaaaaaaaaaacctccattgaatatggctttatccatggcttccacttcattttcaagcttctcaataatcaggattcatcccaaaaaattattttcgagaaaagttacgacattgttacgaggggaaactcgtacgaaagcaacgaaaggtggagtctcgagtgtttgtgaaccactgcctcctgatagacctttgtggttccctggtagcacacctcctgaatggcttgatggcagccttcctggagattttggtttccatccacttggattaggttccgatccagaaaccctaaaatggttcgcacaagccgaactaatgcacgcaaggtgggcaatgctggccgtggccggaatcctcatacccgaactactcgaatccttgggcttcatcgacaacttctcat

SEQ ID NO: 8549 - DNA, 421 bp, Gossypium hirsutum
  Clone ID: LIB3120-036-Q1-K1-C9
tcggaaaactattaaagccgactttggggcttttattcagaagttagagttgcttcctccgcctgagcctgctcctggtaaagctccccatcctctcaccggtctcaatttcgccgcttctgatgtatttgacattgaagggtatgtgactgggtttggccatccagactggttgaggacacatgaaccatctactcgcacatcacctgtggttttggcccttgtagaaggaggtgctacctgtatagggaaaactgttgtggatgaactggcatacagtatccatggagagaataaacactatagcacaccaaccaatcctgctgcacctgcacgcattcccggtggatcctttagtggagcagctgttgctgttgctgctgattttgtggacttctctttatgcatcgatactcttggt

SEQ ID NO: 8550 - DNA, 435 bp, Gossypium hirsutum
  Clone ID: LIB3120-036-Q1-K1-D1
cccacgcgtccgctgacttcagcctctaataaaaggagtgagtcagaactcagctctgccttttgatttcctttccctttcaagctcttaactttccactcatttcccattttcttctgattggcttttgattgtatgagctcgaacggatagatcacttttgaacttcagctagttcgtattagtcataatgaaaggaaggaggaaagccagtatagctaatcttatccagaatttgcaagatccgagaatgatggttgaagtccaatgctgtgagatttagaggatctggggactgaattttccagtttataaaatgatgattgtgtgaagtgttctatgagttttatctctctgatggagtggaacgaacagaccccgttgcaatgggactgggaaaacctaatgttaaacgcaacaccaactgaaatcccg

SEQ ID NO: 8551 - DNA, 303 bp, Gossypium hirsutum
  Clone ID: LIB3120-036-Q1-K1-D10
cggcacgcgcccgcttttacttttttaatcaaactaaataatagtgggtgaattgtatcaattaatacaaattccggagcaatggcttgccgtggacgagcttatgaggaggttgagctcaaaggtcttggagagaaacgtctgggaaaccatttgggactctaccaaaatatttccttaagctttgtaccatgataacaagaacattggtgtgctcgagggcgaaggcaaagccccttgattcatacgcctgatcaattacgctctatgatctccaatcggttagggtttaaaggagagaat

SEQ ID NO: 8552 - DNA, 390 bp, Gossypium hirsutum
  Clone ID: LIB3120-036-Q1-K1-D11
aagatcccccctaaggagaacagtaatacattttcacaggtagggctgaattctcttaactgcggagatagttgctatattacgacaccttatccgtttcctgtgcactctgaggtgtaatgaaaaagacaaagaagacgggattgattttataaaatgtcaagcttgcacctggctcaacgcggggcccatacgttggggagactgttgaactctattctgaagacccatacattttctttttatccagaccaaaaagacatggtgaaattttcacaacccatataccgggttgagcacgcgtgacgaccgacaacccttttgcgggtatgttcgagttggggacacatgctcatttttttattccgacctaccttaagagcaaatatt

SEQ ID NO: 8553 - DNA, 460 bp, Gossypium hirsutum
  Clone ID: LIB3120-036-Q1-K1-D12
gtcacaactcagagaagagaaggggaagggaaacaacaatgatggggcaaaggcaacacgttgttcttctcattgtctcagcttttcttctcttccaaacctcaaacgcccataacgttacacgtctgcttgcaaagcacccctctttgtccacattcaatcattacctcaccctcactcacttagctcccgagatcaaccgccgcaccaccatcactgtccttgccttagacaacgccgccatgtcttccctcttggataaaaacccttccatttacaccatcaagaacatcctttcccttcatgtcctccttgactactttggtgccaagaagcttcaccaaataaggaatggtactgcactagctgctactatgttccaagctactggtgtggctactggggtttctgggtttgttaatataaccgattttaaaggtgggaaagttggtttttgagc

SEQ ID NO: 8554 - DNA, 410 bp, Gossypium hirsutum
  unsure (1)..(410): unsure at all n locations; Clone ID: LIB3120-036-Q1-K1-D2
gcgcaggtattttcaggaccgacaatgttcccgttgatgacattgttaagcttgttgacaccttcccgggccaatccattggctttttcggtgctctgagggccanagnttactatgacgaagtgaggaaatggatcggagaggtaggagtcaatagtgtcgggaaaaagctcgtgaactcgagggaagggccaccatctttcgagcaacctacgatgaccattgagaagctgttggagtatggaaacatgcttgttgcanaacaagagaacgtgaagagggttcaattggctgacaaatatttgagtgaagctgtccttggaaatgctaatgacgatgctatcaanagaggagctttctaaatgggaaattaagctccaagggaatgaaaaaaaatctatattggacac

SEQ ID NO: 8555 - DNA, 440 bp, Gossypium hirsutum
  unsure (1)..(440): unsure at all n locations; Clone ID: LIB3120-036-Q1-K1-D3
tcgcccacgcgtccgcccacgcgtgcggtgagactcttttgtatacctgtagcatatantaggagtaagcagtaatagcaatggcctcctccatgatctcatcgtcaaccattgccaccgtgaaccgctcctccccggcacaggccaacatggtggcccccttcaccggcctcaaatctgcctctgctttcccagncaccaggaaggccaacaactacatcacttttcttgcaagcaacggtgggagagtgcaatgcatgcaggtgtggccgcctcttgggaagaataagttcgagactctcttatacctgcccgatcttactcccgtacagttggctaaggaagnnagataccttcttcgctctaaatggattccttgcttggaattcgaattagaggagggattcgtgcaccgtaagtactcaagcttacccacgtac

SEQ ID NO: 8556 - DNA, 452 bp, Gossypium hirsutum
  Clone ID: LIB3120-036-Q1-K1-D4
ggaaaaacggggtcctacttttggctccaccatgaacgttctctacggagattacacttgcgggcaaggcgatatcgatcccatgaacatcatcatctcccattaccttcattaccttgacttactaggtgttgggcgagaggaagcagggccacacgaggagctaagctgtgccgagcagaaagcattcaacccaaccccagctccacctgctgccagtgcttgctgatctttggttcagccaatttcattgttaaaatgcagttgtcaatgaagggtaatttaataagagagctgggcaattaggttgttgtaaaatcatggtctatgtcggtgtgagaaaagggcccatcaatttcatgatattatatatagttgtatacgtttgatttgctgctgttaggtgggctttataatttgcttttttgtgtgtgggaagaatttgatatatt

SEQ ID NO: 8557 - DNA, 451 bp, Gossypium hirsutum
  Clone ID: LIB3120-036-Q1-K1-D5
ggttaaacgccgcatcaaaataaatagccacagttgctctctggtcatcttgtttaggtcccttgtttgcttccaagattatccaaagtctgcaacaaaagagacaacactgcttgacggtcccttgactaaacacccagggttttgcagaattggtagtgggggtattaaaaagataaataccagagccagaaggaaaagtcccattgaagcaagaagaagtaaattactaatcatagttaacatgcaagaacattgacagggcattttgcatacctctgggagctttacctcgtctaccaccggatcttcctgctcctacgttgaagcttttagctaaagtttcagtactcaaagaggaggttgttcggctcgaagagcaggtcatacactttatgcaggacttgtatcgagaagttgtctggtaatcattgttgaaatggaaaatgga

SEQ ID NO: 8558 - DNA, 387 bp, Gossypium hirsutum
  unsure (1)..(387): unsure at all n locations; Clone ID: LIB3120-036-Q1-K1-D6
aaattgtttaacaaatggctcgtactaagcaaactgcgaggaaatcaaccggcggcaaggccccacgcaagcaactagccactaaggctgctcgtaagtcagctccggcgacaggaggagtgaagaagcctcaccgtttcaggccaggaactgtggctctcatggaaatcaggaagtaccagagtagcaccgagctcttgatcagaaagcttccattctagaggcttgtgagagaaatcgctcaagatttcaagaccganttaaggttccaaagcagcgctgtctgcgctctttaagaagctgccgaggcttatctcgtcggactgtttgaagatactaatctatgtgctattcatgctaagagggttaccatcatgcctaaagata

SEQ ID NO: 8559 - DNA, 408 bp, Gossypium hirsutum
  Clone ID: LIB3120-036-Q1-K1-D9
gaacaagcaagggcagagaggtttggtgaaatgactgaaagagagaaacctgtaaatctacccccaaaacttgctcaaataaaggagaagacaggtgtttctggtaactcaaatgagcaatccaatgacgataaggctgtagactctcaaactatcagcaagatgaaacttgcccacattgaaaagagaccacctatggtggccagaccaccaccaaagccatccagtggcatttctgctgatgcaaataccactgttgtaggacaacctccatcacctggtgcgccaccaccgtcaccgtcaccttctggtggacgaccaccttcgccttcttcttcaggcaagctacctagaggggcaggcagtggcaataaagttcaccgagcttctgaacttgttgaattctat

SEQ ID NO: 8560 - DNA, 359 bp, Gossypium hirsutum
  Clone ID: LIB3120-036-Q1-K1-E1
gtgagactcttttgtataactgtagcatatagtactagtaagcagtaatagcaatggcctcctccatgatctcatcggcggccattgccaccgtgaactgctcctccccggcacaggccaacatggtggcccccttcaccggcctcaagtctgcctctgctttcccagtcactaggaaggccaacaacgacatcacttctcttgcaagcaatggtgggagagtgcaatgcatgcaggtgtggcctcctcttgggaagaataagttcgagacactctcataccttcccgatcttacacccgtacaggtggctaaggaagtagattaccttcttcgctctaaatggattccttgcttggaa

SEQ ID NO: 8561 - DNA, 448 bp, Gossypium hirsutum
  Clone ID: LIB3120-036-Q1-K1-E11
cccacgcgtccgatcatcaactcggtgctgtaatctctgtttctcagctcactgaatctaatggctttcactcattatttgtttgcagttccaatggacacttcaattcaccccaaaatttcaattcccccttcgttttgttccactgaatccccatcttccttacctttcccttctttttcttccccttttcctccattgtctaaagctcgaaatctctctattttccccagaatcaacagagtgggacacaaagcaaaagctgagcctcgagaatctgaagtgaatatagaagctgatgcgttttctcatttcaagcatttgcttcttccaataactgatagaaatccttatctttctgaaggaactagacaggctgctgcaactactgctgctttggcaaagaagaatggagctgaaattactgttgtggttattgatgaaaagc

SEQ ID NO: 8562 - DNA, 434 bp, Gossypium hirsutum
  Clone ID: LIB3120-036-Q1-K1-E12
tgtcggtctcacttcaagctgcagctaccctgatgcaaccaatcaaggttgctgcaccatcaaggaccaatgtgctgctcagggcctcccagagcgtttctaaggccttcggtttggagcctgttggtgctaggctcacctgctctttgcaaactgacctcaaggacttggctcagacgtgtgttgatgctaccaagctcgctggtttcgctcttgctacatctgctcttgttgtctcgggagcaagcgctgaaggagttccaaagcggctaacctacgatgaaatccaaagcaagacatacatggaagtcaaaggaacaggaactgctaaccagtgcccaaccatcgatggtggtgtcgactcttttgccttcaagcctggcaaatactaccccaagaagttctgcttggagcccacttcctttactgtcaag

SEQ ID NO: 8563 - DNA, 268 bp, Gossypium hirsutum
  Clone ID: LIB3120-036-Q1-K1-E2
cccacgcgtccgcccactcgtacgtccgaaccatgatctggaatggaccaatgagagggttaaacttccacaaattagcggctggaactactgctattgtataaaagctacctaaacccactggctatggatagacacccaccttagtgggtgaacactattgcgattgtgcctaaaaagtatgcaggtgctgacaccatcaaccacacatcatctggtgaatgagcgaggaaagaataccctgaagagcatgaccttacaccgacta

SEQ ID NO: 8564 - DNA, 429 bp, Gossypium hirsutum
  Clone ID: LIB3120-036-Q1-K1-E3
cccacgcgtccgtaaaagcaaaaatatcacttagtgtgtgagaaactgtaagggaaagaacacaagctgaagaacagagaagcgagggacaagagggtttcaagatcttatcagatcaaagctagaagataacatttgatggggagggaactcactgatgtgcatatggatgataagcccaacggtgttgggaaatcgaacggtgtggtgaattcaaatggtgctctgagagttttggaagacactgagtcaaagaactacgaggtcaaggaatgcactgaagagaactcgattgtccataatggtactgtgaatgaagatgtgttgggtgtcaaaagctcaaattttggtaccgatatccctgatgagaaaaacgaaacgatcggagatcagaagttcaccgaccgtgtgaaattaagccctgtcgca

SEQ ID NO: 8565 - DNA, 450 bp, Gossypium hirsutum
  unsure (1)..(450): unsure at all n locations; Clone ID: LIB3120-036-Q1-K1-E4
agcttttatccgctattaaggcggctgttacttccttcttccctctcttctcgacttgccttgtaacccagcttatcggttctgggatcagtttgatccttggtttagccttttctgcagtagtcattttaggcttccaagttcattaccctncaccttattttattttcctttgccttgtttacgtgattattctcttgtttattgtggagcatttacaagtgaattggatatttgcttacgtagtcgtcgtcgttgaatcaagctgggggtttgaaccattaaagcgaagtcgaaatttaattaaaggaatgaaaggcgttgctttgaagattatactgcntttcgggctcgtaatttccattaatacctggcgctcagttatgacatacaggaattcagctgctgataaatggacaagttggttatttgtttgaatatggacgtcac

SEQ ID NO: 8566 - DNA, 177 bp, Gossypium hirsutum
  unsure (1)..(177): unsure at all n locations; Clone ID: LIB3120-036-Q1-K1-E5
cccacgcgttcgaaaaaggcagttaggtaccataaaccaaggcaatggctgctcttgcaaccttagctggtggtcaaccaacgaccatcaagggccttggnggcagctctctcaatggaaccaagctcttagtgaagtttacttgccatagttttatacccaaaagctacagggctg

SEQ ID NO: 8567 - DNA, 412 bp, Gossypium hirsutum
  unsure (1)..(412): unsure at all n locations; Clone ID: LIB3120-036-Q1-K1-E6
cttcaatggctactacttctccaatggcaagtcggctgaagagcagttttacatcatgtcttacaagaaaactagttggcccaaagggaatttccggagccccatttatattctcacccggcaagacccgaactccctgtttcactgtcaaagctgttcaatcagacaagccaacattttaagtaattcaacccattaatggtgacccattcattggaagtttagagacaccaatcacatcaagtcctttaattgcttnggacttatccaaccttccagcttatagaacagcagggaacccacttctaagaggcatataagttggtttagcccatgggnttctcttagtatgtccatttgtcaaagctggtcctttaaggaacacagctgttgcaggtcaagctggttcatt

SEQ ID NO: 8568 - DNA, 276 bp, Gossypium hirsutum
  unsure (1)..(276): unsure at all n locations; Clone ID: LIB3120-036-Q1-K1-E7
cttgttttgttctcattttctgaacatggagtgtaattaataatcaatctgggggatgtaaggttgagaaagcaggggcaactgttttgtttgaggaggcaaacttgggtaagtaacaatgttggggtngttgtgagcctatgtcgnttaaacatccttggagaagttggtactccccaatttgnatgtgataagcttatacaggcggaaaaacgcaaggtacntagacttagtttcaaggtncgtttacatatgggactactacatttgtggaac

SEQ ID NO: 8569 - DNA, 451 bp, Gossypium hirsutum
  Clone ID: LIB3120-036-Q1-K1-E8
cgcaaaaccctccttgcagacgtcttctgcttcttcctccaaacaatctccaaggaaacgaaaatggctgcctcttccgcttttctttctacttttatttctccccaaacggtctccttctcacccaaatcctcctcttctcttcgcctccttcctccaactagcgtgcgcatggtacgaactgtgaccctagccaccgcttcacagcccgccaccatcccccggacgccacgcggcatcatgaatccgcgtcgtgtaacgcctgagatgcaggatgtcgtcggagtccctgaaattccccgaactcaagcccttaagcagatttgggcttacattaaagagcacaatcttcaggaccctgaaaacaagaagattataaactgtgatgagaagctgaagaagatatttggtgggaaagatcgcattggatttcttgaaattgctgtgttga

SEQ ID NO: 8570 - DNA, 367 bp, Gossypium hirsutum
  Clone ID: LIB3120-036-Q1-K1-E9
tggacgcgtgggcggacgcgtgggttcgaatgggttaagggacctgtgagtaaggttatctgtcactacagctgtgcagttttatgacctacaagatcggttggggtatgatcagcctagtaaagctgttgagtggctaattaaagcagcttttgatgctattgctgaactttcttcacttaacacttcattccctgatacaccaaagcaactgattgatgagaaaagagggagtgggggaatagaacaagggtttgactcagctgaagttgtgttagatggagatccaagcaattaccaacaacaccttttcttgtccaaattagctttcagtaacacgtctgagactcgaaagaactcgagttta

SEQ ID NO: 8571 - DNA, 443 bp, Gossypium hirsutum
  Clone ID: LIB3120-036-Q1-K1-F1
atcttatcgaggtgatcggatttgtttcggtagatatgctcttcaagcacttgaacccgcttggattacatctagacaaatagaagcggtgcgccgcgcaatgacacgaaatgtacgccgtggtggaaaaatatgggtacgtatatttacagacaaacccgttacggtaagacctacataaacacgtatgtgttcggtgaaaggatcttccgagtattgggtagctgtcggtaaaccgggcagaatactttatgaaatgagcggagtagccgaaaatatagccagaaaggctatttcaatagcggcgtcaaaaatgcctataaaaactcaattcattatttcaggataggaatatagaaccaaaggaaagaagtcttgtcttgggaataaaaaaacaattgcgagtttgcttttttttttttggacaacaatatttttttttt

SEQ ID NO: 8572 - DNA, 360 bp, Gossypium hirsutum
  Clone ID: LIB3120-036-Q1-K1-F10
gcagatcttgcattgtattatccgtggaccatggggatgggggtttggttcctgttccacaggattcactttacggagctacaagatctctctttggcggttcacttgtttcttactacctaaaagagactgcaaactgggggctgtacgtaaacaatcttcgaggatcatttgcacaggctcgcttcaaaggaataactgagagagcattggttattattaaccctgcgaaccctactgggcagtgtctcattgaagctgatttaaaagaaatattgcatctttgttaccaagaaaacttggtattacttgtagatgacgcttaccaccagaatatataccaagactagcgcgccttta

SEQ ID NO: 8573 - DNA, 365 bp, Gossypium hirsutum
  Clone ID: LIB3120-036-Q1-K1-F11
ctttttccagatttcttcttcttttttctttttttttttttcctttttttttcttctctcactttctcgaggcctccatttttgaaccctagctggagaaaaaaaacgtaattttcttggaaaccaaacacttcgattaatttatctccagtcaatcgccaagaaaaaaaatgcagcaccagaggctgaagcaacagcaacaagccttgatgcaacaagctcttcttcaacagcagtctctctatcatcccggcatattagctcctcctcagatagagccaattcccagtggaaatctgcctgctggttttgatccaagcacttgccgcagtgtgtatgtgggaaatatccatacacaagtgact

SEQ ID NO: 8574 - DNA, 454 bp, Gossypium hirsutum
  Clone ID: LIB3120-036-Q1-K1-F2
cattaacttctcttcttgacaaggcagaaagtgttgttccgctagatttacgatcaaagacccctgtgagagttggggcaactgctggtctgagggcattaggaggcgaggcatctgataaaattttgcaatcggttagggaacttttgaaaagtagaagcacccttaaatccgaggcaaatggggtcaaaattctggacggctctcaagaaggttcttatgagtgggtgacaataaattacctactagggaatttgggaaggacatatcatgacacagttggcatagttgatcttggtggtggatctgttcaaatggcgtatgccatctccgagaatgctgcttcaagggctccaagtgtaccagctggacaggacaattatgtaaatgaaatgtatctcaagggatcaaaatattacctctatgtatacaggtatttgcactatggcttact

SEQ ID NO: 8575 - DNA, 420 bp, Gossypium hirsutum
  unsure (1)..(420): unsure at all n locations; Clone ID: LIB3120-036-Q1-K1-F3
aaaaagaaaagaaaataaaagaaaatggttaagtccgacatggcatctcantggagggtgctgagtggcgagaacgactgggatgggttactccaaccactgaatctncatctccgccactacattattcactacgnacaaagggctgggtctgntggtgatcgctacaatcataacaaacatggtggatgcctgaaagataagtttcttgcagaagccggccttgataaatgaaatgagtgcaagttcagcgtcacccactacatgcatgcagagtcagatatttgtgagccctcatgggtnggatttgtggcagtaacaacagatgaaggaaaggctgttcttnnaaggaaggacattgtgattgcttggagaggaaccatacattacactgagtggattaatgatttatacgctaat

SEQ ID NO: 8576 - DNA, 436 bp, Gossypium hirsutum
  Clone ID: LIB3120-036-Q1-K1-F4
aaaaagctctctaaattccctttcccgagctgaaagataaacaaggtgagcctaaaagagctgaagcaatggcagtttgctcagcatacaccacccagtccctccattcaacgtgttcaatctccacaccagcgaaaacccatttaggttttcaccaaaagcaagtagttttctataggagaagcagcaagagaggtggcagcggcagcagcagcggcccatgcgtgataacatgctcggccggtgattcacaaacagctgtgattggtttggccgcagactcaggatgtgggaagagtacctttatgaggaggctaacaagtgtgtttggtggtgcatccgatccaccgaagggaggcaaccctgattcaaacacgctcattagcgatatgaccactgtgatatgcttagatgattaccattcactcgacagaac

SEQ ID NO: 8577 - DNA, 180 bp, Gossypium hirsutum
  Clone ID: LIB3120-036-Q1-K1-F5
tcgggaagctgcctatgttcgggtgcaccgactcggctcaggtattgaaggagcttgaggaatgcaagaaggaataccccaatgcattcattataatcattggcttcgacaacgtgcgttaagtgcagtgcattaggttcattggctacaagcctccaggcttataagctttttataaac

SEQ ID NO: 8578 - DNA, 443 bp, Gossypium hirsutum
  Clone ID: LIB3120-036-Q1-K1-F6
cccacgcgtccggccttctcagcagctcttgctctttcttccattcttctctcagccgcgcagcctgccgtagctgatattgcaggcctcacaccatgcaaagagtccaagcaattcgccaaacgtgagaagcagcacatcaagaagctggaatcgtcgttgaagctatacgcccctgacagcgctccagctctcgctatcaaagcaaccatcgagaaaaccgagagacggtttgacaactatgggaagtacgggctgttgtgtgggtctgatgggttgcctcatttgatagtgagcggtgatcagaggcactggggtgagttcatcacgcctggtctcttgttcttgtacatcgctggatggatcgggtgggttggaaggagctacctcattgctattagcgatgataagaagcctgccatgaaggagatcatcattgacgt

SEQ ID NO: 8579 - DNA, 425 bp, Gossypium hirsutum
  Clone ID: LIB3120-036-Q1-K1-F7
ctttgccttcacaacttacaactcagcgtctccactctctttctctcttcgcctccaaatggcttctgccaccacttccaccactttttccctcctcaaaaccaccgcctccaccacctcttcctccgcctcccgctcttctgcatccctcatccgccttccctccactcgccgccacctcaaatcctcttctctcatccacagcctaggcttctcctccgctgcttctggggactctctgctttccctccatgcctcctccaaagttccatctttcaagggaaaagggtcaagaggggttgtttcaatggccaagaagagtgttggggacttgactgccgctgatttgaaagggaagaaagtgtttgtgagggctgacttgaatgttccattggatgatagccagaacatcactgatgacacca

SEQ ID NO: 8580 - DNA, 413 bp, Gossypium hirsutum
  unsure (1)..(413): unsure at all n locations; Clone ID: LIB3120-036-Q1-K1-F8
cccacgcgtccgcccacgcgttcgctcaaattcgaggagaaagatgggattgattatgctgccgtcacagttcagcttggtggtggtgagcgtgtgccttncctgttcaccatcaagcaattggttgcatcaggcaaacctgatagctttggaggagactttcttgtaccattctaccgtggctcatcttttttggacccaaagggaatgggtggctcaaccggttacgataatgcagtggccttgcctgctggaggaagaggggatgaggaagagctagccaatgagaacaacgagagtgcttcatcttcatcagggaaaatcaccttgagcgtcacaaagagcaagccggagaccggtgaatttaatcgtgtgttcgagagccttcagtcatcttacactgacttgggtgc

SEQ ID NO: 8581 - DNA, 432 bp, Gossypium hirsutum
  Clone ID: LIB3120-036-Q1-K1-G1
cccacgcgttcgcccacgcgtccgcccacgcgtccgcccacgcgtccggtgttagtcaagtaggatcaagggcgctggagcatggtatgacaaataaactaacaagaccttcgaaactgctggatgtatcttctgactttgcacttacttacaaggacaaagagggtgactggatgcttgttggagatgttccttgggagctgttcgttatttccgtgaagaggcttagaatcatgaggacatcagaggcaaccggattggctccaatgttacaaggaaggaaccagaggcaaagaagcaagcccaactagaatactattctctcaaagccgaccataacacgaataagacatgctatccaaagcagagaagaaatacaacatagttaaaagcattttgactgtagcaaaggttgaacccttgagctctctg

SEQ ID NO: 8582 - DNA, 400 bp, Gossypium hirsutum
  Clone ID: LIB3120-036-Q1-K1-G10
ggatgttgcacatgaatcattgagggaatctgttattaaaggagatttcggtcctgcttctgactctcttaatagggtgatgtacatggatccttgtacacctaaaggttacttgtttccatcatcaaatctttcactgggttatatggctgaaaaaagtaaatatagttccgaacttcaagctactggtaacttctcagagtgcacatctgctgcactaatgttattacaaaacggaaaagaaaaatgttccaactaccgctgttatttggggtctgttttcatgcccaagctttaaggaaaatttttggctacagaaaatttctttcatacctcaaagttctttaggttgcatcaaagggcctctctttctgatgtcatgatggcggggcaacatttt

SEQ ID NO: 8583 - DNA, 399 bp, Gossypium hirsutum
  Clone ID: LIB3120-036-Q1-K1-G12
cggattgcatatccggaacgtggagccgggtcgggtcatggatcgggtgagtcccgttctggtgatcaggggacggcgattatggcggttccggaagtttcccacttggggtggggacattggtatactttgagagagcttgaggaggctactgatgaatttgctgctgagaatgtgattggtgaaggcggctatggaattgtttaccgtggcgtcttggaagataatacaaaagttgctgtgaaaaatctactaaataataggggccaagctgaaaaggagtttaaggttgaagtggaaacaaatggacgcgtacgacatatgaatttggtgagggttcttggttattgtgcggaaggagctcataagatgcttgtttatgaatacgttgacaatggg

SEQ ID NO: 8584 - DNA, 183 bp, Gossypium hirsutum
  unsure (1)..(183): unsure at all n locations; Clone ID: LIB3120-036-Q1-K1-G2
gccagccccttcccttctcgatgacaacattgccagcatcttgccatgtaacaccagtgagccatggaacggtaagtgcgccaagcgtanccaacatggcccaccgnccatggatcaattcacactccctaaaccnctgcantcacaaacgccgatgctacatgcttctttatggggacacgc

SEQ ID NO: 8585 - DNA, 129 bp, Gossypium hirsutum
  unsure (1)..(129): unsure at all n locations; Clone ID: LIB3120-036-Q1-K1-G3
cgggcatcaaaaagctttcaatcctttaatggactacacagaacaaatctagtcttcgctaatgggtacgcatccggttgagcctgtgtgcgtttcagtggtaaannntcgttcgttattaaaagtgtt

SEQ ID NO: 8586 - DNA, 172 bp, Gossypium hirsutum
  unsure (1)..(172): unsure at all n locations; Clone ID: LIB3120-036-Q1-K1-G5
gtaaaatgatcctgcattcgtaaagaatctagctaatctcgctaacctccatgtcaatgatgcattaggcactgcgcacggatcccatgctttcacaganngagtggctaattacttaaagccttctngcgctggtttttgtatgcaaaaggaaatcgattatgttgatgga

SEQ ID NO: 8587 - DNA, 421 bp, Gossypium hirsutum
  Clone ID: LIB3120-036-Q1-K1-G6
cccacgcgtccgcccacgcgtccgtcgatcttcatctctgagaggaaaagcagaatcaaatccaaaaatacacaaaaacataaaaagagtatttttctcaaattcataaccatgactgatcacttgcaggagcaggagatggaaattgaggccctggaagcaatacttatggatgaattcaaagaaattcattctggtgaaagtgggctaaacacttcgaataggtgcttccaaataacattatctcctcaggatgatgatacagatcaatcaaccaccctaccagttctgctggctttgattttctcgcatactgaaaaatatccagatgagtctccacttctgaatgtaaaaagtatacgaggaatacaagttagtgacctgaaagttttgaaagaaaaacttgaacaagaggcatctg

SEQ ID NO: 8588 - DNA, 418 bp, Gossypium hirsutum
  Clone ID: LIB3120-036-Q1-K1-G7
tttagctatagcatacactactagtacccactactagcaatggcttcctcaatgatctgatcggctaccattggcactgcctctccggcacaggctaacatggtcgctcctttcaccggcctcaagtctgcctctgctttcccagtcaccaggaaggccaacaacgacattacttctctcgcaagcaatggcggcagagtgcaatgcatgcaggtgtggcctcctactggaaagaagaagttcgagactctctcatacctccccgatcttacacccgtgcagttggctaaggaagtggattaccttcttcgctcaaaatgggttccttgcttggaaattcaattagaggagggattcgtgcaccgtatatactcgagcctacccacgtactacgatggacgctactggaccatgtgga

SEQ ID NO: 8589 - DNA, 437 bp, Gossypium hirsutum
  unsure (1)..(437): unsure at all n locations; Clone ID: LIB3120-036-Q1-K1-G8
gccacgctctcgttctttgaaattcccttgctatcgccctttgtaacaaactttgttgagatggcccgtgcgaagcacactgctcatcaatccaccggcanctacgctccaaggaagcatcttgccactcaggctgctagtaaggcggcaccgacgaccggaggcgctaaaaagcgtgaccgatatcgtcctggatctgtacctgtagctgaaattctgaagtacctgataagttctgaactccttattaggaaactgactttgcaaatgctctttcaagaaattgtccaagactttaacaccgatctgaagatccagatccatgctgagatggcttctcaatgaggcgtagaggcataccttgatgcatagttcgaagataccaacctatacgccattcatgctacgcttgttacaatcattcccacagtcattca

SEQ ID NO: 8590 - DNA, 413 bp, Gossypium hirsutum
  Clone ID: LIB3120-036-Q1-K1-G9
atcaatcccacagacaaccatatatacattcattgctccgacatgtgccacgacatgcaacaacttgtaccgatgcttatcgcgtacatgaccggggtcgttacagaaggtggtattcaagggggtcttctggttcttcacgatccctatggctacatggttgacatcatgcatctgtaataacctttcgcgaattccacttaccttttgaactatctagcggactatttacgtggctacttctttattcgcttatctatacaaggagacaccttggtctgcacctgggactgctatgacggaagacatgcttgtgaacatgctggacatattctttggcatgtgcctatgatggtttcaaaaaaaaattgatatatacaaattgttttccaagtttgttgacaagttttttt

SEQ ID NO: 8591 - DNA, 446 bp, Gossypium hirsutum
  unsure (1)..(446): unsure at all n locations; Clone ID: LIB3120-036-Q1-K1-H1
cccacgcgtccgcttcaatggctgcttctacttcggtttcagtagctgggtttaaggggggtttagggaagagttccttggatggaggtgaagattatgccatgttggcggctaaatcgactcccaacgtcgttcgaatcggaaagccagttcgagctcagccgatgatgaagaacgttaatgaagggaaaggggtgtttgcgccgcttgtggtggttactcgccaaatcgtcggcaaaaagaggttcaatcagcttagaggaaaagctattgccttacattctcaggtaattaacgaattttgcaaagcaattggggcagatggtaaacaaaggcaaggattgattcgcttggcaaagaagaatggtgagaagcttggattccttgcctgatttatggccttacacgtggactntcgttttgtctttatttacaaaatgtttcat

SEQ ID NO: 8592 - DNA, 354 bp, Gossypium hirsutum
  Clone ID: LIB3120-036-Q1-K1-H10
aaacaaagcattatactcgtactaagaagaaactagttgtaggcagctattatatcgcttctcctttctcccttctcttaagagtagaatgattattggaaggttacgccaatggttaagtctactggtctgtgtgcttgctgttatactactcaaatctgaaggcgctagtgtagggattacttatctgcaggatgccgtagcgaaaggagccgtttgtttggatgggagtccaccagcttaccattttgacaagggctctggcgctggacttgataattggattgttcacatggagggtggaggatggtgtgaaaatgtgccgacttgcctctctcgtaagaacaccgattt

SEQ ID NO: 8593 - DNA, 409 bp, Gossypium hirsutum
  Clone ID: LIB3120-036-Q1-K1-H11
cccacgcgttcgcttcaaaggctgcttctacttcggtttcagtatctgggtttaagggaagtggagggaagagttccttcaatggaggtgaagattatgccatgttggcggctaaatcgactcccaacgtcgttcgaatcggaaagccacttcgagctcagccgatgatgaagaacgctaatgaagggaaaggggtgtttgcgccgcttgtggtggttactcgccaaatcgtcggcaaaaagaggttcaatcagcttagaggaaaagctattgccttacattctcaggtaattaacgaattgtgcaaagcacttggggcagatggtaaacaaaggcgaggattgattcgtttggcaaagaagaatggtgagaagcttggattccttgcctgatttatgggcttacacgt

SEQ ID NO: 8594 - DNA, 459 bp, Gossypium hirsutum
  Clone ID: LIB3120-036-Q1-K1-H12
cccacgcgtccgcccacgcgtccgcccacgcgtccgcccacgcgtccgcccacgcgtccgcccacgcgttcgagcgtttagctgaaaaacccaatcccaacttgtttcttcatggcgtctccttcgctcttacaatccacatcctcctccttccacggcccctcccctttccttgcaccaccattctccgcgcgcctgccctactctaaccccagaaatggatacgccggcgtcgtttcggtgagggcaacgggagagattgtgttggtggataaatcggaagccgaaaaaccctaccgtctcaaaactacttacctagacaaaattattccttcctaaagaagagttcaagtacaccaatattcaccaggttccaaagcttgaaaagattgtggtgaatcgtgggattggagatgctgcccagaacgcgaaaggcttggaagccgcaatgaacgagat

SEQ ID NO: 8595 - DNA, 455 bp, Gossypium hirsutum
  Clone ID: LIB3120-036-Q1-K1-H2
actattacatcatcttttaatatgtccactatcatctttttcaattgttgctcttctttgactgcctccaaattgattaatccaagaatacccactaaaggttcaagctttctaaggactcacaagagtttttcatggtggaataggcacttcttgcccaaatgtacttcccagaagcatgttcaatgtcagcttcaaaatgggcagaaaatgaggtcattttcactgaaggaatgtgcaatctcagttgctttggctgctggattgataattggaatgccatcattggattcatctcctatggcttatgcagctaatccttcattgcccgatttatcggttttaatctcggggcctcctataaaggaccctggagcattgttgagatatgcactgccaattgataataaagctataagagaagtacaaaagccacttgaagatataacagagag

SEQ ID NO: 8596 - DNA, 180 bp, Gossypium hirsutum
  unsure (1)..(180): unsure at all n locations; Clone ID: LIB3120-036-Q1-K1-H3
cggacgcgtgggaaaaaaaacaataaacttcattttcctttgaatagcaggaggnacaataattaattaatcaatggtgacttttggattaacttctattgggtcctantgggactccttattgtttggataaggncgaatgaaattatagttcatttgccagatcctaagtgaggcact

SEQ ID NO: 8597 - DNA, 419 bp, Gossypium hirsutum
  Clone ID: LIB3120-036-Q1-K1-H4
ggtgacttcctccagaactactatgtcaaccctctacttaaccatgcctatactccagaccagtacggctcattccttattgataccttcacaaacttcgtcaagaacctctatgggttgggagctaggaaaattggggttacctcacttccaccgttaggttgcgttccattagcaagaacattgttcggttaccacgagaaaggatgcatctccaggttcaataccgatgctcaacaattcaataaaaagctcaacgccgcagcagccaatctccagaagcagcatcctggtcttaagattgtggttttcgacatattcaaggcactttacgacattgttaaatctccctctaactatggttttgttgaagcaacaaaagggtgttgtggaactggaacagtagagacaaccgcatt

SEQ ID NO: 8598 - DNA, 438 bp, Gossypium hirsutum
  Clone ID: LIB3120-036-Q1-K1-H5
gttagctatagcatacactactagtacccactactagcaatggcttcctcaatgatcggatcggctaccattgccactgcctctccggcacaggctaacatggtcgctcctttcaccggcctcaagtctgcctctgctttcccagtcatcaggaaggccaacaacgacattacttctctcgcaagcaatggcggcagagtgcaatgcatgcaggtgtggcctcctactggaaagaagaagttcgagactctctcatacctccccgatcttacacccgtgcagttggctaaggaagtacattaccttcttcgctcaaaatgggttccttgcttggaattcgaattagaggagggattcgtgcaccgtaaatactcgagcctacccacgtactacgatggacgctactggaccatgtgggagctggctatggtcgggtgc

SEQ ID NO: 8599 - DNA, 380 bp, Gossypium hirsutum
  unsure (1)..(380): unsure at all n locations; Clone ID: LIB3120-036-Q1-K1-H6
atataattcccccaagcctttcttaatttggccggccccaatttttttccttaactaccaacaaaaacctggaattgtggaccaacaatcatatttccaaacccaaggttatcccgggccttcaaaacctatcctaataaaccggnactatccctgagaaccgctatatctccattaaaggcccnacctgtaaggttgtggaagtttccacctccaatactgtgaagcacggtcatgctaagtgtcacttcgttggcatcgatatcttcactggcaagaagttggaagatattgttccctcctcccataactgtgatgttcctcatgtcaatcgtactgactaccaatttatttacatttctgangatggatttgggagc

SEQ ID NO: 8600 - DNA, 450 bp, Gossypium hirsutum
  Clone ID: LIB3120-036-Q1-K1-H8
gagactttaaactgagctttgctgaattttcgtgatcgtcgagaaagaaaattatgggaaggaaattcttcgttggcggcaattggaaatgcaatggaaccactgaggaagtgaataagattgtgagtactttgaatgctggagaggtgccttctcaggatgttgttgaggttgtggttagccctccatttgtgttccttcctttggtcaaaacttcactgagacccgatttccatgtcgctgcacaaaattgttgggtcaagaaaggaggtgctttcactggtgaagttagtgcagagatgcttgtcaatttgagcattccttgggttattattggtcattctgagaggagacttattttgaaggagtcaaatgagttcgttgcggataaggttgcttatgcacttgctcaaggcttgaaggtgatagcttgtattggggaaacacttg

SEQ ID NO: 8601 - DNA, 437 bp, Gossypium hirsutum
  Clone ID: LIB3120-037-P1-K1-A2
cagtgagactctttgtataactgtagcatatagtactagtaagcagtaatagcaatggccggctccatgatctcatcggcaaccattgccaccgtgaactgctcctccccggcacaggccaacatggtggcccccttcaccggcctcaagtctgcctctgctttcccagtcactaggaaggccaacaacgacatcacttctcttgcaagcaatggtgggagagtgcaatgcatgcaggtgtggcctcctcttgggaagaagaagttcgagacactctcatacctccccgatcttacacccgtacagttggctaaggaagtagattaccttcttcgctctaaatggattccttgcttggaattcgaattagaggagggattcgtgcaccgtaagtactcgagcttacccacgtactacgatggacgctactggaccat

SEQ ID NO: 8602 - DNA, 353 bp, Gossypium hirsutum
  unsure (1)..(353): unsure at all n locations; Clone ID: LIB3120-037-P1-K1-A3
gcgggtactacctctgttcttccttgtacactccctcgggcaaaacttactccagaggccgcataacttgtaaccaaccctaatctatgctttttggccttactttcgagatccttgaggtctcttaaaggaaccaggctgactactgataatgcgtgtggctcaactatggcctctcgtatgggctcccgtcctgccgtccagacacacatatttnttgatattgagacctttgtcttcaagaaggagaaagggtacctcgctggtcaggacgagtacattgtgagaggagggagagacttgcttaagatggttggctgacgctttcaaagggggtaagcaaaattggtgtt

SEQ ID NO: 8603 - DNA, 354 bp, Gossypium hirsutum
  Clone ID: LIB3120-037-P1-K1-A4
taacaatatcacattgttttcttcaggctctttctcagccatggctgcagccatctccaccgtcgctggcgctgccgccgccaaccgagctctgggagtgtcagtcccaacctcagctttcatggggaagaaagtgagctcaagattcaacagcaccaggcaggttccttcgggaagttttaaggtgatggcggcggagaaagagatagacgaagagacacagaccgaaaaggaccgatggaaagggttggcttacgatatttcggacgaccaacatgacattactcgagggaaagggatggtggattccttgttccaagctcccatgaatgatggaacttactatgctggcat

SEQ ID NO: 8604 - DNA, 124 bp, Gossypium hirsutum
  Clone ID: LIB3120-037-P1-K1-A5
ctggtatattcagtaagccttgctcaatgtgtaccatcacctctgtcgatgggggtatgcgatctttcaccgggcttaaagccgttgcaaccgcagcttaagttagcgccacagccaatgttgc

SEQ ID NO: 8605 - DNA, 263 bp, Gossypium hirsutum
  Clone ID: LIB3120-037-P1-K1-A6
cccatcgtacatccacgccactgttcacacgtgcgatctattacacccggcgggaagggataccttagaggtgaaaaagccaaaaatcactggttacaatcatctactagggatgtgttgtccttacccttcataaagaatggttacattcgattaagcacttacctgaggacctacaacattggttactatgttgacaccaagggctatggtgcctttcacaagggtatgccccactagttctaccatggccgcactggtct

SEQ ID NO: 8606 - DNA, 195 bp, Gossypium hirsutum
  Clone ID: LIB3120-037-P1-K1-A7
gactgtgttacgcgatacgatcgttgaaattttcattctattacaattcggagagaataggggaacttaggatggtgaaaatccacatattttaccttcataaattatatgcttaaaacaatgttactattatgtataaaaatgaagggttacatcaacattaatcactgaacgttgaaaggtaaaatacattac

SEQ ID NO: 8607 - DNA, 331 bp, Gossypium hirsutum
  Clone ID: LIB3120-037-P1-K1-A8
gcgcccaacgtccgtccacgcgtacgttgaacggtcttggcagaatcagcaggcaaggaaaggctggatacgactcgatagataggaaaccagaaacaaagcaggaaaaaatgcagacttcgttgagatacactggtgactccaaagctgtacgaatccacgccaaggagaattttccctttgattccaaaacccatttgcaggttcaaggcgagctggacacaagaactgtagtccccaataacttttgtgcaatgataaggcactcatatcatgatttgttcacaagccttcgggttggaaatgcgctatgataagcgtgaaaaggtgc

SEQ ID NO: 8608 - DNA, 448 bp, Gossypium hirsutum
  Clone ID: LIB3120-037-P1-K1-B2
caatggccaatacaacctccctcgaagaataattaaggaaactcagcgtctcctcagtgaaccagcacctggaattagtgcttcaccatcagaggataacatgcgatatttcaatgtgatgatccttggtcccacacagtctccatatgaaggaggcgttttcaagttggaactatttttgcctgaagaatatcccatgactgctcccaaggttcggtttcttacaaagatatatcatccgaacattgataagcttggaagaatatgccttgatattctcaaagacaaatggagtcctgctctccaaatccgaactgtacttttgagcattcaagcactcttgagtgctccaaatcccgatgatccactctccgagaacattgctaaacactggaaaacgaatgaggctgaagctgtcgagacagctaaggaatggacccgtctatac

SEQ ID NO: 8609 - DNA, 309 bp, Gossypium hirsutum
  Clone ID: LIB3120-037-P1-K1-B6
gcgcgcgtgcgacacattgactcttccttgaccattgtcatttgagaagacatggtcaaagtgggggcctggtatgacaatgaatggggctacagacaaatgcttgttgatcttgcacacttggtggcaagcaagtggcacggcatgcctgtaaatggaagcggtgaccccttgaaggattactgcatggcaaacccagcatatgaggaatgcaaagtgtacgaggcttaaatagatgcaactttatgattatttttaatggtatttatacccgcagatggtataaatactggccaagggcttttcaat

SEQ ID NO: 8610 - DNA, 443 bp, Gossypium hirsutum
  Clone ID: LIB3120-037-P1-K1-B8
cccaccgtccgcttacttactctgataatgtcttgcaaaattagttccttgctgtctcacggtttcatcctcagcattctgggtgttattgctgggcaagccattgcagcacgtgacatctcgaagaatgatgatcaaatgaaacagcctgaatatctaaaacatgaccgtagtgtgctcattccaggccttggacgagtgttgctgccaccagttttcaaacatcacaatccacacactatcggcactggcacccacaccggcagcagtggcggccaccttggcagcacaattggccgaaatcgccagattccacgtggtgatgacacattcgttccaaaccctggttttgaggtgccaattccaacaggtcgtggtgcttgcattgcacgaacaaacccacgttcttgaacatgcttggctatgaaacttccaataaatct

SEQ ID NO: 8611 - DNA, 435 bp, Gossypium hirsutum
  Clone ID: LIB3120-037-P1-K1-C1
ctaaacgggaacgaaaccatctgattcacgccatggattacctctggcattgcttgcaagacgagtttcaaggttgccggcgggtagggttgattttagcgcacgggtttccagggagttgaatcatggggttggagattccagggtttcacttaggccgaggattaaatcttgcaggagattgtgttgccagttttctgatttagggcatgtccaatattatgtgtcaccgaagggtggtggtagtggcgatgccacgaagaaagacaagggaaagagctgtgagattaaacaagtcaagaagaagctgaagcttctcaagcgattgtgcaaggacttgtccatgcttcctcaaattgctgatggcgaggatattaagattggattggccgctgaagttaaagccacgacgattcacgaagcaagcggtgtttt

SEQ ID NO: 8612 - DNA, 454 bp, Gossypium hirsutum
  unsure (1)..(454): unsure at all n locations; Clone ID: LIB3120-037-P1-K1-C2
cccacgcgtncgccacgcgtncgcccacgcgtacggccacgcgtncgaccaaccatggaagcaacctcacttctttcttcatcttcttccttcaccctctctttccttccttcacctctttcttctccacatctccaccacaggtctcttttcttcaggggcatgtttccagttactgtaaacccgcagacatgttcaacagctgttgtccgcaaaaagttgagcttctgcacaaaggcagttcttggaggaaatgtgcatgtaacaggagttcctacttctgtccctgtaagagtagcacacgagcttcatcaagctgggcatcgatatttggatgttaggactcctgaagagttcagtgcagggcatgtccctggggccattaacatcccttacatgtacaaagttggaccaggaatggcaaaaaaccccagctttgtagctgaagtatcat

SEQ ID NO: 8613 - DNA, 404 bp, Gossypium hirsutum
  Clone ID: LIB3120-037-P1-K1-C3
cccacgcgtccggataagcaagacatccatgagttggggccaatagaagaggttgtttacaatttggtgaatcatgtttatgctgctccaaatcaaatggtcaatatacttgatatgcaagagagaacaagtgaagggaaaaactattatacctttgaatatgaactcacctctccaaactatgctagtgctttctttgcaacaatagctattggaaatgggagatattacacactggttgttggagcccttgaaagacggtggagaaggcttcgaaacaagctgaaaggggtggccgactccttcaaggtgcttgacatctgaagaccccccaacttattctttcattgtatataaaccccgaaacataccaattggttttgtgtttagttgagcatcatcat

SEQ ID NO: 8614 - DNA, 346 bp, Gossypium hirsutum
  Clone ID: LIB3120-037-P1-K1-C4
atttgggttgcaatgcacaagcaatggctttgatgactggtttacgtggctcttcacaagcgtcgttggaaggtagtctccaactcatcggccaaactcggttgaacgttgctagcaccaacaggttggctgtggctagacccggttttaccgttagagctcaacatgtccctgccgagcctgaaactggacgcatagctgtgctgggtcttgttgctgctggtttggctactggctcctttgttcaagctgaccttgctgatgcacgaagcatcaaagttgggccggcttcaccggcctccggtggattgcccggaacttttaattccgatgagccaagagacct

SEQ ID NO: 8615 - DNA, 455 bp, Gossypium hirsutum
  Clone ID: LIB3120-037-P1-K1-D1
cccacgcgtccggaaaataggagtgaaattaaatggaaattgtatcgagaaattctggtggtgaagactaagagagtcttagtggttataagaaggtggggaactgaaagtacatcaatgctgaggaaaaccttaaaacttgatatgcaagtattgataggtctaggccataaatctatgagataaattgagcttctaaatatatccatacaatgaaaaaccctaataaaagcttaaagcaatatccattattcatccttgttggaagaaattgtctttagagttaaattgcatatacccctccttcggtgtgtcaaaatagatgacctttcccaatgaacagaaagtatgtcaccgagtctagaattaaaaacctcatcaccaagttatttgcatccatcaactgattgcaatcactaaaaaaacttgaaggtgtgtaatggaacaaacataag

SEQ ID NO: 8616 - DNA, 443 bp, Gossypium hirsutum
  Clone ID: LIB3120-037-P1-K1-D2
gtgataacatgatgagaggtctaccaacttggactggtacaagggccctacacttcttgaggctcttgaccagatcaatgagcccaagaggccttcagacaagcctctccgtctaccacttcaggatgtgtacaagattggtggtattggaactgtcccagttggtcgtgttgaaactggtgtcttgaagcctggtatggttgtgacctttggtcctactggtctgaccactgaagttaagtctgttgagatgcaccatgaagctcttacggaggcgcttcctggtgataatgttgggttcaatgttaagaatgtcgctgttaaggatctcaagcgtggttatgttgcatccaactccaaggatgatcctgctaaggaggctgcaaacttcacttctcacgtcatcatcatgaaccatcctggacaaattggaaacggatatg

SEQ ID NO: 8617 - DNA, 269 bp, Gossypium hirsutum
  Clone ID: LIB3120-037-P1-K1-D3
ctatagcatacatactagtacccactactagcaatggcttcctcaatgatctcatcggctgcgcattggcactgcctctccggcacaggctaacatggtcgctcctttcaccggcctcaagtctgcctctgctttcccaggcaccaggaaggccaacaacgacattacttctctcgcaagcaatggcggcagagtgcaatgcatgcacgtgtggccttctactggaaagaagaagttcgagactctctcataccttcccgatcttacac

SEQ ID NO: 8618 - DNA, 448 bp, Gossypium hirsutum
  Clone ID: LIB3120-037-P1-K1-D4
gaagcagcagtgaactggagatgtgccttttttgcgcctttctgctgcatcatctccattggtgagtggggatctaggtgggctatcacaagctttaccgtcattacctaggcgtcgtggatctaatttggtgcctcgagcttcaaaggatgtcccgtacagttttcgttttccaccgatgactaagaaacccaaatggtggtggaggactttagcgtgccttccttatttaatgcctcttcacgagacgtggatgtatgcagaaacagcatatcatttacacccatttttagaagactttgagtttttgacctatccgtttctcggagccattggaagtttaccgagctggttcttaatggcatatttctttgttgcatatctaaggatagtgagaagaaaggatggccccatttttttcgatttcatgttgtgatgggcatggtat

SEQ ID NO: 8619 - DNA, 257 bp, Gossypium hirsutum
  Clone ID: LIB3120-037-P1-K1-D6
caaaacctcctttcctcccctttttcctcctttacaaggaaaacacaattaggggcgaaggagcaatcactgtcggtctttttaatcttatatacccactccccttctctctcctaactaactctttaaccaccaccttattctttttctcctcaattccctctaaactaacctctacccaccactcctctttctttctaccttcttttcttactaccttggccaccacttacatatttcctttcctgctccattct

SEQ ID NO: 8620 - DNA, 189 bp, Gossypium hirsutum
  Clone ID: LIB3120-037-P1-K1-E1
caacaatgaaaaccattgctttctcctctaaatcttctccccactatctctcttcttttacgttatttctctctttttctcatttcttttgcgtataattggtactcgctggattatatatacaaatatatatataattggaaacatttcattcggtaatttatatagctagccatgacatcgttttta

SEQ ID NO: 8621 - DNA, 437 bp, Gossypium hirsutum
  Clone ID: LIB3120-037-P1-K1-E2
cccacgcgtccgtttgttctttgttcctcttccgcatgtagaatatgatattctcagatgctagcatttgatgttggtgaattatgtgacctttggtggagagtgtgaggctctgcgctgagcaaatagatgcaggcagttggcttttagtagtaatgaagaacatacaggttgtggaaggctctccagttttatgcaggcttcagcattttcatgctttatgtgtatcaactccctatagagttctcaagtatgttacagtggatagctgattttgttggtctattcaaaatatgtgcaacatctgagtggactgaaatttgctcttctgtttctctcgtacttttttacatcatgggatgtaccacttttattactataagtctgattctgtttaaagattttagctgaacctttaaatgaaatgcaatacacgc

SEQ ID NO: 8622 - DNA, 92 bp, Gossypium hirsutum
  unsure (1)..(92): unsure at all n locations; Clone ID: LIB3120-037-P1-K1-E4
ccggccggaaaacccgggacgaccgacgcgtgcgccggaactatcctnctgggaacttgaaaggttaatatgaataatctttgaggtgtcca

SEQ ID NO: 8623 - DNA, 321 bp, Gossypium hirsutum
  Clone ID: LIB3120-037-P1-K1-E5
ctcaacggcgcctcgttattaaattaacaaccaagattgtgtcaaagcgggatggcgttcctgcatgaaccatggttagggaaaaacgggactaaggggactatcaaggctaacatacatgtcatgactgaacacaacatgtcgtcttcgacatagcggaaaaaatcagacctgacacatgtttgcaaagcgcggtgtgcaaagcttaggcagttccattaccaaacttaaagagggcaaattatggaccaagctatgcaacctcgttccagatattccataaacatttgggctgaatgatatggatttgaaagaccctgg

SEQ ID NO: 8624 - DNA, 451 bp, Gossypium hirsutum
  Clone ID: LIB3120-037-P1-K1-F1
tattctcttattctggaattattatttttggtggacttctagcacccactctggagcttgagctaggactggggggcacatcatatgcagatttcatccgtagtgtacatctgccaatgcagttgagtcaggttgatcctatagtggcatccttctctggaggagcagtaggggttatctcagccttgatggtagtcgaaataaacaatgttaaacagcaagagcataaacgatgcacgtattgtcttggaacaggatatcttgcttgtgctcgctgctcaagtaccggatcacttgttcttaccgaaccagtctcgacactaaatggtggagaccgtcctttatcaacccccaaaacggaaagatgttcaaactgtttgggatccggaaagggtatgtgccctacgtgtctttgaaccggaatggcaatggcaagcgaacacgacccacg

SEQ ID NO: 8625 - DNA, 395 bp, Gossypium hirsutum
  Clone ID: LIB3120-037-P1-K1-F2
cccacgcgtacggcacgcgtacgcttaccactcagattcctctcttacccaactcttcatgctctgcatcggctttcccttgtgccctcacttcccataacacaagggcccataaattcagaattcatgcaaacttatgggaaggagaaggagagctcaagcctaaaggaaagaagaaatttataactagagaagaagaaccagagcagtattggcaaacagcaggagaaagggaaggagagaatcccatgaagacccctcttccttacattataatatttggaatgtcaacaccttttgtaatcttagccattgcttttgccaatggctggattaccgttcctgttcgatcagttttgagaattgagagactgggtttttcaatgtcggtttac

SEQ ID NO: 8626 - DNA, 314 bp, Gossypium hirsutum
  Clone ID: LIB3120-037-P1-K1-F3
gaaaaaagagttaaatcattttgaatttgttttgagatttaaaaaaagggtgatgaacatggggtatgggtggatttctggccacctccttttgggatgagagtgaggattgttctggtggagatagagataaaatacgcgttcaaggaagaagattttaggaacaagagtgatgtgcttctgaagatgaaccctgttcataagaaaattcttgttcttatctataatggaaaaactgtgtgtgagttcctcaatcacgttcaatacattgatgagattttgacggataaaacttccctacttcctactcatcc

SEQ ID NO: 8627 - DNA, 441 bp, Gossypium hirsutum
  Clone ID: LIB3120-037-P1-K1-G1
ctccagtctcccaaccaaaccaaacaaccccttatccttttccatctctctcaaagaaatggctacatctcagctaacagcgtcgtcagtgacagcatcagctaggaacttggcttcattacaagggcttaggctgtccactgtcaaattctcttcctttggaacattaaagcctggggctttgaccagcacgtccttcaaacgtttggttgttaaagcggctaccgttgttgcccctaagtacacttcagttaagcccttgggtgacagggtgttggtgaagattaaagaaacagaggagaagactgagggtggcattttgcttccaacaactgctcaatcaaagcctcaaagaggtgaggtggttgctgttggtgaaaggaagacaattgggaataccaaattggaaagttctgtgaagactgttgctcacgtcatata

SEQ ID NO: 8628 - DNA, 97 bp, Gossypium hirsutum
  Clone ID: LIB3120-037-P1-K1-G3
gaaagctctttctatggcagtgaaaaatgaatttcgacttctaaaatgttgaagctggcggcgaaacggctgcttgggctaacgccaagggacatcc

SEQ ID NO: 8629 - DNA, 428 bp, Gossypium hirsutum
  Clone ID: LIB3120-037-P1-K1-G4
gcgcccacgcgtccgcacaattttgatgacccattaagcttttcatcaatggctttccttcaagaagcttgggtctctcttcaacccaagcttctttcatcttctcaacaccccacatcccttacctctctgaacctgtctttttcagccactttcccttgcctcaaactcttcaccactcgccctcttcatggcggggccaaaatgtcagcctgcgtcgcttccagctacaccaccgctttagccgatggagccaaggacaacaacacccttgatgccaccagcttcgacggtgaaaaagtcgagacaatctttttcgacccacaagttcttgaattcttaacaaccccaccattgatgttctcaaaaacgtcaggtttgggtgagatggtagctcctcgagcttattcgacacggcaaattttgac

SEQ ID NO: 8630 - DNA, 429 bp, Gossypium hirsutum
  Clone ID: LIB3120-037-P1-K1-G6
cagatattattggaagaagcttgaagacaaataccatttctcttgccaatttacagctgagctttttgcaatgaaccatacagatttcatcatcaccagtactttccaggaaattgcaggaagcaaggacactgttggtcaatacgagagccacactgctttcactcttcctggtctctaccgcgttgtacatggtatcgatgtgtttgatcccaaattcaacattgtttcccctggtgctgatatggagatatacttcccttacaccgaagagaagcggaggttgaagcattttcatcctgagatcgaagaccttctttacagcaaagttgagaatgaagaacacttatgtgtgctcaatgaccgcaacatgccaattctgttcacaatggcaaggcttgatcgtgtcaagaacttaaccggactcgt

SEQ ID NO: 8631 - DNA, 284 bp, Gossypium hirsutum
  Clone ID: LIB3120-037-P1-K1-H1
aacaaaccaagtaacctaaagccttaggcaccatggcaacctctgctatccaacaatctggggtcgttggccagaccgctttgaagcagtccaatgagctcttacgcaaagtcggagctttcgatggtggtcgtgttaccatgcgcagaactgtgaaaagtgcccctaccagcatctggtacggccctgaccgcccaaagtacttgggtccattctcagaccaaatcccatcatacctgacaggtgaattccctggtgactatgggtgggacactgctgggtta

SEQ ID NO: 8632 - DNA, 382 bp, Gossypium hirsutum
  Clone ID: LIB3120-037-P1-K1-H12
actgcgcgtctaggatcgtgccacgggtcaacgccaagggcaagctgaatacaccccgctggccacgacgttctgtccgggcgaattcaccggggccgaactgcgtcgcgggtatgagatcgtttgggggacaaccttggacaggcgcaactttcattgcaaggtgaccggggccgactgattcctggtgcccacgggtcgcaccaccggacgcgatggcggcaggcctgcccagctgtaccggcggggagacctgcagctgttgcacccgccgatgatgctcgcccggtgagatcgcggaagtgctggcggtcgcactataacacgttcttatttgaccgggctgggattgtctgaagcagaacacttcggtgatcgactt

SEQ ID NO: 8633 - DNA, 354 bp, Gossypium hirsutum
  Clone ID: LIB3120-037-P1-K1-H2
gctttgcttgcttttcccttggtgtcaagcaaatgatttgctgttgcaacaagatggatgccactacccctaaatactcgaaggctaggtatgatgaaatcgtgaaggaagtctcttcctacttgaagaaggttggatacaaccctgacaagattccatttgttcccatttctggttttgagggtgataacatgattgagaggtctaccaacttggactggtacaagggccctacacttcttgaggctcttgaccagatcaatgagcccaagaggccttcagacaagccttttcgtctaccactttaagatgtgtacaagattgggggtattggaactgtcccggttggtcgtg

SEQ ID NO: 8634 - DNA, 420 bp, Gossypium hirsutum
  Clone ID: LIB3120-037-P1-K1-H3
cccacgcgtccgccacgcgtgcgaaaatcatcaacctcaagctttagcagatggtttctgggtctcctcaattcaagaactaataaagtatggcaaccatttcagctacctcatcaatcaccattgcagcttctctttcatacaagccatcatcactcaagctcacctccccaattgccattgggtggccaacaatggcgaagaaagggaaagtgatgcgttctatgaaggaggaggaaaagaatagctctagcgttggcatgagtgctgcatcgctgttagctgcagcagtcatgtcaagctcaccagctatggctctggtggatgagagaatgttcaccgaaggaactggactttcctttgggttgagcaacaaccttcttgggtggatcttgtttggtgtattcggcttgatatggg

SEQ ID NO: 8635 - DNA, 150 bp, Gossypium hirsutum
  unsure (1)..(150): unsure at all n locations; Clone ID: LIB3120-037-P1-K1-H4
cataatcagcngcttccactggcctgtacattacatggttctttgttccccatcattcctgggccagggcgtgaagttcttcagtcccacccctgaaatacctggaactggccgggtttccattacgaaaaccaccaagactgttccttc

SEQ ID NO: 8636 - DNA, 288 bp, Gossypium hirsutum
  Clone ID: LIB3120-037-P1-K1-H7
cccttaagaactgcaagtggacctcaatcttctgctaggaaagagccaaacgggggatatggggggagctatacaaagaaaaagattccttctatggaggattttccaggatatcatgaacctgtgtttgacatgcccagtatgtcaactaattttcatagctttgttggtcgagctactagccctcctgcttactcgaatgttggttctaatgatactagttgccaggtgaattcaacttctagatctgagaaacttgactcatttgatgatgtgtggctcactgga

SEQ ID NO: 8637 - DNA, 252 bp, Gossypium hirsutum
  Clone ID: LIB3120-038-P1-K1-A4
tcgggagtccaacaccaaaatgtcagctcttcttttgatttgcatgcttttcatttcttcagtgacaccaattcttgggtgtggttcatgtgggaaagcacacaagcatcgaaagcctaagggaaagtcccctaaaggtcccatcactttgccttcccttgtgaaacctccaatcaagttgccaccggttgttccttcaatagttaagccacccattgacctccctccggttacggtcccttcaattaacct

SEQ ID NO: 8638 - DNA, 73 bp, Gossypium hirsutum
  Clone ID: LIB3120-038-P1-K1-A5
tcgcccacgcgtccggtattcttgtaagaatatataaatgtgcactatattctcaaaaatattaggggataat

SEQ ID NO: 8639 - DNA, 287 bp, Gossypium hirsutum
  Clone ID: LIB3120-038-P1-K1-A7
gagatgaggaaaatcatgggtgccaaagttcttttcttctttgctttgctttccttttcaggtgtctcggcatttgcacagggtgaggaagaccaaggtcttgttatgaacttttacaaggattcttgttctcaggctgaagacattatcaaggagcacgtttagctactgaacaagcgacacataaacactgctttttcttggctgagaaacatttttcatgactgtgctgtccagtcatgtgatgcttcactgctgcttgacttcacaagaaggagcttgtctga

SEQ ID NO: 8640 - DNA, 97 bp, Gossypium hirsutum
  Clone ID: LIB3120-038-P1-K1-B1
actgctcacactaacacaggtgttgaatcgtacgacatcaagagggcataatgctatatcggcaaggatacggcctactacgacataacctgattag

SEQ ID NO: 8641 - DNA, 374 bp, Gossypium hirsutum
  Clone ID: LIB3120-038-P1-K1-B2
tcgtccacgtcgtccgctagatcgcgagcgccgcccttttttttttttttttagatattaatttgggttagtttttttgtttttttggttattgtttttttttgtttttttattttttttttttttatttttttttgttattttatttttttttttttttttttttttgtttatattttttttatttttttttttttttttttttttttttttttttttttttttttgtttttatttttttttttatttttttttttttttttttttttttttttttttttttttttttttttattttttttttttattttttttttttttttttttttttttttatttctttttgttttttttttatattttttttttttctt

SEQ ID NO: 8642 - DNA, 448 bp, Gossypium hirsutum
  Clone ID: LIB3120-038-P1-K1-B4
gcgctcaaattcagataacaatttcacagttgttttcttcactctctctctcagccatggctgcggccatgttcaccgtctccggcgctgccgccgcctaccgagctctgggagtgtcagtcccaacctcagctttcatggggaagaaagtgagctcgagattcaacaacaccaggctggttccttcgggaagttttaaggtgatggcggccgaaatagagatagacgaagagactcagaccgaataggaccgatggaaagggttggcttacgatatttcggacgaccaacaagacattactcgagggaaagggatggtggattccttgttccaagctcccatgaatgatggaactcactatgctggcatgaagtcctatggatacatcagtcaaggtcctaatacgttcaatttggacatcatcattgatggtatttacatcggttc

SEQ ID NO: 8643 - DNA, 213 bp, Gossypium hirsutum
  Clone ID: LIB3120-038-P1-K1-B5
ttcagctataacttactctactaggacatactactatgcttggctatgtcaatcatataaggggataccattatcactgactgttcatctcacactaacatggtcgttgcttctagcggcatcaagtttgtatgtgcttttccagtcaacaggaaggccaacatcgtcattacttctgtcgcaagcaaagtctgcagtatgcaatgcatgcat

SEQ ID NO: 8644 - DNA, 342 bp, Gossypium hirsutum
  Clone ID: LIB3120-038-P1-K1-C2
cccacgcgttcgggaaaaagaaacccccccccctctcctcttgaaaacaggcaatggcgtggattcaatattcatctccttgggtcagaacaacctcatttcctactttatcagtgcccatcagagcttcttcacgtctgtctctgccaaccactttcagaaaatgggtcgcacattttagagtcaagtccttgaactgggtcttctctggtgctcttgctcttacattatctgcagcaggggttgggttcgcggaggcaaaagtcggtgttaacaagccggaattgcttcctagagagttcactccagtgattgatgtatcaggcttttctctttgatggc

SEQ ID NO: 8645 - DNA, 343 bp, Gossypium hirsutum
  Clone ID: LIB3120-038-P1-K1-C5
tcgtccacgcgtccgcaggcagtcttttttctgaaaactgaaaatggcttccaccgtcgttctgggcactttcacggtcagcagcacctcattcgtccgccgtcagccagtgaggagcctatccttcctcccaaactttaagcaggctcttttcgggctaaaaccccaaagaggtgggcgtcttacaatggcagtatacaaagtaacgctgctcactccggaaggacctcaagagtttgagtgcccagatgacttgaagatcctggacgcggcggatgagaacgggattgatcttccgtactcgtgcagggctggtgcttgctcttcatgtgcttggagagtc

SEQ ID NO: 8646 - DNA, 228 bp, Gossypium hirsutum
  Clone ID: LIB3120-038-P1-K1-D2
gggaaacaagtcctacgacgaagccattgatgctctcaagaaacttctcagtgagaaaggagaactgaaagctgaagcagctgcaagggtagatcaaataacagcagagttaaacacagcatcagctgatggcaaaccatctgactcttctgttgagagactgaaagaaggcttcgtttactttaagaaagaaaaatatgaaaagaatcctgctctgtatggtgagct

SEQ ID NO: 8647 - DNA, 261 bp, Gossypium hirsutum
  Clone ID: LIB3120-038-P1-K1-E5
gctgtttacaagataccatgtcctacctcattttcagtctataaatctcctccagtttcggggccacattcttcgtcagttcgagtctattagaaaccacatacaccttcagttccagtattcatgaaaccatgttcttcctcagtttcagtctataaatctccttcagttccgtaaccacattcttcttcagattcagtccataatcctccttcaattccgagatacaagttaagagtcccttctttggttccaatctac

SEQ ID NO: 8648 - DNA, 286 bp, Gossypium hirsutum
  Clone ID: LIB3120-038-P1-K1-E6
agcggccataaatcctgctccgacttacccatagtagcttgaccttatttgataggtggtgaccgccgcatcattcggcatggcggccaccgtcattttggttccacgtgtccacactgccgttaggatctccctctgctccttcttgccgtctctcccttcttgcgttttcagctctgctttatcctctatcgttaagcttagtccagattcccgtaggatttctcagctgctgacaatagccttatatgagtccgctgtttatgctgtggagtttcttactgac

SEQ ID NO: 8649 - DNA, 157 bp, Gossypium hirsutum
  Clone ID: LIB3120-039-P1-K1-A1
cggaactcacgttaaatctacacatactatatgcactggctacccttatgacactcttacccaagggcccagaaacgaaaacgagcactttaccttctcgactgggatgcaactcggtttagcacgcgaacctgcaactcttagaaatggtcagagc

SEQ ID NO: 8650 - DNA, 264 bp, Gossypium hirsutum
  Clone ID: LIB3120-039-P1-K1-A2
gacaggcgttcgatcataaacctaagagggcttccagtttctaagtcattcacatctttcttagtggggttgttaattccttgcattaatgctgcacccttgggtccagaatccgatagagtaatcaagctgccgaaccagccggcgacgccatcgatatcacagttttcggggtatgtcacagtgaatgaagaacatggaagggcacttttctactggttctttgaagcacagtctgaggcatctaaaaaacctctcctgctt

SEQ ID NO: 8651 - DNA, 335 bp, Gossypium hirsutum
  Clone ID: LIB3120-039-P1-K1-A3
gggagctcaacctacattacaacactgttctaagaggggaagggactacgatagggcaccagcggtaggcaaatggaagttgcgcgtattcttaaatcgcctatgatgaaactcggtttagcaggcgtactgaaaaatcttttaactttcgagatgagcaaacttacaaatgacagaatacctgaaaggtaccctgttcttgatgttattcttcgtgcactagaagccctctgggtgatagatgtatgttctcaggaaatctgctcaaataaagaaattttccaactagtctgtgacttgatcaaatttcctgataaagttgagggctctacctc

SEQ ID NO: 8652 - DNA, 265 bp, Gossypium hirsutum
  Clone ID: LIB3120-039-P1-K1-A4
aggcgtccggtcaaaatgctagcttgcttgtggtagaagagcgcgtcaagcatcttcacgtaaggagtgtatggctactggataaacccaatcttgatacacgctcaaagcatcttggtcatctgggcttgccaagttatcttgatgggagctgttgagggttaccgtattgctggcgggcctctcggtgaggtaaccgaccctttgtacccaggtggcagcttctacccattgggtcttgctgacgacccacaggcattcgctg

SEQ ID NO: 8653 - DNA, 192 bp, Gossypium hirsutum
  Clone ID: LIB3120-039-P1-K1-A5
tggaaaacacgttaaatccacagcttattgaaaagagtgttggacttctattgtccatgatagaaagtcagaaggaagttgagcatattcttctctcgcctttgatgaaacttggctaagcaagcgtactgggtaatcttttaactttggagatgagcaaacttacaaatgacagattacctgacaggtacc

SEQ ID NO: 8654 - DNA, 324 bp, Gossypium hirsutum
  Clone ID: LIB3120-039-P1-K1-A6
cccaggcgtccggtcaaattcggtgaggccgtgtggttcaaggccggatctcagatcttcagggaaggtgggcttgactacttgggaaacccaagcttgatacacgctcaaagcatcttggccatctgggcttgccaagttatcttgatgggagctgttgagggttaccgtattgctggcgggcctctcggtgaggtaaccgaccccttgtacccaggtggcagcttcgacccattgggtcttgctgacgacccagaggcattcgttgagcttaaggtgaaggagatcaagaccggcagatgggctatgttctccatgttggga

SEQ ID NO: 8655 - DNA, 202 bp, Gossypium hirsutum
  Clone ID: LIB3120-039-P1-K1-A7
aattcccggtcgcccgcgcgtccgcttctcttcaacttcattacaacactcttctaagaagagaagggaaaaagggaaggtgcctgcgttccgtcattcccgattccatggcttgtaaaatctcaaattccctgttcctttgcttgggtcctagtcaaaggccaattaggagccaaacaattgctattcattcttctactgc

SEQ ID NO: 8656 - DNA, 158 bp, Gossypium hirsutum
  Clone ID: LIB3120-039-P1-K1-A8
gcgtccgacacacgcgcccgaactgagtgctggcttgcttgcgggagttcagtgcggcgagcgcaagaacgtgcgtagtatatggtgtcagcatttgctctttgtcaatccatccaaaagcattcaacctccaggtgttatagcagctatgtagacat

SEQ ID NO: 8657 - DNA, 317 bp, Gossypium hirsutum
  Clone ID: LIB3120-039-P1-K1-B1
cgcgtccgcggcgttcttaattaagacattgtcaagctcgtcgacaccttccccggccaatccatccttgggttcgatgccttgagggctaaggcataactagtactcatgagatcgattctgatactattttggaccacaaaggcttggttagatttaatatcacttttaggctatataggtggcataattattggcaaatgaaaactttcgacatacatttacaagaaagatactgatatacgcgtttttctccttaatttaaagtttcagggttatgcactttgccttttcaggttgaggattttttttaattt

SEQ ID NO: 8658 - DNA, 215 bp, Gossypium hirsutum
  Clone ID: LIB3120-039-P1-K1-B2
aaaccttaccttatctagggttagggttttgctccttctgagtttctctcagtaccaaaaatgtccccaaattgaagatgatgcaacaaccagcacaagctatggtaccaccaccaatggctccacagacccaacagtaccaatatcagcaaccacctccggctccggttcctaaggcacaacaaccttacatgatgatgaacatgatgcagccg

SEQ ID NO: 8659 - DNA, 361 bp, Gossypium hirsutum
  Clone ID: LIB3120-039-P1-K1-B3
agaaggggaagaatatttatcaatcaacgcatgcgaaacacaaaccgttccatcaacttctgagcgctgattctgctctgtgtcgggaccatcacctctgctgaagctttcttacaagaacgctctgaagatggatgggaaagacgttgggtaaaatctgactggaagaaagatgagaacatggctggggaatggaattacacttctgaacactggaatggagatcctaatgacaaaggtatccacactagtgaagactacagcgtttatgctatttcagctgagttcccaaacgttaacaacaagggcaagactctggtcttccaattttctgtgaagcacgagcagaagtttgactggg

SEQ ID NO: 8660 - DNA, 236 bp, Gossypium hirsutum
  Clone ID: LIB3120-039-P1-K1-B4
gcgtccggatcttcactcaccattgttccaagtttgtttgtaaaccaagctagaaccagcatccaacatcgcctcattagcagcctacagcgctgccgcctcccttggcgtctctgaaatgctcggtaaccctctgaatttcagtggtggagctaggtcatcggctccaacaccatccaactaatcctttttcaagaccgttgctcttttctccaagaagaaggccgttcctccaa

SEQ ID NO: 8661 - DNA, 170 bp, Gossypium hirsutum
  Clone ID: LIB3120-039-P1-K1-B5
aggcgttcttgttttaaaacatgttaaccatgtcgactccttacccggccaatccatcgattgcttcggtgccttgagggctcgggtttacgatgacgaagtgaggaaatggatcagtgaggtcggagtcgcatgcgtagggaagaagttagtgaactcatgggaaggac

SEQ ID NO: 8662 - DNA, 148 bp, Gossypium hirsutum
  Clone ID: LIB3120-039-P1-K1-B6
gtcggattcccggtcgccgacgcgtccgaaaacctacctatatgtaggtggaggtgtcgcttccatccactcttctcttcaatacaaaaaccgtcccaaacttgaatatgagccactaccctctattacatgtcgtcccaccccaatg

SEQ ID NO: 8663 - DNA, 184 bp, Gossypium hirsutum
  Clone ID: LIB3120-039-P1-K1-B7
cgtccgagacggggaagaataataatcaatcatcgatgtggtcattgaaaccgatttaaaacactttgcggcggaggttttggacacggttgaggattttcaaatgaagtgagcctttaaaactctgaaacgctatcgggaaagggtttgcctgtttaatgatgacgtacagggaactgctgga

SEQ ID NO: 8664 - DNA, 279 bp, Gossypium hirsutum
  Clone ID: LIB3120-039-P1-K1-B8
ggtgcttaccgacagctcttccacccagaacaactcatcagcggcaaggaagacgcgctaacggctttgcccgtggtcactacaccattggcaaggagattgtcgacctctgtttggaccgcatcaggaaacttgctgataactgcactggtcttcaaggattccttgttttcaacgctgttggtggaggtaccgcatcaggtcttggttctctccttttggagcgattgccatgcgattatggcaagaaatccacgttgggttttactgtctacccat

SEQ ID NO: 8665 - DNA, 248 bp, Gossypium hirsutum
  Clone ID: LIB3120-039-P1-K1-C1
agaaggcgaagaatattcatcaattatcgatgagttcattgaagcgatcttaacacgttagcgtgaggctattgtacagtttgaggattctcaaatgaagtgggcctttacaactctgaaacgctatcgggaaaggtctcgcatttttaatgatgacgtacacggaactgctggagtcgcacttgctggattgttaggaactgtaagagcacaacgtccatctttggctgattatccaaaccacaaga

SEQ ID NO: 8666 - DNA, 167 bp, Gossypium hirsutum
  Clone ID: LIB3120-039-P1-K1-C2
cccacgcacccgcagatgcttcacacgcaacacctaatcatctgcatggaaaacacgataacggcggttcccagagagaactgcactattggcatgcagataccccaccacccattgaacctgcgcttggaacctcaatgatgacagaactgtactagagggaatcc

SEQ ID NO: 8667 - DNA, 298 bp, Gossypium hirsutum
  unsure (1)..(298): unsure at all n locations; Clone ID: LIB3120-039-P1-K1-C3
gaagtttgattgagctctctcatggcgttttctacccgtctcctctacaaatctcgccagctgtatgttagtcaagctgttctgcggcaggaggttgccattcctgtccgcttttactctaaagaggcttctccccctggtttaaaaggagatgagatattgaaaaatatctttgtggaggttaagaacaaattcgagacagcattgngaatatttaggagggagaaaatcaccattgacccagttgaccaagttgctgtttctcagtatgcaaatgttttaaagactgttagaaaaa

SEQ ID NO: 8668 - DNA, 103 bp, Gossypium hirsutum
  Clone ID: LIB3120-039-P1-K1-C4
cttgctgtcccatctcataaaatgaaggaactacttctccatatgcagcctatctaaaactacgtaggttattcaccgaggggggctgcatttcaacaactac

SEQ ID NO: 8669 - DNA, 123 bp, Gossypium hirsutum
  Clone ID: LIB3120-039-P1-K1-C5
gcgtccgaagtttgattgagctctctcatggcgttttttacccgtctcctctacaaaatctccccccgtcgatgtccttaaacctgttgtgcggcacctcgaagccattcctgctcgcattca

SEQ ID NO: 8670 - DNA, 228 bp, Gossypium hirsutum
  Clone ID: LIB3120-039-P1-K1-C6
ctcctgtcccatctgatacaatgaaggaactatcttctccatatgcagcctctctaaaactagcgctttttctttttgtaatttcaggatacaataaaagcgagtccaccagaaaataagtcaatgaagagagcgagtggtgtcggtgtcacgaccaccactttattctatgtactgtgtggcattgttggatacgcagcattcggaaacgatgcaccaggaaatttc

SEQ ID NO: 8671 - DNA, 208 bp, Gossypium hirsutum
  Clone ID: LIB3120-039-P1-K1-C7
atccgcatgcagcccggaggcgtaaacagctatttaaacacttggaacagcttgactgctggtggtgctaaagactaggagatgtggggtgctacatataacgtggaagggccaacagctgttgcaggcaccgagtctcctatgctcagtatctaaatccatgtgagaaatggtagtaactctgtttggcactatactgactatatcg

SEQ ID NO: 8672 - DNA, 257 bp, Gossypium hirsutum
  Clone ID: LIB3120-039-P1-K1-C8
gccgcctaccacaggcttcgaggcgttttttttgatgatcttgattcaatttgccgcctatgcgtcagtgccgctaccgatctgtagctttaaaatgaattgtacaatatagtttgtgttgagaacgcgcacactaaagcttgcacgcgcagtgttgaccatgtttcttcatggacgtcaaatgccatggctgactcaacataacagcagggcttagccactctcaaacagtgatggtatgtgtgaattgtcagact

SEQ ID NO: 8673 - DNA, 281 bp, Gossypium hirsutum
  Clone ID: LIB3120-039-P1-K1-D1
acccgtactgtgcccggtggtgaagacaattagttggtcaactgttaacgcttgtaaaatggtgggggtcaggactagagaagcagttgcagcacatcctttcatttacgacacatatgccgtgcttcacggcaattcacctaaacatcctaaccgacctcctcttcttctgttgctggccgccgatcgcgcgatccttgccggataattggggatctatccggttaccttccgacggatttacaaacgccgttgagaacgaaggcgtctccgctcgattc

SEQ ID NO: 8674 - DNA, 292 bp, Gossypium hirsutum
  Clone ID: LIB3120-039-P1-K1-D2
gtctcagatctgaggtgccgttgctgatttgttcatcagcttgattgaatctgacgcctatggtcgtcgccggcaccgaactgttgctttaaaaagaaatggagaatttaatttctcttgtgaacaagattcaaagagcttgcaccgctcttggtgaccatggagaagcacgtgcattgccgactctttgggactcattacctgcgattgccgtcgtcggcggtcagagttcagggaaatcttcggcgctcgaaggcattgtcggcaaagatttttaccccggggatcagga

SEQ ID NO: 8675 - DNA, 412 bp, Gossypium hirsutum
  Clone ID: LIB3120-039-P1-K1-D3
cccacgcgtccgcccacgcgtccgtttagctatagcatacactactagtacccactactagcggtggcttcctcaatgatctgatcggctaccattgccactgcctctccggcacaggctaacatggtcgctcctttcaccggcctcaagtctgcctctgctttcccagtcaccaggaaggccaacaacgacattacttctctcgcaagcaatggcggcagagtgcaatgcatgcaggtgtggcctcctactggaaagaagaagttcgagactttttcatacctccccgatcttacacccgtgcagttggctaaggaaggggattaccttcttcgttcaaaatgggttccttgcttggaattcgaattaaaggagggattcgggcaccgtaaatacttgagcctacccacgt

SEQ ID NO: 8676 - DNA, 361 bp, Gossypium hirsutum
  Clone ID: LIB3120-039-P1-K1-D4
cccacgcgtccgcccacactctcaaattcagttaacaatttcacagttgttttcttcagtctgtctctcagccatggctgcagccatctccaccgtcgctgccgctgccgccgccaaccgagctctgggagtgtcagtcccaacctcagctttcatggggaagaaagtgagctcaagattcaacagcaccaggcaggttccttcgggaagttttaaggtgatggcggcggaaaaagagatagacgaagagacacagaccgaaaaggaccgatggaaagggttggcttacgatatttcggacgaccaacaggacattactcgagggaaagggatggtggattccttggtccaagctcccatg

SEQ ID NO: 8677 - DNA, 295 bp, Gossypium hirsutum
  Clone ID: LIB3120-039-P1-K1-D5
accagtcgtgcgcgcacgcgtacgattagctttagcaaacactactagaacccaatactagcggtggctagaccaatgagggatcgctaccatcgccactgcctatccgcacaggctaacatgggcggctccttacaccgacctaaagtctgcctctgctttcccagtcaccaggaaggccaacaacgacattacttctcttgaatgcaatggctgaagagtgcaatgcatgcaggtgtagcctcctactggaaagaagaagttcgagactctcttatacctacccgatcttaca

SEQ ID NO: 8678 - DNA, 126 bp, Gossypium hirsutum
  Clone ID: LIB3120-039-P1-K1-D6
cccacgcgtccgcccacactctcaaattcagttaacaatctcacaggtgttttcttcattctgtttctcagccatggctgcagccatatacaccgtcgttgcagctgccgcctacaaccgtgctct

SEQ ID NO: 8679 - DNA, 131 bp, Gossypium hirsutum
  Clone ID: LIB3120-039-P1-K1-D7
cccacgcgtccgcccacgcgtccgtttagctataacatacactactagtacccaatactaggggtggctaccataaacatgagaactgttacaatgaccactacactatacaaacattctaacaatgctac

SEQ ID NO: 8680 - DNA, 203 bp, Gossypium hirsutum
  Clone ID: LIB3120-039-P1-K1-D8
cccacgcgtccgtccacactctcaaattcagttaacaatttcacagtagatttcttcagtgtgtctttcagccatggctgcagccatctccaccgtcgttgccgttgccgcctccaaccgatctctgggagtgtcagtcccaacctcacttttaatggggaagaaagtgagctcaggattcaacagcaccaggcaggttcctt

SEQ ID NO: 8681 - DNA, 234 bp, Gossypium hirsutum
  Clone ID: LIB3120-039-P1-K1-E1
gtccgcacaggctctcaaaaattgtttccagttcatctaattttgcaacaccatatctagtgtgcttcaaagctaccatcatcatgatgtctcttctgttgacaagacccatttccagacatttaaagggttgaaattgaataaacccactttatcctacgctgctggtagatgccaaaaatccaggcttatatgtaaagccagggaggctgttgctcaagttgaagtggtaac

SEQ ID NO: 8682 - DNA, 296 bp, Gossypium hirsutum
  Clone ID: LIB3120-039-P1-K1-E2
cccaggtggaactatgatggatcaagtactgtacaagcacccggtgaagatagtgaagtatgttataccctcaagcaatgtttaaggaccctttccgaggaggtaacaatatcttggtaatttgtgattcatacacaccagctggtgagcctattcccacaaacaagcgccaccgtgccgctgagattttcagtaacaagaaggtggtcgatgaagtaccatggtttggttttgagcatgagtacactttactttaacaaaatgtgaaatggccttttggatggcctgttggaggc

SEQ ID NO: 8683 - DNA, 251 bp, Gossypium hirsutum
  Clone ID: LIB3120-039-P1-K1-E3
cgtccgaattcccggtcggcgacgcgtccgccatatcgtaggtttcctcgtttgatccaaatcttatccgtcgtgaatggcatccttatcgtgcggattagcggactgggacacaggtagagtcaaaccagcaacatcaagtgtatctcttgtcgtaacgattataccctctagcttaaccacatccttcaccggatgaaaccattaccgcgctgtttctaataggtctgagattgccacgctcaggcggc

SEQ ID NO: 8684 - DNA, 385 bp, Gossypium hirsutum
  Clone ID: LIB3120-039-P1-K1-E4
actaggcgtacccatacgcttccgctagtgttttacagaacaaatgttgacttataattataagcctaatagagctactttgagtattttgctgaatggtctgtgtaaaaatgggaaaactgaggatgcgcttaagatgtttgatgaaatgactctgaggggtatagagccaaataggtgtatatataccataatcatttcgggtttgtgtcgagcagatagggctgatgatgcttgtaggctgttaggtaggatgaaagatagtgggtgctcccctgattttggtgcttataaagctttgcttaatggggttttgtgagtggggtttggcttgaattaaactttttgcccttttggcagttttttttaaaatgggaccggtttt

SEQ ID NO: 8685 - DNA, 123 bp, Gossypium hirsutum
  Clone ID: LIB3120-039-P1-K1-E5
gcgtccgccacacggagtactcctcgttcgatccacattttagccgttgagaatggcccaattatctcggtggacaacggtatggcgcaaaggcagactaaaaccattctcatggcgggattc

SEQ ID NO: 8686 - DNA, 206 bp, Gossypium hirsutum
  Clone ID: LIB3120-039-P1-K1-E6
cgcgtccgcccacgcgtccgtccacacgatcgctacctgtgtactcccacattctgaattctatttctaagccgatttgaagcacttggatgagctcgcttacaagatcggtaccaaatgtggtggtcgcgtttccattcaaaaaaccgataaaagtgctctgccaggatatggcctaactggcctgtcacgacatgtttcatgtt

SEQ ID NO: 8687 - DNA, 196 bp, Gossypium hirsutum
  Clone ID: LIB3120-039-P1-K1-E7
tttggctctttgtttttgttttttggtttagagagatggatcatgcagcagatgctcatagcgctgatttgatgacaataacacgtttcgtgttgaacgagcaatccaagtatcctgagtctcgtggggatttcaccatcttgcttaatcacatcgttcttggttgcaagtttgcttgctctgctgctaacaaggc

SEQ ID NO: 8688 - DNA, 167 bp, Gossypium hirsutum
  Clone ID: LIB3120-039-P1-K1-E8
actagtcgtaaccatacgcttcggctaatgtttcatagcaccaccacgcactcacaaccaatcgcagatcatcattattatgggcgtctctgtgccaggtttcaaacatgaagcctacccagcaggtggtgtgcaaggctcaaaagcaggaagatgatggaagcctt

SEQ ID NO: 8689 - DNA, 274 bp, Gossypium hirsutum
  Clone ID: LIB3120-039-P1-K1-F1
tttggctctttgtttttgttttttggtttagagagatggatcatgcagcagatgctcatagggctgatttgatgacaatagacacgtttcgtgttgaacgagcaatccaagtatcctgagtctcgtggggatttcaccatcttgcttaatcacatcgttcttggttgcaagtttgtttgctctgctgctaacaaggctggtcttgccaaactcatcggactcgctggggagactaatgttcagggtgaagaacaaaagaaattggatgtgcttt

SEQ ID NO: 8690 - DNA, 270 bp, Gossypium hirsutum
  Clone ID: LIB3120-039-P1-K1-F2
ggagttcactcatcatacggtcgatgatgtacttgtaaaacactaatacgcactcacaatcaaatgcttatcataattactggggccgtcgatcctcaagttcaggatattcaaatcccgcctatggatactcgggttcggattctatctccgatccggacggaaccggtaaaacattgttgacagatgggtcatggttagctggcttggccatgggagattcaccgagaacaacttcctaggattcttacaatatgcaccaactttttc

SEQ ID NO: 8691 - DNA, 361 bp, Gossypium hirsutum
  Clone ID: LIB3120-039-P1-K1-F3
ttaaatattgtcaatatcaaaatgtgtgaacctaaacattatgcaacacagactccctcagagaaagatgttaaagcaccgaacataattgagagaggtaaggaagaaattgaggcactattccaccatgataaaaaaccacaccatcacaaagaaacacatgggaggagcgatgatatcgacgagaacaccgctgttgatgatgttaaaggccctaacgtgtttgaaagagtgaaagaagaagtggaggccattgttggagcaattcatcccaagaaagaatctaaaggaccgtgagtcaccttcgtcgatgcaaggtgggtttagaattctgattcgaggatcatatcgaataatttag

SEQ ID NO: 8692 - DNA, 226 bp, Gossypium hirsutum
  Clone ID: LIB3120-039-P1-K1-F4
cccacgcgtccgaccactcgtacgtcatacataataaagaagcctaccttgcttatccatttgccatcattcatgctcacgtggattccacaagcccttttacaattgcagcctatattggccaccttaatcgccacataaccttctacataacatactgcattcgagaaccaggcgttggacctgtcgtggtacctaatcatgttactccgcatttgcctccact

SEQ ID NO: 8693 - DNA, 240 bp, Gossypium hirsutum
  Clone ID: LIB3120-039-P1-K1-F5
ataaatattgtcaatatcaaatggtgtgattttactcatatagcacacaaactctctcatagatagattttaaagcaccgaacataatttatagaggtaaggaataaattctatgctctcatccaccatgatatataaccacacgatcacaaataaacacatgggaggagcgatgatatcgactagaacacctatgatgatgatgtgaaaagccctaacgagtttgatagaatgaaagaa

SEQ ID NO: 8694 - DNA, 220 bp, Gossypium hirsutum
  Clone ID: LIB3120-039-P1-K1-F6
gtcggattccgggtcgcggacgcgtccgcccgcacctctcttcggtggattatcttattttaaaacacgcttactttggtaaaactgatggtgagggtggttttgacgtgcggtgcggtggcgaccgcaaacatattggagagttcaagttcaacagtcggcgggaagccgtactacttcttgtcagtgttgacaagaaccgccgacggagacgaaggcg

SEQ ID NO: 8695 - DNA, 210 bp, Gossypium hirsutum
  Clone ID: LIB3120-039-P1-K1-F7
ttaaatattgtcaatatcaaaactgtgtgaacctaaacattatgcaacacacactccctcatggaaagatgttacaagcacggagcataattgagagaggtaaggaacaaattgacgctctattccaccatggtaaaaaaccacaccatcacaaagggacacatggcacgagcgatcatatcgcctacgaacaccgcttgctgatgatgt

SEQ ID NO: 8696 - DNA, 237 bp, Gossypium hirsutum
  Clone ID: LIB3120-039-P1-K1-F8
cccacgcgtccgaccactcgtacggcatacataataaagaagcctatcttgcttatccatttgcaagaagacaacaacccgggaacattaaccatgcagtcggatcgtttcttcaatgccctgaagggtcatggagctctctgtcgccttgttattctaccctttgagagccatggttattctggtcgagaaagcatcatgcatgtcctgtgggaaactgataaatggctttaaaag

SEQ ID NO: 8697 - DNA, 83 bp, Gossypium hirsutum
  Clone ID: LIB3120-039-P1-K1-G2
gcacgctttgttttttttttaaagaaacaaagcatgcttcccttgacttcactgtacagttttttattttatgttagcggacg

SEQ ID NO: 8698 - DNA, 169 bp, Gossypium hirsutum
  Clone ID: LIB3120-039-P1-K1-G3
cccacgcgtccgcttgaaaactccaaccaaaattccctatcactttgcgtattttttgatccggacaattttccttcttggaggggctttttactattaacactcaccccttctttaactgtcttcaacatttcaagtttagggctttataccttgggcctttaaacat

SEQ ID NO: 8699 - DNA, 175 bp, Gossypium hirsutum
  Clone ID: LIB3120-039-P1-K1-G4
ctaacacaaaaaacactactaagacccaagcctgcgccgcagtctttacggccatgtacatgagaaacacagttccttactggttcttaccataagataaaccgaaacatttcattataaaccagatacattctacatgtgactagctcattcaaagttgaagcaaagaaaggag

SEQ ID NO: 8700 - DNA, 368 bp, Gossypium hirsutum
  Clone ID: LIB3120-039-P1-K1-G5
cccacgcgtccgcttgaaaactccaaccaaaattccctttcactttgcgtattttttggtctgatctattttcttctttcgacttgtttttagtagtaacattttctctttgttttagtttctgcaaatttcaagtttagggcttcaactttgagcttaaacacactcagcaaagctggataggtacagagccgatcgctatggcgatggcaacaacaccaccaccaacaacaaccaagactcttactataataacaatattcacgaccgttactatagaggacccttgcgttttttcgacgctttttctatgagccggttttacagcattaacacccgccccaatactaattttaaccgttaagttt

SEQ ID NO: 8701 - DNA, 120 bp, Gossypium hirsutum
  Clone ID: LIB3120-039-P1-K1-G6
acccactcgtccgctcactcaaacaaaaaaactctcactctactttaccactctcaaatctatcttcctccacagagacaccactatatcctttgccccaccttctataccttcataaat

SEQ ID NO: 8702 - DNA, 461 bp, Gossypium hirsutum
  Clone ID: LIB3120-039-P1-K1-G7
gcgtccgcccacgcttcctcttgaaaactccaaccaaatttccctttcactttgcgtatattttgtactggaggtattttattcattagacttgcttctagaaataacattaaactttttgttttaatttttgcaaacttaaaaaataaggctaaaatctagagcttaaacacaattaacaaagttttaaagaaacaaaacccatagatatggctaaggcaacaactttatcaccaacaaaaaactaataatttttactataataatctaataatcacctaccctcatctaataaatagaactttttgaattttttaaagataacttatatctaattaagcattttttaaacaagtaattaaaaactcgactaacccaaaaacttaatatttaaaacgatttataatcattaatttccctaataaatttccatacttaaaaaatcatatattatattatta

SEQ ID NO: 8703 - DNA, 127 bp, Gossypium hirsutum
  Clone ID: LIB3120-039-P1-K1-G8
ctgacagtaaacgcactggaaaacccgtaaggcgcaaggaagctgattggcggcatccctcgggggtgcaccgccgaccgaccttgatcttctgagaagggttccagagagagcatgcttgtaggca

SEQ ID NO: 8704 - DNA, 363 bp, Gossypium hirsutum
  Clone ID: LIB3120-039-P1-K1-H1
cccacgcgtccgcccacgcgtccgatagttcgtaacaatgtcggtctcacttcaagctgcagctaccctgatgcaaccaatcaaggttgctgcaccatcaaggaccaatgtgctgctcaggtcctcccagagcgtttctaaggccttcggtttggagcctgttggtgctaggctcacctgctctttgcaaactgacctcaaggacttggctcagacgtgtgttgatgctaccaagctcgctggtttcgttcttgctaaatctgctcttgttgcttcgggagcaagcgctgaaggagttccaaagcggttaacctacgatgaaatccaaagcaagacatacatgggagttaaaggaacagggac

SEQ ID NO: 8705 - DNA, 223 bp, Gossypium hirsutum
  unsure (1)..(223): unsure at all n locations; Clone ID: LIB3120-039-P1-K1-H2
nnnnnnnnnnnnnnnnnnnnntnnnatttcgtcttcaagatctcagttctcaaatcgtagcgctcttttctatcaagccatggctctgatcttgcatgcaggaaaaacatacaaaaatgactttaaggcactcattgctgcagaatatagtggtgtgcaggtcaaaatggttgagaattatgagatgggtgtgtcaaataagactcctgagttcatcaagatg

SEQ ID NO: 8706 - DNA, 304 bp, Gossypium hirsutum
  Clone ID: LIB3120-039-P1-K1-H3
gtggaattttggccatggatgagtccaacgctacctgtgggaaacgtttggcctcaatcgggctagaaaacacggaggctaaccgccaagcctacaggacgttgcttgtttcagctcctggccttggtcagtacatctcaggtgccatcctttttggggaaaccctctataaaaccacacttgatggcaagaagatggttgatgttcttgttgagcaaaacatagtccctggtatcaaggttgacaagggtcttgttccactggctggttcaaacaacgagtcatggtgccaaggtcttgatgg

SEQ ID NO: 8707 - DNA, 413 bp, Gossypium hirsutum
  Clone ID: LIB3120-039-P1-K1-H4
gtcgcgacggtctcattgaacatttaatagatcatgtctttctcattcttcaagccgtcgaggccgaaaaccccaccagaggttgccaaagcgatcaaagacagccttaatgcactcgacaccaaaaccgttgctgaagttaaagcccttgaaaaggctatggaagaagttgaaaaaaattttgtgacaatgagatgcatgctttctggggatggtgaggttgaaccgaatgtcgagcaggtctcacagttggcacttgaaatctctaaagaggatgttatttccctttgtgttcacaaagtaccgatactgggatgggaagcaagaaaagatttagtccactgttggtccatattgttggagcaacaaggtgattccaaatattggtgtttggaatacattgagaaacattt

SEQ ID NO: 8708 - DNA, 265 bp, Gossypium hirsutum
  Clone ID: LIB3120-039-P1-K1-H5
gtggaattttggccatggatgagtccaacgctacctgtgggaaacgtttggccttaatcgggctggaaaacacggaggctaaccgccaagcctacaggacgttgcttgtttcagctactggccttggtcagtacatctcaagtgccatcctttttgaggaaaccctctatcaaaccacaattgatggcaagaagatggttgatgttcttgttgagcagaacatagtccctggtatcaaggttgacaagggtctttgtccactggc

SEQ ID NO: 8709 - DNA, 115 bp, Gossypium hirsutum
  Clone ID: LIB3120-039-P1-K1-H6
atatatcgcggctccttctcgctgcgatttcgtcttcaagatctcagttctaaaatcgtaccgcggggaacctacaagcacatgggtccgatctgcatgcaggataaacaaacaa

SEQ ID NO: 8710 - DNA, 174 bp, Gossypium hirsutum
  Clone ID: LIB3120-039-P1-K1-H7
gatggcccctagatctccacctaaaagagttttcatttctcactcattcacatctttcttcgtgggttataaattgcttgcattgatgctgcacactacggtgcttgtttcaattcctggacttggttagccatctaagggccatcccttttgaggaaaccctttatcaaacca

SEQ ID NO: 8711 - DNA, 148 bp, Gossypium hirsutum
  Clone ID: LIB3120-039-P1-K1-H8
aaaatcatatcattgcaacattgaatagatgatgtctctgtcatgcttaactctagtccgactgtgtgacaaagacttgagaggtgtaggatacgtgggagctctcggtcgaaattgaaataccactactgttaacgttattgtactt

SEQ ID NO: 8712 - DNA, 172 bp, Gossypium hirsutum
  Clone ID: LIB3120-043-P1-K1-A1
atttagctatagcatacactactagtacccactactagcaatggcttcctcaatgatctcagcggctaccattgccactgcctctccggcacaggctaacatggtcgctcctttcaccggactcaagtctggctctgctttcccaggcaccaggaagggccaccacgacaat

SEQ ID NO: 8713 - DNA, 320 bp, Gossypium hirsutum
  Clone ID: LIB3120-043-P1-K1-A10
ggtttcgttgcttcaaactctaaggatgatcctgcaaaggaggctgccagcttcacctctcaggtcatcatcatgaaccaccctgggcagattggaaacggatatgccccagtccttgactgccatacctcccacattgctgtgaaattttccgaattgctgaccaagatcgacaggcgatctggaaaggagcttgagaaggagcccaagttcttgaagaatggtgatgcagggatgataaagatggttcccaccaagcctatggttgtggagactttctctgagtacccaccacttggacggtttgctgtcagggacat

SEQ ID NO: 8714 - DNA, 365 bp, Gossypium hirsutum
  unsure (1)..(365): unsure at all n locations; Clone ID: LIB3120-043-P1-K1-A12
attgatttagagcagcatgatagaagggagcagctaaagaaaagtggtcttggaaaggtcattatgttcttatcaaaatctgatgaggaaactacgtccaacaggaaacttgctaaggaattggttgataaatggagtagaccaatctttaataagagcactaggtttgaagacatgagaaatgttgaggatgatagagttcccttgcgaaggccatctgtgaaaaggcccacanatagagctgcatcaatggaatctagagatggtgattttgatttggatatttctcgggaccacaagtctggtagatcatcgtcaggtcaaaatgcttnncagtctgaatcttcttcaaggctacaacatgc

SEQ ID NO: 8715 - DNA, 278 bp, Gossypium hirsutum
  unsure (1)..(278): unsure at all n locations; Clone ID: LIB3120-043-P1-K1-A2
cccacgcgttcggagctttgaaggccgaggaggggaaaggttccatgtgaacggcacttgcgcatgggttagtcgatcctaagagacgggggaagcccgtccgacagcgcgtccagcgcgagcttcgaaagggaatcgggttaaaattcctgaaccgggacgcggcggctgacggcaacgttagggagtccggaaacgtcggcgggggcctcgggaagagttatcttttctgtttaacggcctgcccaccctggaaacggttcanccggaggtagggt

SEQ ID NO: 8716 - DNA, 231 bp, Gossypium hirsutum
  Clone ID: LIB3120-043-P1-K1-A3
atttagctatagcatacactactaccacccactactatgcagatggcttcctcaatgatctcatcggctaccattgccactgcctctccggcacaggctaacatggtcgctcctttcaccggtctcaagtctgcctctgctttcccagtcaccaggaaggccaacaacgacattacttctctcgcaagcaatggcggtagagtgcaatgcatgcaggtgtggcctcctact

SEQ ID NO: 8717 - DNA, 265 bp, Gossypium hirsutum
  Clone ID: LIB3120-043-P1-K1-A4
cccactcgctctgtccgagatagctagtgtccagcctaattacaacattcttagcccttcacggttttactcctcttcctcctccgccgccaccacatttctttctgttttctaccctcaacgcacgcgcttctctccgccgcaatatctcaagttagataagcaagttttagcttctgcttcctgtcgctatgctcatgaagtaaagcctcctttaaggatggctgctgtttaatccgatcttaatagaagggaggcttccaac

SEQ ID NO: 8718 - DNA, 157 bp, Gossypium hirsutum
  Clone ID: LIB3120-043-P1-K1-A5
agcatacactacacctcccggaagatttagcatcaattgtgacttcatgttggcaagaggatccaaatgctcggcccaatttcagccaaatcatacagatgctattacactatctctcgaccatttcaccacccgagcctgtgatgcctcctaagag

SEQ ID NO: 8719 - DNA, 114 bp, Gossypium hirsutum
  Clone ID: LIB3120-043-P1-K1-A6
gccactcgttcggtgctagagagagagtgagagtaatagtagtatcaataatttggcttaggttgcatctctgtgtctgatgcaacagagaggaaggactaacaccgtagatca

SEQ ID NO: 8720 - DNA, 190 bp, Gossypium hirsutum
  unsure (1)..(190): unsure at all n locations; Clone ID: LIB3120-043-P1-K1-A7
attaggcattccctttatngtttantcaagttagtaaccagcacccaacatggcctcattagcagcctccaccgctgccgcctcccttggcgtctctgaaatgcttggtaaccctctgaatttcagtggtggagctaggtcatcggctccaacaccatccaactcatccactttcaagaccgttgctctt

SEQ ID NO: 8721 - DNA, 172 bp, Gossypium hirsutum
  Clone ID: LIB3120-043-P1-K1-A8
ctcactcgttctctccgtcctagctactctccagccaattaacggaattcatattccaaagcgaacccgactgaaggctagcttttgcgagtccaaaaaatcaaggtgggaggaagcattggcgagggcgaagagcaagtcaatcggctagatagctcaactgggagaaatt

SEQ ID NO: 8722 - DNA, 322 bp, Gossypium hirsutum
  Clone ID: LIB3120-043-P1-K1-A9
attccgatcaaatcacgatcccaccggcgccgactattagagttaaagtcaaatacggctctatttaccatcaaatcaacatcaattctcaagctacattcggggaattaaagaaaatgttaacgggaccaacgggattacaccataaagatcaaaagctaatatacaaagataaagagagggattcgaatgtgtttttggatatggtgggtgttaaagataaatcgaaaatggttttaatggaagacccaattagtcaagaaaagagattaatggagatgaggaaaaatgctaaaatggagaaaggctctaaatccatatc

SEQ ID NO: 8723 - DNA, 238 bp, Gossypium hirsutum
  unsure (1)..(238): unsure at all n locations; Clone ID: LIB3120-043-P1-K1-B1
tcccaatggcatcnnctttgtgggttagccatgaatgtgtagaagaagcagtatattgataaagaaaagatatttttttccaaaatcaaaagagcgattgggttgaaaaaataaaggatttcgaaccgtcttcttatcctataacgaacataaatcaattagatggcaaaagataggatagagaatccgttgatgaatccgcctgtctccgaggtatctattcttttcttactataat

SEQ ID NO: 8724 - DNA, 360 bp, Gossypium hirsutum
  Clone ID: LIB3120-043-P1-K1-B10
cccacgcgtccgcaacattcatggctttcatctctcaaaaccactgctcttttctcttccacaaaccaacacaagagttctcttttcaaggttccattttctcagaattggagccgatctagtgatgaagcttcaaaccctgagtcacctaactcggaagaagctgctcctgttgaccctgtgaagcttgcttttgaaaaggctaaatcttataagaaaaccaaagtgaacccggacggggattcgagtccagcttcagttaaggttgcaaaggagaagacaagcgagaacaaggagaatggaagtgagagcataattgcttctgtgaagaaaactgggagtgagggtacctcacagcaa

SEQ ID NO: 8725 - DNA, 293 bp, Gossypium hirsutum
  Clone ID: LIB3120-043-P1-K1-B11
cttgagggaaagaaaaaaaaagaagaagaagcttgaatctatttttttgaagatggagggtaaagaagaagatgttaagctaggagcaaacaagttctcagagagacaacctattgggacatcagcccagacagacaaggactacaaggagccaccagcagcacccttctttgagcctggtgaactcaaatcatggtctttttacagagctggtattgccgagtttgtagccacctctttgttcctttacatcaccgacttgactgtcatgggtgtgtctcacgctaaaacca

SEQ ID NO: 8726 - DNA, 330 bp, Gossypium hirsutum
  unsure (1)..(330): unsure at all n locations; Clone ID: LIB3120-043-P1-K1-B12
gcaaactcctcataagtgattactgcaaaagttccaagactccatccagggagtttgctgagtatatcaagcagagaggctatgatcttcatgatgtaaaatcatatggacagatgcttgaggatgctggttttgatgtgattcttgcagaggatcgaaccgatcagttcttacaagttctgcggcgtgaattgaaccaagtggagaaagagaaggatgcattcatctctgacttctctaaggaagactatgatgaaatagttggtggatggaaggcanagctgataagaagctcatcangggagcagagatgggccctttttcttgcca

SEQ ID NO: 8727 - DNA, 150 bp, Gossypium hirsutum
  Clone ID: LIB3120-043-P1-K1-B2
tcgcttctctttcggttctaccgcctgcacaacgattaagggatttcattttccaaatgggaccccactcaaggctatcttttgccaccacaaaaaatctaagtggtaggtaccctcaacccacgcgcatgtgcccgacgaaatattata

SEQ ID NO: 8728 - DNA, 305 bp, Gossypium hirsutum
  Clone ID: LIB3120-043-P1-K1-B3
ccgtccgaattcccggtcgccacgcgtcatctcttcttcacactctctccctgctgcattctagccccgacccacctcccgaaacgtacgatttcgtcgtacggccgagcattgaaggccaggtcatgaacttctacgtgttgaaacggcccggcgtcgattttttcctggaagaaataagcaagaaacacgaagtggtggttttcacggcggggctcaagcaatatgcttcccaggtcttggataagctcgacccgaagggcttaatatcccaccggctttatcgggattcttgcaaggaactg

SEQ ID NO: 8729 - DNA, 139 bp, Gossypium hirsutum
  Clone ID: LIB3120-043-P1-K1-B4
gggatggaaaacacacgccatccgtctcaccactaaaccccaactattgtttatcatggcttcctcaactttctcccctgcagctccttcgcagctatgctccggcaagagtggcatgttcctgcccatcacaagcgtt

SEQ ID NO: 8730 - DNA, 186 bp, Gossypium hirsutum
  Clone ID: LIB3120-043-P1-K1-B5
attaggctttccgtatactagaccctgctcccgccgtatttcacttcccctctcttctctcttcttttccttccttccttccttccttctgtcaacaccactctctaatggcttcccttgctggttcatcaatctctatgcaacctcgccagaccctggctacaagcagggtttctgggttgaaat

SEQ ID NO: 8731 - DNA, 354 bp, Gossypium hirsutum
  Clone ID: LIB3120-043-P1-K1-B6
gttgtcatggcttctctgcctaccatcttcttcttatctttctttataatctccacaacattgacgtcagccggcgccgccgccgccaccatcaaactctccctctctcccttccctcacccttcttcatcccatccttaccaaattctcaacaactaattcacttcttctgttgcaggagcccaccacctcaaacatcccaaagccaaggccgataatactacctcttctcttctaagggctcccctattttctaacagttatggggggctcactatctccctcaaattgggaactccgcctaaaacccttcctttcgtcatggacaccggaagcagccttttctggttccct

SEQ ID NO: 8732 - DNA, 165 bp, Gossypium hirsutum
  unsure (1)..(165): unsure at all n locations; Clone ID: LIB3120-043-P1-K1-B7
atctttcttgacttagacgagaccnngnnganctatagcatacactactagtacccactactagcaatggcttcctcaatgatctcatcggctaccattgccactgcctctccggcacaggctaacatggtcgctcctttcaccggtctaagtctgccttgcttt

SEQ ID NO: 8733 - DNA, 267 bp, Gossypium hirsutum
  Clone ID: LIB3120-043-P1-K1-B8
cccacgcgtccggcatctcagtacctccgcagttcactgagaaatggatgaggaagttaaggctgtggttcctgagtcactcttgaagaaacagaagagggctgaagaatgggagcttgccaaaaagcaggaccttgaagtggcaaaaaagaggaaagtcgagaaccgcaggctgatttacactatggctaaccagtatgcaaaggagtacgaggctaaggaaaaagagctgattcatttgaagcgggaggcaaagttaaagggggg

SEQ ID NO: 8734 - DNA, 433 bp, Gossypium hirsutum
  Clone ID: LIB3120-043-P1-K1-B9
atgtaaggatgtttcccgctgttgctcttgctgatctacatatataacgtccactgctgctatgttttggcatctttgtttaccataggagtcttgtcttttgtttatccactccactttgcggtacatagagaattccgatggaacttcgagacttttcaaacaatgttatgcattattgctctctaatcttagacagaatttgacactatctggtaattaaagactgtgaatgatgaagtggtacttctagtacacattttttgagttatttctactaatggatgatgcttttccttttggattttttttttttaccagcattggttcaaagttagctttgtgttctgctgcatttttatgacatgacattgcattactaggtaatgcccaaataatgaaataatgactggttcttgacccgttatcgatc

SEQ ID NO: 8735 - DNA, 304 bp, Gossypium hirsutum
  Clone ID: LIB3120-043-P1-K1-C1
tccctgggtaccgtccgaattcccggtcgccacgcgtcgtcatcactgcgaccacgcgcccgaaaaagttcttgtaagcaaagaagctcctcaccgtccaattttactcgattttggtcttacaaaaaaactatcaagctctctgaagcatgcactagcaaagatgtttttggcttctgccgagggtgaccatgtggctcttttgtctgccttctcagaaatgggcctcaggctgcgcctagatatgcctgagcaggttatggagataacaagtgtattcttccgtagttctacaccagcaact

SEQ ID NO: 8736 - DNA, 282 bp, Gossypium hirsutum
  Clone ID: LIB3120-043-P1-K1-C10
cccacgcgtccgcggacgcgtgggttcttgagatggaggattcagttcctggaaaagagcatccgaaaactcgacttcaatcctactggtatcaataccatggttcaagtgaacgacctcaagaattcacctggacctggtaaaaaggaactcagacaagctaccaaccaagcccttaacttgcttcaagataactatcccgaatttgtggccaaacaagtgttcatcaacgttccatggtggtacttggctttcaataggatgatcagtcctttcctgact

SEQ ID NO: 8737 - DNA, 261 bp, Gossypium hirsutum
  unsure (1)..(261): unsure at all n locations; Clone ID: LIB3120-043-P1-K1-C11
gtggtgtaacttacccagggtttcattgaagttgtgctaatgatgaaggccattatttgcatggacagccactgatttgtgtattaattattttcccagtaaaataaaaagatggttaaattnaanaaaaaaaaaaaaaaaaaaaaaaaaaaaaaaaaaaaaaaaaaaaaaaaaaaaaaaaaaaaaaaaaaaaaaaaaaaaaaaaaaaaaaaaaaaaaaaaaaaaaaaaaaaaaaaaaaaaaaaaaaaaggggggcccttt

SEQ ID NO: 8738 - DNA, 318 bp, Gossypium hirsutum
  Clone ID: LIB3120-043-P1-K1-C12
gttcctttgattccccgttctggactaccaattctggtgctccagtttggaacaataactcatcacttactgtgggagcaagaggtccaattctccttgaagactatcatttggtggagaagctagctaatttcgacagagaacgcatacctgaacgtgttgttcatgctagaggagccagtgcgaaagggttctttgaggtcactcatgatatatctcagctcacatgtgctgatttccttcgtgcccctggagtgcagaccccgctcattgttagattctccacggttattcatgaacgtggtagtcctgaaactt

SEQ ID NO: 8739 - DNA, 240 bp, Gossypium hirsutum
  Clone ID: LIB3120-043-P1-K1-C2
cccacgcgtccgaaaagatgcttcttctttgcatttattacggttctctctctacgagtattgtaatttgaagagttttattactccaaagaaatctatttcgatttttaatccaagattattcttgttcctatataattctcatacatgtgaataccaatccattttccttttttttccgaatcaaatcttttaattaacaatcaactttttttggggtttttttggaccaattttttt

SEQ ID NO: 8740 - DNA, 245 bp, Gossypium hirsutum
  Clone ID: LIB3120-043-P1-K1-C3
ctttgagcctggtgaactcaaatcatggtctttgtatctgatcccgaagatgactcatagggcggccttcttgttcctttacatcaccgtcttgactgtcatgggtgtgtctcagtctaaaaccaaatgtgcaaccgttggtattcaaggcattgcttgggcttttggtggcatgatctttgcccttgtttactgtactgccggcatttcaggtggtcatattaaccctgctgtgacctttggat

SEQ ID NO: 8741 - DNA, 139 bp, Gossypium hirsutum
  Clone ID: LIB3120-043-P1-K1-C4
atcaccaacaaaatcagttgcttcacaatggcctctacaaccatggctctttcttccccatcattcgccggtaaggcagtgaagttctccccttccacccctgaaatccggggaactggccgtgtttccatgaagaaaa

SEQ ID NO: 8742 - DNA, 232 bp, Gossypium hirsutum
  Clone ID: LIB3120-043-P1-K1-C5
acttcatcgcgtgctgatcccaattcatggtctttttacagagctggtattgccgactttggagcggatatcatggagtaaaatctctcaaagtctaacacgattttaatcagcaaccttgttccgccgtgtcaaaaccacctcaactgggcccattggaagataacatgttatacttgaagcaacaattcttcgaatcagcttgcaaagggagcccatttgttgccaaacg

SEQ ID NO: 8743 - DNA, 182 bp, Gossypium hirsutum
  Clone ID: LIB3120-043-P1-K1-C6
cccacgcgtccgaaaagatgcttcttctttgcatttattacagtactctctctactactatggtaatttgaagagttatattactccaaaaaacaatatttctatttatcaaccaacattattcctctctctatataaaacacctacaatttaattccaaaaacattttcattcttttcata

SEQ ID NO: 8744 - DNA, 199 bp, Gossypium hirsutum
  unsure (1)..(199): unsure at all n locations; Clone ID: LIB3120-043-P1-K1-C7
cccacgcgtccggaaactacaaatcatggtctttttacagagctggaattgccgngttggaggggaacccccctttttctgttcctccctgaggacacttattaggcttgcggtctctctatgtttagaccttggatttccaatggaacggatgagacctaaggaataaaaaggccgttcttcgccatatctcatgaaa

SEQ ID NO: 8745 - DNA, 286 bp, Gossypium hirsutum
  Clone ID: LIB3120-043-P1-K1-C8
ttcaaaatcacatgatgtgtactcctcttgggatgatgaattcaaaaaactggtgcaaagcttccccaaagagaaaggctgggcaggatccaatctttatttctatcaaggtttttggtgcccctctcttgttctaaaagcttttatttctttccagaaacattttcaagcatttaattctgatataatcgttgctccttttccaaaatgtggtactacttggctcaaggccttgactttctccactttgtaccggattcagttccaatgggatgaaaatccattg

SEQ ID NO: 8746 - DNA, 384 bp, Gossypium hirsutum
  Clone ID: LIB3120-043-P1-K1-C9
cccacgcgtccgaattcaaccaccatcactgcctactcctcagccatggcaaccaccacagctgccaccgtgtcacattttttcggtacccgtatccaaacctctaacccaagctccggtagaatccaagctaggttcggctttggaaccaagaaagcaccacccgcaccaaaaaaggccgcccctaaacggccatccgatcgccttgtttggttccccggcgcaaacccaccggaatggcttgacggtacaatgatcggagaccgtgggttcgatcctttcgggtttgctaaaccggctgaatacttacagtacgatttggactcgttggacaaaactttaccaagaatgtggcttgtgaaattataggggtgattagcgaga

SEQ ID NO: 8747 - DNA, 204 bp, Gossypium hirsutum
  Clone ID: LIB3120-043-P1-K1-D1
aatgctcctcgcataaggatttcataactgattatacgtggctttttacaagctgcgttggaagggagtctccaacttagcggccaaacccggttgaacgttgctagcaccaacagggtggctgtggctagacctggttttaccgttagagctcaacaggtccctgccgagcctgaaactggacgcagagctgtgctgggtctt

SEQ ID NO: 8748 - DNA, 312 bp, Gossypium hirsutum
  Clone ID: LIB3120-043-P1-K1-D10
cccacgcgtccggcaacctcaagctttagcagttggtttctctttctcctcaattcaagaactaataaagtatggcaaccatttcagctacctcatcaatcaccattgcagcttctctttcatacaagccatcatcactcaagctcaccaccccaattgccattgggttgccaacaatggcgaagaaagtgaaagtgatgtgttctatgaaggaggaggaggaaaagaatagctctagcgttggcatgagtgctgcatcgctgttagctgcagcagtcatgtcaagctcaccggctatggctctggtggatg

SEQ ID NO: 8749 - DNA, 377 bp, Gossypium hirsutum
  Clone ID: LIB3120-043-P1-K1-D11
gaacagaaaaaagaggtcttccgtctcatattcttcgatcctctggaaagttgtagaccagagcaagaatacattatggctggacatagtgattcaagttcgtctgaaaagaaatcaagtgaagccatgaatgatgtaccgacctttagcacggagaatatgcaaaataacatgaaagttatatattacagccgaacgtttatgtctatcatcggaggagttattgctggaattttagggttcacaggctttatggggtttatcttttattttcttggcatggcaattacttcaattggactcatagcaaaggcaaagttctcagtccatttatattttgatagctggaaccggattatactcgatggtttcatggg

SEQ ID NO: 8750 - DNA, 353 bp, Gossypium hirsutum
  Clone ID: LIB3120-043-P1-K1-D12
gctgagtaccgtgccggtattgttcccgtttcctaccgccgggtgccatgccggaaaagaggagggataaggttcacaatcaatggatttcgatatttcaacttagtgttgatttctaacgtggcgggttcagggaatatcgtgaaggctagtgtgaaaggatcaaggacagggtggatgagcatgagtcgaaattggggtcagaattggcagtcaaacgttgtgctggttggtcagtcgctctcatttagggtcacaggcagtgacagacgcacttccacctcttggaacattgtccctgcccattggcaatttggtcaaacattcacgggcaaaaatttcagagtttgatt

SEQ ID NO: 8751 - DNA, 123 bp, Gossypium hirsutum
  Clone ID: LIB3120-043-P1-K1-D2
atcacaatcacattatgtgtactcactattggcctgtacaaccatggatatttgttcaccagggttctacggagagggggtggacttcttccattttatatttgaatttcggtgaaatggtcg

SEQ ID NO: 8752 - DNA, 170 bp, Gossypium hirsutum
  Clone ID: LIB3120-043-P1-K1-D3
cccacgcgtccgcccacgcgtccgtgttaatacaacacagagagagagaacgggggaaaaagaaatgggggttggttttgggttttgacagtactgtgagaagtgagctactgcatcatgagctgccattcaaaatcgaacagctcaacaagcataaattgggagagagt

SEQ ID NO: 8753 - DNA, 199 bp, Gossypium hirsutum
  Clone ID: LIB3120-043-P1-K1-D4
cccacgcgtccgattcggtttatcaactgaaacagaacgctatcaagaaaattgagagccaaagtttctgaaccctgaaaagaactgaggaaaattaaattaaaagatggcttttagtgtaggctttcgtttcaatcttttgggaaaggcttaatctttggttattccttcaagttcattaatttcttttgggggtttt

SEQ ID NO: 8754 - DNA, 284 bp, Gossypium hirsutum
  Clone ID: LIB3120-043-P1-K1-D5
cggacgcgtgggtagctatagcatacactactagtacccactactagcaatggcttcctggatgatctcatcggctaccattgccactgcctctccggcacaggctaacatggtcgctcctttcaccggcctcaagtctgcctttgctttcccagtcaccaggaaggccaacaccgacattacttctttcgaaggcaatggcggcagagtgcaatgcatgcaggtgtggcctcctactggaaagaagaagttcgagactctctaatacctccccgatcttacac

SEQ ID NO: 8755 - DNA, 234 bp, Gossypium hirsutum
  Clone ID: LIB3120-043-P1-K1-D6
atcaccaacaaaatcagttgcttcacaatggcctctacaaccatggctctttcttccccatcattcgccggtaaggcagtgaagttctccccttccacccctgaaatccggggaactggccgtgtttccatgaggaaaaccaccaagcctgttccttctggtagcccatggtacggtcctgaccgagttttgtacttgggtccactttccggtgagccaccatcttacttgacc

SEQ ID NO: 8756 - DNA, 246 bp, Gossypium hirsutum
  Clone ID: LIB3120-043-P1-K1-D7
accaatccttttttttttcctgtgcttgtacacaatggctatgactgtaaatgcagcagtgtctcttccatcttccaagtcatctaccctgtcatttaaaaactcagtcactgtccctgaaagaatcaacttcaacaagagtgttttgtacccaaaaaatgtcagccttggtggaaatgtggtttccattagagctcaggtcactacagaggctcctgcaaaggcaccaaaaatttccaagaaaga

SEQ ID NO: 8757 - DNA, 171 bp, Gossypium hirsutum
  Clone ID: LIB3120-043-P1-K1-D8
cccacgcgtccgattcggtcttctatcttagcggctggtttctttacattgcgttctcctgatttggcgactttgtaattcggataaagtttgcagtccttggttgaatcacaatggcagtgtctgcaattggatttgagggtaatgaaaaaaggcttgaaatttcctttt

SEQ ID NO: 8758 - DNA, 341 bp, Gossypium hirsutum
  unsure (1)..(341): unsure at all n locations; Clone ID: LIB3120-043-P1-K1-D9
cccacgcgtccgcccacgcgtccgacaatggcctctacaaccatggctctttcttccccatcattcgccggtaaggcagtgaagttctccccttccacccctgaaatccagggaactggccgtgtttccatgaggaaaaccaccaagcctgttccttctggtagcccatggtacggtcctgaccgagttttgtccttgggtccactttccggtgagccaccatcttacttgaccggtgagttccctggtgacntatggtgggacactgctggactctcagctgatcccgagacctttgctaggaaccgtgagctcgaagtcattcactgcagatgggccat

SEQ ID NO: 8759 - DNA, 152 bp, Gossypium hirsutum
  Clone ID: LIB3120-043-P1-K1-E1
gaaactgtttggaacttagacacagggccgtctcatattccaccagccgtgcatagataaggggctgctttgacatggttcttgtccattgtgtaaacgggatatgtactgttattattgcaaactaaactaaacaatacacgttgagaaga

SEQ ID NO: 8760 - DNA, 379 bp, Gossypium hirsutum
  Clone ID: LIB3120-043-P1-K1-E10
caaatgcaaaatactcaacccgttcaacttgatgaagcgtgcgaattgttttatgaaggggtaaatcgacatgggccttattgggaccatgttctggggtactggaaagcaagtttggaacatccagacaagttactattcttgaaatatgaagaactgattgaagatactgttttgtatcttaagaaaatagcagaatttatgggttatcctttctcgtcagaggaacaacaacaaggggtgcctgaaaacattgtacagctgtgcagtttcgagaatttaaatggcttggaagtaaataaaactgggaaacatcttgactggcaaggagatttggcgattgaaaataacaatttctttctgaaagggaaagttggag

SEQ ID NO: 8761 - DNA, 287 bp, Gossypium hirsutum
  Clone ID: LIB3120-043-P1-K1-E11
cggacgcgtgggcggctggtgcctcacttcgtcctccactgccaccgccacttctttccctctctggcgacccacattacgatcctcctccattgttgccaccctcaactcttccccttctcctccaacactcatccgcaaccagcctgttttcgctgctcctgttcctttgctcaccccttctaattggagagaagacatgggagacaagtcatacgaggaagccattgaagctctcaagaaactgcttagtgagaaaggagaattgaaagctgtagcagccgcaa

SEQ ID NO: 8762 - DNA, 271 bp, Gossypium hirsutum
  Clone ID: LIB3120-043-P1-K1-E12
caaatcccaaaatactcaacccgttcaacttgatgaagcgttcgaattgttttatgaaggtgtaaattggtatgggccttattgggaccatgttctggggtactggaaagcaagtttggaacatccagacaagttactattcttgaaatatgaagaactgattgaagatactgttttgtatcttaagaaaatagcagaatttatgggttatcctttctcgtcagaggaacaacaacaaggggtgcctgaaaacattgtacagttgtgcagt

SEQ ID NO: 8763 - DNA, 151 bp, Gossypium hirsutum
  Clone ID: LIB3120-043-P1-K1-E2
gaagagctaaattgccgatattctgcttcttctacccctcctcctctctccctccattctatcgaattctcaagcttccaatggaaacgttagcttcttcttctcttcgtacgaccctcggcggcggcgctggtggcggattactcaattt

SEQ ID NO: 8764 - DNA, 163 bp, Gossypium hirsutum
  Clone ID: LIB3120-043-P1-K1-E3
attgaaagcaatggcagtagataccacagttctaggactttcaaaagaagaggccgaaaagaaaccatatattgcctctatgggagtatatgttttcaagaaggagatccttttaaaccttttgagatggcgttttccaacttcaaatgactttggatcaaaa

SEQ ID NO: 8765 - DNA, 160 bp, Gossypium hirsutum
  Clone ID: LIB3120-043-P1-K1-E4
gcaccggtcacagttactggggatattgtatttgtcctccaacagaaagatcatccaaaatttaaacgaaagggtgatgacttatttgtagaacatacgttgacacttactgaggcagtttgcggcttccagtttatactgacccacctagatggtaggc

SEQ ID NO: 8766 - DNA, 153 bp, Gossypium hirsutum
  Clone ID: LIB3120-043-P1-K1-E5
gaaactgtgtggaactcaaagaccgacttgctatagtaactgggtcatctcgtggtattggccgagttatagccactcacctggctggactcggtgctaaactcgttattaactacactttcagtgcataccaagccgatctcgtatctaccc

SEQ ID NO: 8767 - DNA, 150 bp, Gossypium hirsutum
  Clone ID: LIB3120-043-P1-K1-E6
gaagaactaaattccccagaatttgcttcagtaatggctgcctcagttatggcttcttcagttaccctcaagccttcattcaatgttgagaaatctggtgtaagaggggttccttcccttgctaggtccccttcttctttcaaggttgaa

SEQ ID NO: 8768 - DNA, 261 bp, Gossypium hirsutum
  Clone ID: LIB3120-043-P1-K1-E7
aaccccgccacctgacttaactcatccgataactaaacctctcaaatccttttcttttcctgttttctcttccactgccaattgttcaaccatgtcatcagctgtgattgcaggtgcctcttcttcttgttctgccgccttcaccagcaggaagaactgctccaacaaaactacgttgaccccttctcccagggcattcaatacttcacagaaaaccgccctccagggcttgtctctcaaaaaggccaaagggggtgtcta

SEQ ID NO: 8769 - DNA, 211 bp, Gossypium hirsutum
  Clone ID: LIB3120-043-P1-K1-E8
caacgggacacattaactgatggaggagcaatgagaagaagctgcaaaatgttcagcaaagactttaatatggaacctgtcggttggcagtcgaatcccatagtagtacttcggaattgttcaagccaatggcaatatgccgaccatcaggagcccaattcacacttgtaactggtccgttttcgtaatcaacagtgacaagttttgaagt

SEQ ID NO: 8770 - DNA, 337 bp, Gossypium hirsutum
  Clone ID: LIB3120-043-P1-K1-E9
cccacgcgtccggaaaaaatcagccttaaggctcttatcttggatatctttgcagccggtaccgatacgacatacgtggtcctggagtgggcaatgacagaactcttaaggcaccccaagataatgaagaaacttcaaaacgaggtcaggaatgtttctgctgaaaattcaagcatatcagtggatgatctcgataacatgcgctacctaaaagcagtgatcaaagagactcttcgtttacatcctccgattcccttgctgctttcaacaatatctacaaaagacgtcaagctcaagggctatgacatttatcaaggaactcaagttatcatcaatg

SEQ ID NO: 8771 - DNA, 163 bp, Gossypium hirsutum
  Clone ID: LIB3120-043-P1-K1-F1
aaaacggatcccggagctaaaacatcacggcgaagcaagcttaaaccaggaacaatagtgggaattatagtcggtgatatagctggagttggattagtaattatggtattccttttcgtctataaaataaagagaaaaaacagagtactggagaccacactga

SEQ ID NO: 8772 - DNA, 204 bp, Gossypium hirsutum
  Clone ID: LIB3120-043-P1-K1-F10
atttgataaagtctaaaaaggttttcattcttcactgctcttgcgccgatcagttcttccccaccatcgattcatcatcataatcggcagatgacatcaaatccgactctatttggagtcgtatcctcctaaccctcatctaacttcgatttcaacgaagcagacaaggattcgaaggccattaaaaggtgcatggtggacgtg

SEQ ID NO: 8773 - DNA, 298 bp, Gossypium hirsutum
  Clone ID: LIB3120-043-P1-K1-F11
cccacgcgtccggtggaggttttttgcaggattgaaaatcaatgtcaagttcatctccttttcttctttttcattgccttaacctctagggcactagcttgaaacctttttttttctttttccatttagttttgggggtgtgtttaatggctatggagatgcagagcggggggaagatgatggggttcttggttatcttgttggttttgtttatagagatggcagcacccactactgctagcagaaacagcttttctacccaaattcttgaggttcaaaaccagttgaagctcttgaa

SEQ ID NO: 8774 - DNA, 296 bp, Gossypium hirsutum
  Clone ID: LIB3120-043-P1-K1-F12
cccacgcgtccggcatggccgtggctgtactagctactcaagctttgctctgacaaacccattgccgggctcttccaagaccaacacccttcacttccaaccctccttcacagtccagccgctacccctgcaaacatcacggtgaaacatggcccacaacctccttttctatcctccattccacgcccattgtttgccgcgcgtgccgccgcaagtacaccgccttgagctccatctcggaagaaagcgatcaggatggtcctctttggcgagtgctttacctgagtctgtgggcc

SEQ ID NO: 8775 - DNA, 240 bp, Gossypium hirsutum
  Clone ID: LIB3120-043-P1-K1-F2
gagccactctcacattactttttgtgtgttctcttgtctccccaatttcttaccttcctaacatcaaccttagatcttttcctttttcctcattaattcgcttacatgggcttaaccctattttaaggggtctcttggatggtggttcttttttaaggttggaaaaaaaaggaaaaaaggcggaggtttacagggtaatctttaaaacgttaacattggcaaccaagaaccctttcaatc

SEQ ID NO: 8776 - DNA, 200 bp, Gossypium hirsutum
  Clone ID: LIB3120-043-P1-K1-F3
ctcacacttggactgacatttgtgtagctgacgaaactctttaatggctgaaaaaagcatggcttagatcatcggaggaactgtatacctgtgaaagttcattgcggaagccaacgcaaaagagggtcattccactcttgccgttgtaagggagtccaccgaatccaacactgttaaggaaaaacttgtcgacactttca

SEQ ID NO: 8777 - DNA, 408 bp, Gossypium hirsutum
  Clone ID: LIB3120-043-P1-K1-F4
cccacgcgtccgatccaacctcggtgcggacaacaggtgcgggagttgcaagtgctataggaagaattggtggtatggtatgtccccttggtgccaggggaatgggtgaatgaatgccataaaacagcacctgtaccgctattttgggtcgctatagttgtgtcgatagtttgtgtccaactcttcccctatgataccaagggacgggagcttagtgatactagttgataagaagtagttagcttctaaagacaaatggcaaattgtgtgccatccgtaatttgtcttttaagggaaataagtggtcccctacctgtacttatagtttgaattgtagggtggggatattatgtacacttaattttcttagaaaatgcaatggggtgctgggatcattttgtaaaaaca

SEQ ID NO: 8778 - DNA, 206 bp, Gossypium hirsutum
  Clone ID: LIB3120-043-P1-K1-F5
ctatcacttaaacccacatttgttctctctctctctctctctctccaatcaattaattcctccattggaggagcttagggtttgttggtgttctgatctttgctctgtctgaaaaataaacagaattataaaccaacaccaacgccatgggaaaatttgaagagggaggattcaattcagtggtttgccctaagcctatacaaacc

SEQ ID NO: 8779 - DNA, 237 bp, Gossypium hirsutum
  Clone ID: LIB3120-043-P1-K1-F6
ccgcacagctgctccgtaatatttggagcaacagagtacactacagctattgacatctggtctgctggttgtgtccttgctgaaatgttacttggacagcctttgtttcctggtgagagtggggtcgaccagctggttgagattattaaggtcttggccactccaaccggagaagaaattaattgcatgaatcttaataatacaaagttcaaattccttcaaattaaggttaaccca

SEQ ID NO: 8780 - DNA, 140 bp, Gossypium hirsutum
  Clone ID: LIB3120-043-P1-K1-F7
cgttctcatagtagctggcagccccgtggcgtctctcgcaccacagccaagttcattcactaggtgatatccgcctaaagtcggccgatcaagtgccgctgtcatacatatgtggataacggccggggaactggatgcaa

SEQ ID NO: 8781 - DNA, 138 bp, Gossypium hirsutum
  Clone ID: LIB3120-043-P1-K1-F8
cggacgcgtggggcaaagacaatccttaggctcgcctacctctaagctccatatccatggaggagaagagattaccggagcaatcgtcgacgacgatgaccgccgcaaagacagtaagtctcgccgattgacgttttc

SEQ ID NO: 8782 - DNA, 312 bp, Gossypium hirsutum
  Clone ID: LIB3120-043-P1-K1-F9
cccacgcgtccgcggacgcgtgggcggacgcgtgggctggatcacgggacaatgtccagtggcagctttggttacaggatgaaagatagcttaaaagacagagaaggaagcaatcaaacagagagtctgctcggcgatcaaggttgcgtaagcaggcggaatgtgatgagctggctcaacgtgctgaagccttaaaggaagaaaatgctaaccttatatcagaagttagtcgcctcatgagcgagtatgagcagcttcatgctgagaatgcctctcttaaagagaggctaggggaaatccctgggcacgagg

SEQ ID NO: 8783 - DNA, 257 bp, Gossypium hirsutum
  Clone ID: LIB3120-043-P1-K1-G1
tattattatatacttttaacccctgccgacactctcaccattttctcagcaaacttagcctatgaaaatcaccattacaagtcccaaagaagacccccgctaattctaaaagaaagaaccagagttttctttctctttagtttacgtttattgtccttttggaatttttgatactaaaaaaaggaagcaacgaagaagggaattggagggcaaagaagaggatgttagattgggagccaacacgttcacagagaggc

SEQ ID NO: 8784 - DNA, 362 bp, Gossypium hirsutum
  Clone ID: LIB3120-043-P1-K1-G10
ttcacctcgccttctttcaactcaccttccttactctttgttcccaacacgcatgaccgatgatacctcggtttgccgtttcgtttacatctgccgggaccccaaagatgtttttgtctcaaagtggcatttcgccaacaagttgagacccaaggaactgccaccactatcactagaggaagcctttgacttgttctgcaaaggggtatcggaatatggaccgttttgggatcacgttttggggtactgggaagctagtgtggagtcaccgaagaaagtgttgttcttgaaatacgaagatgtgaaaaaggagcctttgtggtgtgtgaggaaacttgcagagttcttgggggtacccttta

SEQ ID NO: 8785 - DNA, 384 bp, Gossypium hirsutum
  Clone ID: LIB3120-043-P1-K1-G11
ctttagagtaaatttcttttgcaatcctttgtagagctccgggatccattgtcaccatgtcttgctcaaatctgacaatgtgggtgtcctcaaaaccctctctttctgacacttcttcactctctttccgttctttcatcagcccttttcagctcccatctcagagctcaacccccggtaacccttccaggtcctcatctgtaaccccagttcactgtggtcttcgtgagcttagagaccgtattgattcagtaaagaacacgcagaagatcactgaagccatgaaacttgtggctgctgctaacagtagagagcacaagaagctgttgtcaatggcagaccccttctctgagtccctggttgaagtctttacaacatcaatga

SEQ ID NO: 8786 - DNA, 345 bp, Gossypium hirsutum
  unsure (1)..(345): unsure at all n locations; Clone ID: LIB3120-043-P1-K1-G12
ctctgaaacagtcacttagctgttaacagcactcaacaatggcgaccacccttttcttcctcctatttttcacccccttcctctactccgccaccgcaccaaatcataatgcaccgcaagatctggtccgttcatcatgcatcaacgccagctacccctcactctgcctccgcacactatcatcctactctggccccaccggcaccccacgcgacttagcccaagccgncgttaaagtcagcctcgcccgcgcccgcaaagcttcgacctacttaaaaaccagcgtcacggggaaaagcaaaagggaacgagcggctctaagcgactgcgtggagcaaatggctg

SEQ ID NO: 8787 - DNA, 132 bp, Gossypium hirsutum
  Clone ID: LIB3120-043-P1-K1-G2
cgaaccctaaaaagaaaagaaataaaaaaccaccaaccgaagatatttcccacagaacaatcaccgagtaccttcgtattcatatttctcgatacagcaatcgaactccccccgacgtttctctgtttcttt

SEQ ID NO: 8788 - DNA, 170 bp, Gossypium hirsutum
  Clone ID: LIB3120-043-P1-K1-G3
ggctaacggacgaggtcagactctaaagccttaggcaccatggcaacctctgctatccaacagtctgctttcgttggccagaccgctttgaagcagtccaatgagctcttacgcaaagtcggagctttcgatggtggtcgtgttaccatgcgcagaactgtgaaaagtgc

SEQ ID NO: 8789 - DNA, 294 bp, Gossypium hirsutum
  Clone ID: LIB3120-043-P1-K1-G4
cacctcgataacacccataatcagcatacccatggcaactcaagcaggtcttttcactcccactatcaccacttcaaagtctctggctccatggaacccatcttcaccattttcattagctacccccaagtccatcaacttctccatggctaaaaaaactagcgttagggctgcagctgcaaatgaagctgttgctgccgttgccacaaaggaagctccggtgggtttcacccctccagatttggacccaaacaccccatcacccatcttcggaggaagcactggtggactgct

SEQ ID NO: 8790 - DNA, 302 bp, Gossypium hirsutum
  Clone ID: LIB3120-043-P1-K1-G5
ggctaacaaaccaagtcaacctgatgcataggacaggctcaggctgtggatttggatgaggttgatgctaaggttagtaagttgatgccagagcttgggttttcccccgaggattccgataggttggtcgcaagttttagtagcggatggcagatgaggatgtcacttgggaagattttgttgcaggagcctgatttattacttttggacgagcctacaaatcacctcgaccttgatacaatcgagtggcttgaaggatatctcaacaagcatgatgtgccaatggtcatcatatctcatga

SEQ ID NO: 8791 - DNA, 150 bp, Gossypium hirsutum
  Clone ID: LIB3120-043-P1-K1-G6
ctaaccctaaaaagaaaagaaataaaaaaccaccaaccctcaatctttcccacataacactggggggtcaccactacgtaagtcatcttgctccatacaacacatcttcatcacccccactatctacccccaatttcatcaacttcttca

SEQ ID NO: 8792 - DNA, 336 bp, Gossypium hirsutum
  Clone ID: LIB3120-043-P1-K1-G7
cccacgcgtccgtggaaggtgcagaccgatatggagccaccaaatccattggcaccatgtgttgctcaaatctgacaatgtgggtgtcctcaaaaccctctctttctgacacttcttcactctctttccgttctttcatcagcccttttcagctcccatctcatagctcaacccccggtaacccttccaggtcctcatctgtaaccccagttcactgtggtcttcgtgagcttagagaccgcattgattcagtaaaaaacacgcataagatcactgaagccatgaaacttgtggctgctgctaaagataggagagcacaagaagctgttgtcaatg

SEQ ID NO: 8793 - DNA, 124 bp, Gossypium hirsutum
  Clone ID: LIB3120-043-P1-K1-G8
cccacgcgtgctgcacgcgtacgatgacgcgtgggtctggctcaaaatttcatcttcctagtctttattctgaatcaaacccagaaaaactatgccaattgctaccttatctctccattcttta

SEQ ID NO: 8794 - DNA, 384 bp, Gossypium hirsutum
  unsure (1)..(384): unsure at all n locations; Clone ID: LIB3120-043-P1-K1-G9
cccacgcggtccgtatcgctttgatttcgcatccttgctgtgcactcgatggcaaatcgatggttgaggcctgaggtgtatccgctgtttgcggccgtaggtgttgctgtcggaatctgcgggtttcagttggtgcgcaatatctgcatcaaccctgaagtcagggtaaccaaggagaacagggctgctggggttttggacaactttgctgagggagaaaaatattctgaacatttcttgagaaaatatgtccgcaacaagacgccaganatcatgcccagtatcaacagcttcttcactgacccanagtgaggcttcactcttgctttatgctgaaactaaaaaataaaaaaaatagaggaactaagtcttattcaatcaata

SEQ ID NO: 8795 - DNA, 371 bp, Gossypium hirsutum
  Clone ID: LIB3120-043-P1-K1-H1
cccacgcgtccgtggaaggtgttgatggatatggggccaccaattagcatggaagtccagggcgtttctttccacactgtgtctaaaggatattggggtgaatgtgggcagcgagggggatactttgagatgaccaacattcctccaaagacagttgacgagatatacaagattgcatcaatatccctcagtcctaatgttcccgctcagatatttatgggattgatggtcaacccactcaaacctggagatgtttcatatgatcaatttgttagggaaagcaaaggaatccttgaatcattgagaagaagagcagggataatgactgatggatttaacagctgcaaaaatgtggtttgaaatttcactga

SEQ ID NO: 8796 - DNA, 232 bp, Gossypium hirsutum
  Clone ID: LIB3120-043-P1-K1-H10
gttcatcggtaaccttcctcaagtattatggtcaattcctgggttgaacctgcttgatatctctgacaataatttcactggggagctgcctactgctttggacaataatgccattgctgcggttcttgacatgtctcggaacaagttttatggaggtctaacaactgttctcagaaggttcagttctattaatttgtctggaaactattttgaaggcagggttccagattac

SEQ ID NO: 8797 - DNA, 350 bp, Gossypium hirsutum
  Clone ID: LIB3120-043-P1-K1-H12
cccacgcgtccgggtttgtcagccgaccctgaggcctttgccaggaatagggctcttgaggtcatccatggaagatgggcaatgttgggagcactaggctgcatcacaccagaagtacttgagaaatggcttagggttgatttcaaggaaccagtatggttcaaggcaggagctcaaattttctcagaaggtggcttggattacttaggcaaccctaacctagtccatgctcaaagcatcctcgccgttctcggattccaagtcgtcctaatgggactcgtcgaaggattccgcatcaatggcctccctggtgttggtgaaggcaatgatctttaccctggtggccagta

SEQ ID NO: 8798 - DNA, 221 bp, Gossypium hirsutum
  Clone ID: LIB3120-043-P1-K1-H2
ctcacgcgtgcgtgcaaagccattgatgaatctcgggatatctaaagctgttttcttcaatcgttggcaggtagtactgactgctggtgcaacccctgcgatcgagattcttagtttctgcttagcagatgttggaaatgcatttcttgttccaacaccttgttatcctggttatgacagggatgtaaaatggcgaaccgcggtggaaaaaatacatgttc

SEQ ID NO: 8799 - DNA, 313 bp, Gossypium hirsutum
  Clone ID: LIB3120-043-P1-K1-H3
ctcacacgcacgaccacgcgtaacgcaccgtgtgctctattgccacaccttgcacattgctgcgaccgccatttatctttctttaccaacatttccttcatcttcttcaactgttaaagctaaaccttctatattcagtcacccccatttattcattgcaaagaacgtaccatcttcttcactctttagttcttcaacgaagataacgaagcaaattcgtactgccttcaagatcaaatgctcatcggcttctttttcgaatactcttccatctgctcttctttttgactgcgatggtgttctcgttgatact

SEQ ID NO: 8800 - DNA, 161 bp, Gossypium hirsutum
  Clone ID: LIB3120-043-P1-K1-H4
cccacgcgtccgtccacgcgtccgcccacgcatccgttcacgcgtccgcccacgcgtccgaaagagaaggccggagtgaaagacaagacacagagagagagacagagagagagatgtcgggaggaatagcgcgtggtcgactcgccgaggaacgtaaggca

SEQ ID NO: 8801 - DNA, 191 bp, Gossypium hirsutum
  Clone ID: LIB3120-043-P1-K1-H5
ctttgacgcaaaattaaaatgaaataacgctgttgctagacttgacagcttgatactgactgggatcgatatataaatgaaaaactcagcttatggctttgtatttcatgggtacttcacttactccaaaatcctgttcaaattctaatgtcattgcagatgacgcattgttttactcaaaatctaaacac

SEQ ID NO: 8802 - DNA, 144 bp, Gossypium hirsutum
  Clone ID: LIB3120-043-P1-K1-H6
ctcacgcgtacgatcacacattggcacacgcgtacgcccagggaaagctgttttcttcatgcgaaggcgaaaagttttcttggcggtgtttctttttctttttggtatgagatgatcgttgaataacgatgaggaagaaaacag

SEQ ID NO: 8803 - DNA, 243 bp, Gossypium hirsutum
  Clone ID: LIB3120-043-P1-K1-H7
ctcacgcgtccggcacttcgaaggccggcgaggggtaaggtcacatcttgaccatggctgggaaggtcgtagagctcttgaccaagattgacagacgatctggtaaggagctagagaaggagcctaagttcttgaagaatggtgatgcaggtgtgattaacatggttccgaccaagcccatggttgtggaaaccttctccgaataccctccactggaaccttttgccgttagggacatgagac

SEQ ID NO: 8804 - DNA, 206 bp, Gossypium hirsutum
  Clone ID: LIB3120-043-P1-K1-H8
cccacgcgtccgcccacgcgtccgcccacgcgtccgcccactgctgtcctaatcatgctccttgggctctccagctccgcggccacaccaaagagcggtgcaggtcacgacctggtccgttcatcatgtgtccacgcaagctatcaaggcctttgttttagcacccttgtttcttactccggccaagccaacaccccacgtgagtt

SEQ ID NO: 8805 - DNA, 200 bp, Gossypium hirsutum
  Clone ID: LIB3120-043-P1-K1-H9
attctatcgggctatatgaattgctctctcttgagttttgaagaataataacgcaaagaatggtcctttaacatgaggggaagacttagacatcttgctcaatcgattacacgccgtgtatctcatgctgacaagaaggctgtaatacgtaaattctttgcttcagatgctgatctgaaaaagactgcccttaatgacta

SEQ ID NO: 8806 - DNA, 198 bp, Gossypium hirsutum
  Clone ID: LIB3120-044-P1-K1-A1
cccacgcgtccgcccacgcgtccgaaagcactgaaaacgcaaaaccatggcctctgcttctctcctcaagacttcaccagttttagacaagtctgagtgggttaagggtcacacccttcgccaaccttccacttctgcggtgaggtgccaccctgttgcaccctctggactaactgtgcgtgcaagctcatatgccga

SEQ ID NO: 8807 - DNA, 377 bp, Gossypium hirsutum
  Clone ID: LIB3120-044-P1-K1-A10
cccacgcgtccgaaacattctcaatggcaacgccattcctcaccacgtccaccactttgtcggtttctctttcaacccatctccaccgtctttccagttccttatcctctacttgtttcccttttaagccaaacctccacagagtccgtagaagcccatcacttcttgcttcctatggaaccccacacttatttaaccacgaggatcatcattccacctataaatcatggctatccaccagaattcttggacccaaatccaatttctggcaaatgggtccttcagaacctagctgtagcagagaaattttagtcaaatcctctgcatcagacagtagtaacactgtcatctccactctatctaaaaaagtgttgggg

SEQ ID NO: 8808 - DNA, 187 bp, Gossypium hirsutum
  Clone ID: LIB3120-044-P1-K1-A11
acgccttaggcaccatggcaacctctgctatccatcaatctgctttcgttggccagaccgctgggaagcagtccaatgagctcttacgcaaagtcggagctttcgatggtggtcgtgttaccatgcgcagaactggtgaaagtgcccctaccagcaattggtacgggccttaccgcccaaagtactt

SEQ ID NO: 8809 - DNA, 450 bp, Gossypium hirsutum
  Clone ID: LIB3120-044-P1-K1-A12
gtgattgcagaagctgtcaatcctgtgattgccttgtccttgagtgaagaagcagcagcctggacttgaagccttccattggatgttgtacttgggattgcccccgatggcttgagtggcaatggcttaaagaaagcttcagaggcaggcaccctgttttgggtagcacgagttagtggcagagccattgaaactgctgaagtggaagccattgatttctctcttctcactctgagttgaaaacctgcaacgctgcaacttcttctgtgagtgtttttagtatgaagggaaatggagggaggaagttagtgaactcaaggtacggacctccaacatttgagcaaccgaaaatgaccatttgaaaagctattggaatatggaaacatgcttgttgctgagcaagagaatgttaagagaggtcaaattggcttacaaatactggtgtgaagc

SEQ ID NO: 8810 - DNA, 208 bp, Gossypium hirsutum
  Clone ID: LIB3120-044-P1-K1-A2
cccacgcgtccgttgcgatctcaaagaaggcaggaatgatccctctgcagatggaattggggggaaaagatgcatgtatcgtactcgaggatgccgacttggatttagttgctgcaaacataataaaaggaggattttcttacagtggtcaaagatgcacggctgtcaaggttgtgttagtgatggaatctgttgctgatgttctggt

SEQ ID NO: 8811 - DNA, 87 bp, Gossypium hirsutum
  unsure (1)..(87): unsure at all n locations; Clone ID: LIB3120-044-P1-K1-A3
accactctttctttcaaaatcaacanannacattaaaanaaagaccattttctntttttttagctaatgactttaccacttttagac

SEQ ID NO: 8812 - DNA, 362 bp, Gossypium hirsutum
  Clone ID: LIB3120-044-P1-K1-A4
gtcttcctttacttcacaaacaaacagtactatttctttcaaaactttgcttaatattttgggttcttttgcaatatgtcccgttcttaccaagatttagagcctgattgccaatacaaagaaggagaagctcaggaccttatcgagtttcatgtcaaacattttagaaaggaccagctgaaagttcacttcggcagcaacaacgtcctaaccgtttccggcgaacggcccctggaaggaagtaaatggacccgattccgcagggaattcaccattcccaaagactgcaaagcgaacgaaatccgtgcgaggttcagttccggttttctttatataccattcccaaagaaaatcgttttttc

SEQ ID NO: 8813 - DNA, 193 bp, Gossypium hirsutum
  Clone ID: LIB3120-044-P1-K1-A5
ggtaccgtccgtattcccgttcgtcgacgcgtccgacctttctttctttcttattttatttatttctcttttgcctcttctaccattgctatttcgtgcgcatgattccacggtatggcagtgaatctctccccttcaacccctgaattccagggaactggccgtgtttccttgagtaaaaccaccaagcctg

SEQ ID NO: 8814 - DNA, 218 bp, Gossypium hirsutum
  Clone ID: LIB3120-044-P1-K1-A6
gtcttcctttacttcacaaacaaacagtactatttctttcaaaactttgcttaatatttttgttacttttgcaatatgtgccgttcttaccaagatttagagcctgattgccaatacaaagaaggagaagctcatgaccttatcgagtttcatgtgaaacattttagataggaccagctgaaagttcacttttgcaggaacaacgttctaaccgtttc

SEQ ID NO: 8815 - DNA, 181 bp, Gossypium hirsutum
  Clone ID: LIB3120-044-P1-K1-A7
aacagatttcgatcatctcggtctaggtatacataggagcgagtatccacatctgactggggggagacaagctgggctcaatcatcactatttcgatccatcattccagtagaaacggacattggagtgtggctggatctatctcacccaacatgggttaatctgacggggaaatcaactt

SEQ ID NO: 8816 - DNA, 143 bp, Gossypium hirsutum
  Clone ID: LIB3120-044-P1-K1-A8
gtcttcctttacttcacaaacaaacagtactatttctttcaaaactttgcttaatatttgggtgtcttttgcaatatgtggccgttcttaccaagatttatagcctgattgccaatacaaagaaggagaagctgatgacctta

SEQ ID NO: 8817 - DNA, 230 bp, Gossypium hirsutum
  Clone ID: LIB3120-044-P1-K1-A9
aacaatcgcagctccccctaggaagcctgtagatgtcccattctccagaaactatatgcctacttgggcttttgatcacattaagtatttcaatggtggctctgagattcagctccaccttgacaaatacactggtactggtttccagtccaaaggatcatacttgttcggacacttcagtatgcaaataaagctagtccctggagattctgcggggactgtcactgcct

SEQ ID NO: 8818 - DNA, 134 bp, Gossypium hirsutum
  Clone ID: LIB3120-044-P1-K1-B1
taactctccatgacggtacagctacacactagtagaaaggatccaacttataaaacagactaaaggaataatattctttttccctctctctctctctctctctctctctctctctctctctgtctgaaaatctt

SEQ ID NO: 8819 - DNA, 436 bp, Gossypium hirsutum
  Clone ID: LIB3120-044-P1-K1-B10
gctccataacgctcattaaattccaaaaaggaaaacttccgatcccgtctccggcgacatgtggccggccgttttgactcaggtggccaccggcttaagcgttttagctggtgccgtcttagtcaaatccgtcatggatcaaaaacccatggccggtccgtttcaaagatgcccgacttgtaacggcacgggtcgcatcacgtgcatttgcaatcgttggtccgatggagattccggttgtcggacttgcgccgggtccggtcggatggcgtgtagcagttgtggtgggtctggtaccggtagaccgattccggttcagatttctgtacgtcaaccgacgaatcggaactcttaattttccgggtttggactctttaaactcttatatatttttatagctttttttttgaaatttaataatgtaatataacagtga

SEQ ID NO: 8820 - DNA, 103 bp, Gossypium hirsutum
  Clone ID: LIB3120-044-P1-K1-B11
gttttccaatagttcgtaacaatggcggtctcacttcaagctgcagctaccctgatgcaacgcaatcaaggttgctgcaccatcaatgaccaatgtgccgctc

SEQ ID NO: 8821 - DNA, 376 bp, Gossypium hirsutum
  Clone ID: LIB3120-044-P1-K1-B12
ctttggaccagaacctggctaagaattcggctggtgagataattggaactaggaccgagggtgccgacgtgaaggcgacgccgtttcagccttacagcgaggtttttggtctacagaggtttagggagtgtgagttgatccatggacggtgggccatgttggctacgcttggtgcacttaccgttgaatggctcactggtgttacatggcaagatgctggcaaggtggagttagttgagggttcatcgtatctcggccaaccccttcccttctcgatgacaacattgatttggatagaagtattggtgatcggattcatcgagtttcaaaggaacgccgagcttgacccggagaagaggctgtaccccggaggaaa

SEQ ID NO: 8822 - DNA, 233 bp, Gossypium hirsutum
  Clone ID: LIB3120-044-P1-K1-B2
gcgtccgctgttctgcatctctgtgtttgaagatgagaattatcaacatgaagtagttaaagaagtgtgcggagatcagaaatttgttgatagcggagggtattccaagtccccagctgaagaagcagctaagggagttgttactagtgaagcagaggcctcgctttatcagagcaggcctagtgtaggggtggaaaatgatagggtgggaatatgaggtccatgtgggggat

SEQ ID NO: 8823 - DNA, 259 bp, Gossypium hirsutum
  Clone ID: LIB3120-044-P1-K1-B3
ccgtccggaatcccggtcgccgacgcgtccggtttaatttaaaaatggctacggaatcttcagaatcggaagaagacaggaagacccgtgagggccccagccactgcctgtgcggcacatactaacatggcctgctccttttaccggcctcaagtctggctctgctttcacagtgatcaggacggccaacaccgactttgctattctcccaggcaatgccgacaaatgcattgcttggcagccgtggcctcctactgca

SEQ ID NO: 8824 - DNA, 264 bp, Gossypium hirsutum
  Clone ID: LIB3120-044-P1-K1-B4
ctgcatatcgatctcgactgtggttatatttctacatacggatctcgtgaccttcattccgggcatcgttccacatgttgaaggtttgcctcttggtgccgaaacaacaaatgacgttcctttccctttgcatcctctcattatgactgccatggattgcacagaaccagatattgaagcttaccttcgtgaactcaaaccccattttgttttctttgatttcgcgtgttggttgccaactttgactaacgagctaggcataaa

SEQ ID NO: 8825 - DNA, 188 bp, Gossypium hirsutum
  Clone ID: LIB3120-044-P1-K1-B5
ccctgcgtccgtccgattccggtcgccgcgctccggttttaatttaaaaatggctacggaatcttcagaatcggaagaagaagggaagatcacaggaggaaaccaacacctaatcgttgaagatgacctgagagaaatgggcaaaaaagcagcttggagtgtcagctcttgtaaaactggcaatggcg

SEQ ID NO: 8826 - DNA, 247 bp, Gossypium hirsutum
  Clone ID: LIB3120-044-P1-K1-B6
cgggaggaatccctctatctcctttttttccccctaaaattgtattataataaatcctctagaattatctggacctcacattgataatcatctcctccagatctatccgcttcggctttgagagagaagggataaagaatatagcgaaaaagagggtaaaacggcgcatacagtagaccacgagcccgataaccttgaaaagagcgcgttgaccggctatacgggagtgggaaaaacaaatattctt

SEQ ID NO: 8827 - DNA, 200 bp, Gossypium hirsutum
  unsure (1)..(200): unsure at all n locations; Clone ID: LIB3120-044-P1-K1-B7
gcgactcttncgtcaacctttcaagccacacagtggcttcattattcccttctcacacttgagagccgcagttgtcactttctaaatccatcccaattctcaccaaatcatcacagtctcaatttcatggccttaaattctctcacccttcttctcttaaaattcctcgtttttccacttttaaaacctcgatttctgct

SEQ ID NO: 8828 - DNA, 207 bp, Gossypium hirsutum
  Clone ID: LIB3120-044-P1-K1-B8
cgcgtccgctgcacatcgatctcgactgtggtgagattgggaagaacaagcagcctcatatgtcagtggggtccgatgtgaaattggcattgcaggggataaataagatattggagaccacgggagctaagctgaatcttgattattcggaatggaggcaggagttaaacgagcagaagctgaaattcccttggagttacaagacct

SEQ ID NO: 8829 - DNA, 212 bp, Gossypium hirsutum
  unsure (1)..(212): unsure at all n locations; Clone ID: LIB3120-044-P1-K1-B9
ttttnttttttttttttgaagggaaaaactggaatgcgattacaagcaaatatgagacaaatttaaagtacaagataagaagatacaaaagcatcatagatgatttttcaatatcacctcatccatccccaatactcgaaactctagggctcaaaaagtagaaaagatgtgtgagaagacacatacaaagcacaatggggttgaaaaagaaa

SEQ ID NO: 8830 - DNA, 169 bp, Gossypium hirsutum
  Clone ID: LIB3120-044-P1-K1-C1
tggattcttcccttcaccaacaaaatcacatgcttcacaatggcctctacaaccatggctgggtgttccccatcattcgccggtaaggcagtgaagttctccccttccacccctgaaatccggtgaactggccgtgtttacatgaggaaaaccaccaagcctgttcctt

SEQ ID NO: 8831 - DNA, 443 bp, Gossypium hirsutum
  Clone ID: LIB3120-044-P1-K1-C10
cccacgcgtccggcaaagaacgtagagaataagaaaaacatggaagcttgctttctctcatggaaattccttcactaaaagtcatgagattgtgccctcaatcaaggctagatcacttacttttactaagaaaaaccccaacctttttcactctaggaaagtttctttcccatctttcatcacatgctgccatctggattcatcttcaccgtcggatgatgacaagaagccaacacttgattctgattggcgttcatttagagcaaggctagtagcattagagaaagtatcaaagcctgagaactcttcatcgtccaccaatcctgatacagtagtggatcacccttcatccgttgcaattaacgacaaatgggtccacaccatccatgagcccgaaaagggttgtctccttatcgcgactgagaagctcgatggcgtacata

SEQ ID NO: 8832 - DNA, 196 bp, Gossypium hirsutum
  Clone ID: LIB3120-044-P1-K1-C11
cttatgtggcaagcagtgacggaacagggtaatgcatgcaggtgtgttctattacgggaaagtagaagaaagagactctcttatacctgctctatctaacaccctatcagttggtttaggaagtatactacctttactgatgaaatagactaccttgctgggaatggaaataataggaggaatcattgcccggtaa

SEQ ID NO: 8833 - DNA, 165 bp, Gossypium hirsutum
  Clone ID: LIB3120-044-P1-K1-C12
tcttcactcaccactgttccaagattgttgtaaaccaagctagaaccagcagccaggatgggctcattagcagcctccgccgttgccttctcccttggcgtctctgaaatgctcggtaaccctctgaatttcattggtggagctaggccattggctccaacacca

SEQ ID NO: 8834 - DNA, 362 bp, Gossypium hirsutum
  Clone ID: LIB3120-044-P1-K1-C2
gcgtccggtcgcgcgttcggtatgcggtgatattgtaatatcatctatgatgctctcgtcatttacttgagttctttcctaataaaggtacaagttaaatagacaccgacgtatcgttgcctagtgctgttggtaccaatgttggccaccgtgttagcatgtcagctgactggatgcctggtcaacctagaccaccttaccttgatgggtcagctccaggtgactttgggtttgacccactaagacttggtgtggtccctgtgaaccttgagaggtacaaagaatctgagttgattcactgcagatgggctatgcttgctgttccaggtatattggtaccataggccttttggttaggaaac

SEQ ID NO: 8835 - DNA, 229 bp, Gossypium hirsutum
  Clone ID: LIB3120-044-P1-K1-C3
gaaaatctttccagtttcaattttctcacaacaaaactgaaaatgtcttgctgttcaggaaggtgtggctgcggcgctgattgcaagtgtggcagtggctgtaacggatgcagtatgttccctgacataatagagaagactacaactgagactattgttcttggtgtggcaactcagaaaatgcactttgagggatctgagatgggagttggggttgagggtggatgcc

SEQ ID NO: 8836 - DNA, 344 bp, Gossypium hirsutum
  Clone ID: LIB3120-044-P1-K1-C4
cccacgcgtccgatggccgccaacacactaatgagctgtggcatagccaccacatttccttcacttctttcctcatcaaagtccaagttcagtggcgccgccgtatcgttgcctagtgctgttggtaccaatgttggccaccgtgttagcatgtcagctgactggatgcctggtcaacctagaccaccttaccttgatgggtcagcaccaggtgactttgggtttgacccactaagactaggtgaggtccctgagaaccttgagaggtacaaagaatctgagtggatacactgcagatgggctatgcttgctgttccaggtatattggtaccagaggccttagg

SEQ ID NO: 8837 - DNA, 165 bp, Gossypium hirsutum
  Clone ID: LIB3120-044-P1-K1-C5
gaaaatctttccagtatcaattttctcacaacataactgaaaatgtcttgctctttatctagatgagtctacacatcatggtaacagcaacacctaaagcaagacctgtctcacaaactacatcgaatcgatcctttactcaaactgatgccaaagaagctccca

SEQ ID NO: 8838 - DNA, 175 bp, Gossypium hirsutum
  Clone ID: LIB3120-044-P1-K1-C7
gcgtccggaaaatctttccgatccaatcctgtaacatcataactatacatgtcttactgagcatgaagacgttgccaacacgctgagtgcacgtccttcaatggatgtaacggattcaacatgttacctgtcattgtggattgtgccactccaaataccgttgttcttggtgcgg

SEQ ID NO: 8839 - DNA, 161 bp, Gossypium hirsutum
  Clone ID: LIB3120-044-P1-K1-C9
ccacgcgtccgaaagattgtaggggggttttcgttttcatctacaaggaattggcatctaggtaaagcataatgttgtcccgctcttattcctgctctatcgtccacccgatcagttagtctaggctgtaaacatccttattgatgaaagggacttccgtg

SEQ ID NO: 8840 - DNA, 235 bp, Gossypium hirsutum
  Clone ID: LIB3120-044-P1-K1-D1
ctccacgcgtccgccagcccttccaggagaaaacttcttatgcgttccttagggaggttaagtgcactgactacctatattatgatctgccataaatcgatgcgcatgatttgacatgcgttatccttaaagaggattgaggcactctaaatgcactttttcatgttccgataaataatcaaacctatttaaatgttcccgccattctctatttccctggaaaagggacctaaac

SEQ ID NO: 8841 - DNA, 236 bp, Gossypium hirsutum
  Clone ID: LIB3120-044-P1-K1-D10
acgcgtctcatgacatcttgtcccacataccaactacatatctttcactacctacctggtaagctggttcggtacgcataggacaaaaacccacccacacaacttccacattgttcttcagttaaagtctaaccaaaacttctcttcttcttctgtctcttcttcttcctcagtaatggaagagcaaagagagcttgttgttttaccagctcaagcacaagaagcatatgccaggg

SEQ ID NO: 8842 - DNA, 259 bp, Gossypium hirsutum
  Clone ID: LIB3120-044-P1-K1-D11
cccacgcgtccgcccacgcgttcgtagactattttgtataactgtagcatataatactagtgagcagtaatagcaatggcctgctccatgatctcatcggtagaccattgccaccgagaactgctctttctcggtacatgccaacatggcggccccctttaccggccttaagtttgcctatgtttttcgagacacttggagggccatcaacgactttacttttcttgtatgcaatggtgggagagtgcaaggcatgcag

SEQ ID NO: 8843 - DNA, 319 bp, Gossypium hirsutum
  Clone ID: LIB3120-044-P1-K1-D12
gtcgaattccgcgcgcccctgcgacgatggatctcaccaagaccacatggggcctactgcacgtgctacgctcgagggagtgtggttcctggtgtctcttataagcactcctcgccattagtctcccctccatccatatctccttccttcgagctctaagagccttaaaacaagctcactatttggagaatcatgaagggttgtgccaaggtcatcattgaaggttccaaaggcaaagaacactacttcactagagacaaaccgtgaaactggagagactttggaggagtttcttccaaaggcaccaccagataaggca

SEQ ID NO: 8844 - DNA, 264 bp, Gossypium hirsutum
  Clone ID: LIB3120-044-P1-K1-D2
ctgatcttcaagtacttcaaagtgccacctatgtatcagaatcgggttctttcatacggtggggctggtgcagtcttctttcggttgtcattgatactacttggaacagccaccctccagaggtttgaagcggtcaacctactactggctgccgtattgttattctcatctttcaagctattttccaatgatgaggatgacactgatttgtctgacaacttcatagtgaagacttgccagagatttatccccgtcacatctaat

SEQ ID NO: 8845 - DNA, 181 bp, Gossypium hirsutum
  Clone ID: LIB3120-044-P1-K1-D3
gtccgccacgcgtacataaccatgatcagtagatgattatttgaggaccttatcagggacgttcaggggggcggcaactagtgatgactgagcttcctgagtgagtgtttagtattgattccgggatgaagggtggcatgtctgtgaaagctgccatgattttgttgcatgaagggcataa

SEQ ID NO: 8846 - DNA, 300 bp, Gossypium hirsutum
  Clone ID: LIB3120-044-P1-K1-D4
cggacgcgtgcgctttcttgttcttccaacctttctaaatcacttcattcttcacaatcctgtggttttcgtgttaagatgactgcttctgttgaagataaaaagaagaattatacccttcaaaaatctgaaaaagctttcaatgctgccaagaatttgatgcctggaggtgtaaattctcctgtccgtgcctttaaatccgttggtggacaaccgattgtgattgattctgttaaaggttctcatatgtgggacatagatggtaatgagtatatcgactatgttggctcctggggtccg

SEQ ID NO: 8847 - DNA, 169 bp, Gossypium hirsutum
  Clone ID: LIB3120-044-P1-K1-D5
gccacacgcacaaaagccatgtcaaagctggtggtgttgcaaccaacaaagcagcctcccagctgcctcctctcttcctctctttcccacttcaatggcaccaagctctgccaaatccagtacaaaagaaaggtatatcagccaaaaggtgcattgcatgttgcaacat

SEQ ID NO: 8848 - DNA, 137 bp, Gossypium hirsutum
  Clone ID: LIB3120-044-P1-K1-D6
atgcatggtatgtatatctatttgccacctatgttgacttgattggtggttacatccacattcgagatatcattctcaagggcggcttctcatcctacgttcatacaacacaagaaagaagcgttttggttcgacag

SEQ ID NO: 8849 - DNA, 213 bp, Gossypium hirsutum
  Clone ID: LIB3120-044-P1-K1-D7
cacagtcttacaatatgtacaaaatcaaagataagggaggggattattatactttgaaggagaaaaaaaatcaagaaacgcttcctttttttctcctttgattttccccgtatgaggtcttgaaattgttcgaatccccttttttgtaatttttttcatctaattctcagttttcttttctatttatttttctcgagttctttttttgggata

SEQ ID NO: 8850 - DNA, 65 bp, Gossypium hirsutum
  Clone ID: LIB3120-044-P1-K1-D8
gcgtctcgcccactcgtcctcccactcgtccgcccacgcgtccgaaagattctttcaaaacatta

SEQ ID NO: 8851 - DNA, 164 bp, Gossypium hirsutum
  Clone ID: LIB3120-044-P1-K1-D9
accgagaagctgagctgatccatggacgttgggccatggctgctgtcgtcagcatgttcgggggccaagcttggagtggcattccatggttcgaggcaggagctgacccaggtgcgatagctccattctctttcggatcactccttggtactcagctaatccta

SEQ ID NO: 8852 - DNA, 250 bp, Gossypium hirsutum
  Clone ID: LIB3120-044-P1-K1-E1
gtcgaccacgcgtccgcagactcttacaatatggtgccaaaacggcgttaaagggtggctagggtttctgaatttaagtgcttaaaaatcatttgggaaaaagatccaaaattgtcgcaacgcaattcgggagattaatgcctaatcttgatcaacaaagcacgaaactgctaattttaacggctgtccgtcgtatggaccctttctgaaaaaaaattcttatcaccgctgctcatgtcgccttctatga

SEQ ID NO: 8853 - DNA, 284 bp, Gossypium hirsutum
  Clone ID: LIB3120-044-P1-K1-E10
gcgaatagctgagttagagccactagcactagtaccaaccctggcttacgccgcatgtttggggcagcaccacgcactcaccaccaatggcagatcatcatcattaccgccgtcgctgcgccaggcttcaaacatgaagcctaaccagcgggcggtgtgcaaggctcataagctggaagatgatggaagccttgtgacccgaaggtcggctctcactgtactaattggtgctgacgctgcaggctctaaggtttgtaccgctgatgctgcctatggtgaagctg

SEQ ID NO: 8854 - DNA, 367 bp, Gossypium hirsutum
  Clone ID: LIB3120-044-P1-K1-E12
cgcgactagctgacttagagctgagctgagctcacgagttggtttttttattcagcgctgaggggctgtaccaacctaacacttttttttttcgattaaatttccatgggtttctaataaacgatccctttctgcttaattatcttttcctgagtcgcaatgctccattcctctgcttgctgcaatatgcaagagtcttaaccaaaatgccggcggccatatcaaactgtgtctgcgaactttgcatgccctgaggtggagaccataatgttttctgagagtgttagtgaggaagcgcctcggcaggaatttgagacgcttactgtgtctcaaccacttgtgaggagcgttagccagaagtttgggc

SEQ ID NO: 8855 - DNA, 179 bp, Gossypium hirsutum
  Clone ID: LIB3120-044-P1-K1-E2
gcgtccgcccacgcgtccgcccactcgtccgcccacgcgtccgaaagattctctcaaaacagtgagggagtggtagttcgagttatcgacgacgttttttttcaacacgaaaaaaaatggattacttttatggaccagggaggaaccatctcttcgttccgggtccggttaacataccg

SEQ ID NO: 8856 - DNA, 318 bp, Gossypium hirsutum
  Clone ID: LIB3120-044-P1-K1-E3
cccacgcgtccgtttttttttgagaacaaacaacattgcaaacaaggcataggtgtgacatgactgagttggcagtcttacaacccttttggattttatgaatgtctgcccccgttttatgtgttattttttatggtttttcacgtttgttgcaaacactgccatttgttacttatagtttaagaataattgacaaagtttgggaccgttatttcctagcgggatttgatggttagccagtttaattacccttttattgtaaaatatacttattttatcctttttttttttttccttcattcctggaatgctggtttt

SEQ ID NO: 8857 - DNA, 231 bp, Gossypium hirsutum
  Clone ID: LIB3120-044-P1-K1-E4
cacacaaaacataagcacagtctcacgagaaacttcatttctctgccacaaaaagctcccccggggggactcccctggcatcaacagcacaattctaaacccaaaaacataaaaaaaatggcagcaagtgtagcaacaatggcgatgctcaatgcaaaatgcctaagcatcagctcaactaagatgggcagcccaacaaagccaacccaaaggccttttttcctttctttc

SEQ ID NO: 8858 - DNA, 147 bp, Gossypium hirsutum
  Clone ID: LIB3120-044-P1-K1-E5
cacactcttacagtacggtccagaacggggataaatggtggctaggtttttaatcagaatggggcacttggattggtactaaacactctactggatttgattcagcttcattttattgcattgttcaagatgggtgatgtagctaag

SEQ ID NO: 8859 - DNA, 67 bp, Gossypium hirsutum
  Clone ID: LIB3120-044-P1-K1-E6
tttgggcgacgcgtccgcccacgcctaactctactcttccagttcaaatattttggcacatgttctt

SEQ ID NO: 8860 - DNA, 216 bp, Gossypium hirsutum
  Clone ID: LIB3120-044-P1-K1-E7
ccaccccctctctctctctctctctctcatcaacattcaaaaacattcttaatattatcgagccccctttgaaacactggcaggcatatttaaattaaaaatccttaacgttatgtttaaaatcaaacccttatgcatgggtactcctttaattaataccttcgtttcttttgggacagaaaataggttttcaacctttaatatttccacactttt

SEQ ID NO: 8861 - DNA, 213 bp, Gossypium hirsutum
  unsure (1)..(213): unsure at all n locations; Clone ID: LIB3120-044-P1-K1-E8
ggcggacgcgtncgnccacgcctccncccacgcgtaagaacagtatatcggcaaaaatgttcattgagagctttggggttgagagtccaaatgtcaagtacacagacaatgcattccagtcggtgtacaactatgagactactgagcttgttcatgagaacagggatggaacctatcaatgggttgtcaagcccaagactgttaaatatgaat

SEQ ID NO: 8862 - DNA, 241 bp, Gossypium hirsutum
  unsure (1)..(241): unsure at all n locations; Clone ID: LIB3120-044-P1-K1-F1
cttccccccctctctctctctctctctcataaacattcaaaaacattcttaagaatattgaagccccaaagaaacacagaaaggaaaaataaaaataaaaatacataatgttatgtttcagatcaaacccttatgcatcggcttttcttttatttttttcttggtntctttttggacgggaaataggttctaaagctttaaatgtccaaacttggattatttaagggtttgggaaaagttt

SEQ ID NO: 8863 - DNA, 69 bp, Gossypium hirsutum
  Clone ID: LIB3120-044-P1-K1-F10
taattttttctatatttatttatatttcttaattcctaagaaaatataattttttatactttttttttt

SEQ ID NO: 8864 - DNA, 81 bp, Gossypium hirsutum
  Clone ID: LIB3120-044-P1-K1-F11
ctcaattgacacaataaaaaaatcctaaaagaactaccttttctatactattatgggggatgtaaaccatataatctgcct

SEQ ID NO: 8865 - DNA, 304 bp, Gossypium hirsutum
  unsure (1)..(304): unsure at all n locations; Clone ID: LIB3120-044-P1-K1-F12
ggcattcaggttgtcaaggctgatgactgcattggtccagaagtagaaaagttagttgctggacttcctgaaggtggtgttcttcttcttgaaaatgttagattttacaaggaagaggaaaagaatgaacctgaatttgcaaagaagcttgcttcgttagctgatctctntgtcaatgatgcatttgggactgcacatcgagcacatgcatcaacagagggtggtacaaaattcttgatgccatcacgtgcttgtttccttttacagaagggactagcctaccttgttggtgctgtttaaagcc

SEQ ID NO: 8866 - DNA, 178 bp, Gossypium hirsutum
  Clone ID: LIB3120-044-P1-K1-F2
aacatcgcgtccgagcccgtgaattcatatataggagggattcgtgcaccgtaaatactcgagcctacccacgtactacgatggacgctactggaccatgtggaagctgcctatgttcgggtgcaccgactcggctcaggtattgaaggagcttgaggaatgcaaaaaggaatacccc

SEQ ID NO: 8867 - DNA, 181 bp, Gossypium hirsutum
  Clone ID: LIB3120-044-P1-K1-F3
cccacgcgtgcgggaacctgaaagcgtgtcactcacagactgttattagccctactgcacgggagacgacaggcacgagggccggtccaagaggtaatcatagcgaacaccatcgcagtggctgagcaaaactattttcatcagctgactgtcctggctgcggcaaaccctgtgggagaga

SEQ ID NO: 8868 - DNA, 86 bp, Gossypium hirsutum
  Clone ID: LIB3120-044-P1-K1-F4
tccacgcgtccgatcccttcattcattcatatatgcttgctgttataagtgggcctgtaggggggttttttaagtggggggttttg

SEQ ID NO: 8869 - DNA, 193 bp, Gossypium hirsutum
  Clone ID: LIB3120-044-P1-K1-F5
ggctacttcatcatcttcttcaaagctttcccttttcttcttgttttccttcttgtttgctgccactttagctcgtaattccccttcaccaacaacaaaaatcctcgatgtcttagcttctttgaaacaagctcagcatattctttcctttgatcctcaaatttctaatggttttgccaaaagccaacccctt

SEQ ID NO: 8870 - DNA, 248 bp, Gossypium hirsutum
  Clone ID: LIB3120-044-P1-K1-F6
cccacgcgtccgatcccttcattcattcatatctgcttttctttacgtttggtcattcgattttttctttgggttttccttctttttgatccttttgctattttgggtggtgaaagattgaagaattttgatcatgtcgatcgcgttggaacggatagaatcggcggggttcgggcgggtcatgaactgcgcttgcgatagttctaaattcgaatcgcctccgccggttaaggaaacgaaacggttgt

SEQ ID NO: 8871 - DNA, 237 bp, Gossypium hirsutum
  Clone ID: LIB3120-044-P1-K1-F7
cccacgcgttcgtggacctgaaattcgtgttatttcacattactgttttttatccctcacccattcgatcccagagtcgtacctggatgaccactgcctactgtcgcaagattgctcgaaatgtgatggctatggccactggtgagactttggccacgcgtgaagctccaacctaagttaccccaactgagctgacaaagtttatcaccaaattacatgaaacctgggttaaagttg

SEQ ID NO: 8872 - DNA, 73 bp, Gossypium hirsutum
  unsure (1)..(73): unsure at all n locations; Clone ID: LIB3120-044-P1-K1-F8
cccacgcgtncgtcgaactctattcgagaatttcacatgctgttttattcctcccacagtgagacactttcac

SEQ ID NO: 8873 - DNA, 227 bp, Gossypium hirsutum
  Clone ID: LIB3120-044-P1-K1-G10
cccatttccaatctccagctcccaaggtaaatatgccgatcagaaacatagcggttggccggcccgaagaggctactcaccccgatgctctcaaggctgctttggctgagttcatctcaaccttgatcttcgttttcgctggatcgggctcaggaatggcctttaacaagttgactgacaacggagcaaccaccccggctggtctcgtagccgccgctctagctcat

SEQ ID NO: 8874 - DNA, 398 bp, Gossypium hirsutum
  Clone ID: LIB3120-044-P1-K1-G11
gttactagccacctttcttcattgccttatctccacggattttccggtcgactttgtttgaagttgctccattttgggggtgacgaaagctggattccattttttttattgtctttaaatatattttggtggctggaaaatagtttcatgcgctgactcagttgctgcataaaaggcattttttccagggtgtcattgtagttgggaaaaatcaactctttgttctgagggggactcatcaattcatctgccaataacactggcattatgaaggttcctgagatttgggttgtcttctatgtgatcgggacagctttgttcgtcttcgacttcagcagctcctgcattcctggtatagatttgcagcatgttgatgagacgagtatgagtgaaacaag

SEQ ID NO: 8875 - DNA, 352 bp, Gossypium hirsutum
  Clone ID: LIB3120-044-P1-K1-G12
cttagactcggatccaacaaacttagtacaaaacctccgcaaggatggaaagaagccgaggggatacattgcagataccaccactgcaaacgcccaggttcgaactctggctgaaactgtgcgactagatgcacgaaccaagttgttgaaccccaaatggtatgaaggaatgatgtccagtggatatgaaggggttcgcgaaattgagaagcgccttacaaatactgtagggtggagtgcaacttcggggcaagtggataactgggtgtacgaagaggctaattcaactttcattcaagatgagaacatgttgagcaggctgatgaacaccaatcccaactcgttcaggaag

SEQ ID NO: 8876 - DNA, 181 bp, Gossypium hirsutum
  Clone ID: LIB3120-044-P1-K1-G2
cccacgcgtccggggaagtgtatgcgtgtagtacacatgctgtttttagtcctcctgcaatgagaaagattgtcaagtggtcttttccaagaggtaatcataacaaacaccatcccagtgtcagagcaaaactattttcctcagttgactgtcctctctgtggcaaaccttctgggagaga

SEQ ID NO: 8877 - DNA, 284 bp, Gossypium hirsutum
  Clone ID: LIB3120-044-P1-K1-G3
gctactctttctcagattaggtgctgcttgagttttacaccctgtttataccctccctgcttgcgcgctttccgtcttctgtttcttccttctgtctttcttttgctgaagattacaatagaatcgacgcttggccttctcaaccttttattttcggagtttactgcaactggaaaggtatcattgcatttcattgcgattcctaaccaaaccaattaaaatttgcccaaaataaaaccctttggccgtttccttttttttttgggttcgacggaagggggaaa

SEQ ID NO: 8878 - DNA, 286 bp, Gossypium hirsutum
  Clone ID: LIB3120-044-P1-K1-G4
cagctgaaacatatagcgctagtaagcaatactagcaatggcctcctccatggggcgatcggcaaccattggcagcgttaactgctccttcccgtgacatgccaacatggtggcccccttcaccggcctcaagtctgactgtgctttcccagtcactaggaaggccaacaacgacatcgctattcttgcatgcaatggtgggagagtgcgatgcatgcaggttgggcctcctcttggtgagaagatgtttgtgacacgcttagacctgccgcggtcttacacccgg

SEQ ID NO: 8879 - DNA, 101 bp, Gossypium hirsutum
  Clone ID: LIB3120-044-P1-K1-G5
caccgactcgcattaggtattgaaggagcttgaggggggcaagaaggaataccccaatgcattcattataatcattggctttgacaacttgcttcaagtgc

SEQ ID NO: 8880 - DNA, 459 bp, Gossypium hirsutum
  Clone ID: LIB3120-044-P1-K1-G6
gcgtccgtcacgcgtccggtgaagtgtatgcgtgtagtacacatgctgtttttagtcctcctgcaatgcggagattgtcaagtggggggttccaataggtaatcataacaaacaccatcccagtgtcagagcaaaactactttccttagttgactgtgctgtctgtggcaaaccttctgggagagaccatatggcgtctccatgatgattgctctggagggttagaaccctatgcaaccttgggcattgattgaattctccacatgctatgagaattttcgtatggaactgcaaatcaattatctatggcttcattgggtagttaggtggtcttcttttaatcacaaaaagtttgtggaatgaactggtaaggcaacaattggatggctactatttttttgcttctcttctttggggttatattgatatccggcgtaatgggtggtattttttttttcc

SEQ ID NO: 8881 - DNA, 156 bp, Gossypium hirsutum
  Clone ID: LIB3120-044-P1-K1-G7
cttccctcagtaccttcctaattccctttcgacccactcgttcggttcctctttctcacacacgtcctgcttgatttttacaccctgatttacactccttcttaggggaaaattaaaaagaaatctaatattgaagatttattaaaattgcaatca

SEQ ID NO: 8882 - DNA, 136 bp, Gossypium hirsutum
  Clone ID: LIB3120-044-P1-K1-G8
gttttgtataactgtacaatttcacagttgttttcttcagtctctctctcagccatggctgcagccatctccaccgtcgctgccgctgccgccgccaaccgagctctgggagtgtcagtcccaacctaagctttat

SEQ ID NO: 8883 - DNA, 91 bp, Gossypium hirsutum
  Clone ID: LIB3120-044-P1-K1-G9
ataactcgataaaatagtgcgtttgctcaccaaattcagttccggggaaaactctgatcgggggagacatactttgctggctctttcacca

SEQ ID NO: 8884 - DNA, 325 bp, Gossypium hirsutum
  Clone ID: LIB3120-044-P1-K1-H1
cccactcgtccgcccacgcgtccggttgggttaagcactctttaaaaaaaaggcaggtgaaggaaaaataaaaaggaaatctaagagggaagataaattaaaattgcaatcaatttcgagtttggtaatcgggatcagggtgtctttagaaattaaagagagtttgatttggtttttagggtggaggcttaaggaggatccttccttttacttttatcgtttggcttttgtcagccactcttttcttgttcttgttcgtcaacgcctccaacacatattacttaatcaatattttcttcatctgattttgatcggagcatcagtc

SEQ ID NO: 8885 - DNA, 202 bp, Gossypium hirsutum
  Clone ID: LIB3120-044-P1-K1-H10
agcgcccacgcgttcgtacaaagtctgctcgctcatagcacatccttctagtagcaaaaagggagaacggcagtactagctttcttttttggtgcattgtttcgatagcaatggagatggtaacgaagttggcatccgagagaccggttgtgatcttcagcaagagttcttgttgcatgtgccatacaataaagaccctttt

SEQ ID NO: 8886 - DNA, 345 bp, Gossypium hirsutum
  Clone ID: LIB3120-044-P1-K1-H11
cccacgcgtccgatttagctatagcatacactactagtacccactactagcaatggcttccgcaatgatctcatcggctaccattgccactgcctctccggcacaggctaacatggtcgctcctttcaccggtctcaagtctgcctctgctttcccagtcaccaggaaggccaacaacgacattacttttctcgcaggcaatggcggaagagtgcaatgcatgcaggtgtggcctcctactgggaagaagaagtttgagactttttcatacctccccgaccttacacccgtgcagttggctaaggaagtaaattaccttcttcgttcaaaatgggttccttgctt

SEQ ID NO: 8887 - DNA, 352 bp, Gossypium hirsutum
  Clone ID: LIB3120-044-P1-K1-H12
cccacgcgttcctccacgcgtccctcgctttcaaacgaaaaagactgaaatgctgaagaagggagttgaagaaaagagatggtctgaaaaatttatttcacgtgtagtgttcaatgatgacttggtcatagcatctccagacacttttaaagtagctcttggatcagatgcagaatttgtcctgttggcatctgatggtttatgggattacataaacagttcggacgcagttgcttttgttcgaaatcaattacgagaacatggagatgttcaggtagcatgtgatgcacttgcacaagccgctctggataaaggctcagaagacaatgtcagcattatcatagctgatttc

SEQ ID NO: 8888 - DNA, 201 bp, Gossypium hirsutum
  Clone ID: LIB3120-044-P1-K1-H2
cttttgtttttctttagcatatagtactagtaagcagtaatagcaatggcctcctccatgatctcatcggcaaccattgccaccgtgaactgctcctccccggcacaggccatcatggtggcccccttcaccgccctcaagtttgcctctgctttccaagccactaggaaggccaccaccgacttcacttttctggcaggc

SEQ ID NO: 8889 - DNA, 110 bp, Gossypium hirsutum
  Clone ID: LIB3120-044-P1-K1-H3
ggagggaagggaaggaatgaaaggaaatagaaaaagggaggtggggggaaaggaagcaagaaggggacggggggatagcaactagggttaggggttggggcgggggaggg

SEQ ID NO: 8890 - DNA, 232 bp, Gossypium hirsutum
  Clone ID: LIB3120-044-P1-K1-H4
ctggatccaactcggctttgttgcaaaaaatcaatctgtcatggcaaccatctcggctaccgccacccctgcagctcttgttcacaagacattgcccaggattgcatccccagtccccattgggtcgccaacaatgggaaagaggggaaggtgatgatgatgtgtagcatggagaagaagagtgagaatgggtcaaacatggggatgagtgcatcattgctgcagcagcctg

SEQ ID NO: 8891 - DNA, 103 bp, Gossypium hirsutum
  unsure (1)..(103): unsure at all n locations; Clone ID: LIB3120-044-P1-K1-H5
gcgactctcnnttcttccacactatcatgcactttctaaactaatgtattgaaagagcttgagcggtgccagacggaataccccactgcattcattaaaatca

SEQ ID NO: 8892 - DNA, 166 bp, Gossypium hirsutum
  Clone ID: LIB3120-044-P1-K1-H6
cttttgataactgttccacattctcatagctttcatcatcttcaaatggctaaatcactggggattgttatgttatgttttctcttagtaattgttttacttggagaaatccaggcatcaagcccttctcaaaaacaaagacaaggcaaccatggaaatggaatgt

SEQ ID NO: 8893 - DNA, 99 bp, Gossypium hirsutum
  Clone ID: LIB3120-044-P1-K1-H7
cgcgtccgcccacgcttccgttgcaacctaaaagaaggctggaatgtcccctctgcaaatggaattggaggaaaaagatgcatggttggtactcaagaa

SEQ ID NO: 8894 - DNA, 170 bp, Gossypium hirsutum
  Clone ID: LIB3120-044-P1-K1-H8
cttcttcctctcatctgctcttcctttctaaaaccctaacaaaagggacctgtttttcttccctatctaccatgtccatcaaccttaacgcccatgcatttgctggtaaccccataagatccaaaacccctaaagcccatgacccactctccccttcttagctttcagtc

SEQ ID NO: 8895 - DNA, 190 bp, Gossypium hirsutum
  unsure (1)..(190): unsure at all n locations; Clone ID: LIB3120-044-P1-K1-H9
gccgtttggtttgagacagaaaatgaatcatatgctccttgttattaaactaatactagcaggaattgagaaactatcaccgactggtatatgcgtgtatgcataagtttcttgttatcattcagcagaatgtgaaccatattgttctaaattactatataatatatgaggagaatctgtttgcctaana

SEQ ID NO: 8896 - DNA, 135 bp, Gossypium hirsutum
  Clone ID: LIB3120-045-P1-K1-A3
cccacgcgtccgattctctctctgtattatctttgcctctttaatggctactatcgggttgtttctcatatcctttcttatttgctttcactcttaaagggctgagccttttatcggagtgaactacggtcaatt

SEQ ID NO: 8897 - DNA, 177 bp, Gossypium hirsutum
  Clone ID: LIB3120-045-P1-K1-A5
atatttagctatagcatacactactagtacccactactagcaatggcttcctcaatgatctcatcggctaccattgccactgcctctccggcacaggctaacatggtcgctcctttcaccggtctcaagtctgcctttgctttcccagtcaccaggaaggccaacaacgacattact

SEQ ID NO: 8898 - DNA, 224 bp, Gossypium hirsutum
  Clone ID: LIB3120-045-P1-K1-A6
gaaaacagtacgaaaacttccaagaattcaacatttatatgccccagttgactggtaacctgggaaaggaagatgatgagtttgagatcttgtcttctctccacccaactccagcggtttgtggacttccaaaagaagctgcacgcctcttcatttcagaaactgaaatgtttgaccgagggatgtatgctggaccagttggttggtttggaggaggagaaagt

SEQ ID NO: 8899 - DNA, 67 bp, Gossypium hirsutum
  Clone ID: LIB3120-045-P1-K1-A7
atcccccccgaccacccacccgtccgcacactcatcatacactactattcccctctattaaacacac

SEQ ID NO: 8900 - DNA, 181 bp, Gossypium hirsutum
  Clone ID: LIB3120-045-P1-K1-B1
ctaaagccccccaattttatttctctagccgatataaaaacgctgtaggactgaatatctgctccaacttccttccttacttcccgaggtgctttagctattgaagtcagttgacaatggcatcttttgcaagttttgcattcaacaaatttgaagcagctgcattgcaagggttcttcca

SEQ ID NO: 8901 - DNA, 229 bp, Gossypium hirsutum
  Clone ID: LIB3120-045-P1-K1-B11
cccggtcgccgacgcgtacgcccacgcgtccaaattcaaccaccagaacatgcctacttcttagccatggcaaccaccacagggtggagcgtgacacattgttttcggtacccgtatatctacctgtgacaccaatattgggaagaatccaagctaggataggctttggaaggaaacaagagcaccacccttctttgaaagtggtgaacttaaatgatggtctttttac

SEQ ID NO: 8902 - DNA, 359 bp, Gossypium hirsutum
  unsure (1)..(359): unsure at all n locations; Clone ID: LIB3120-045-P1-K1-B3
caccaacaaaatcagttgcttcacaatggcctctacaaccatggctctttcttccccatcattcgccggtaaggcagtgaagttctccccttccacccctgaaatccggggaactggccgtgtttccatgaggaaaaccaccaagcctgttccttctggtagcccatggtacggtcctgaccgagttttgtacttgggtccactttccggtgagccaccatcttacttgaccggtgagttccctggtgactatgggttggacactgctggactctcagctgatcccgagacctttgctaggaaccgtgagctcgaagtcattcactgcagatgtgccatgtngggagctcttgggtgtg

SEQ ID NO: 8903 - DNA, 279 bp, Gossypium hirsutum
  Clone ID: LIB3120-045-P1-K1-B5
ctaaagccccccaatttttatttctctagccgatataaaaacgctgtaggactgaatatcgcctccaacttcctcccttacttcccgaggtgctttagctattgagttcagttgacaatggcatctttgcaagttttgcatgcaacaaatctgaagcagtcgccattgcaagggtttcttccactctcatcccgttatgctgtggctgcgcccctgaaatcgactgttttgtcgaggacaaagaccataggccagaagaaccaaaagagatcttttaca

SEQ ID NO: 8904 - DNA, 251 bp, Gossypium hirsutum
  Clone ID: LIB3120-045-P1-K1-B6
cccacgcgtccgcacgggttccactgcggttatcttcaaagtactagtaaaagattagaaggctaaagcagtgagagggggcgcagcaatcaaaaatcaaatcgaatattgcagagaagaatagagaggaaagagaaggaaatggctttaaatggaaatggttgctgttggattcaggagcgtattttaagtagaaatggatgtagtgtgttcctcactcccaggagtaggtcttttgctgccattttgcc

SEQ ID NO: 8905 - DNA, 125 bp, Gossypium hirsutum
  Clone ID: LIB3120-045-P1-K1-B7
ttcccgtcgagacacgtccatgaacaaccaaatttttatcctttagccgtttataaacactttacttcttaattagggggggtactttatatgtttctttatatactttttacatttcattttat

SEQ ID NO: 8906 - DNA, 433 bp, Gossypium hirsutum
  Clone ID: LIB3120-045-P1-K1-B8
cgcctagcctaggttgtctgtcgacaacaatgtctcacctgctgaagctctatctctggggttacaactctctccaggcttttggctggacaatttctttggtcagaattttgtcctgtttcatagccaccaaatctgtcattggcgcctatgcttctgctggagacttaatctgtttgttacaaacttgtgcgttcttggaagttgtacatggagcaatagggattgttccaagtggagtgttgtttcctctgatgcaatggggtggaagaacacatttcttattagcaatcgtccgccggattcacgaggtacaggaattatctgcagttttcataacattttttgcttggagcctaaccgaggtaatacggtattcgcattatgcattgaacatatctgggcggttgttcgtcttggctcacctacctga

SEQ ID NO: 8907 - DNA, 254 bp, Gossypium hirsutum
  Clone ID: LIB3120-045-P1-K1-B9
cttgagggaaagaaataaaaagaagaagaagtttgaatctatttttttgaagatcgacggtggggaataaagatgttaagcgtgggacaaacaacttctcaaagtggacatcctatggggacttcatgcccaaacgaccaaggactacaacgtgccaccatgagaacccttgtttgaccctggtgaactcaaatcatggaccttatacagagctggttttgccgcgtatgaagccaccttcttgttcctttaca

SEQ ID NO: 8908 - DNA, 370 bp, Gossypium hirsutum
  Clone ID: LIB3120-045-P1-K1-C11
gccacgcgtcctaccacgcgtccgacaatggcctttacaaccatggctctttcttccccagcattcggcggtaaggcagtgaagttctccccttccacccctgaaatccagggaactggccgtgtttccatgaggaaaaccaccaagcctgttccttctggtagcccatggtacggtcctgaccgagttttgtacttgggtccactttccggtgagccaccatcttacttgaccggtgagttccctggtgactatggttgggacactgttggactcttagctgatcccgagacctttgctaggaaccgtgagctcgaagtcattcactgcagatgggccatgttgggagctcttgggtgtgttttccctg

SEQ ID NO: 8909 - DNA, 373 bp, Gossypium hirsutum
  Clone ID: LIB3120-045-P1-K1-C2
cgcctagcctaggttgtctgtcgacaacaatgtctcacctgctgaagctctatctctttgcgttacaactctctccaggcttttggctggacaatttctttggtcagaattttgtcctgtttcatagccaccaaatctgtcattggcgcctatgcttctgctggagacttaatctgtttgttacaaacttgtgcgttcttggaagttgtacatggagcaatagggattgttccaagtggagtgttgtttcctctgatgcaatggggtggaagaacacatttcttattagcaatcgtccgccggattcacgaggtacaggaattatctgccagtttcataacattttttgcttggagcctaaccgaggtaatac

SEQ ID NO: 8910 - DNA, 58 bp, Gossypium hirsutum
  Clone ID: LIB3120-045-P1-K1-C4
gtttctttcttctctctcaaaaatctctcatttccaatagactctccgctcctctgat

SEQ ID NO: 8911 - DNA, 261 bp, Gossypium hirsutum
  Clone ID: LIB3120-045-P1-K1-C5
attttctcacctgaaacaccaattacgctcccataaacaccacttcgcaacccaaaatttacacttcttctgctactgctaccgccatttctgcttttattttcaaccttacctctctttgcttactttcaagatatggatatgcttccttcttttattctttatccacttattaatggtggaagccatctttctaatttccactctctttcttcttcttctaacaccattgcttcccatatggaagcctaaagttacaaa

SEQ ID NO: 8912 - DNA, 311 bp, Gossypium hirsutum
  Clone ID: LIB3120-045-P1-K1-C6
gtttctttcttctctctcaaaaatctctcaaatccaatagactctccgctcctctgatctgtgcttcgacttggtttatgagctcgaaggagaaacccactcttggcggtacgcggattaagacccgcaaacggaatattgctgcacccctggacccttcagcatttggtgatgcagtagtccagatctatttggataatgctggtgacctggaacttgttgccaggagcattgaatcttcagatcttaacttctcaagatacggtgacaccttctttgaggttgtttttgctggaggccgcacacaaccg

SEQ ID NO: 8913 - DNA, 162 bp, Gossypium hirsutum
  Clone ID: LIB3120-045-P1-K1-C7
gagcaaacatgtatgatttcaccattcaaaacgacggtgaggtggtgacattggagactagagttatgactgcaaagattacagggactttgaaggatgaatagcctttgattgtttacaaaattaacaaggtattattgtccagtgagttgtacaagccat

SEQ ID NO: 8914 - DNA, 243 bp, Gossypium hirsutum
  Clone ID: LIB3120-045-P1-K1-C8
gaaaacttccacattgttctactccctcttttcttagcttcaaccctttttcatcttcattcccttctttctcaacgcgacacaacaaggttttacggacaccatctctggcagtagcttccatggctgatctgagtactgtgctcgccactggagccgctggctgaacaggtcaaatagttcacatgtagctgaatgaggggtgggaccagtttctcgtgggaggactctttggatcttcag

SEQ ID NO: 8915 - DNA, 154 bp, Gossypium hirsutum
  unsure (1)..(154): unsure at all n locations; Clone ID: LIB3120-045-P1-K1-D10
taccgtcccaattcccgntggacgacgcgtccggctgagcaccgtgccggcatagtccccgttttctaccgccgggtgccatgccttcaaaagaggagggataatgggcacactcaatggatttctatattataacctattgttgatttcttac

SEQ ID NO: 8916 - DNA, 272 bp, Gossypium hirsutum
  Clone ID: LIB3120-045-P1-K1-D11
gaacagaaaaaagaggtcttccgtctcatattcttcgatcctctggaaagttgtagaccagggcaagaatacattatggctggacatagtgattcaagttcgtctgaaaagaaatcaagtgaagccatgaatgatgtaccgacctttagcacggagaatatgcaaaataacatgaaagttatatattacagccgaacgtttatgtctatcatcggaggagttattgctggaattttagggttcacaggctttatggggcttatcttttattt

SEQ ID NO: 8917 - DNA, 230 bp, Gossypium hirsutum
  Clone ID: LIB3120-045-P1-K1-D5
cccacgcgtccggtcggttcagtgacagttcacatcctattgagagatttaaaaggatagggcgggcaactcaaggtgccctcattgtagcttccactcttcagattgtccttggcttcagtggcctttggcgtaatgttgcgaggtttttaagtccactttcagtcgttcctttggtatctctagttgcttttggtcttacaaatttgcttttcctggggttgccaaat

SEQ ID NO: 8918 - DNA, 233 bp, Gossypium hirsutum
  Clone ID: LIB3120-045-P1-K1-D8
atcgctgctccacatttcggtataaaggctaatggggaacacatgaacctatatatcgagggcgacatgctaatttttctatggcgagtaatgaggaggcttacgaacaatttttttcgggaaatgcaagaacaaataattgatggaggtctgcctaaagttatcgcttgtgtggagaatctcattaacgaaagtcaaaaggaacccgttttcccacaaaccctgcccaaact

SEQ ID NO: 8919 - DNA, 257 bp, Gossypium hirsutum
  Clone ID: LIB3120-045-P1-K1-D9
gaacagcaaacagaggccctccggataatattctttgatcctatggaacgttgttgaccagggcacgaatacattgtggctggacatagtgattcaagctcggatgtaaagagaacaggtcgagccatgaatgaggtacccacctttaccgcggcgaatatgcgcaaaaacatgagagctgtatattacaggcgcacgtgtatgcttatcatgggaggagctattgatgggatcttagggttcacaggcgatatggg

SEQ ID NO: 8920 - DNA, 315 bp, Gossypium hirsutum
  Clone ID: LIB3120-045-P1-K1-E1
gcagatggcctcactcgccaacacaaccgcaggtgccgttgccggcgcccggaaaatttccaacggaaaacgtattcccatcatttctttccaaatccctctcctttccctctttcaggccttccatttcctcactgaaacccttaatccccaccaaattctcctctctttcccctctccaatgctcccctaatccctccccttctacctccccgccttccctcaaatctcgcctccgcaacggcgaaaccctttacggaatcttccttcctttattcttcccccacttttggctgaaaatcctcgccctttttt

SEQ ID NO: 8921 - DNA, 119 bp, Gossypium hirsutum
  unsure (1)..(119): unsure at all n locations; Clone ID: LIB3120-045-P1-K1-E10
cnntggacgcgagcgtaccgcacatcccaaaatactcaacccgttcaacttgtagaagcgttcgaattgttttataaatgggtaaggtggtatgggccttatggggaccatgttctggg

SEQ ID NO: 8922 - DNA, 194 bp, Gossypium hirsutum
  Clone ID: LIB3120-045-P1-K1-E3
ggttcctctgttttcaagaaacggttctgggtgggggtctggggctgttgttgtttgtgctaccaaaggagccaataataagccattaacaggtgtgatttttgagccttttgaggaagttaagaaggaacttaatcttgtcccaactgtgcctcaaatgtccttggctcgtcaaaagtttgctgatgagtgtg

SEQ ID NO: 8923 - DNA, 197 bp, Gossypium hirsutum
  Clone ID: LIB3120-045-P1-K1-E5
gcagatggcctcactcgccaacacaactcgtttttttccgttgtctgcatccttggaaaatttgcgacgggaaaacgtattcccagcgtttctttcaaatccttctcctttccctctttcaggccttccatttcctcactgaaacccttattccccaccaaatgctcttttctttttccctttccaatgcttcccta

SEQ ID NO: 8924 - DNA, 115 bp, Gossypium hirsutum
  Clone ID: LIB3120-045-P1-K1-E6
gcacaaaggcttttctgtctttgtttctcgctttattttttatttatttataatcattacaaggggtggaaaatcctccttggggagatgcacgagagtatgatgactgtttcat

SEQ ID NO: 8925 - DNA, 225 bp, Gossypium hirsutum
  Clone ID: LIB3120-045-P1-K1-E8
tgcattagtttcattgcctacaagcctccaggcttctaagctttttataaactttgtctcgccatttgtttgaatttgtactcagaaaaaccatgttctttacttttgtttttctctttctttgagttattggcctttgtttctcgatttctgggttttaatcctttttggattttcattggaagaaaggctgagaactaatgaataaaagttggttttcttccc

SEQ ID NO: 8926 - DNA, 228 bp, Gossypium hirsutum
  Clone ID: LIB3120-045-P1-K1-E9
cttgcgcaaataatacctcattaagcccttaactggcatatccacttattccgcgcccaggcgacacacatggggatcgtgctgccttggacccaacctttaatgttccccttgttattgaaatacttcaaaccaggcaggaatggctgctccggaaatttggccaacccttggaagagcagagaaaacatcgctgactaataacacggggcaaagatactctttctt

SEQ ID NO: 8927 - DNA, 337 bp, Gossypium hirsutum
  Clone ID: LIB3120-045-P1-K1-F10
atttgataaagtctaaaaaggttttcattcttcactgctcttgcgccgatcagttcttccggaccatcgattcatcatcataatcggcagatgacatcaaatccgactctatttggagtcgtatcctcctaacccttatctaacttcgatttcaacgaagcatacaaggattcgaaggccattaataggtgcatggtggacgtgggctctgacatggaagcgcgagtggcgcggcgcacggagccgaaggcattgcgatgtgtggcgcttgggattggcttgcggcgctaggggtcgcttgaaaccgttttaaaatttgtgggcccaatttggccta

SEQ ID NO: 8928 - DNA, 58 bp, Gossypium hirsutum
  Clone ID: LIB3120-045-P1-K1-F11
cccacgcggtccgtatcgctttgatttcgcatccttgctgtgcactcgatggcaaaac

SEQ ID NO: 8929 - DNA, 219 bp, Gossypium hirsutum
  Clone ID: LIB3120-045-P1-K1-F4
cccacgcgtccgcttttctggatgaacttttagacttactcatcgacaaagaagctatttgctagatgcattatatgctgccattagtgccgcaatgttcttcttctattcatatgttgtgatctctggagggaacccacccccaaagaagatgaagctttctgctgttcattaatcatggccatcttaattatatgaatgttggttccctttgtgtaa

SEQ ID NO: 8930 - DNA, 340 bp, Gossypium hirsutum
  Clone ID: LIB3120-045-P1-K1-F5
aaagaaaacgagcaaaagataaacacatgatatcatcatcacaaaactcctttgctaaaatgggggttctttcatttaaagctttcttcttcgacaaatcccccacaacccaactggttttttttttccctttaaaagcttgggtttttttttttttgaaagagaaagagagagggattgagaattaaggcttaagcattaaaccaccaaaaaaaagaagggtttttttgggctggcttggtttctttttctttctttccaggaaaaaatactttgatttttgttcaaaattatggggtttttctttttaaatggtatatggttaggtttggaaaatttt

SEQ ID NO: 8931 - DNA, 371 bp, Gossypium hirsutum
  Clone ID: LIB3120-045-P1-K1-F6
aaaaggtttaaaaactctctcaaccccttttatgtccggcccaactccggccgtggtccagggatcggaccgacttcggccaccgcgccgttcaccatacacggtgtcctaaaatttattgatggttgttttgttttattttgtattttttattttttttttttttttttttctcttttttttttttttttcttttacttttttaattgttttttttttatttgttttttgttttttttttttgttattttttatttttaatttttttgtttttatttagttttttttttttttttttttttttttttttttttttttattttttattgttttttttttttttttttttttttttttttttttatttattt

SEQ ID NO: 8932 - DNA, 162 bp, Gossypium hirsutum
  Clone ID: LIB3120-045-P1-K1-F7
gttgtcttgcaatgccatttataaccctcaggttcaaatcagacaagatggccaacccgggggtgtcgactatagagtgttgtgcgaggatacttcgggcaaaaagatttctccttggcacgatgttccattgcacttgggagatggtgttattagcttcat

SEQ ID NO: 8933 - DNA, 66 bp, Gossypium hirsutum
  Clone ID: LIB3120-045-P1-K1-F8
actccgcctacgccttatatttaggccgccgcctccaccttcacttttgtttgatcttctttacat

SEQ ID NO: 8934 - DNA, 262 bp, Gossypium hirsutum
  Clone ID: LIB3120-045-P1-K1-G2
gttccgccgtagatggaggccgccgccgccaccgccactttggttggatcttctttacatgtacatccaccaccttcaagctctgttaccagatcgactgtttacgctgccagacctcgcctctccttcccgattaagcattattcttctctagcttgttcaggatcatggaataaaagaatggttttggagagtaggagaggcatatttgaaagggcttcgtcttttcccaactcgactgacccatttgatccaattgctc

SEQ ID NO: 8935 - DNA, 461 bp, Gossypium hirsutum
  Clone ID: LIB3120-045-P1-K1-G5
gatgaaatggaaaaggcagcgaagctgttgggtctgatgttggataggggggtttttccacgattatgcaacatcgaatgaggtgttgattcagctttgtaaagctggaatgttagatgatgcagttacagcattgtttggattggctgaaacggggtttaaaccagaaccacattgttgggagtttctgattgaaatgaattgcaaagataggaaattgctgcctgtttttgaactacttgatgagttagtaataaaagattgtccttataatcttcatgttggtgctactttttgtttagcctcctattgcttgtaaaaattttcattgttgaggcatttggttttatttgtataccttccatgtcattttttttggtggattactttgaatatttacccgatataataaatttttcttttatttttttggctaaatatttatagttccatttattttt

SEQ ID NO: 8936 - DNA, 194 bp, Gossypium hirsutum
  Clone ID: LIB3120-045-P1-K1-G9
ctctagagtaaacttccttttgcaatcctttgtagagcttcgggatccattgtcaccatgtggtgctcaaatctgacaatgtgggtgtcctcaaaaccctctctttttgacacttcttcactccttttccgttctttcataaaacccttttcaactcccatattaaaggttaacccccgggaacccttttcagg

SEQ ID NO: 8937 - DNA, 251 bp, Gossypium hirsutum
  Clone ID: LIB3120-045-P1-K1-H1
aaaaacaaagggcgagaaaaaaaaaaagaagaggagaaaaaacaaacaacacaaaaaaaaaaaaaaaaaaaaagaaaaaaaaaataaaaaaagaaaaaaaaacacaaaaaaacaaaaaaaaaaaaaaaaaaaaaaaactaaataatttataaaataaattaaaataatattttttaaaataaaataaataattttaaaataaataaaatattttttatattatatataaaatatataaaaaaatattataa

SEQ ID NO: 8938 - DNA, 107 bp, Gossypium hirsutum
  Clone ID: LIB3120-045-P1-K1-H10
ttcattcgtaaccttccttaagtattatggtcaaattctgggttgaacctgcttcatataggtgaccattaatttactggggagcttgcttcttttttttacaataa

SEQ ID NO: 8939 - DNA, 267 bp, Gossypium hirsutum
  Clone ID: LIB3120-045-P1-K1-H2
aaaagaaaagatagaatcaatggatggaataatgaataagataaggaatttagatgcgtacgcctaagataaacgaggatttctacagccgcacgctttccggtggcgttatcactgtcgtctcctccgttgttatgttcttgctcttcttctccgagctccgattatatcttcatgctgcaaccgaaacaaaactcgtggttgacacttcaaggggggaaactctacgcatcaattttgattgtacatttcctgctcttgcatgct

SEQ ID NO: 8940 - DNA, 225 bp, Gossypium hirsutum
  Clone ID: LIB3120-045-P1-K1-H4
gatatattcagcaagccttgcacaatggccaccatcacctctgccgctgtcgctatcccatctttcaccggccttaaagccggtgcaaccgcagctaaagttagcgccacagccaaggttgcagcctctccagtcccaaggggcagcatcaaggcctccctcaaagacgttggtgttgctgttggggcaactgttgcatgcgtaatccttgccagcattgccatg

SEQ ID NO: 8941 - DNA, 281 bp, Gossypium hirsutum
  Clone ID: LIB3120-045-P1-K1-H5
tccatgcttcacagtcacagcaacaaggaaatgcttactctatgacatccaagaaacaatgggtgactccctctccatcgcctggtattgatgggagcagtcccattgtacgtgagaaagcctcagaggatgggtataactggcgtaaatacgggcagaaacttgttaaaggaaatgaatttgttcgaagttattacagatgtacacattcaaactgccaagttaaaaaagcaattggatttttcacaatgatggtaaaatgggctgacactgtttatttt

SEQ ID NO: 8942 - DNA, 167 bp, Gossypium hirsutum
  Clone ID: LIB3120-045-P1-K1-H7
ctcactcaacattcccactttccaatctccatctttcaaggtcaatatgccgatcagaaacggggcagttggccggcccgtagaggcgactcacctcgatgctctcaaggcagctatggctgagttcattttaaccttgatcttcgttttttgctggatcggttctc

SEQ ID NO: 8943 - DNA, 204 bp, Gossypium hirsutum
  Clone ID: LIB3120-046-P1-K1-A1
gcgcacccatgcggcaaatgagcacggatcggtcttggcggtgaaggaaaaggctgcttgtgaggctaacgggcagtcctatgcgaagacgaacctttggaatgttgatattgtacctagtaaatcacttacctaattatagcccgatatggagcctgtagtgtcgcattagccaaatcccaaaaccttatcacaaaaaataac

SEQ ID NO: 8944 - DNA, 280 bp, Gossypium hirsutum
  Clone ID: LIB3120-046-P1-K1-A10
gagatgtggtgagggagttactggtcttttatagctcctttatgggttgctgtaattgttggggtttgagttggttgggcatggaagccgaagtgaacatctataggcagggagatgttcatggatcgttctggtcctaaggatacggttcctgcaaaatcttctgagtcttctttcaatgattttggttcccttccgagctagaatttgatcaagtcttcgttgcctagtgttatctcttggattttagatgacggagctcaaaaagattctttctttt

SEQ ID NO: 8945 - DNA, 260 bp, Gossypium hirsutum
  Clone ID: LIB3120-046-P1-K1-A11
gccttaggcaccatggcaacctctgctatccaacaatctgctttcgttggccagaccgctttgaagcagtccaatgagctcttacgcaaagtcggagctttcgatggtggtcgtgttaccatgcgcagaactgtgaaaagtgcccctaccagcatctggtacggccctgaccgcccaaagtacttgggtccattctcagaccaaatcccatcatacctgacaggtgaattccctggtgactatgggtgggacactgttgg

SEQ ID NO: 8946 - DNA, 195 bp, Gossypium hirsutum
  Clone ID: LIB3120-046-P1-K1-A12
gccatgcgcaccgtgacaacctgtgctatacagcaatctgctttcgttggccagaccgctgggatgcggggcattgagcttttacgcaaattctgagcttctcatggccggtcgttgcccatgcgcagacctgtgaaaagggccccaaccagcgcttgttccggtcaggaccgcccaaaggacttgggtcccttt

SEQ ID NO: 8947 - DNA, 149 bp, Gossypium hirsutum
  Clone ID: LIB3120-046-P1-K1-A2
cagactctcccgctcattctcgctgcgatttcggctggaagatcacacaactcaaaggggggcgctcttttctatcaagccatggctctcaacttccgtgcgggatagacccacatagaagcctggaaggcactcatagctgaatacta

SEQ ID NO: 8948 - DNA, 245 bp, Gossypium hirsutum
  unsure (1)..(245): unsure at all n locations; Clone ID: LIB3120-046-P1-K1-A3
cgcgaagcgaaactttgtagtttgaaagcgtaggatcattaagacactgtttgtgaggctgagaaccagtcctttgcgtttttgcacctttgtaatgtttgtattgtaccttgtagatcacttacctaattatagccccatattgatgctgtagtgatgcanaaaaaaaaaaaaaaaaaaaaaaataaaattaaataaataataaaaattaaaaaaaaaaataaaataaaatgggggcggccgtt

SEQ ID NO: 8949 - DNA, 197 bp, Gossypium hirsutum
  Clone ID: LIB3120-046-P1-K1-A4
ccgacgactcttccgctcacgcgtgcggttatctctgagggtggcttaataaacgcctggggggtactttcggtctccattgacttctttatttctacgcttgcgaatttttcgtacgcgaaaatgagagagtgcctttcagttcacatcggtcaggctggcatccaagtcggaaatgcctgctggaagctgtactg

SEQ ID NO: 8950 - DNA, 301 bp, Gossypium hirsutum
  Clone ID: LIB3120-046-P1-K1-A5
ctcgcggagcgaaccttgttgtttgaaagctaggattttagctttcgggttttctataggggttgagagttgtgaggttctcgggttatgtcttgagtgtaaaacacttgtaatcttcatcttgttatagtgaaatttcttttcgcctctgcccgtggacgtaggcattaaagccgaaccacgtaaatccttgtgttcactttatttttcgttccggtcaattaacttgtagtcatatcggagttctcgaatcgatcctttccgcaccagcaacctatcttattagtgaagcaaatttcca

SEQ ID NO: 8951 - DNA, 248 bp, Gossypium hirsutum
  Clone ID: LIB3120-046-P1-K1-A6
tcctgcagacatcttcgggccgtcaacacaaggtttgatggtggtattataatgacccatggaaatgaggctggcttgatgctatctacgaggatttcaccacttcagttggtaattgtacctatttgaaagatggttggtgataatacatgagtactatatggtggatcttctgaaaaagaaactcaaataagagatggacttgacgataaacttgatggcgcacataagaggaaacccttagggaa

SEQ ID NO: 8952 - DNA, 234 bp, Gossypium hirsutum
  Clone ID: LIB3120-046-P1-K1-A7
cgcgttcggcattcgtccgaacacgcgtccgtgagaacgaaggtaaagggaggcaatgctaagaacgggggtggtccaacggtcaaatatgtggaaaagtgcatgatttcccaaagttggttcttttccaaagtgtctgacatacattgtaagcatggctgctgatgtccatcgtacattactatacgggggtatctttctgtacctttcagataagaaaagcccaactgaaaa

SEQ ID NO: 8953 - DNA, 195 bp, Gossypium hirsutum
  Clone ID: LIB3120-046-P1-K1-A8
cccacgcgtccgctgaaagcaaagaaaaaatggcaacggagatggcccttgtaaagcctatctccaaattcagtacaagcagtccaatttttagcaactcccgatatgggaagttcacgaccgtcagaatgtcatctacttcccaatcaacagcaaaggccgccgcgaagggtggcaggaaagctgcaaaacccg

SEQ ID NO: 8954 - DNA, 243 bp, Gossypium hirsutum
  unsure (1)..(243): unsure at all n locations; Clone ID: LIB3120-046-P1-K1-B1
gacccttgttccagtttgttnnnnnngaactaaggataaaggaaccacaccagccatgggtgcaacatctgcctcatgtcttattctcccatcgctcaaacccaaagttctatctttatccgactaaactcccatttcactttttctctgctccctttctccaacccccaatgcaaagcctttcttctgttctgctcttccaggtttcaggcttttaaaccaaaaagggctctttttctttcg

SEQ ID NO: 8955 - DNA, 304 bp, Gossypium hirsutum
  Clone ID: LIB3120-046-P1-K1-B10
cccaggcgtacgcgcacgcgtccgaaaaaaaaaaaaaaccaatgtgcgctgactcctcctagcccgccataccgggacatggggtcagtcaaatcttcatcatctccttgcctatcaccggccgtacattacctcctattcggttctccatgctccattgctaacccgtttctgcttcaaaagagcgggcttccgctgctttccggggcggtggaaccttatttctttggagcggaagaccaagcgcttcattacaggatcgtacacgaaaagacgaccgcttggtcgagccggaaacattttt

SEQ ID NO: 8956 - DNA, 119 bp, Gossypium hirsutum
  Clone ID: LIB3120-046-P1-K1-B11
acgtacgcccacgcgtacgaaaacgcgtacgggtggatttttttatttttttggtcgaatcgaagtttgggtatgtttcattgatttttttattaatttcttggatatcaattgtcgtt

SEQ ID NO: 8957 - DNA, 222 bp, Gossypium hirsutum
  Clone ID: LIB3120-046-P1-K1-B12
cccacgcgtccgatcagcatgtcataaaacataagaaaataggctgaagtttaatttacgagctttggggcaaaagtgtaaatatgtgaaagtttacgatcaaaactataatttttccaaaatatggatttggggtcaatttgaatactgtgagtcctaattagactattttttaaatgatggagcaaggaaaactaaattccgggcttaaatgggaaaaat

SEQ ID NO: 8958 - DNA, 179 bp, Gossypium hirsutum
  Clone ID: LIB3120-046-P1-K1-B2
aaactcccatcacccgagatcatctttccccttcagaatggcggctgcaaccatggctcggtcttccccatctttcgccggaaaggccgtcaagctctctccttccgcccctaaaatccaaggcaagggccgggtttccatgaggaaaaccgctcccaaggctgctcccctttggaagt

SEQ ID NO: 8959 - DNA, 251 bp, Gossypium hirsutum
  Clone ID: LIB3120-046-P1-K1-B3
caccattgctccaagtttgttgtaaaccaagctagaaccagcagccaacatggcctcattagcagcctccaccgctgccgcctcccttggcgtctctgaaatgctcggtaaccctttggaatttaagggggggagctgggtaatgggttccaacaccatccaactaatccattttaaagaccgtggttcttttttcaaagaagaaggccgttcttccaaagccaaaggttgttgttgtcgccccggccgat

SEQ ID NO: 8960 - DNA, 146 bp, Gossypium hirsutum
  Clone ID: LIB3120-046-P1-K1-B4
gccaactccagctactgctactgctcccgctactgcccctgttagcaaacctaaatcaccggctccaactgctgcccctaccacttccccaccaactttttcaccaccggttgcggattctgagaagtctgcggcggatacagccc

SEQ ID NO: 8961 - DNA, 283 bp, Gossypium hirsutum
  Clone ID: LIB3120-046-P1-K1-B5
gcccatatgcaccaagcttgcatttcattcaaattgtacaggcttcttcgtgttccttgacgacatcaaccatggtgctatccaagacagcttctcaatctgatgtctcagttcactccacttttgcctctcgttatgtccgagaccaacttcctaggttaaggatgccagagaactcaataccaaaggacgctgcatatcaaatcatcaacgatgaactgatgcttgatgggaacccgaggtggaacctggcctcttttgtaactacctggatggagcctga

SEQ ID NO: 8962 - DNA, 223 bp, Gossypium hirsutum
  Clone ID: LIB3120-046-P1-K1-B6
tccatctccatctctaatctacgcgagacctacccaattctcaacagccacttaccatctgcttcttttagtctgatcaaagcgccaaatcaacgaattggatttctcaaattcaactctgaaacctctcagtttcataggttttatctccaagctctaccccgagaggttcctgttgttgaaggtgaagaccagctgcagcctcttacccttaataatgggt

SEQ ID NO: 8963 - DNA, 211 bp, Gossypium hirsutum
  Clone ID: LIB3120-046-P1-K1-B7
gcccctgccatcgcttatcacttaattggaccagttcattgcttacaacagatgcgagacttaatgaatgaacaggttcaagatcaactagggcaaagccacttcattggacatcatgtttaaagatagcagaagatgttgcagagggccttgcctacatccaccaagcatcaaggcttttccatggcaacttgaaatcgtccaacgtcct

SEQ ID NO: 8964 - DNA, 304 bp, Gossypium hirsutum
  Clone ID: LIB3120-046-P1-K1-B8
gtaccgtcctgattcccggtcgaccacacccgtccgcgactactcctcgtgctgatctacttttgcaagccgctataattctcgttacgatctttatgttccttgctatgcacgatattcccaaaaagatcttcaccaaaatccgttaccggaatcgagccgacttccaggcgaagcgtcacttcgtcctcggagcccagctcttggctcaagccagatcctccaagtctcgttcatccaccggctctttagccaaacaagccgaagccgaagccgacaaagccatttctctagaccggaaaga

SEQ ID NO: 8965 - DNA, 212 bp, Gossypium hirsutum
  Clone ID: LIB3120-046-P1-K1-B9
gatcagtgcaaagaagcgtttgatgatgctctgttttgggttggtgaaattggcgtcaatgattatgcatatactattggatcaactgtgtcaggcgacaccattcgaaagcttgccataaatacttttactgagtttttacagggattgctgaagaaaggtgcaaaatacgtggtcgttgaagcactgccgacgacaggttgtttaccgtt

SEQ ID NO: 8966 - DNA, 253 bp, Gossypium hirsutum
  Clone ID: LIB3120-046-P1-K1-C1
gttcctttcattgcttatcactcaattgtacaatggcagcagcaaccatggctctttcttccccatcctttgccggaaaggctgtcaagttctctccttctactcctgaaatccaaggcattgggcgtgtttccatgaggaaaactgccaccaaccctgctgcctttggaagcccatggtccggccctgatagagttttatacttgggtccactctccggtgagcctccatcctacttgaccggagagttccc

SEQ ID NO: 8967 - DNA, 203 bp, Gossypium hirsutum
  Clone ID: LIB3120-046-P1-K1-C10
gtgaaactggcacagcttttagcaccctcaactcaatggcaaatgacactaccaaagaccttgtcctgtggaagttccattgcagcaataatgtggagtcctctggtactgatacagcacatgataggagctgctaaaagctctggcatgtttaatgtgggtgccttgtttgaaaacatcactttcaacaggctagagaactt

SEQ ID NO: 8968 - DNA, 229 bp, Gossypium hirsutum
  Clone ID: LIB3120-046-P1-K1-C11
tcgccacgcgtaccgtacgcgtacgatgagcatggaaggggggtttacgtctttcatatacaaagaattgggatctaggttaggcattatgttttcccgtttatttttgttagcagctggcgcccagttttgataggctgttggtaaaaaaataataataatggaagggacttctgtaggcggcggagctcacagaggaggaaacgacgtggaactgctttgcaaaact

SEQ ID NO: 8969 - DNA, 282 bp, Gossypium hirsutum
  Clone ID: LIB3120-046-P1-K1-C12
cccacgcgtccggtttacctgtttgatgaaggctcaaccatctcatggataccatgtggaaggaagctcacttgttcttaccctggcatcaaattctcctatggccctgacacatacttgggccatgaggttactgttctggagatggacgggcaatttgacagattagatgaactgatatacgtagaaggccatttaagcaatctctctaccaagttctatggagaagtcactcaacaaatgttgaagcatgctgatttcccaggaagtaacattggaact

SEQ ID NO: 8970 - DNA, 368 bp, Gossypium hirsutum
  Clone ID: LIB3120-046-P1-K1-C2
gcaatattactcatcttcaacgccaaatgtttcagagttgctgtgttagcggagaagttgaatgacaccgctttctggggtggccacggtggcggtgacagtgtagggctcgacgatgatgactacagcagcttcatcggtgacgatatggagctggagatgttgacggattcctacatccgccgagtgctcgccggtagcaacggaaaatcaacgattgcattcactaacaacgctaaaaaaactccaagttgtggcaagggtaaacaatatggtccgggcttggtggacaggaaagtggttagcaatggcagtccataccaccgtcttggccgggaacggcatattttaaagggaaggaaaattaa

SEQ ID NO: 8971 - DNA, 194 bp, Gossypium hirsutum
  Clone ID: LIB3120-046-P1-K1-C3
gcgcctaagagttttaaggaaaatgcagatcttcgtgaaaaccctaactgggaagaccagtaaccctagaggttgaatccagcgacactatcgacaatgttaaggctaagatccaggacaaggaaggtatcccgccggaccagcagaggttgatctttgccgaaaagcagcttgaggatggtcgtacacttgcc

SEQ ID NO: 8972 - DNA, 302 bp, Gossypium hirsutum
  Clone ID: LIB3120-046-P1-K1-C4
cccacgcgtccgatttttttttatattctatacaaaaacaaaactccatgcggcgaaatggcatttatcaattcttttctgtatctgtttgttataaatataaattcaaatttgagtataatttttcttcttccgttcatacgcatttcatatttcatacattccacatatattatatggtatatggagttagataaaatttcatgtgattcagtaaacagaatagaaattcaattccatcattattagatcgattcgtaggattcgatgaagattgaaaaaaagaatgggatttttttgag

SEQ ID NO: 8973 - DNA, 228 bp, Gossypium hirsutum
  Clone ID: LIB3120-046-P1-K1-C5
cccacgcgtccggggacaactgctagaacatgccttcccttcctacttgcttccactgtgctaggctacatggttggttcggggttgccatctgctgtgaaaaaagttcttcatccgattatttgctgtgcactctcagcagatcttgcagcagtggcatttgggtacatttcacagtcgggagttgatgcggtattaggagattaccttacaaaggtgtcatctaat

SEQ ID NO: 8974 - DNA, 202 bp, Gossypium hirsutum
  Clone ID: LIB3120-046-P1-K1-C6
cccacgcgtccgatcacccgtcctgactcgcgtctgtccacccttctaactatacttgcgatgagctaacttgcaatctggcatagaaaaaaaggagctggaactgaaaacacaggtagatataggctacgacgcgccgttcattgtctttactaccattgacttaatctctttgacaggtgaaagcggaacctgttatttt

SEQ ID NO: 8975 - DNA, 108 bp, Gossypium hirsutum
  Clone ID: LIB3120-046-P1-K1-C7
gccacacccttccggaatatggaagtaatatgaatgatcaagggaacctatgatacttgttattatggggctaggctacatggatggtcagatgttgccatctgcttt

SEQ ID NO: 8976 - DNA, 281 bp, Gossypium hirsutum
  Clone ID: LIB3120-046-P1-K1-C8
cgcgtccgcccacccgtccgttatcccaaacttattacccatttttcccattcaaattttctccatcatcctccaaccatgtgcaaaggcttacaacaaggaagcacatcaagttcttgtctgaaacagggtgtctcactctcacctaatgcaaatcctagggtttcaacaaggttggtgaagtgtgagctctgcaactccagggcaaccttatattgtcaagcagatgatgcatacctgtgcaggaaatgcgacaaatgggttcatgaagctaatttctt

SEQ ID NO: 8977 - DNA, 397 bp, Gossypium hirsutum
  Clone ID: LIB3120-046-P1-K1-C9
cccacgcgtccgagagattgtaggggggttttcgttttcatctagaaagaattgggatctaggttaggcattatgttttcccgtttatttttggtagcagctggtgccgagttttgataggctgttggtaaaaaaataataataatggaagggaattcttggagcggcggaactgacagaggaggaaacgacgtggaactgctttcaaaactcttcaggtggaacacaggctgttctacttcgatctcaaggagaacccacgcgggcgttatttgaaaatcttggaaaagacattggccaccaggttcaccatcattgtcccctcctatggcatttcttggttcctggaccttttcaatttttacgtaaactccgacgacaacgacctttttagcaa

SEQ ID NO: 8978 - DNA, 179 bp, Gossypium hirsutum
  Clone ID: LIB3120-046-P1-K1-D1
cccacgcgtccgagaatatggagaaattgatggcaagggatcctgatgcgtttgcttatgctataaagcgatcatgtgaaaacaaggctgaggttgtgtcactagatgagaaggaaagtggattgggggcctcccctgacttggggtaatccattgggcaatgcaataaaacctgggtt

SEQ ID NO: 8979 - DNA, 191 bp, Gossypium hirsutum
  Clone ID: LIB3120-046-P1-K1-D10
ggctcgcccacatttcacattggcaacatatgccacttcctgagatatggagggagaaagaggagtgtgatggatatctcgaactatactagaatcttatttcccggaaaattgctttgatattttaaaggaagctcttattgccaacacggccgtttataacggaaagaggattccattaccttttaatt

SEQ ID NO: 8980 - DNA, 200 bp, Gossypium hirsutum
  Clone ID: LIB3120-046-P1-K1-D11
taccgtccgcatcccggtcgagcccacgcgtccggccacgcgtacaaggatagcgccagcataactctcttcgggagagacagtaatgctaagcgggtggggagggataagtgcaacgatacttgtctctcataaaaaaaatgctagccttcatagtgacggggtcgcggtcactgctaaaaccacggtggctaacgacc

SEQ ID NO: 8981 - DNA, 335 bp, Gossypium hirsutum
  Clone ID: LIB3120-046-P1-K1-D12
acgaaggaaacccaccaagatctgcaggttctttacttttctttgcttcctcataaaggagagaggctaatgaagtggtatacaatatgtatatgcattctcgaactccttctaacaacctatgcattttgttatcatttccgattggacgatccattaatccagctggcggaagatgataaatggatgaatttttttgattgttactggggattgggaatagatggactttgtatagggcccattttactgacaggatttataaccactctagcgactttggcggctgggccggttactcgagattcgcgattatttattttcctgatgctagc

SEQ ID NO: 8982 - DNA, 269 bp, Gossypium hirsutum
  Clone ID: LIB3120-046-P1-K1-D2
gaggagctcattttttatttttttccccagttcctgattttgagagttgatcctgccgtgagacacaaggatgacaagtacagcttgttttatcattgtgagccgaaatgacatcccaatatatgaagctgaagtggaatctgccgttaaaaaagaaaatgctgctcagctgcataaatccgtataacatgcagttctggatatggttaaagaccttgcatggaccaccagtgcaatgttcttgaaagcaattgacaggttcaatgatt

SEQ ID NO: 8983 - DNA, 152 bp, Gossypium hirsutum
  Clone ID: LIB3120-046-P1-K1-D3
ttcagctataccatacactattaagtgtcaataacagaagaggtttccttcaactattccgtggggggaggatgccacggcctttatagcaccagaaaacctggtaccttccaaaaacatgaagaagagggtgtaaggttgagaccccattc

SEQ ID NO: 8984 - DNA, 358 bp, Gossypium hirsutum
  Clone ID: LIB3120-046-P1-K1-D4
ctctttcgtataactgtagcatatagtactagtaagcagtaatagcaatggcctcctccatgatctcatcggcaaccattgccaccgtgaactgctcctccccggcacaggccaacatggtggcccccttcaccggcctcaagtctgcctctgctttcccagtcactaggaaggccaacaacgacatcacttctcttgcaagcaatggtgggagagtgcaatgcatgcaggtgtggcctcctcttgggaagaagacgttcgagacactctcatacctccccgatcttacacccgtacagtttggctaaggaagtagattaccttcttcgctctaaatggattccttgcttggaattcg

SEQ ID NO: 8985 - DNA, 292 bp, Gossypium hirsutum
  Clone ID: LIB3120-046-P1-K1-D5
tttagctatagcatacactactagtacccactactagcaatggcttcctcaatgatctcatcggctaccattgccactgcctctccggcacaggctaacatggtcgctcctttcaccggtctcaagtctgcctctgctttcccagtcaccaggaaggccaacaacgacattacttctctcgcaagcaatggcggtagagtgcaatgcatgcaggtgtggcctcctactgggaagaagaagtttgggactctctcatacctccccgacctaacacccgtgcagttggctaagg

SEQ ID NO: 8986 - DNA, 248 bp, Gossypium hirsutum
  Clone ID: LIB3120-046-P1-K1-D6
gagatgttggtagccctgacattaagggatttgggaagaaaccggtgtcaattgcctacaatggtgaagataaaccagtgttcttgacaaaactgtctttgaaattcaaggaacctgaaaatacaaccttattcattatggacaaatttgatgggaattctgaactggttgcggagttggtcactgcaaatggattcaaagctgcttatgcagtcaaagatggtgctgaaggaccacggggatgggtg

SEQ ID NO: 8987 - DNA, 261 bp, Gossypium hirsutum
  Clone ID: LIB3120-046-P1-K1-D7
cccacgcgtccgaaaaaccctgaagtgtccacgacggaagaggtggtggtgacggctccagggagggaggagacaaggtcttttatggctcctaaaatggtggcactgaagaagaagaagaagaagagggtaaaggtagagacgccattctctacgactcttgagtggaaaccttcgttgtatgtaatctcggaggataacgttttggcggagaagagagagaaaacaacgccggaagcttcaacaacgccggctgatgga

SEQ ID NO: 8988 - DNA, 284 bp, Gossypium hirsutum
  Clone ID: LIB3120-046-P1-K1-D8
cccacgcgtccgatcactcgcaataggggacattctccgcatcggtctaggtatggcctacggggcttaacctaaaacatggcctatcacatggctcattcttggaagagggggacatgcttatacaagcttcatcattctttgcaaatgccacggtaaacttgaaactctcttcctgattcccacaggtgtcggtatttctgacgtgtttttccttgacccgaacaggcagactgaggcggggtaagctataccatacgggtgcatgggattggatataagaa

SEQ ID NO: 8989 - DNA, 187 bp, Gossypium hirsutum
  Clone ID: LIB3120-046-P1-K1-D9
tacgctcatctctcgatctcctcgaggttgtactaggttatgctgaagaaacagataaactgaatgggtaaggacatttgagggattttctctttcagactttctcaaagagaggaaaatgtcaactggaagaaatacccattggtgtaatagatgcaggcgcccattattccttcgggggcatgat

SEQ ID NO: 8990 - DNA, 190 bp, Gossypium hirsutum
  Clone ID: LIB3120-046-P1-K1-E1
gcgacaggctacttgttggggccaactttgcgtcagctggcattggaatcctcaatggcgccggcgtccaatttataaacatcatcagaatgtacaagcaattaaaatactttcaacaatacccggcccgggtgggttgccctcgtgggttccgaggaaccccaggggttcgtaaccgtggccctggggc

SEQ ID NO: 8991 - DNA, 242 bp, Gossypium hirsutum
  Clone ID: LIB3120-046-P1-K1-E10
gattgtcccgaagacatctaatagatatcggaggaaccgatgcttgaacagaggcaatcaaattcctggctacatgagtcccgtgcaacccggaagcctttatcaactaatcacagctccttacttgccaccagctgaagccccaaatccgttcctgaccgaagcagatgtcaccgagccccctttgcctcctgtcgctgcaaaagccccaagtacttttccaaatggtactgtactggccc

SEQ ID NO: 8992 - DNA, 219 bp, Gossypium hirsutum
  Clone ID: LIB3120-046-P1-K1-E11
tctcatgattcactggtctctctgtctctcttcttttctttcctctactttaaattttttgtggaaatcagtccaaaaagcttgccatatttttcagaaaaaccaagcttcattccattacgtcttgaatgcaatctcttcctgtttcacaatttgccctgtgcctttttatctttcttttgctgggtttgtacacattctttcaattccttcttgggt

SEQ ID NO: 8993 - DNA, 285 bp, Gossypium hirsutum
  Clone ID: LIB3120-046-P1-K1-E12
gcgaatagctgagttagagctgagctgagctcacgagttggtttttttattcagtgctgaggcgctttaccaacctaacacttttttttttcgattaaatttccatgggtttctaataaacgatccctttctgcttaattatttttcttgatcgtaatcctccattcctcgcttgctgcaatatgcaagagtcttaaccaaaatgccgccggcaatatagaaatgtgtctgcaactttgcatgccctgagttggagaccataatgttttctgagagtgtgagtga

SEQ ID NO: 8994 - DNA, 190 bp, Gossypium hirsutum
  Clone ID: LIB3120-046-P1-K1-E3
cccacgcgtccgataaaaagcaatctcttggttttcttgtttgtataaagggttagtagagttgggtctctaggtttctttcaaaacaaggtttttctttgacgtatttcctcgcttttcttttaaggggaaaccacaaagaaagggaaccgggtttggaagaaggagatggttttaatggtggagattt

SEQ ID NO: 8995 - DNA, 239 bp, Gossypium hirsutum
  Clone ID: LIB3120-046-P1-K1-E4
cagcagcagggaagaagcggaggcagcgtcgtggttgcttcctaaccctaaccacaaagcgggggaaagcccggacgtgaagacagggcaatacaagtcttccgagattgattcgtacctagatctggattaccgccatgtttgatcttaaaatggaaaccccggaccaggaccattactattttggaactgttggagtgggacctttgcaaagcaacatccttgcaatcttcgatgat

SEQ ID NO: 8996 - DNA, 139 bp, Gossypium hirsutum
  Clone ID: LIB3120-046-P1-K1-E6
cccacgcgtccgctcttggagaaatgtgacattctccttcttggtggtggtatgattttgacattttacaaggcacaaggcctatcagtcggttaatccttggtagaggaggatagcctggacctggcaccatcacttt

SEQ ID NO: 8997 - DNA, 166 bp, Gossypium hirsutum
  Clone ID: LIB3120-046-P1-K1-E8
caggacccgtgggcgccggtaaggcagtgaagttctccccttccacccctgaaatccagggaactggccgtgtttccatgaggaaaaccaccaagcctgttccttctggtagcccatggtacggtcctgaccgagttttgtacttgggtccactttccggtgagcc

SEQ ID NO: 8998 - DNA, 266 bp, Gossypium hirsutum
  Clone ID: LIB3120-046-P1-K1-E9
cccacgcgtccgagaataaaaccctaattccaaaattcccccaaattttactagaatggatgagatacgaagagcaagagcacgaggtgtacggaggggagatacctgacgaggaaggagagatggatgcggagttcgatatgactgctggagctgaggattaccaaggcaacgaccaaggccttcaacaagatcctagttcctccaaagacttggaagacatgaaaaggaggcttagggaaatcgaggaagaggcgggagcttta

SEQ ID NO: 8999 - DNA, 190 bp, Gossypium hirsutum
  Clone ID: LIB3120-046-P1-K1-F1
cccacgcatccgccaacgaaccaagttttttgtaaaccaagctagaaccagcagccaagagggcctcattagcagcctccaccgctgccgcctcccttggcgtctctgaaatgctcggtaaccctctgaatttcagtggtggagctaggtcatcggctccaacaccatccaacttatccattttcaagac

SEQ ID NO: 9000 - DNA, 198 bp, Gossypium hirsutum
  Clone ID: LIB3120-046-P1-K1-F10
gtcgaattctttcgcccggcgacgcgtgacgttacagcgaccttaacaaacactctttacacctcttgtacgaatatcacataattcgtttagcggatgttgcacgggcaggtttatacgaacatatttgattatggtcgtgattactccagacatggcaagacatgtactgaactaagaacctatgtttcatttact

SEQ ID NO: 9001 - DNA, 233 bp, Gossypium hirsutum
  Clone ID: LIB3120-046-P1-K1-F11
gaagacattccggagagtatcgtgagtaaagaaaaagagctggagatgcaaagagatgatctggcatctaaaccagagaacattagagagaagatagtggaaggcagagtttcaaagaggcttggagagcttgcccttttggaacagcccttcattaaggatgacagtctgttggttaaagactgggtaaagcaaactgttgcagcacttgaagagaacataaaagtccgaag

SEQ ID NO: 9002 - DNA, 327 bp, Gossypium hirsutum
  Clone ID: LIB3120-046-P1-K1-F12
acgcgcatgtcacagattcaagagctcctacacagcatccgtgtactaacctatacattttcggggatgcgactctgatgactgtgcatgcacttcttctctaaaaagacatatgctacaaggaggaggaaaggaatgtacctgaaagggcatagaaactcgcttcgaaagctgatcttttaggcactggtgcatatgggactgaacatctagcgcatgcatcatcagagggtggacaaaaactttgtagccatcacatgctggactcttttgacagaaagaactattctaccttgttgaagcttgtttaagccctaaaaggctttt

SEQ ID NO: 9003 - DNA, 185 bp, Gossypium hirsutum
  Clone ID: LIB3120-046-P1-K1-F2
gcatacactagaagaagcggaggcagcgtcgaggttgcttcctaaccctaaccacaaaggacatgaaagcccggacgtgaacacagggcagtacgtgtttcccgagatggatccgtacctagatctggattacggtcatgtggatccggaaatggaaaccccgggccaggaccagaacagttttg

SEQ ID NO: 9004 - DNA, 52 bp, Gossypium hirsutum
  Clone ID: LIB3120-046-P1-K1-F3
gtctaaagatttatgaacccaaacccaatttttagattcaagcaaaaaggaa

SEQ ID NO: 9005 - DNA, 269 bp, Gossypium hirsutum
  unsure (1)..(269): unsure at all n locations; Clone ID: LIB3120-046-P1-K1-F4
ggagaagaaaggggttccgcgtttacgtgatgatgccgttggatagcgtgacgaacgggaatacggtgaatagaaagaaggcgatgaatgcgagtctccacgcgctgaaaagcgcgggagtggaggggataatgattgacgtttggtggggtctggtggagagggaagcgacggntgcttacaattggggtggctacgccgagcttctcgagatggctaagaagcatggccttaaagtccaggctgtcatgtcattccatcagtgtggg

SEQ ID NO: 9006 - DNA, 237 bp, Gossypium hirsutum
  Clone ID: LIB3120-046-P1-K1-F5
gttggaaatttagaaacaaaaactaatgtaggcgaagataaaagtgttttgcctctcgggtccaggacgcttgaaagtgatgataaagctagtggcgtgccagagtctctcattgatatgcctattgcagatttatggacagatccatgcattgcatttgccattcaaactctcactggaattccctgcgatactccaacgatatcaaagtcaaataggggaaaaaatccagggatt

SEQ ID NO: 9007 - DNA, 280 bp, Gossypium hirsutum
  Clone ID: LIB3120-046-P1-K1-F6
gcatacactactagtacccactactagcaatggcttcctcaatgatctcatcggctaccattgccactgcctctccggcacaggctaacatggtcgctcctttcaccggcctcaagtctgcctctgctttcccagtcatcaggaaggccaacaacgacattacttttttcgcaggcaatggcggcagagtgcaatgcatgcaggtgtggcctcctactggaaagaagaagttcgagactttcttatacctccccgatcttacacccgtgcagttggttaa

SEQ ID NO: 9008 - DNA, 150 bp, Gossypium hirsutum
  Clone ID: LIB3120-046-P1-K1-F7
ggctactgtttctgtagccaaacccaaccttcagattcaggcaaaaggaaagggtgttggttttgcagatttctcaggcctacacaactcctctactagccttccctttgccaggaaaacctctgatgacttccattcactcttgctttt

SEQ ID NO: 9009 - DNA, 254 bp, Gossypium hirsutum
  Clone ID: LIB3120-046-P1-K1-F8
ggcaaacaaaccaagtcaacctaaagccttaggcaccatggcaacctctgctatccaacgatctgctttcgttggccagaccgctttgaagcagtccaatgagctcttacgcaaagtcggagctttcgatggtggtcgtgttaccatgcgcagaactgtgaaaagtgcccctaccagcatctggtacggccctgaccgcccaaagtacttgggtccattctcagaccaaatcccatcatacctgacaggtgaat

SEQ ID NO: 9010 - DNA, 249 bp, Gossypium hirsutum
  Clone ID: LIB3120-046-P1-K1-F9
cagtgagactcttttgtatacctgtagcatatagtaatagtaagcagtaatagcaatggccgcctccatgatctcatcggcaaccattgccaccgtgaaccgctcctccccggcacaggccaacatggtggcccccttcaccggcctcaaatctgcctctgctttcccagtcaccaggaaggccaacaacgacatcacttctcttgcaagcaacggtgggagagtgcaatgcatgcaggtgtggccgcc

SEQ ID NO: 9011 - DNA, 243 bp, Gossypium hirsutum
  Clone ID: LIB3120-046-P1-K1-G1
gtctcttgcttgtgattccaaacagcactctgcatcacatgggcctttcttacccatcatggggcggtaaggcagtgaagttctccccttccacccctgaaatccagggaactggccgtgtttccatgaggaaaaccaccaagcctgttccttctggtagcccatggtacggtcctgaccgagttttgtacttgggtccactttccggtgagccaccatcttacttgaccggtgagttccctg

SEQ ID NO: 9012 - DNA, 290 bp, Gossypium hirsutum
  Clone ID: LIB3120-046-P1-K1-G10
ttacgtcacatgctcgatttggattctccactctcacggctgtactttgcattaactattgggacaggtccttaagtacctttcagtttcaaagagataatccttggatgatccaactactgggtgtcacttgtctctctttggctgcaaaagttgaagagacacatgtgcctctgctcctagacctacaagtggcggagacaatgtatgttttcgaggccaaatctatcaaaagaatggagctttcggtgctctccacactgaaatggaagatgcatccagttacaccc

SEQ ID NO: 9013 - DNA, 341 bp, Gossypium hirsutum
  Clone ID: LIB3120-046-P1-K1-G11
cccacgcgtccgcaaaaacaaaataaaataaagaacacacaacaatggccgccaacacactaatgagctgtggcatagccaccacatttccttcacttctttcctcatcaaagtccaagttcagtggcgccgccgtatcgttgcctagtgctgttggtaccaatgttggccaccgtgttagcatgtcagctgattggatgcctggtcaacctagaccaccttaccttgatggctcagcaccaggtgactttgggtttgacccactaagacttggtgaggtccctgagaaccttgagaggtacaaagaatctgagttgattcactgcagatgggctatgctt

SEQ ID NO: 9014 - DNA, 244 bp, Gossypium hirsutum
  Clone ID: LIB3120-046-P1-K1-G12
catcggcgccacgcatgcgcttcgtctcggatccaacaaacttagtacaaaacctccgcaaggatggaaagaagccgagtgcatacattgcagataccaccactgcaaacgcccaggttcgaactctggctgaaactgtgcgactagatgcacgaaccaagtagttgaaccccaaatggtatgaaggaatgatgtccattggatgtgaaggggttggagacattgagaagcgccttacaaatac

SEQ ID NO: 9015 - DNA, 199 bp, Gossypium hirsutum
  Clone ID: LIB3120-046-P1-K1-G2
ggcaaacatacggggttgcaatggcacaagcaatggcatcgatgactggtttacgtggctcttcacaagctgtgttggaaggtagtctccaactcagcggccaaacccggttgaacgttgctagcaccaacagggtggctgtggctagacctggttttaccgttagagctcaacaggttcctgccgagccctgaaacct

SEQ ID NO: 9016 - DNA, 297 bp, Gossypium hirsutum
  Clone ID: LIB3120-046-P1-K1-G4
cccacgcgttcggggttgcaatggcacatgcattgtcacctgttgttcttccatttttgagatcaagtccccccccctctcataacctctccctctaacaagccaaaggccccaagcagattctatttgttctaacatggagaaaagccatgaacttggaccggcccaaattaaggaatccggtaaagaacctggggttttaaccaaagaaatccggggatccgccactaatgaaatcctggatggcaggaccattggacacagataaggcttaaaagatgttggtccaggggttga

SEQ ID NO: 9017 - DNA, 296 bp, Gossypium hirsutum
  Clone ID: LIB3120-046-P1-K1-G5
gtcccttgcatatgtgttaaaattagaggagggattcgtgcaccgtaaatactcgagcctacccacgtactacgatggacgctactggaccatgtggaagctgcctatgttcgggtgcaccgactcggctcaggtattgaaggagcttgaggaatgcaagaaggaataccccaatgcattcattagaatcattggcttcgacaccgtgcgtcaggtgcagggcattagtttcattgcctacaagcctccagccttctaagcttttaataaacttggcttctcaattggttggaatt

SEQ ID NO: 9018 - DNA, 240 bp, Gossypium hirsutum
  Clone ID: LIB3120-046-P1-K1-G6
ctcaagcattcggggttgcaatgacacaggcatgggagtttaaggctctttgcattgggggtctgatttaatgagcagtagtggttataagcacaagaagagaaaacaattgcagacagtagacctgaaggtgaggttggactgtgatggttgtgaactcaaggacaagaaagccctctttttattgattggagtgaaatcggtgatcataaacaggaaacagatgatggtgattgtaat

SEQ ID NO: 9019 - DNA, 173 bp, Gossypium hirsutum
  Clone ID: LIB3120-046-P1-K1-G7
acccacgcgtccgagcatatagtactagtaagcagtaatagcaatggcctcctccatgatctcatcggcaaccattgccaccgtgaactgctcctccccggcacaggccaacatggtggcccccttcaccggcctcaagtctgcctttgctttcccagtcataggaggccaca

SEQ ID NO: 9020 - DNA, 117 bp, Gossypium hirsutum
  Clone ID: LIB3120-046-P1-K1-G8
caccaactttgtccccggaaagtgaacttagagagtgagaagggatttgccttgtttatgtttttatttgttggtgtgaatttaaatttgttgcacaatcaatgaaagtataatgtg

SEQ ID NO: 9021 - DNA, 329 bp, Gossypium hirsutum
  Clone ID: LIB3120-046-P1-K1-G9
tcttgctcaaatctgacactgtgggtgtcctcaaaaccctctctttctgacactcattcactctctttgcggtctttcatcagcccttttcagcttccgtctcagagctcaacccccggtaaccgttgcaggtccttatctgtaaccccaggtcactgcggtcttcgggagcttagagaccgtgttgattcagtaaagaccacgcagaacatcactgaagctatgaaactggtggctgctgctaaagttaggagagcacacgatgctgctgtcaatggcagaccttaatctgagtccctggctgaagttctttacagcatcaatgaaca

SEQ ID NO: 9022 - DNA, 179 bp, Gossypium hirsutum
  Clone ID: LIB3120-046-P1-K1-H1
cccacgcgtccgcccacgcgtccgcccacgcgtccgcccacgcgtccgcccacgcgtccgggctgtggtaaaactgtgattagtcaagctctttccaagtactctaattctgatgctgttgtctatgttggttgtggagagcgaggaaccgaaatggctggggttctaatggatttcct

SEQ ID NO: 9023 - DNA, 330 bp, Gossypium hirsutum
  Clone ID: LIB3120-046-P1-K1-H10
cccacgcttccgtacaaagtattctccccaaagcaatcctttcacttgcaaaaagggagagcggcaggcctagatatattatgcggaacattcaatacatcgtcgggaagattttatcctatatagcatgataatcacaggacctgtgaggcagatggtgtaccgaaaaaatgctccttgcaggttaaggcaaataatgcggattaattggaaatatttcggaaggagagcttcatcataggcccagatgaccggagtgctggttagcactatgcagaggcggtcattacagtaaggaagaaggctaactcgttgaaaaagaataacggc

SEQ ID NO: 9024 - DNA, 391 bp, Gossypium hirsutum
  Clone ID: LIB3120-046-P1-K1-H12
gtgcttttggcgacactcgatttaaaacgaagaagaatgaaatgctgaagaagggagttggggaaaagagatggtctgaaaaatttatttcacgtgtagcgttcaatgatgacttggtcatagcatcttcagacacttttaaagtagctattggatcagatgcagaatttgtcctgttggcatctgatggcttatgggattacataaacagttcggacgcagttgcttttgttcgaaatcaattacgagaacatggagatgttcatgtagcatgtgatgcacttgcacaagccgctctggataaaggctcacaagacaatgtcagcattatcatagctgatttcgggcatactgaatggcagaaattgccagttgagcaacagaattttct

SEQ ID NO: 9025 - DNA, 249 bp, Gossypium hirsutum
  unsure (1)..(249): unsure at all n locations; Clone ID: LIB3120-046-P1-K1-H2
ctgccgcgaacncatacgcccacgcgtccgctcctccacaaattaactcccttttttcctcttcaagttttctctctataccgcttctattctcctttattttcttctctatatcaccacaaacgaagttatgggagtgggaggattataagagagttggggtttctgggtgatttcagaggtaaagggagggtgacttctggttcaatggggaaacagaaaggggggttcttttggcgttcttttcct

SEQ ID NO: 9026 - DNA, 129 bp, Gossypium hirsutum
  Clone ID: LIB3120-046-P1-K1-H3
agaacttttgcggtattgctgaataaggatgggttaatggccacccatgattaggaaacggaacacttcttcaaggatactgatgtcaactgtgtcttatgccctcgtaatccaaatgatggtggaagt

SEQ ID NO: 9027 - DNA, 220 bp, Gossypium hirsutum
  unsure (1)..(220): unsure at all n locations; Clone ID: LIB3120-046-P1-K1-H4
taancttncnttttcagaatcctacatcgctgccgcttccctcgacgaccctgaaatggtgggctaccattttgcatattcattgagcctatctaggccatcaggaaccaaacaccaatccaactttattctagtttcaagacgcgggccatacatctccatggggatggccaatagtaaaaagacgacggctccttctgcatccctgtccaggaaagag

SEQ ID NO: 9028 - DNA, 166 bp, Gossypium hirsutum
  unsure (1)..(166): unsure at all n locations; Clone ID: LIB3120-046-P1-K1-H6
tccgcattcccggtcgacccacagcgttcgcccacgcgtccgaccactnnnnnnnnnttttnaaattatttataacgagaatgggtgccaggggaggaggccgttgctacagtgctgctcatggggacactcttactcgacgactacacaaggtgagggagattcg

SEQ ID NO: 9029 - DNA, 443 bp, Gossypium hirsutum
  unsure (1)..(443): unsure at all n locations; Clone ID: LIB3120-046-P1-K1-H7
cagactctcccgctccttctcgctgcgatttcgtcttcaagatctcagttctcaaatcggagcgctcttttctatcaagccatggctctgatcttgcatgcaggaaaaacaaacaaaaatgcctttaaggcactcattgctgcaaaatatagtggcgtgcaggtcaaaatggttgagaattttgagatgggtgtgtcaaataagactcctgagttcatcaagatgaaccccttgggggaagggtcctgtgttggaaaacacctggagggttcggtattttgagagcaaaggccaatggctcggttatgttggctcggctcaaaagggtaacaacccctattatgtgggnttctacatttgattggattaatgggcatattcgaggcaatgggattggatttttgcagccccttggaaattgattgcttaatatttgccaaaat

SEQ ID NO: 9030 - DNA, 262 bp, Gossypium hirsutum
  Clone ID: LIB3120-046-P1-K1-H8
aagccaatgatgttgaaaaattggccaactttgccgtcagtgaactcggttctatcgacatttggataaataatgctggcactaacaaaggttttagaccattactacagttcagtgatgaagatattaagcagattgtctcaacaaatcttgttggttctattctctgaactcgggaagccatgcgcataatgaaaaaccagccaaagggaggcatatatttaacatggatggtgcaggctttgggggatctaacactcct

SEQ ID NO: 9031 - DNA, 306 bp, Gossypium hirsutum
  Clone ID: LIB3120-046-P1-K1-H9
agcactcaaaatactttcaacaataccagaccaggctcggctgatcttgtcggatcacacgtaaggacagggggttgtaaacgatgcacttgtgctcattactgctgatggaaacgcttgcttgaacacctcctattagggtccattattgcttagagctcgccagtttagcataccagatgatggtcaattgctcaggtgtgcagacaggaaactcctactgaggttgatggatcaaggacctcggacggttcggttgactgggaccgacccaatgggttgggttccagcagaattagccatgag

SEQ ID NO: 9032 - DNA, 335 bp, Gossypium hirsutum
  Clone ID: LIB3120-048-P1-K1-A1
atttactacccttttgcctttgttccatcgatttctagagcttcatggctgaaaccgcctggaactccgccccttctacctctaccaccgccgaggcgccagcgcctcaagaaaccaaaaagaccaccgaggcaccagtaagatgggccgatatggaagacgaagcttcggaagaaccgagcacttcatcggaagacaaaggtgcgccggaactcggagttgaaaacctaaaaatcgatgaaagcaaaaagatcaacaagttcctcgacgaacccgaggactccaacatcaaagccgtcacatctggggagacaccatacactttagcatttacg

SEQ ID NO: 9033 - DNA, 221 bp, Gossypium hirsutum
  Clone ID: LIB3120-048-P1-K1-A2
gcgtacgtgcacgcgtgcgacgagagctggcattacagaggggtgcggagaaggccatggggcaagtgggctgcagagatccgagacccgaccaggaagggacgtcgtgtttggctaggtactttcgatactgatgtcgatgctgtcaaggcttatgattgtgcagcattttaaaatgagggggcagaaagcattactgaatttcccattggaagctggac

SEQ ID NO: 9034 - DNA, 320 bp, Gossypium hirsutum
  Clone ID: LIB3120-048-P1-K1-A3
cacaaccactatcactaccattatggcttcggctactgtttctgtagccaaacccaacctggagatgcaggcaaaaggaaagggtgttggttttgcagatttctcaggcctacacaactcctctactagccttccctttgccaggaaaacctctgatgacttccattcactcgttgcttttcagacatctgctctaggaagcaataatggcgggtacaggaaagggatggcagaggcaaagctaaaggtggctataaatgggtttgggaggattggcaggaacttcttaaggtgctggcatggtccgaaagactccccac

SEQ ID NO: 9035 - DNA, 241 bp, Gossypium hirsutum
  Clone ID: LIB3120-048-P1-K1-A4
cccacgcgtccgctttgatatggttgtttccatggcggtgagatcaattttcactatcttagcaaggatcaaacttatttttgggattggtccttcgatattaccacgaagcctatcagcttctgcaactgttcatccaactgaaaaccctaacggattcatgtcaggttccataaaaaaatcccttccgaagaggaaaacaaagattcgaggttcgggtttttcgagtcgaacacaaagc

SEQ ID NO: 9036 - DNA, 323 bp, Gossypium hirsutum
  Clone ID: LIB3120-048-P1-K1-A5
atttactacccttatgcctttgatgcatcgatttctagagcttgatggctgaaacagcctggaactgcgggccttatacctgtgccaccgtcgaggcgcctgttcctcaagaaaccaaatagaccaccgaggcacctgtacgatgggccgatttggaagacgaagcttacgaagaaccgagcacttcatcggaagacaaaggtgcgctggcactcggagttgaaaacctaagaatcgatgaaagcaaaaagatcaacaagttcctcgacgaacccgaggacttcaacatcaaaggcgtcacatgtggggagacaccatacact

SEQ ID NO: 9037 - DNA, 91 bp, Gossypium hirsutum
  Clone ID: LIB3120-048-P1-K1-A6
gcccggcctgaatgcccggtcgacgcgacgcgtccgcccacgcttccggaaagcactggaatttcctatgcatgggctatgcttttctcct

SEQ ID NO: 9038 - DNA, 253 bp, Gossypium hirsutum
  Clone ID: LIB3120-048-P1-K1-A7
acgcgtccgccactatcactaccattatggctacgtctactgtgcctgtagccaaacccaacctggaaaggcaggcaaaaggaaagggtgatgactttgcagatttatcaagcctacacaactcctttactagccttccctttgccaggattaacgctctgatgacggccattcactcgttgctctacagacatatgctctacgaagcagtcatggctcatagcaggaaagggatggctcatgcacagctaaa

SEQ ID NO: 9039 - DNA, 241 bp, Gossypium hirsutum
  Clone ID: LIB3120-048-P1-K1-A8
gacgcgtgcgtccacgcgatgcgattacttatgtggcaagccatgcacgtagagtccattgcatgcatcagcatcgcgattactggaaagaagaagcttgacactatctcatacctacccgatcttacacccgtgcagtatgctaacgtagtagcttaccttctattttcaaaatgggtagcttgcttggaatacaaattggaggacgtattcgtgcaccgtaagtactctagcttaccca

SEQ ID NO: 9040 - DNA, 255 bp, Gossypium hirsutum
  Clone ID: LIB3120-048-P1-K1-B1
ggtggccgacgcatccgtgacggtcgtatggagaagttttactgggcacccaccagggaagataggatcggtgttcgcgcaggtcttttcaggaccgacaatgttcccgttgatgaccttgttaagcttgatgacaccttcccgggccaatccattgactttttcggtgctgtgagggccagagtttacgatgacgaaatgaggaaatggatcggagaggtcggagtcaatggtgtcgggagatagctcgtgaac

SEQ ID NO: 9041 - DNA, 244 bp, Gossypium hirsutum
  Clone ID: LIB3120-048-P1-K1-B2
cccacgcgttcgcccacgcgtccggccacccacatagctacattaggatggttcaacatcggatcgatagatgtatgctgctttacatgaaccgacaacaatgtgtcaaggcactggcacagtatgcaagcgttgggccgtgcattacaattacagtgtggagagagctataaaaggagaacatggacttctttgaagcatattttaaagcttttttttcatacaggccttttatgggtacatt

SEQ ID NO: 9042 - DNA, 296 bp, Gossypium hirsutum
  Clone ID: LIB3120-048-P1-K1-B3
tccacgcgtccgcaaattttacctttactaaatggcccccaaagctgagaaaaagccaggcgaaaagaaaccggcggaggagaaaaagaccaccgttgccgagaaatccccggcggagaagaaaccgaaggccggcaagaagcttccaaaagaaggcggtgccgccgctgacacgaagaagaagaaggccatgaggagtgtggagacttacaagatctacatcttcgagcgttcttaaacaagttcaccctgatatcgggatctcaagcaacgctaatggggtactgaacagtttc

SEQ ID NO: 9043 - DNA, 154 bp, Gossypium hirsutum
  Clone ID: LIB3120-048-P1-K1-B4
ctgggtctattcaggacgcctagcgcattggcgaccatcacggttgacgctgccgatatggcatctctgaccggacataatgacggtgcaaccggctatgaaggtagcgccacaggcaatgtggcagtcctatcattgccaaggggcagcttaa

SEQ ID NO: 9044 - DNA, 185 bp, Gossypium hirsutum
  Clone ID: LIB3120-048-P1-K1-B5
atgcgtgcggtacatggacaagattacacgctccctaaagggccgataggatcagaagtagcgcagggattagaaacgcccgacaggaggaaaaagacgaccacctgcgctaagatcgctgacacctaacaaacccaatgcagtgactatgcttgcactagaaggcccagccgtcgctgacacga

SEQ ID NO: 9045 - DNA, 355 bp, Gossypium hirsutum
  Clone ID: LIB3120-048-P1-K1-B6
ctgggtctacttcagggacgcctagcgcattggcgaccatcactgatgatacagcccagcatggggtacgtattcgaagctatgacgttcaacatccactgtggttacctagaagcgatcgtgagaggtcaccggtccggtctcttaaccgccgacgattacaacaatctctgccaatgcgagacccttgacgatatcaagatgcacctatccgccaccgaatacggtccttacctccaaaatgaaccttcaccattgcatacgactactattgtggagaaatgcactcttaaactcgttgatgagtataagcatatgctatgccaggctaccgagccatgtccaccttttagag

SEQ ID NO: 9046 - DNA, 220 bp, Gossypium hirsutum
  Clone ID: LIB3120-048-P1-K1-B7
tacactctatctgagatttagcgctttacttaacggtcctgatagttgatagatagtgcagcgttaagtaacctgaggggagacatagaccaccggtgtcaagaaatagcttgcggttagtaaaccctatgccatcaagactctttcaaatgaatgatctgcgcgcgctgacacgtactggatgaaagcccttaggtgtgtggagacttacaagatctac

SEQ ID NO: 9047 - DNA, 292 bp, Gossypium hirsutum
  Clone ID: LIB3120-048-P1-K1-B8
gaaaaaaaaaaggtggggagagggcttacacacatgaacagatcctcataatggagggaacgatattgggacgattggaatggactttaacggtgcctacacattacgtgttcttagcacggttcatcaaagcatcgatccctgacccgaagatggaaaacatggtgtatttcttagctgagttggggataatgcattacgagaccattaggtattgtccgtcgatggtggctgcttcggctgtgtatgccgcacggtgcaccttgaagaagacaccagcttggacagacac

SEQ ID NO: 9048 - DNA, 295 bp, Gossypium hirsutum
  Clone ID: LIB3120-048-P1-K1-C1
aattcgcctgatcgacgcgtgcgtccgtgagactcgtatctggtatttacgcgccttttcttactttccggaccatttttatgacaagtgcagagatcaatcatctagctgaatccctaccatcttcgaatcatggctgcgcttgtggtttgataggcctctttgatcaaactaagtttcatgtctgatcttgacgttcaaattcgtactgccttccatccctttgctgatgcagatgctgaggactcacgtgcggatgctaggagtatgtgcatattcgtttcaggagaggaat

SEQ ID NO: 9049 - DNA, 221 bp, Gossypium hirsutum
  Clone ID: LIB3120-048-P1-K1-C2
gtccggcccggtatcccctcgaccgcacccacgcgtccggaaaaaaaaaaggtggggagagggtgtgacagagagagaaataattcaatttggattctagtcggaaagtcaggaaaaatcacttcttcaaagtttaagggacttttaagggttcaattcagctccaactttctccttcgctgcttttggtttatggttgtcgataccgctgcttgaaatct

SEQ ID NO: 9050 - DNA, 204 bp, Gossypium hirsutum
  Clone ID: LIB3120-048-P1-K1-C3
cccacgcgtccgattttcttcaatccctgtctttatatgttatgacccttcacaacccttggtatgcaccacctttttccctctatctcatccaccttcaatccattaatttgcttgtattttcacctgttcgatggaaccaacatagcctaagtcccgaaacctcgaccagttcatgaacgaagtcgccccgccttggtttat

SEQ ID NO: 9051 - DNA, 133 bp, Gossypium hirsutum
  Clone ID: LIB3120-048-P1-K1-C4
ttcccggtcgcgcacgcgtccggctatagcatacactactagacccactacttctttggcttcctcaatgatcattatctggggcgggtgtcactgtctgtgcggcacaggctaacatggacgatcctttcac

SEQ ID NO: 9052 - DNA, 334 bp, Gossypium hirsutum
  unsure (1)..(334): unsure at all n locations; Clone ID: LIB3120-048-P1-K1-C5
ctcgttcctacacattaaatcccagactttatatgttatgacctcttcacaaccaccaggcatgcaccacctctntcgctctatctcatacaccttcaatccattagtttgcttgtattttcacctgttcgatggaaccaacaaagcctaagtcccgaaacctcgaccagttcatgaacgaagtcgccccgcctcggtttatctcggtttccaagcgtccattgacgacaatgttggccaccatagccgaggaagaaaaagatttcaacgacaatgaggtcgttaaaggacgacgaacatattcgtcgtcagtgtgtggcaaagctgctatatg

SEQ ID NO: 9053 - DNA, 316 bp, Gossypium hirsutum
  Clone ID: LIB3120-048-P1-K1-C6
gctatagcatacactactagtacccactactagcatatggcttcctcaatgatctcatcggctaccattgccactgcctctccggcacaggctaacatggtcgctcctttcaccggtctcaagtctgcctctgctttcccagtcaccaggaaggccaacaacgacattacttctctcgcaagcaatggcggtagagtgcaatgcatgcaggtgtggcctcctactgggaagaagaagtttgagactctctcatacctccccgatcttacacccgtgcagttggctaaggaagtagattaccttcttcgctcaaaat

SEQ ID NO: 9054 - DNA, 192 bp, Gossypium hirsutum
  Clone ID: LIB3120-048-P1-K1-C7
ctgaagcaatcaatggtttattctgaatttaccgatcactgaacagagggggcgcatcatgagacgggagataacaaagaccttgctctcatggagcatattctacatggaagctttcatgtgaacgcacctatgaaagtgcttgaaacgcgcccgccgcaaaaaccgaaacatgaccgcctcccattgagg

SEQ ID NO: 9055 - DNA, 277 bp, Gossypium hirsutum
  Clone ID: LIB3120-048-P1-K1-C8
ctcgaagcccacacccttgctaatgggcgattgcagcggatggcttttctgtttttgttggggggttattttttatttatttgataactatacaagtgtcaaaatcccattggggactgcagagagatgagacgtacatcgttggcaaggcctgacctatcttcccaccgtaagcgctaaattggcggtcgaaattgttaccgcacacacgtggaagacggctgattcagtttggaggggtttcagttttaaatatacatactatttctcacttcta

SEQ ID NO: 9056 - DNA, 394 bp, Gossypium hirsutum
  Clone ID: LIB3120-048-P1-K1-D1
aaaatttcttggttttcctcccaaagcaacatgatgttgcaaacagcttgcagctcgtttgcatggctgttgaatgttggcaaccagaaagatggactgttcccagcatctttctcatttctggttgccatatagggaatttcactcttgtactcattttggaaggcgaggaaaccgatggctcctttaccacctggtccccgtgggttgccaatcctggggtatcttccatttcttggattcgataatctgcatctggtctttacggagttgggtggagtttatggtcccaattacaagctttggcttgggaacaagcttaaccgaagtaatagctttccatcgcttggaaaagagtggttcgtgaccatgatatagcttttcagagcgagac

SEQ ID NO: 9057 - DNA, 240 bp, Gossypium hirsutum
  Clone ID: LIB3120-048-P1-K1-D2
ctcgaagcccacaccctttctattggacgctcgctctgtttcctctttcgcatcaaagctcaggaggcatgtctcagcagccggatacgaagcctttgactgaagaagagctcgaacgaaagaaaaagaaagaagaaaaggcgaaggagaaggaactgaagaaacagaaggccttagaaaaagctgagttagccaaacttaaggcacaacaaggatcgaatgctccaaaaaagagtgaaa

SEQ ID NO: 9058 - DNA, 200 bp, Gossypium hirsutum
  Clone ID: LIB3120-048-P1-K1-D3
aaaatttcttggttttcctcccaaagcatcatagatgttcgcagaacagctcgcatctcgagggcaccgctgctgaaggtaggcaggcaaacccatatcctgttccaagcatgcttactatggcattgtgtgatgctatgacttatgacatggctcccatatctgatggctaggatgcatcaatttactttagcacatag

SEQ ID NO: 9059 - DNA, 189 bp, Gossypium hirsutum
  Clone ID: LIB3120-048-P1-K1-D4
ctcgaagcccacaccctttctagtggacgccggtcagtatcctctggcgcatcaaagctgcaggggccatgtatcagcatgcggatactaaccctcagactgaggatgagctccatcgagagaaaaagaatgaagatacgtcctaagatagggaactgaagaaacagatggccttagaataagctgctt

SEQ ID NO: 9060 - DNA, 312 bp, Gossypium hirsutum
  Clone ID: LIB3120-048-P1-K1-D5
aaaatttcttggttttcctcccaaagcaacaagatgttgcaaacagcttgcagctcgttttgcatggctgttgaatgttggcaaccagaaagatggactgttcccagcatctttctcatttctggttgccatatagggaatttcactcttgtactcattttggaaggcgaggaaaccgatggctcctttaccacctggtccccgtgggttgccaatcctggggtatcttccatttcttggattcgataatctccatctggtctttacggagttgggtggagtttatggtcccatttacaagctttggcttgg

SEQ ID NO: 9061 - DNA, 284 bp, Gossypium hirsutum
  Clone ID: LIB3120-048-P1-K1-D6
ctcgaagcccacaccctttctattggacgccgctctgtttcctctttcgcatcaaagctcagcagccatgtctcagcaaccggatacgaagcctttgactgaagaagagctcgaacgaaggaaaaagaaagaagaaaaggcgaaggagaaggaactgaagaaacagaaggccttagaaaaagctgagttagccaaacttaaggcacaacaaggatcgaatgctccaaaaaagagtgcaaagaagagtgccaagcgagaggcagatgatgagaatccagaggatt

SEQ ID NO: 9062 - DNA, 314 bp, Gossypium hirsutum
  Clone ID: LIB3120-048-P1-K1-D7
taccgtccgaattccgggtcggcccacagcgtgcgcccacgcggtgcttatgcctggccacgagcgagtactcacagtcggagcgagtgtcgggattgagaggtggcgatcatatatggtgtgatagatacattctagagagaatcactgaacatgccggtgtcgtactctgacctcgatcctaaaccaatagagggcgactggaatggcgctggatgccacacaaattacagcactaagagcatgagggaagatggaggcttcgaaggtataaagaaagcaatcctgaatttgtcgtttcgccacaaggagca

SEQ ID NO: 9063 - DNA, 333 bp, Gossypium hirsutum
  Clone ID: LIB3120-048-P1-K1-D8
ccggtccgaattcccggtcggccccacgtccgcccacgcgcccgacccactctatggtgcgcctttacttgtactatgcgcttccgtcctcagggaagaccctaaccctttgcgcgggcccttctccttttggggataccacttcttggctaatcgctctcgccttcttcttcgctcggggtttcatcaagactggacttggtaatcgaatcgcttaccaattcgtttccttattcggatcttcctcattaggtttaggctacagcttagtcttcagcgaagctttattagcgcccgcaatttcaatccgattccgacgcgctggaggaattt

SEQ ID NO: 9064 - DNA, 104 bp, Gossypium hirsutum
  Clone ID: LIB3120-048-P1-K1-E1
ccacgcgtccgccaaagggtgaaatctgtgatgtaaatcgtcgtttgtgttgatgctgctgaggatgagttcttcagattgacaaccagggaagggaaactgac

SEQ ID NO: 9065 - DNA, 345 bp, Gossypium hirsutum
  unsure (1)..(345): unsure at all n locations; Clone ID: LIB3120-048-P1-K1-E2
gcgcaccacgcgtcccatccccattgacacaatggcttccatgcctagctctggaattgttctgtaggccaaccccatttcttggccaaaccaaaaatgctaaccctcttagagatgttgtctctttgggcactcccaaatatgcaatgggaaatgaactatggtatggaccagacagagtgaagtacttgggaccattttcagctcagactccatcttacttgactggagaattccctggtgactatggttgggacactgttggtttgtcagccgaccctgaggccttngccaggaatagggctcttgaggtcattcatggaagatgggcaatgttgggagcac

SEQ ID NO: 9066 - DNA, 218 bp, Gossypium hirsutum
  Clone ID: LIB3120-048-P1-K1-E3
gcaccgggtatttgttgaacaacaaggatgcttctcagcacatctttgaagtatctgctgggcgtgactctcttgttcttggagaaggtcaaatccttgcacaagttaaacatgttgtcaaagttgggcaaggtgttgttggctatggaaggaacatgacagggctgatcaagctcgcatttactgctgggaagcgtgatagaacagaaactaacatt

SEQ ID NO: 9067 - DNA, 240 bp, Gossypium hirsutum
  Clone ID: LIB3120-048-P1-K1-E4
atcattttgcgtggcaatgtcgacggcttctatcaacggttggtgccttacctcctcttcgtccaccactaccacctcctctttttccgctcgtcgacgacctacattgcggccttcagtcgtcgctagccttaactcttctccttctcctccgactcttatccaagaccgcccggtttttgctgcccctattcctttgctcaccccgagagaagagatgggaaacaagtcctacgacga

SEQ ID NO: 9068 - DNA, 289 bp, Gossypium hirsutum
  Clone ID: LIB3120-048-P1-K1-E5
gtccggaaaaagaattatgaattcgccgacgacggttagggattcatcgtcgccgacacggatcggggctcgttcttcgatgatggactggataagagcttgtggcttgtcgggattagccggtatgaagatcgataaagaagaactcagacgaaggctttcgatgcctcagtatctacgccttgctatgttagattccattaaaaaaaaagacgtcgacggcggcgatgaacattttcgttcgcgttctttcgactacgatggtacttgttctcaatctcctatcggt

SEQ ID NO: 9069 - DNA, 52 bp, Gossypium hirsutum
  Clone ID: LIB3120-048-P1-K1-E8
accgttgtggggttgagagtatcagatggcttccattgagtctatactggta

SEQ ID NO: 9070 - DNA, 294 bp, Gossypium hirsutum
  Clone ID: LIB3120-048-P1-K1-F1
tttagctatagcatacactactagtacccactactagcaatggcttcctcaatgatctcatcggctaccattgccactgcctctccggcacaggctaacatggtcgctcctttcaccggcctcaagtctgcctctgctttcccagtcaccaggaaggccaacaacgacattacttctctcgcaagcaatggcggcagagtgcaatgcatgcaggtgtggcctcctactggaaagaagaagttcgagactctctcatacctccccgatcttacacccgtgcagttggctaaggaa

SEQ ID NO: 9071 - DNA, 355 bp, Gossypium hirsutum
  Clone ID: LIB3120-048-P1-K1-F2
caaccttccacttctgtggtgaggtgccaccctgttgcaccctccggactaactgtgcgtgcaagctcatatgccgatgagcttgtcaagactgctaaagctattgcttctcctggccgtggaattttggccatggatgagtccaacgctacctgtgggaaacgtttggcctcaatcgggctagaaaacacggaggctaaccgccaagcctacaggacgttgcttgtttcagctcctggccttggtcagtacatctcacgtgccatcctctttgaggaaaccctctatcaaaccacaattgatggcaagaagatggttgatgttcttgttgagcaagacatagtccctggtatca

SEQ ID NO: 9072 - DNA, 54 bp, Gossypium hirsutum
  Clone ID: LIB3120-048-P1-K1-F3
tccacgctgcccatatctcttctaattcacttatttaacgacatactggatata

SEQ ID NO: 9073 - DNA, 347 bp, Gossypium hirsutum
  unsure (1)..(347): unsure at all n locations; Clone ID: LIB3120-048-P1-K1-F4
cggacgcgtgggtcaattttcttggattttttttccattttttgtcctaaaacttctcttggaacaactcaaccctagttttgctgtacccgatctgtttagaagtgaagctaatttcttcgatcgaagcagctgttggaagagttgcagatctgttgtgtggctttggattctataaaacatctgtttttgttttatttttttgtctgagaactggactcctataacaacaaccaacgttgttcaaaactgtggctgccatttttcaggctatgcttttgaaagtactgaagctgcaaaaggcttaaaacnagagagagagagagtagagtgagagagaggggggg

SEQ ID NO: 9074 - DNA, 308 bp, Gossypium hirsutum
  Clone ID: LIB3120-048-P1-K1-F5
cttagctatagcatacactaatagaaccagttgcttcacaagggtctctacaacaactgatggggtaccattgacactggctgtccggcacaggctaacatggtcgctcctttcaccggcctcaagtctgcctctgctttcccagtcaccaggaaggccaacaacgacattacttctctcgcaagcactggcggcagagtgcaatgcatgcaggtgtggcctcctactggaaagaagatgtttgagactttctcatacctgccggatcttacacccgagcaggttgcttaaggaagtggattaccttc

SEQ ID NO: 9075 - DNA, 350 bp, Gossypium hirsutum
  Clone ID: LIB3120-048-P1-K1-F6
acgacaggtacaaatggattggtctggttcggatctctattgctaaaaatggatgctcacctctgtggaggggcattagtcgggtaagggacgaagttaaacaagggttgtgttggaatttgggcaaggcaaaacggtggatttttagtttgataggtggcttccgaatggctatcctctcattgatgatgttcggtcaagggaggtggccccggctggctttacatccgtcttatccatgacgagtgttattggaacttgtgcttgggagagatttaatcagctattgtctcaacgtgggatcttaagagtggttgcggttgatgtttaggatttctttgggttggaga

SEQ ID NO: 9076 - DNA, 276 bp, Gossypium hirsutum
  Clone ID: LIB3120-048-P1-K1-F7
cgcccgacgcgcgcggcagagaccactctcggctcaattcttacattacgcttgcatttgcatatctaatacgagcgggagacttttcaaactagggttcaaaaacagaggaaactcatgagcatgcttagtgactgagtttgaatagagcaacctactctctgaagctcgcaggtgcaacctaccacgagagtagctcagagtctcctttgattgtgaacggagggaaaatgtggggacacgcagtggtggatgtatcaaccattcgaggatgct

SEQ ID NO: 9077 - DNA, 236 bp, Gossypium hirsutum
  Clone ID: LIB3120-048-P1-K1-F8
ttggctccatgtctagacagagcaacgaaacctaggacgaaagcggttcgttatcgttggatcttaatgaagccgctgatgtggaagacgacaaagccgatggatcacacaattccagtgatctcacaggggatcatgaagaaggacaaggcctaacaaacagactatgttccatcttaacatcatcatcagagccccatgagctactcaattccgtcgacgatgccattcatttt

SEQ ID NO: 9078 - DNA, 279 bp, Gossypium hirsutum
  unsure (1)..(279): unsure at all n locations; Clone ID: LIB3120-048-P1-K1-G1
atccctttaaccatattgctctcaattcttacatgacgcttgcttctgcatatagaatacggtcaagtgacttcttatccttccattcaaaaacagatgaatctcaattgaaagcttttgaaatgagtaggatcagtgcaggttactctctgttgctggcaggtgcaactcaccatttgttttgctcagaatcttctttgattgtgtctgctgtgaatttctggaaacaggcgngggaatatttattaaccattgctggatgctctgtctggaacttat

SEQ ID NO: 9079 - DNA, 391 bp, Gossypium hirsutum
  Clone ID: LIB3120-048-P1-K1-G2
cccacgcgtccgcaaatggtgatttgatcaaagaagccaatccaattcctcactcgaacggccttctttcagaagatggttcaggataccctaaacagtgaagaactttttatcaaacggttgctaacattttctatggatccccttagggatgtgtttgtggtcttgtaaaatataatgaatgcttggtggttttttactggctttagaattttattatagattttacagtaccatgggaccatcttcaaggggatataaatgaataatccaaggcggggttgggttgggggggttggtgtttatttaagtaattcttggttttcttttgagtttttttacttatttacttgatgtttttagtttctttttttttgtggtagcttttttt

SEQ ID NO: 9080 - DNA, 183 bp, Gossypium hirsutum
  Clone ID: LIB3120-048-P1-K1-G3
cccacgcgtccgcgtcgctagccttaactcttcttcttctcctccgactcttatccaagacggcccggtttttgctgcccctattcctttgctcaccccgagagacgagatgggaaacaagtcctacgacgaagccattgaagctctcaagaaacttttcagtgagaaaggagaactgaaagc

SEQ ID NO: 9081 - DNA, 225 bp, Gossypium hirsutum
  Clone ID: LIB3120-048-P1-K1-G4
cccacgcgtccgcaacgccattcctcaccacgtccaccactttgtccctttctctttcaacggcatctccaccgtctttccagttccttatcctctacttgtttcccttttaagccaaacctccacagagtccgtagaagcccatcacttcttgcttcctatggaaacccacacttatttaaccacgaagatcatcattccacctataaatcattgctatccacc

SEQ ID NO: 9082 - DNA, 155 bp, Gossypium hirsutum
  Clone ID: LIB3120-048-P1-K1-G5
ccacacctcatggctgtaagttactctcatgtgctttctaaacttcctctaaatgttacatctcaaacattccccttctataacatagttgcactgtaagaaaacagcgcacgagacgtctaaaaagctcatggccttacatctctctctcgctt

SEQ ID NO: 9083 - DNA, 243 bp, Gossypium hirsutum
  Clone ID: LIB3120-048-P1-K1-G6
cccacgcgtccgcaacgccattcctcaccacttccaccactttgtccctttctctttcaacgcatctccaccgtctttccagttccttatcctctacttgtttcccttttaagccaaacctccacagagtccgtagaagcccatcacttcttgcttcctatggaaacccacacttatttaaccacgaagatcatcattccacctataaatcattgttttccaccagaattcttggacccaaat

SEQ ID NO: 9084 - DNA, 275 bp, Gossypium hirsutum
  Clone ID: LIB3120-048-P1-K1-G7
cccacgcgtgcgcgtcgctagccttaactcttttctgtctcctccgactcttatccaagacgggccggattttgctgccgctattccttcgctcaccccaacagagggggtgacaaacatgttgtaccactaagccgctgatgctctcatcaagactgatcgagagaaccgagaactggaagcttaaagccctgcaagggtagatcaaataacagcagagttaaacacagcatcagctgatggcataccatctgactcttctgtgagagacttgt

SEQ ID NO: 9085 - DNA, 56 bp, Gossypium hirsutum
  Clone ID: LIB3120-048-P1-K1-G8
attcctaccacttcatcactttgtccttttctctttcaaccgaggggcaccgtctt

SEQ ID NO: 9086 - DNA, 185 bp, Gossypium hirsutum
  Clone ID: LIB3120-048-P1-K1-H1
gcgtgacaatcatgacgggccttaactttacataggctgcttgtgtttgatcgctgttaactgtgacgcagagggtatccatgcgagatcatcaacaacatatctgctgatggggttggaactgaatactgtgatacatgtttgcaggctgacctcttcaggccgacctattttatttcaggtgc

SEQ ID NO: 9087 - DNA, 309 bp, Gossypium hirsutum
  Clone ID: LIB3120-048-P1-K1-H2
ggcaaatactacatttgcctcagctattcaaattggtgaccctgtttctattgatagagccgcgtacgctttgaaaaattcaaatgggattgtcgaggaagcgactgaggaggagttaatggatgcaatggcacaggcggattctacaggaatgttcatttgccctcatactggagtcgcattgactgctttaatgaagcttaggaaaagtggggttatcggagctggagacagaactgttgtggttagtacagctcatggattgaagtttacacagtccaagggttgactaccactcgaaggagattc

SEQ ID NO: 9088 - DNA, 202 bp, Gossypium hirsutum
  Clone ID: LIB3120-048-P1-K1-H3
cattgagcctctcgacaattccgttgcttccaaggtggtttctgattccgccaaggaatccgggaagcggactatctccactatgctagggattcttccatctgatcccttctccgtttcggtttcccgtctccaccccttctcttcatcgccttctattctcttctatcaacactgggtatacgttgtggaacgcggagta

SEQ ID NO: 9089 - DNA, 363 bp, Gossypium hirsutum
  Clone ID: LIB3120-048-P1-K1-H4
cccacgcgtccgcttctaagttcaaaacattgatgacaatggcaactctaagcagtgcttggcgttttcatcttctcttgtttccttgcatgttcgatctcggtttcgggacgacccaccactttcctcgaagattttagaatcacttggtccgattcccatatcaagcaaatcgatggagggagggccattcaacttattctagaccaaaattcaggctgtggatttgcttccaaaagacagtatttgtttggacgtgtcagcatgaagatcaagcttatccccggtgacttggccggaaccgtaaccgccttttacattgaattctgatacgggacactgttatgagacgaggcttagatt

SEQ ID NO: 9090 - DNA, 235 bp, Gossypium hirsutum
  Clone ID: LIB3120-048-P1-K1-H5
gccgcgcgtcgcgattgagcctctcgacaattccgttgtttccaaggtggtttctgattccgccaaggaatcggggaagcggactatctgcactatgctacggcttcttccatctgatcacttctccgtttcggtttccgactccacccctgctcttcatcgccttctattctcttttatcatcactggctatacgtggaggaacgcgcaggatagggtttacactgatgaggaa

SEQ ID NO: 9091 - DNA, 225 bp, Gossypium hirsutum
  Clone ID: LIB3120-048-P1-K1-H6
tgagagctaacagaaagcactgaaaaagcaaatccatggcctctgcttctctcctcaagactttaccagatatagacacggctgagtgcgattaagggtcacaccctgggccaacctttcacttatgcggtgaggtgccaccctggtgcaccctccggactaactgtgcgtgcaagctcatatgccgatgagcttgccaagactgctaaagctattgctaatcct

SEQ ID NO: 9092 - DNA, 388 bp, Gossypium hirsutum
  Clone ID: LIB3120-048-P1-K1-H7
cccacgcgtgcgaccacgcgtccgcccacgcgtccgcaagcttttcatcaatggctgggctgtgaacaagcttcaatctctcttcaacccaagcttctttcatcttctcaacaccccagatcccttgcctctctcaacctctctgtttcagccactgtcccttccctcaaactctgcaccactcgccctcttcatggcggtgccaaaatgtcagcctccgccgctttcagctacgccaccgctttagccgatgtagccaagttcaacaacacccttggaggcaccagcttcgacgttgaaaagggtcgggaaatctttttcgacccacaaggtcttccggtctttacccaccccaccattggtgttcctaaaaaacggtagggtttgg

SEQ ID NO: 9093 - DNA, 231 bp, Gossypium hirsutum
  Clone ID: LIB3120-048-P1-K1-H8
tgtccctgggaccggccggattcctgttcgggcgaggcgacgcgcacgcccacgcgttcgcttcgaaattattattatcttggacttcgcatctctttcaggcacgtgagggaggacttgactgtgaagaattgaacttcaagctatctaggactctctacattttctaggttgagtcatagtgcttggtaaaatgtcgaatgctatatcgatatcgccatagtttagacc

SEQ ID NO: 9094 - DNA, 200 bp, Gossypium hirsutum
  Clone ID: LIB3120-053-P1-K1-A1
gtccgaaaggactttgctttgcctaatttgcaagctttgaggtcgactgaaagaactatggctgaagagggacacgtaatcgcctgccacactgttgattcatggaaccagcagctcgagatgagaaaccagtccaagaaactggcggggacggatttcacagcatcattgtggggtccatgccggtgattttcaaccaa

SEQ ID NO: 9095 - DNA, 369 bp, Gossypium hirsutum
  Clone ID: LIB3120-053-P1-K1-A10
ggtcgacgacgcgtacgtccgcggacgcatgagggcaacggcatggtcttgggcaaaattttcgacctttataattcgggatgtgcaggcaatacgaatttttgggagcttttgaagaaggcaatggcttttctgtttaaggacccagctaagctttcagcgtaccgagacagaagatttaatggttcgcaagaggaattcgagcaagcgctcctcaatttgacaaccgtctacataggaaacatgtctttttacactacttgaagaacaagattatgagcttttcttttgagccggtgaaattaataaaaatattatgggccttgtcaagaactctaaaacgccttgcggcttttgctttttctttgt

SEQ ID NO: 9096 - DNA, 302 bp, Gossypium hirsutum
  Clone ID: LIB3120-053-P1-K1-A12
cggacgcgtgggggcaagggcaagggcaagggcaaaattttcgacctttataattcgttatgtgcaggcaatacgaatttttgggagcttttgaagaaggcaatggcttctctgttcaaggacccagctaagctttcagcgtaccgagacagaagattcaatggttcgcaagaggaattcgagcaagcgctcctcaattcgacaaccgtttacatgggaaacatgtctttttacactactgaagaacaggtttatgaccttttttctagacccggggaaataaaaaaaatttttagggccct

SEQ ID NO: 9097 - DNA, 314 bp, Gossypium hirsutum
  Clone ID: LIB3120-053-P1-K1-A2
cccacgcgtccgcaaatttctgaatctttatttggtccaaattcgtgttcacagttgagggcgcagcgatgtcgaacgagtacgagttcgccgataagggagacaagattatctatgaaaccgaagccaaagggttcaacccgggattgattgtattgctggttattggtggactactgataacattccttgtgggaaactacatactttactcgtacgcgcagaagactcttcctcctaggaaaaagaagcccgtttccaagaagaagatgaaccgagagaggctgaagcagggagtctcagcaccaggggag

SEQ ID NO: 9098 - DNA, 235 bp, Gossypium hirsutum
  Clone ID: LIB3120-053-P1-K1-A3
gtccgataaaatcaggaccggatatgcgaagctcagctttggttcgagactggctcgtcagtctcatgatgctaagactcttccagcattgccctgccaaatcatgaagcaagatggagatagactacgatcccttgcactctttggggcaggggtctcagggcttttgggttgtgctaccatagcttattctgatgaggctgagcatggtttggcggttcctaactattcttgg

SEQ ID NO: 9099 - DNA, 266 bp, Gossypium hirsutum
  Clone ID: LIB3120-053-P1-K1-A4
caacggcgaccccttcattggaagcctgtagactccaatcacctcaagccccttaattgcgtggtacctttccaacctcccagcctataggacggcagtgaacccacttctgaggggaatcgaagtgggtctggctcacggcttcctcctggttggtccattcgtaaaggccggccctctaaggaacactgcggtggcgggtcaagctggttccttagccgttgccggtttggttgtgatcctacacttttgcttgacgatgtatg

SEQ ID NO: 9100 - DNA, 401 bp, Gossypium hirsutum
  Clone ID: LIB3120-053-P1-K1-A5
cgcgttcgccacacgcgtgcgcccacgcgtgcggtatttccataactggtttaattcccttcatgcactgtgctccatagtcttggaacccaaggacagaagactcttttagcatttcaccgcaaagatggagataacaaatgtgagcgagtatcaagaaattgcgaagcataagttgccaaagatggtgtatgactactacgcatctggtgctgaggaccaatggacattgcatgagaatagatgtgctttcaccaagatactgtttcgtcctcgtattctcattgatgtaaacaagatagacatgaccacgactgcgtttggtttcaagatatcaatgcctatcatgattgccccaactgacatgcaaaaaatggctcattctgaaggggagtatgcaa

SEQ ID NO: 9101 - DNA, 277 bp, Gossypium hirsutum
  Clone ID: LIB3120-053-P1-K1-A6
aaaggctcaaaaaagtcgttttttttcctaatctaagaaagaagaggaagaatcaagcttggttttctctcacaatgtcggaggcaccattcaaacctagggaaaagcttatcgagtatcagaaatattttcaaggcttccaaaaacacacttacttgaaaggtcgttacaataacatcacatctgtcgccattcccgttgttttagcagcaggttccttgtttttattcgtacaagggtactataccatgtttcatgggattggaaaaaaggaatg

SEQ ID NO: 9102 - DNA, 186 bp, Gossypium hirsutum
  Clone ID: LIB3120-053-P1-K1-A7
acctttgctgaacgtccaaatggtgaacgccacactcatgaacatcgctgatgacggcaccaacgttgagctccccggtatgtacaacaaggaagagaaccctcgtgttccgatcattgtcaccggtaacgatttctcgacgctgtacgcgccgctcatccgagacaggcgtatggagaactttac

SEQ ID NO: 9103 - DNA, 246 bp, Gossypium hirsutum
  Clone ID: LIB3120-053-P1-K1-A8
actctcacccgtgcgacccacacgtccgcccacgccaacgtatgaatactgatcgggtggcctaccaaaaaatatgtggggcttccagctttatatcccttatggactacgtcgtattatcagaccccaccctgtcatactttccttcctcctgacactttgcttcaccatgggacgatctgattcggcggtcatctaaaacacatcctgtcactgcactaagctgacactttactttcttcaaac

SEQ ID NO: 9104 - DNA, 239 bp, Gossypium hirsutum
  Clone ID: LIB3120-053-P1-K1-A9
tactttcataacacttccacgaacttcgctgtacatactgcaatggcggctggcgtctgcaccgttggtgttatcaaccgcgcacggtgaagctagaatggaccaggagccggagcttgtgttgcaagctcaatttacatggccaacatttagaagaacgtgagcgctaggttcaacaacaacggtaggggtccattgggacccttcatgatggcggttgccaaaaagccccacaaata

SEQ ID NO: 9105 - DNA, 251 bp, Gossypium hirsutum
  Clone ID: LIB3120-053-P1-K1-B1
cactcaccattgttccaagtttgttgtaaaccaagttagaaccagcagccaacatggccgcattagcagcctccaccgctgccgcctcccttggcgtctctgaaatgcttggtaaccctctgaatttcagtggtggagctaggtcatcggctccaacaccatccaactcatccactttcaagaccgttgctcttttctccaagaagaaggccgctcctccaaagcccaaggttgttgctgtcgccccggcc

SEQ ID NO: 9106 - DNA, 201 bp, Gossypium hirsutum
  Clone ID: LIB3120-053-P1-K1-B10
cgctccgcaatatgaagttgcgagtgttgcacctccaaagagtccggagaaaatcaagcccgagccatcacaaaaaaggaagacgtctaagaagtcaaccagggagagaaatctctacaaagcaaattatttccatgcatgtgagagtcttctttctttgatggtaaataagcaccggcatggcaaaatggcaattctttc

SEQ ID NO: 9107 - DNA, 221 bp, Gossypium hirsutum
  Clone ID: LIB3120-053-P1-K1-B11
cccacgcgtccgcccacgcgtccgctttctgttacattacttctctcgcaagcaatggcgggggagtgcaatgcatgcaggtgtggcctcctactggaaagaagaagttcgagactctttcatacctccccgatcttacacccgtgcagttggttaaggaagtggattaccttattcgctcaaaatgggttccttgcttggaatcggaataaaaggaggga

SEQ ID NO: 9108 - DNA, 189 bp, Gossypium hirsutum
  Clone ID: LIB3120-053-P1-K1-B12
gcgcgagcctgtcgcgcgcactcctataataactcgtccgctttttattccatgaccgtttttgttgacaagggtgcggaggatatgatcaagagcgcccatttcttaactaccaatggtggtgcttcagtttggaacaataactcatcacttactgtgggagcaggaggtccatttttccttgaagac

SEQ ID NO: 9109 - DNA, 372 bp, Gossypium hirsutum
  Clone ID: LIB3120-053-P1-K1-B2
caacaaaatcagttgcttcacaatggcctctacaaccatggctctttcttccccatcattggccggtaaggcagtgaagttctccccttccacccctgaaatccggggaactggccgtgtttccatgaggaaaaccaccaagcctgttccttctggtagcccatggtacggtcctgaccgagttttgtacttgggtccactttccggtgagccaccatcttacttgaccggtgagttccctggtgactatggttgggacactgctggactctcagctgatcccgagacctttgctaggaaccgtgagctcgaagtcattcactgcatatgggccatgttgggagctcttgggtgtgttttccttgacctgtt

SEQ ID NO: 9110 - DNA, 124 bp, Gossypium hirsutum
  Clone ID: LIB3120-053-P1-K1-B3
gcggtcgttacaattactttcataacatttcacgaacttcactctggagtctccatggaggatgtcgtgttcaccatatgtgctgtcaaccgagcaccgttgagtttgaatggatcacgtgccg

SEQ ID NO: 9111 - DNA, 250 bp, Gossypium hirsutum
  Clone ID: LIB3120-053-P1-K1-B4
ctcacccgttcgagccccaccctcccgattgatactacttttcaaacacattttcccttcaattttcgtataaggtcctaggaaaagaaatatgagagagtgcatttcagttcacatcggtcaggccggtattcaggtcggaaatgcttgctgggaactttactgtctcgagcatggcattcagcctgatggccaaatgccaagtgataagactgttggtggaggagacgatgctttcaacacctttttc

SEQ ID NO: 9112 - DNA, 221 bp, Gossypium hirsutum
  Clone ID: LIB3120-053-P1-K1-B6
attgattctacatttctatgacacaaaaagctcccccgccccgactccgctgtcatcaacagcacatttctaaacccatatacataaaaaaatggcagcaagtgttgcatcattggcgatgctcaatgcaaactgcctaagcttcagctcagctaagatgagcagcccaacaaagccaaccctaaggccttttttccttgtctccatgcataacctcccca

SEQ ID NO: 9113 - DNA, 302 bp, Gossypium hirsutum
  Clone ID: LIB3120-053-P1-K1-B7
gcgtctctctcttcatctctctgaaccaaaaagtctttagcttttcgcttcgagagagaccatgttggtttaccaggatctcatctccggtgacgagcttctttctgactcattcccctacaaggaaatcgagaatgggatgctgtgggaagttgagggaaagtgggtagtgcaaggagctgtccatgttgacattggtgccaatcctttatcccaaggtgctgatgaggataaagaggttatgaccaacctgtgaaggctgttgacattgttgacactttcaggctttaagagcaaccccc

SEQ ID NO: 9114 - DNA, 302 bp, Gossypium hirsutum
  Clone ID: LIB3120-053-P1-K1-B8
tcgaccaccctgtccgggacattcgaaaagacggacaatttcaagagaaaaaagatgtttggttgaggcatgaatttgatcacaacagtgatcggttttggaatgagtgccacttttattgtgtttgtttgtacgaaaatgatctgtcggagaattagagggtcccaaacccgacttttgtttcagaccgaatccaggattgatctcgaacaggcagaggcagaatttagaggggttgaaccagtagtggtagctgcaatacccaccatcaagttcaatcgtgaagccttcaagtccatgga

SEQ ID NO: 9115 - DNA, 228 bp, Gossypium hirsutum
  Clone ID: LIB3120-053-P1-K1-B9
cgcttcttctaaagtccaaaaattccttacggataaaagacggaattataagatcatatatgcttgagatatatggtatatggtatatggtactaaccccctcacgatgaactcgtgttaggcatgacttcatataacaaacctgcctaaacttgtttatgctactacaagctttcggtgctgggtttggaaaggtgccctttgcttagctttagatagacttaattt

SEQ ID NO: 9116 - DNA, 229 bp, Gossypium hirsutum
  Clone ID: LIB3120-053-P1-K1-C1
gccagtgagacaggtcgttgaaaaaagtgcagaaaaaccggttgctgtcaaggaagaaggaagcactagttcactacctgaaagggtacaacttggtaactctcctgtgtacaagttagacagaaaactcggtaaagggggtttcgggcaagtttttgttggaagaaggatatctggtgggacggggtgcagtggaccagatgctttcgaggttgctttgaagtttgag

SEQ ID NO: 9117 - DNA, 207 bp, Gossypium hirsutum
  Clone ID: LIB3120-053-P1-K1-C10
gcacccttccgtataactaaattgaaataccactacttttaacttttttctacttacctccattaatcctatgacaatcaagccaccagctgatatgtgaagttggaactgggaatggcggttcgatcggtggaacttcaccgttaccggcgtcgttatcaaagctattgattaagggaggaactgtggtgaatgctcatcggcagg

SEQ ID NO: 9118 - DNA, 280 bp, Gossypium hirsutum
  Clone ID: LIB3120-053-P1-K1-C11
attacactgccggaaaaaaatcatggccaccgtcacgacgcaagcctctgccgctgttttccggccatgtgcatcgaaaacacggttccttactggttcttccggtaaggttaaaccggaaccgtttaattaaaaccaggggctgttacatcgactagctcattaaaagttgaagcaaagaagggggaggggttacctggtcttccttcaccagctaacctgaatggcagtcttccaggagataagggcttagatcctctgggatgggctgaggaccctg

SEQ ID NO: 9119 - DNA, 140 bp, Gossypium hirsutum
  Clone ID: LIB3120-053-P1-K1-C2
cccacgcgttcgaccaccctttccggtacactggcataaacacttatcgggagatcaaggacagaatctggggtcgctttggtaacgctggaacaatggatatcccctttgggaccgatgagcgattattggatgtacta

SEQ ID NO: 9120 - DNA, 360 bp, Gossypium hirsutum
  Clone ID: LIB3120-053-P1-K1-C3
ccgtccgaattcccgttcggcatcacgcgttcgcaataccccatttttctggttcctttttcaagccattttacaggcacttcccagttgggagaaggggaaaatggcacagcttttagcaccctcaactcaatggcaaatgacactaccaaagacctcaacctatggaagtcccattgcaacaaaaatgtggagttctctggtactgaaacagaacaagaaaggagctgctaaaagctctggcaagtttaaagtggttgccttgtctgaaaacagcactgtcaacaggctagagaacttactaaacatggacgtcactccatacaccgacaagatcatcgcttgatacgtttggatagg

SEQ ID NO: 9121 - DNA, 102 bp, Gossypium hirsutum
  Clone ID: LIB3120-053-P1-K1-C4
gagaagctgaaaatttcaccatctaaaaagcttgaagtgcttttggctgataaatgaccaaaataacctgtcttctccccctaggaaaaacgttctttcctc

SEQ ID NO: 9122 - DNA, 269 bp, Gossypium hirsutum
  Clone ID: LIB3120-053-P1-K1-C5
ttgtacgctcctttctgacgccgggctaacgcgtgtgcggacgcgtgggcggacgcgtgggagctatagcatacactactagtacccactactagcaatggcttcctcaatgatctcatcggctaccattgccactgcctcttcggcacaggctaacatggtcgctcctttcaccggcctcaagtctgcctctgctttcccagtcaccaggaaggccaacaacgacattacttctctcgcaagcaatggctgcagagtgcaatgcatgc

SEQ ID NO: 9123 - DNA, 284 bp, Gossypium hirsutum
  Clone ID: LIB3120-053-P1-K1-C6
gagacgctgaaaagttcaccatctaaaaagcttgaagtgctttcggctgataaatgaccagaataacctgtcttctcccccttggaaaaacgttctttcctctgctgtgaaagttctatacctatttttttcacattttcgctgtgaaagctcccttccgttcctcggtcctcttccgcagagatgctcttgatgctttgggattggctccgtactgctgtaggagaatgcttatgactcatgtcgacctcattgaaaaacttctgaactacaacacaattgag

SEQ ID NO: 9124 - DNA, 263 bp, Gossypium hirsutum
  Clone ID: LIB3120-053-P1-K1-C7
cgtccgagtaccgtttgttttttctttcgacccacgcgtgcggaggattaggttattgaaataagcaagaaactttatgttcgacccgggattggagtccgagccaagctgagaaccaaacactcgggtcatttcggatccacctcgggtgagaaaggtaagttcgggttgacaacaatccacattttaagggttgttaaaaagcttcaggattcggggatgcttgattgtctgcaattgctacacttccatattggatccca

SEQ ID NO: 9125 - DNA, 221 bp, Gossypium hirsutum
  Clone ID: LIB3120-053-P1-K1-C8
gtcgacctgtcacatatattaacgatgagcagtaatatcaatgtccggcgtcaatagatgagctgaagaatgaagatatacagcttcttttgaactcgatccgtaagctttctacgattgcacgtgcccttggggaagaaaggactcgaaaagaattgattccgtttcttagtgagaacaatgatgacgatgatgaagttctccttgccatggatgaagaa

SEQ ID NO: 9126 - DNA, 217 bp, Gossypium hirsutum
  Clone ID: LIB3120-053-P1-K1-D10
cccacaacaatttacagggagaactgcctgctggtgcattttttaacaccatatcgcccacggctgtctctgggaatccatcactttgtggctctgcagttaacaaatcttgccctgctgttcttcctaaacccattgtgttaaatcctacctcctcttctgattccatttccgaggaatcgcctacgactgtcggtcataagaggataattctcag

SEQ ID NO: 9127 - DNA, 337 bp, Gossypium hirsutum
  Clone ID: LIB3120-053-P1-K1-D12
gcgtccgctcgctttttcgataaaagaactttttttgattctacgatctgcactgcttggaggcgtggggtaaaatacatggcttagatggatgaagatccaccttgtacaaactggctgcggcggtgccctacacctgctttgtcttgtaaaaacagaaaaccagggcggcgtgctaatagactcacatctgcttatatcattgtgctatcgagctactcttcatttgtgaaacacacacccaaatatttgggcgctcgtgaaaaactaaagaacggtgacaacccagaagactccctagcttattgtccttacgcacatgcccctttacaatagc

SEQ ID NO: 9128 - DNA, 256 bp, Gossypium hirsutum
  Clone ID: LIB3120-053-P1-K1-D2
cgtcgagttcttatgcgatgccggtttggttgtgatcctcagcatttgcgttgacgatgtgtggagttgcgtcggtcaaagaatgtgatccattgatagcaccgagcctaaccctgactgggaggaagaaagagccagaccagttgcacaacgggtgatggatgggctaggttcactggagggatcttctttggtggaacatctggtgtgacttgggctaacttcctactgtatgtccttgaccttccttactgct

SEQ ID NO: 9129 - DNA, 232 bp, Gossypium hirsutum
  Clone ID: LIB3120-053-P1-K1-D3
gtcttgtgcagccgcatcggtctttttcccttacacatttgcccttcgtctctttaccagtaaaaagggtcaatactggttaaaaagtcgaaacccaaaagaaaagaagagtagaaatggaaatggatcatgggggggaacttgtatttttttttcgtttctactgctaaagttttttttcactcttggggttaataagtttttcttttgcaaattggttgttccttcctcc

SEQ ID NO: 9130 - DNA, 122 bp, Gossypium hirsutum
  Clone ID: LIB3120-053-P1-K1-D4
cccacgcgtccgcggacgcgtgggctaagtagcacgtatcttgttgctatgttggtgttgaggacatttatatgtctcgcgttctgtactattgcaatgttcggtgcacagagtgactctgc

SEQ ID NO: 9131 - DNA, 272 bp, Gossypium hirsutum
  Clone ID: LIB3120-053-P1-K1-D5
gtcttgtcatccgcatcgctctttttcccttacacatttttccttcgtctatctaccaggtaaataggtcaggactggatgagaagtccgaacccatcataaaagacgagtaccgacggaaatgcatcatgggggggaacctgactttttctttcgcttctactgcttaagcttttttgtacttttgggggtaataaacttttcttttgcaaattggttggttctttcttcaaactgtccttaaaaaaaacacacttttattaaactcggaa

SEQ ID NO: 9132 - DNA, 56 bp, Gossypium hirsutum
  Clone ID: LIB3120-053-P1-K1-D6
ttcgcccacgcgtctctatctcgcagtcttctacgttgccggtttggtggtgatcc

SEQ ID NO: 9133 - DNA, 122 bp, Gossypium hirsutum
  Clone ID: LIB3120-053-P1-K1-D7
acggcccttccaagacgccatctacaaatcaagagcttgtcaccgacctatacacccagtgtctttgcttgcccatccttggccggatctacactgtaactcttcggagccaccaccgaaat

SEQ ID NO: 9134 - DNA, 224 bp, Gossypium hirsutum
  Clone ID: LIB3120-053-P1-K1-D8
ctccaccatttctatcttacccactaacaagaactcctcgcttctcggcttcctcgcagacacctcctcctaactcacaaccacccaatccaccaccatctcctaaattaaccacaacttcatctgagcagcaaccaccggtaactgtgcgagaaccaaagccccccaaacctaccaccactgttgaaaccactgattggatagcttcctccttgaccaggcgc

SEQ ID NO: 9135 - DNA, 60 bp, Gossypium hirsutum
  unsure (1)..(60): unsure at all n locations; Clone ID: LIB3120-053-P1-K1-D9
gtccgaaagactccatctttactnttctctccttcttatcttctctttcaaggcttcctt

SEQ ID NO: 9136 - DNA, 191 bp, Gossypium hirsutum
  Clone ID: LIB3120-053-P1-K1-E1
cccacgcgtccgaaagaggtacatttccaaaacagagtttgaaacccacaaaaaaccagagtatctttggatctcaatccaaggcaagatctataatgtaactcaatggagtcaccaccaccctggtgggccacttccattactgaacctcgccggtcaagacgccaccgatgctttcatagcttatcatc

SEQ ID NO: 9137 - DNA, 245 bp, Gossypium hirsutum
  unsure (1)..(245): unsure at all n locations; Clone ID: LIB3120-053-P1-K1-E10
gtcgctttgttgagaaaagtactgcatatcatccttggatctggtctgctgggaatgatgaaatagaatacatgccttacatggatgaagttgtcccttttaagtcctatctccaacggtaccctacacctcatttgtcttgtaaaagcagcagcccaatgtggtatgctattagacgtgcatctgctcatatcattgngctatcgagctactctccatttgtgaaatacacacctcaatatgag

SEQ ID NO: 9138 - DNA, 175 bp, Gossypium hirsutum
  Clone ID: LIB3120-053-P1-K1-E11
gccaggcccaaagttccactttccgttgctttaccatcttactagacccataaaaaacgtggttgactatgtttgggcggcttggtcaaattcctaaaccctttgattcttctttctcaacgacgatatatagttcttgcttggttatgggagatacatgcaccgcaagaaaggg

SEQ ID NO: 9139 - DNA, 122 bp, Gossypium hirsutum
  Clone ID: LIB3120-053-P1-K1-E12
ggcactctcctcccacacgtactcccactcttccttggacccgtcctcaaaaaagcgaggggaattcatttcgtgttggacaccacaaatcaccctcccatttccctcctcttttcctctct

SEQ ID NO: 9140 - DNA, 262 bp, Gossypium hirsutum
  Clone ID: LIB3120-053-P1-K1-E2
cgcgtgcgcgagcctcaacggtgttttgtgattaaaaaaacgaccaagattgtggcaaaacaagattgcttccctgcatgaaccatggctagtggataacggcttgaagggatctagcatggagattcgccatggcaggactgcacacaacatgtcgccttcgtcattgcggaaaaaataggacctgacgctagtttccaaggttgggtatgcaatgcttaggcagttcctcgccaaccttcaataggtcatattagggacc

SEQ ID NO: 9141 - DNA, 170 bp, Gossypium hirsutum
  Clone ID: LIB3120-053-P1-K1-E3
acattagaagttccttgttttacgtggaatatgcggtgggagaaggattcactcaaagctttacaaaatttaggaacattaagctacatctcctccaaacttcaaacccatttattagtaacctctgattgtgttgatgatggggtggtgccatggatctgatagatgct

SEQ ID NO: 9142 - DNA, 102 bp, Gossypium hirsutum
  Clone ID: LIB3120-053-P1-K1-E4
cttaaggctatttcgcaggaagtttctatccgtgaactcgctgatgttgatgctgttaatgctgcgacctatgaaattggaaacttgacagttgacgccata

SEQ ID NO: 9143 - DNA, 69 bp, Gossypium hirsutum
  Clone ID: LIB3120-053-P1-K1-E5
tccggacctccaacagacgtacattttcaaaacagagactgaaacccacaaaaaaccaaaggatctttt

SEQ ID NO: 9144 - DNA, 330 bp, Gossypium hirsutum
  unsure (1)..(330): unsure at all n locations; Clone ID: LIB3120-053-P1-K1-E7
tccggtcctgaattccccgttgtacgctctcgtccgcccgcgcttccgtggatttccaatggttctgctganaactaatgaatggaaaggtagttgcttgccatatttcttgataaggattattataaaattaaatacaaaaaaatactaatctttacaaactgcgtcctctttaaagaactctttcttttctttccctctttttcctttttacttaacccttatcacctttccttttctttctttctttctttcctcttttacctatttccctggttttttaaattctcctttcgaattcatggcattctttttccccttttaatcctt

SEQ ID NO: 9145 - DNA, 298 bp, Gossypium hirsutum
  Clone ID: LIB3120-053-P1-K1-E9
cccaggcgtccggctggttggggagagaggacttcaactctcaggtgggcataagcagatgattgctatagccagggcaatgttgaaaaacccggcaatcctactcttggatgaagcaactagtgctctagattccgagtcagaaaagttggttcaagaggctcttgatcgtttcattattgggaggacaactcttgtaattgcccatcgcctttccactattcgcagggttgatcttgtaccttgcctccaccagggaagtgtttttgaatttggaccacatgatgacctctttgcc

SEQ ID NO: 9146 - DNA, 242 bp, Gossypium hirsutum
  unsure (1)..(242): unsure at all n locations; Clone ID: LIB3120-053-P1-K1-F1
gcgtccgcccgacccttccgtggatttccaatggatctgctganaactaatgaataaaaaggtacttgcttgccatatttcttgataaagaaaataataaaaataaaaacaaaaaaatacaaaattttaaaaactgcttcctctttaaagaaccctatctttctttccctgttttcctatttaccaactctttacccacctttccttattctttctttcttactttcctcttttaccttttc

SEQ ID NO: 9147 - DNA, 323 bp, Gossypium hirsutum
  Clone ID: LIB3120-053-P1-K1-F10
aaagtctcaaactttcacgcttttcaattcagttcttccgcatacaaacagagagagaggggcgtaactttatgatttcatatgtgtgaagtgaacaattgacaacatggcttccacattgtttagaactattcaaatccacccattttttctctacccaactgcattatttagcagaaggaatggcgtcctttactgcacagtgaagagtcgtcaaactcaaacagtttcacaagaaatgcagaaccctccaaaagccaaagttccacaacatgccctgaaaaaaacattttttaatatcacaagaaactatgaggcattct

SEQ ID NO: 9148 - DNA, 279 bp, Gossypium hirsutum
  Clone ID: LIB3120-053-P1-K1-F12
aagatgcacaaccctatgctgtatgatcatggctcgcaaaactagttccttgctttctcacggatgggtgctcagcattctgtttgttattgctgggcaagccattgcagcacgtgacatctcgaagaatgatgatcaaatgaaacagcctgaatatctaaaacatgaccgtagtgtgctcattccaggccttggacgagtgttgctgccaccagttttaaaacataacaatcaacacactatcggcactggcacccacaccggcagcagtggcggcca

SEQ ID NO: 9149 - DNA, 280 bp, Gossypium hirsutum
  Clone ID: LIB3120-053-P1-K1-F2
tttttcgacccactcgtccgctctccggtttacgagttctagtggaaattcaaagtctgcagatgtcaaggagcacataccagtgttataccctgaaactattctatgtgttgaggtctaccataacatacgaaaatggtcaaaggtccaagagttcttggttcttggccgtcaaaccttaaccgaaattaaggacaagatatgttgcttgactgaccaggtgatgcataaggctggccgttatgatccttctggatatttcctatagaaaacatatttt

SEQ ID NO: 9150 - DNA, 301 bp, Gossypium hirsutum
  Clone ID: LIB3120-053-P1-K1-F3
tcgggcaaacacaccaagtcaacctaaagccttatgcaccatggctacctctgctatccaacaatctgctttcgttggccagaccgctttgaagcagtccaatgagctcttacgcaaagtcggagctttcgatggtggtcgtgttaccatgcgcagaactgtgaaaagtgcccctaccagcatctggtacggccctgaccgcccaaagtacttgggtccattctcagaccaaatcccatcatacctgacaggtgaattccctggtgactatgggtgggacactgctgggttatcagctgac

SEQ ID NO: 9151 - DNA, 108 bp, Gossypium hirsutum
  Clone ID: LIB3120-053-P1-K1-F4
ggcaagactttgaacagtgcccaccatcatttctgccactgtcgataaagaaactttcaggggccttaaagccggtgcaaccgcacctaaagttagcgccacaaccaa

SEQ ID NO: 9152 - DNA, 190 bp, Gossypium hirsutum
  Clone ID: LIB3120-053-P1-K1-F5
ccacacccttaatcaccagccgtaaaaaatggacacacttcgctcaagttcatcgtctgagggtggtccggtcacccctccctccggttcgcacaatcgcttccccatccaaggtctattccgccgccgcaagattcccttgcactccttcgggcagcggtttccgactgaaccacgtccagttcctacg

SEQ ID NO: 9153 - DNA, 213 bp, Gossypium hirsutum
  Clone ID: LIB3120-053-P1-K1-F7
tcgagcaacacaccaagtcaacactacatgccttatgcaccaaggcttcctatggtgtacagcgatctgcttgctgtggccagtcgcggggtaaatcaaataacagcgcagttaaacacagcatcagctgatggcaaaccatctgactcttctgttgagagactgaaagaaggcttcgtttacttcaggaaagaaaactatgaaaggaatcct

SEQ ID NO: 9154 - DNA, 246 bp, Gossypium hirsutum
  Clone ID: LIB3120-053-P1-K1-F8
cccacgcgtccgatatttaactatagcattcactactacattttcttctagctctggagggataattatggggaggaaattcttcgttggcggcaattggaaatgcaatggaaccactgaggaagtgaataagattgtgagtactttgaatgctggagaggtgccttctcaggatgttgttgaggttgtggttagccctgcatttgcgttccttcctttggtcaaaactttactgatacccgattt

SEQ ID NO: 9155 - DNA, 83 bp, Gossypium hirsutum
  Clone ID: LIB3120-053-P1-K1-F9
cccacgcactcgggtccactttccggtgattcaccatcttacttgaccggtgagttcccgggtgactatggttgggacactgc

SEQ ID NO: 9156 - DNA, 229 bp, Gossypium hirsutum
  Clone ID: LIB3120-053-P1-K1-G1
ccattacccatccgtttccatcactcattttcccgagaaacaaacactcttctcttattggcttgtatcacttccccatttttgaataaaccccaacacagtctctttttagccttctctatcttttctttaatcaaatcttgatctccgttcctctcttttatttcttttaaatattaaggttacttatattttccgattcgacggtttttattattatttttttgga

SEQ ID NO: 9157 - DNA, 275 bp, Gossypium hirsutum
  Clone ID: LIB3120-053-P1-K1-G10
ggtgtgcggtcaaactctcataggaacacttcgcttttaagggagtgtatcactgcaagtggcagggggttggatgaacagccacctgctgaaacctttactgagtctcatgtgaaatcagagccagctgactatgttttcaccccagagatacaaaatgaggctcctattcggttggacagttgtaaccctgatacattacttgcttttaatgggcttggagcaagattttggttacaataaggaccaaaccatcttgaccgattccatagttg

SEQ ID NO: 9158 - DNA, 266 bp, Gossypium hirsutum
  Clone ID: LIB3120-053-P1-K1-G11
ctcttaaaccttaccttagtggataacatctgttatgtaagtcggcgaaacgtatccttagcgtagggaaatggattggctttgagggctgggcacggtggtcccagacccgaacccgacggctgtcggcgcactgctcgagctgttcccgcggccagagcggaactccgcgtgcctgccgggggacgtactgggaacggatccctcgggggcattccccgggcaactaacagttgattaagaactggtacggacaaggggaattc

SEQ ID NO: 9159 - DNA, 141 bp, Gossypium hirsutum
  Clone ID: LIB3120-053-P1-K1-G12
gtctcccctcctttcggtttctctccggcccccccccaataaaaacgaaattcagggaattaaattccctataagatcccttctcgtaaatttccttttcgttctaaatcaaacccaacttaccgggttcttttttctttc

SEQ ID NO: 9160 - DNA, 411 bp, Gossypium hirsutum
  Clone ID: LIB3120-053-P1-K1-G2
cccacgcgtccgatatttagctatagcatacactactagtacccactactagcaatggcttcctcaatgatctcatcggctaccattgccactgcctctccggcacaggctaacatggtcgctcctttcaccggcctcaagtctgcctctgctttcccagtcaccaggaaggccaacaacgacattacttctctcgcaagcaatggcggcagagtgcaatgcatgcaggtgtggcctcctactggaaagaagaagttcgagactctctcatacctccccgatcttacacccgtgcagttggctaaagaagtggattaccttcttcgctcaaaatgggttccttgcttggaattcgaattagaggagggattcgtgcaccgtaaatactcgagcctacccacgtactacgat

SEQ ID NO: 9161 - DNA, 219 bp, Gossypium hirsutum
  Clone ID: LIB3120-053-P1-K1-G3
cccacgcgtccgttcctagcagacagaacctgagatagtgaggtagctaaacaatggcaggttgcccagtatacaccacccaatctctcaactcaacatgttcaatctccacaccatcaaaaacccacttcagttctcaccacaaccacctagttttctacagaactagcaagagaactagcaagagaggtggcagcagctcatgtgtgataacctgct

SEQ ID NO: 9162 - DNA, 187 bp, Gossypium hirsutum
  Clone ID: LIB3120-053-P1-K1-G4
accattcgtccgccagtcctacatacccttttctcgttgtttcacttatgcgcttctaaaatccattaccagcgaaccatatagagcatcaatggcggtggtgtgcagtgttggttgcggctgcggtagcgtcagttttcaacggtgcgagtctttaatgctctcgaatcctacatcttcaaaaccg

SEQ ID NO: 9163 - DNA, 90 bp, Gossypium hirsutum
  Clone ID: LIB3120-053-P1-K1-G5
ccgtgcagatccggtccggacattacgcgttcgacactcacccgtccgttgtaaatgacacagctgttgctcacgcattgacttttctgt

SEQ ID NO: 9164 - DNA, 356 bp, Gossypium hirsutum
  Clone ID: LIB3120-053-P1-K1-G6
ccggtcgacccactgcctgcgccagccctaaagacccttttcttgatgattcactctgcgctacgaaaatccattaccagtgaaccataaagagcaacagtggcggtggtgtgcagcgttggttgcggctgtcgtagcgtcagttttcaacggtgcgagtctttaatgctctcgaatcctacatcttgaaaaaccgaaaacgtcaacatctttgcaacgacgccggcgccctcatctatacccgttggcggtggcagtctccaatcattgcaaccagaacgatcatcgtcaaagaacaaacgcatggggatttcgtacgaaaaatggacagctggatgagaagattcatggctgag

SEQ ID NO: 9165 - DNA, 258 bp, Gossypium hirsutum
  Clone ID: LIB3120-053-P1-K1-G8
gccctaaatacccttttcttgttgtttcattttgcgcttctaaaatccattaccagtgaaccatatagagcgacattggcggtcgtgtgcagtgttgcttgcgcatgtcttatcgtgacttttcaacggtgcgagtctataatgctctcgaattctacatcctgaaaaccgagaacggtcaacatctttgcaacgacgccgtcgacctcatctaatccccgttggccgggcagtctccaatcattggatccataacca

SEQ ID NO: 9166 - DNA, 177 bp, Gossypium hirsutum
  Clone ID: LIB3120-053-P1-K1-G9
attatgattctttatttatgttaataataaagttactattactgaatgaatcaaatcatgtgtatcttggatcggttctatggcatccttgcttcccttggataatggcaaaaagaggccaacaacttgtttttagggcttgataatgcctgcaaaaccacactgttttatatgctc

SEQ ID NO: 9167 - DNA, 292 bp, Gossypium hirsutum
  Clone ID: LIB3120-053-P1-K1-H1
gcgcataaataatcccccgtttctttctctttaatcaaatcccttcactttttttaaaaaaatcttcataagaaaaaaatgactccatttactgttatgttaatggttcttttccttgtgttcaccttgtctcaggcccgctttttgacagttgaaccggagttacgccgatccgttcgccaggtccaggcccgttttttgacagttgaaccggaacttggcgccaccgcccaagatactatctcgaatgtacccgattccgacccgagaaccacaacaatcactatccttc

SEQ ID NO: 9168 - DNA, 308 bp, Gossypium hirsutum
  unsure (1)..(308): unsure at all n locations; Clone ID: LIB3120-053-P1-K1-H11
ccggcgcgttcgtccacgctntcttcattctataccaaattatttttattatacttttttcttacatggggcgggggcttatacgccggggtacgcctaagcctatatacccaaacgcctccgtgcatcgggttcttccacactcccgaacactccattcctacgggtgccctgaactgaaaatcctccccacgcaccattgaaagctcacgctcccgagtagaagcctatacatctgcccatagggaagcaccagtcggtggaaccccaccctggcgggacccaaacccccaataaccaaactttgg

SEQ ID NO: 9169 - DNA, 226 bp, Gossypium hirsutum
  Clone ID: LIB3120-053-P1-K1-H12
gcgtccaatttcaatgcgctttttaaaagccatccccttttcttcaactcttcttcttcatcgggtgctgctttttcgattccacttcattcacggggctcattgcgcaaaacccatcatgttgattataaaaacctggtccgaacccgactcgaccgtgactcatcccgagtaaactcgttcaccaccgaggtactactcgttgtcaatgggattcgaaaaattg

SEQ ID NO: 9170 - DNA, 175 bp, Gossypium hirsutum
  Clone ID: LIB3120-053-P1-K1-H2
acgcggacgctgttgaagctcttttgcttgcgcagcttccactgctgtgactgagcaccggcactgtctctgctcccatttggcctcaggcttctcctcctcattaccatgctgcttcacctgtagtcccgcctagtcacccaccaacccaccaccattaaccaccaacgctcac

SEQ ID NO: 9171 - DNA, 195 bp, Gossypium hirsutum
  Clone ID: LIB3120-053-P1-K1-H3
gtccgggttagggaaaccagcggagtacttgcattatgatttggattctttggaccagagcctggctaagaatatggctggtgagatcattggaactaggaccgaagttgccgacttgaaggcgacgccgtttcagccttacagcgaggtttttggtctacataggtttagggagcgtgaattgatccatggacg

SEQ ID NO: 9172 - DNA, 339 bp, Gossypium hirsutum
  Clone ID: LIB3120-053-P1-K1-H4
cggacgcgtggtcggacgcgtgggaaatctgtgatcatcccaatctttgccatagcaatcagtacttttgttagttttagctttgctgctatgtatgggattgcagttgctgcccttggaatgttgagcaccattgcaactgggttggctatcgatgcttatggtcccatcagtgacaatgctggaggtatagctgagatggctggtatgagccatcgcattcgtgagagaactgatgctcttgatgctgctggaaacaccactgctgccattggaaagggatttgccattgggtcaacggcgttggtgtctttggctctatttggtgcctttgtgagc

SEQ ID NO: 9173 - DNA, 318 bp, Gossypium hirsutum
  Clone ID: LIB3120-053-P1-K1-H5
accaccatcactgcctactcctcagccatggcaaccaccacagctgccaccgtgtcacattttttcggtacccgtatccaaacctctaacccaagctccggtagaatccaagctaggttcggctttggaaccaagaaagcaccacccgcaccaaaaaaggccgtccctaaacgggcatccgatcgccttgtttggttccccgcgcaaacccaccggaatggctgacggacaatgatcggagaccgtgggttcgatcctttcgggtttgctaaccggctgaatacttacagtacgatttggactcgttggaccaaaact

SEQ ID NO: 9174 - DNA, 420 bp, Gossypium hirsutum
  Clone ID: LIB3120-053-P1-K1-H6
cggcattgcgtgcgggacccacgcgttcgcggacgcgtgggcggacgcgtgggcggacgcgtgggcggacgcgtgggggcttccatcaacggttggtgccttacctcctcttcttcctccaccaccacctcctctttttccgctcgtcgacgacctacattgcggccttcggtcgtcgctagccttaactcttctccttctcctccgactcttatccaagaccgcccggttttcgctgcccctgttcctttgctcaccccgagagaagagatgggaaacaagtcctacgacgaagccattgaagctctcaagatacttctcagtgagaaaggagaactgaaagctgaagcagcttgcagggtagatcaaataacagcagaggtaaacacaacatcagctgacggcaaaccatctgactct

SEQ ID NO: 9175 - DNA, 142 bp, Gossypium hirsutum
  Clone ID: LIB3120-053-P1-K1-H7
cccacgcgtccgcaaatttctgaatctttatttggtccaaattcgtgttcacagttgagggcgcagcgatgtcgaacgagtacgagttcgccgataagggagacaagattatctatgaaaccgaagccaaaggggttcaacc

SEQ ID NO: 9176 - DNA, 360 bp, Gossypium hirsutum
  Clone ID: LIB3120-053-P1-K1-H8
cggacgcgtgggcggacgcgtgggaaatctgtgatcatcccactctttgccatacccatcagtacttccgtcagctgtagctgcgctaccttctatggtacctccaccaccacctcctgttttgccgctcgccaacgacctacattgcggccttcgtgcgtatctggccttaactgtccttcttctgctgcgactcttatacaagaccgtccggccttcgctgtccctgttcctttgctcaccccgagagaagagatgggaaacaagttctacgacgaagccattgaaactttcaagaaacttctcagtgagaaaggagaactgaaagctgcatcagctgcaagggttgatcaaataaca

SEQ ID NO: 9177 - DNA, 361 bp, Gossypium hirsutum
  Clone ID: LIB3120-053-P1-K1-H9
tcgggatttgcacgttgtacagcagtttgggatccctcatctttttgatcttcccattagagcaaccgtatgtccgatgatttatgtttgtgcttatatagtaaagtgtatttttccattgcgttattgcaaactcaagagtactccattagaatgtttgtatgtgctgaaaatcctacccaagtttatgttttattacatttaatttttgcagctttctgcttttggtgatagtggaacacctgaagtggtggctgatcctcaaggtgaagttgcccagacgtttcataaccttggagtatgtgttgtgcaacagcgtgccaagattcgccagcaagtatcaacagcagttacatatgac

SEQ ID NO: 9178 - DNA, 401 bp, Gossypium hirsutum
  Clone ID: LIB3120-054-P1-K1-A1
cccacgcgtccgaggaaaacaaaccgcgtcaacctaaagccttaggcaccatggcatcctctggtgatgcacaatctactttttgatggccagaccgctttgaaacagtccaatgagctcttacacaaagacggagctttcaatcgtgggcccgttaccatgcgcagaactgagaaaaatgcccctactagcatttggtatggccctgaccgcccaaagtacttgggtccattataagaccaaattccatgatacctgacaggtgaattatatggtgactatggatgggacactgttgggttatcagttgaccatgggacattttctaagaaccgtgagcttgacgtgatccactgcagatgggcattgcttggagccattgattgtgtcttccctgaaat

SEQ ID NO: 9179 - DNA, 252 bp, Gossypium hirsutum
  Clone ID: LIB3120-054-P1-K1-A10
cccacgcgtccgcccacgcgtacgcaatcttctcacaaagcagagtagcagcagcaaaacaagtagggggccctccaagcgcccactatctccataaaaccatctaattctccacttgctcctacacccaatgctggcctgcggccacccttcgatcgttttgctttgaaatcatctttcttttttccatcgttccatctcttgtttccttttccccaccagagccgtccaactaatactgcttaacctgca

SEQ ID NO: 9180 - DNA, 223 bp, Gossypium hirsutum
  Clone ID: LIB3120-054-P1-K1-A11
cgtccgctttcttctaaagtaccaaaaactccttacgggtagaatatggcatatctatatcatcgattcgctcggggtatttcccagccagactttaagaacaggattgaaaacgctgggaatgacatgcaggacccggttgctgttctcactgcgggagaggaagggacacttttggagatgggctttgagcctacctgcggccttgcatgcttggggaaag

SEQ ID NO: 9181 - DNA, 417 bp, Gossypium hirsutum
  Clone ID: LIB3120-054-P1-K1-A3
gccacgcgtcacgacgcaaactgaaaggcgtggaggatatggtgggcctcgaggttctttccgtggaggacaccgtggtggttttaatgatggagaatctggagagggggagcgccctcgcaggatgtatgatcgccgtagtgggacaggacgtgggaatgagtttaaacctgatggttctggatgtggtaattggggtagtcctacttatggaattgcttccgaggcccaaaaaaatgtcccttaaaatgaaaagaatgttggcttttagaaacaatttttagaggaaaataccctttttttctttcaaggggaaaatttttaatttatctttggagaaaaagccccaaaacaccgggatgacttttttaaaatattataaaatttttttggagaaaaaaaaaaattttttttttc

SEQ ID NO: 9182 - DNA, 409 bp, Gossypium hirsutum
  Clone ID: LIB3120-054-P1-K1-A4
cccacgcgtccggcaaaggtcaaggtcgtgaaggtcacttcccctgggaaagtagaccaagatggtatatccaaggtgattgagcagataatagatgaagaagatgaagaaaaagatgctgatatagaaagcatagaagtggatgatgaaattaagagtgataatgaccaagagagaggtaaaattgagatggatgtggataatggagttattgatagtgataggcaaattgaaattgcaattaaagttgttgttgggggtcttgaacaaaagctttctggcaaggttcctgcattagagtcacttacagttcctgctaagctagtgaaaaaggggcacctagctttttaatttttttttagaaagggacgtaagccaacaagatactattttaaaggcaaagggtttg

SEQ ID NO: 9183 - DNA, 262 bp, Gossypium hirsutum
  Clone ID: LIB3120-054-P1-K1-A5
cccacgcgtccgagcaaactgaacggccggcgagtattgagccagactgactgatatgaatgagggggacatcgggtggggctaaattggtttccaaagggacggaaatcaatgaggttccgtagtcggaactacatcaattcctggggcaaatttttctggttcgttgctttcatcgtctccactttcgttcttttcaatggcttctcctactctaactttcgctttctttttggagaaagatttgagcctgtgttgaagt

SEQ ID NO: 9184 - DNA, 365 bp, Gossypium hirsutum
  Clone ID: LIB3120-054-P1-K1-A6
cccacgcgtccggtcagatttcttttttctctctcaaaaatctctgaaatccaatactctccgatcctctgatcttttctttgacttggtttatgagcttgaaggagaaacccattcttggcggtacgcggattaagacccgcaaacggaatattgctgcgcccctggacccttcaccatttgctgatgcagtagtccagatctatttggataatgctggtgacctggaactggttgcaaggagcattgaatcttcaaatcttaacttatcaagatacggtgacaccttctttgaggttgtttttgctggaggccgcacacaacctgcctcacttaaacttgatgaaggggagtgcaacccttac

SEQ ID NO: 9185 - DNA, 322 bp, Gossypium hirsutum
  Clone ID: LIB3120-054-P1-K1-A7
tatattcagctatagcatacactactagtacccactactagcaatggcgtgctcaatgatctgatcggctaccattgccactgcctctccggcacaggctaacatggtcgctcctttcaccggtctcaagtctgcctctgctttcccagtcaccaggaaggccaacaacgacattacttttttcgcaagcaatggcggtagagtgcaatgcatgcacgtgtggcctcctactgggaagaagaaggttgagactttttcatacctccccgatcttacacccgtgcagttggctaaggaagtgtattacctttttccctcaaaa

SEQ ID NO: 9186 - DNA, 324 bp, Gossypium hirsutum
  Clone ID: LIB3120-054-P1-K1-A8
ggatgttttagtcaaggaaggagttcccccactcagtcacacactttgtttcaattttgcctattgccattcttttacatttatatataaaacagacctccgtgtccttgcttgatttgtatcacctaagtttggttggttcagattaatttgagacatataccagataaggtagggtggaagaggagggatgaagatgccgatagggttcaggttccatccgacagatgaagagctggtggttcattacttgaagagaaaggccttaagccttcctttacctgcttaagtcatttccgagtttgatgttttggggactaatcc

SEQ ID NO: 9187 - DNA, 261 bp, Gossypium hirsutum
  Clone ID: LIB3120-054-P1-K1-A9
cggacgcgtgggggcaagggcaagggcaagggcaaaattttcgacctttataattcgttatgtgcaggcaatacgaatttttgggagcttttgaagaaggcaatggcttctctgttcaaggacccagctaagctttcagcgtaccgagacagaagattcaatggttcgcaagaggaattcgagcaagcgctcctcaattcgacaaccgtctacatcggaaacatgtcttttacactactgaagaacacgtttatgagcttt

SEQ ID NO: 9188 - DNA, 52 bp, Gossypium hirsutum
  Clone ID: LIB3120-054-P1-K1-B1
ggccacgcgtacgcccacgcgtttcgccaacccttccggttggccttcaatt

SEQ ID NO: 9189 - DNA, 239 bp, Gossypium hirsutum
  Clone ID: LIB3120-054-P1-K1-B10
cgccgcacccggcgcgcgcacccgtccgattatatcttcctctccacctttgaaccatgtcggcttttgttggcaagggtgcgaggagtcgatcaagagggccacgtacatcgccacgccaggcaaaggtattttggcggcggacgagagcacaggcaccatcgggaagcgtctctcgagcataaacttagacaccatcgagtccaatggccaagccttccccgagatccttttaacct

SEQ ID NO: 9190 - DNA, 186 bp, Gossypium hirsutum
  Clone ID: LIB3120-054-P1-K1-B11
ggaaagtagcctgggaacaccttctgctgcagcatctaatgcagatgatctaggtttaacccaattccaaggcttttggatcccttctcggagtgttcccacttcatccataatcgcatttcagaaaaatttccaggctcttgatgatgatatcattgttgtatctaagcccaaatctggcaccac

SEQ ID NO: 9191 - DNA, 418 bp, Gossypium hirsutum
  Clone ID: LIB3120-054-P1-K1-B2
gataaagtcaatgatccttacagcgtgtctgttcccatttatgtgctttggcattggtttcatggtgaatacagtcgctattttctatggatctctagcagctattccttttggaacaatggtggttgttttcgtaatttgggctttcatttcattccccctggcccttcttggtacagttgttggaagaaactggagtggtgctccaaataatccttgccgtgtgaagaccattcctcgcccaattccggagaagaaatggtatttgaccccctctgtggtgtctttgatgggaggacttctgccatttggcagcatattcattgaaatgtattttatcttcacatccttttggaattacaaggtgaagttctttttcctaggttttaatcatttgacgagggacaaaaatacattt

SEQ ID NO: 9192 - DNA, 368 bp, Gossypium hirsutum
  Clone ID: LIB3120-054-P1-K1-B3
gttgggaggatatgccagaaatgccgaatccacaaatggactgcctaggtatatcatataaaggcaaatttcatgtttggagtgaccaggtacgcttggcagaacagaacccatccgaaattttcgatccatcaaataaaacatggtgcacagtctatgacatatggcctttttcgagggcaatgcaatttgctttacaagagatgggggatgaacaagtatattccgtggtggattggggggagagcttttttaaaactagatattttttaagaagagaggggcacaattttggtggtgtttccttcggttattttttcttaacagtggataaaaactttggcgccttttggttattttttttttca

SEQ ID NO: 9193 - DNA, 387 bp, Gossypium hirsutum
  Clone ID: LIB3120-054-P1-K1-B4
gccggatgagattactcttaacacgcttttatatgagttttttaagaatggacggtttgatgatggggagaagatatggggtaaaacggtggagaaaaacgtggagcctgatattaggagttataatgctaagttgcttggattttcaactgaaaagaaactgaaagaggcagttaactgggttgaaaaaatgaggtgtaaaggacttaagcttgatgtgtttaccttcaattatatgatacgagcttgtgtaaatgaggaaaaattggagcatcctaaagagtggtttaatcaattggggaaaaatgattgtgcaccagaataacttgacttttacgacgttagttccattccttttgtgagaagggggatttagagttttgccct

SEQ ID NO: 9194 - DNA, 234 bp, Gossypium hirsutum
  Clone ID: LIB3120-054-P1-K1-B6
catgggcgctcctttcaacggccctaaagctggctttgcttttccaagcaccaggaaaggccacgaccacctttctttttttgcaaggcatggcgggagaatgcaatgcatgcaggtgtggcctcctactggaaagaagaagtttgagacttctttataccttcccgatcttacacccctgcagttggcgaaaaaagggaaccactttcttttagcttgtctttgccaaaaagg

SEQ ID NO: 9195 - DNA, 422 bp, Gossypium hirsutum
  unsure (1)..(422): unsure at all n locations; Clone ID: LIB3120-054-P1-K1-B7
cccacgcgtccgcttttacttagggtttttgattccttagtttctttctgtcatctttatatgcgatcaatcaatcatgactggcaaagccaagccaaagaagcacacagccaaggaaatagcagcgaagatcgacgccgccacaaccaatagaggcggcggcaaggccggattagctgaccgttcaggtgtggagaaaggtggacatgctaagtacgagtgtcctcattgcaaaataacagctccagatttgaagtcgatgcaaattcatcatgatgccaagcatcccaaggttccctttgaagagtcaaagcttgggaatctacatgctgttaatgtggttgagcctnccaagcctcgtcctggtgttaggggtagccctaaaaagtgataataaaaaaccccaaaaaaatgtgtttttc

SEQ ID NO: 9196 - DNA, 174 bp, Gossypium hirsutum
  Clone ID: LIB3120-054-P1-K1-B8
cccacgcgtccggtcagctcaaggatggaagaattgttgcagtaaaacgacttaaagttcaaggaggtcctgatgcagattctatcatttcgacagaggttgagctgttgtcaagggtacatcattgtcatgttgtaccttagcttggctactgtttggaattcaggggtaaac

SEQ ID NO: 9197 - DNA, 255 bp, Gossypium hirsutum
  Clone ID: LIB3120-054-P1-K1-B9
taccggcggaataccgcccggtcggcggacgcgtcaggccacgcgtccgcccacgcgtgcgctttctcttctcttaccatggatccttacaaggttcgggcttctagttcctttgattccccgttctggactaccaattctggtgctccagtttggaacaataactcatcacttactgtgggagcaagaggtccaattctccttgaagactatcatttggtggaaaagctagctaatttcgacagaaaacgcata

SEQ ID NO: 9198 - DNA, 397 bp, Gossypium hirsutum
  Clone ID: LIB3120-054-P1-K1-C1
gcctgcacgtaccggtccacacgtccggttatctctgagggtgtcttaataaacgccttcgatttactttcggtttccatttacttctttgtttctacgtttttgaatttttagtaagcgaaaatgagagagtgcatttcagttcacatcggtcaggctggtatccaagtcggaaatgcctgctgggagctttactgccttgaacatggaatccagcctgatggccagatgccaagtgacaagactgtcggaggaggtgatgatgcttttaacacctttttcagtgaaactggtgctggaaagcacgtccctcgtgctgtctttgtggatcttgagcctactgttattgatgaagtgaggactggtacttaccgtcagcttttccaccctgagcaac

SEQ ID NO: 9199 - DNA, 304 bp, Gossypium hirsutum
  Clone ID: LIB3120-054-P1-K1-C10
taccggctggaataccggccgacgacgcgtccggccacgcgttcattctttacaagatcatcttttatctctactctaaccatggatccttacggcgatggttctagaagatcctgggaataaaaaccctgaaccacaaataaatgggcaacaagattgctagacaattgcacatatactgacggcgagggcatgagggtcactcacgcatggagaaaaacaccggggggggaaaaggccaaatttactgtgaaaattgacacgtagcgtggaaacaacctaaaataaaaacatggaaggggcc

SEQ ID NO: 9200 - DNA, 241 bp, Gossypium hirsutum
  Clone ID: LIB3120-054-P1-K1-C11
ttcccggtcgacgacgcgtccgcatatacttccatatttttttatcaatcaacattctcagattttcgtatgtccttcatggcggcgtgattctttaggttctttgttcctctcaataattcacggttttattgcatcgaggaaaaaaagtgaatctgaaatacgcttggattggattgcgatttgaaagattgggcacgggaaggaaaaaacggttttttgatgaacaattctccaaaaa

SEQ ID NO: 9201 - DNA, 275 bp, Gossypium hirsutum
  Clone ID: LIB3120-054-P1-K1-C12
cccacgcgtccgctctttttatcccccttttttatcttgactttaatctccacgccttcttcccattacttcattacattcccaagagaaaaacccagagccaaaaaaaaatggccaaattatggctgttcatggcactattgggggttccatgtctggttagggctacacgcatggtgaagaacccgttggtggttaagggtcaagtttactgtgaccattgccgtgctgggtttgaaacaccaaagactagaaacatggttggtgccaaggtt

SEQ ID NO: 9202 - DNA, 337 bp, Gossypium hirsutum
  Clone ID: LIB3120-054-P1-K1-C2
cccacgcgtccgcggacgcgtgggttctttctctctctctctctctctcttacattatgactatgctctctaattctttggttttacccacaagtcttccattccaattatcttcttctggctcacatttaaagacagcagggggtgctagtcccacaaacttgtcattcaattgtaatggcttaggaaaactgcatctttcttcctttagaaggccagtagtaacagttcaagcttcctacagtgatggtgaaagaccaagcaatgcaagcatctttgttggaggttttattttgggaggacttgtggttggtgcacttggatgtgtatttgttcc

SEQ ID NO: 9203 - DNA, 344 bp, Gossypium hirsutum
  Clone ID: LIB3120-054-P1-K1-C3
gcatacactactagtacccactactagcaatggcttcctcaatgatctcatcggctaccattgccactgcctctccggcacaggctaacatggtcgctcctttcaccggcctcaagtctgcctctgctttcccagtcatcaggaaggccaacaacgacattacttctctcgcaagcaatggcggcagattgcaatgcatgcaggtgtggcctcctactgaaaagaagaagtttgagactctctcatacctccccgatcttacacccgtgcagttggctaaggaagtagattaccttctttgctcaaaaggggttccttgcttggaattcgaattagaggaggga

SEQ ID NO: 9204 - DNA, 255 bp, Gossypium hirsutum
  Clone ID: LIB3120-054-P1-K1-C4
cccaaatttcttttttttagaatacaaaaaatgggctgcaattcttccaaaagcagcgtctccgccgtggatttctaccgtccgccgccgtcaagctttgcggtgttcgacatcaacgccatagatgaaccgtgggttaaggtggaccaaaccccgtcggagaaccaagagaagcccacacatgttcttgctgcgattctcgaaaaactcaacgcctttgaaactgttcttaattcatggagtgaagttagcaaa

SEQ ID NO: 9205 - DNA, 264 bp, Gossypium hirsutum
  Clone ID: LIB3120-054-P1-K1-C5
agctagcgagcttcttagcttccctataagttaagcatcgttcaaattaagaggatggagtgcgaactccagatcaattcctaagctgataagtactttgatgcctacaagaccaaagcctatcttatgccaaaaatggccaatcaagtcgtttgagatgtaaaacttgtagagggtattggctggcattcaacgagtacactaaaacaatgatgttatgaacccgatggtaactttgaaacttgaaaggaaatgatgcaaaag

SEQ ID NO: 9206 - DNA, 221 bp, Gossypium hirsutum
  Clone ID: LIB3120-054-P1-K1-C6
cccacgcgtacgcccacgcgtccgcatgagtggtgttacatgctgcctgcgtttcccgggtcaggtaaactcggacctacccaagcttgctgaaaacctaatcccgttcctcaaactacatttattgagggccgggttctctcctttaacgtttcgaggttcccagctgtacatagttctaactttcccacacttaacacaccaaatgtgggatctcaata

SEQ ID NO: 9207 - DNA, 206 bp, Gossypium hirsutum
  Clone ID: LIB3120-054-P1-K1-C7
atctcacgtcccctaaattccgcctttattcttcaaattccccacaaatggccgtaactttgtgagatcttcacaccgaatttggccttaaatcccttaacgacttccttaccggcaaatctaacatcaatgggtacaagcttactaatgatgacattaaggttgattctgctgtttttaaaaatcctggtgattcattttccaat

SEQ ID NO: 9208 - DNA, 148 bp, Gossypium hirsutum
  Clone ID: LIB3120-054-P1-K1-C8
tcgaccgacgcgtacgtctataccaatcacaagacatgaacaacgaattgaaacctccattccgggagtgatcagactcaggagagaagcttttaaatatgtcgtcaattgatgctaatacttttttttgagaggctggttttgggga

SEQ ID NO: 9209 - DNA, 254 bp, Gossypium hirsutum
  Clone ID: LIB3120-054-P1-K1-C9
attacactgccggaaaaaaatcatggaccttgaaaatgtatacatcaatgaataacatccacagagataaggatgttgaaccaacagaatttgaggaatcagttgcccaggcattctttgatttggagaataccaaccaggatctgaaaagtgacctaaaggatctttacattaatacagcagtccaatttgatgtgtttggtaaccgaaaagctgttgttatccatgtcccctaccgattgaggaaagctttt

SEQ ID NO: 9210 - DNA, 398 bp, Gossypium hirsutum
  unsure (1)..(398): unsure at all n locations; Clone ID: LIB3120-054-P1-K1-D1
ctttgttttccaatagttcgtaacaatggcggtctcacttcaagctgcagctaccctgatgcagccaatcaaggttgctgcaccatcaaggaccaatgtgccgctcaggtcctcccagagcgtttctaaggccttcggtttggagcctgttggtgctaggcttacctgctctttgcaaactgacctcaaggacttggctctgaagtgtgttgatgctaccaagctcgctggtttcgctcttgctacatctgctcttgttgtctcgggagcaagcgctgaangagtttcaaagcggctaacctactctgaaatccaaagcaagacatacatggaagttaaaggaacaggaactgctaaccaatgcccaaccattgatggtggtgtcgactcttttgcct

SEQ ID NO: 9211 - DNA, 271 bp, Gossypium hirsutum
  Clone ID: LIB3120-054-P1-K1-D11
ctaaactcctctcttcccctttctctcctccattatcttctctttcaaggcttccttcgggtaccactattacttttcctactcgttgcttagactagtatttttttccatttatatattcatttttctcatagacgctcgcttataacacgagattatataacactgcgcgagagacacacacagagagagagagagagagagaagaaaaacccctttgggggggggaacccttttttattaaattaaacttcccagagacaaagggggg

SEQ ID NO: 9212 - DNA, 52 bp, Gossypium hirsutum
  Clone ID: LIB3120-054-P1-K1-D12
cgcgtccggtcgctttttttataaaagaattatatattatatttccaacact

SEQ ID NO: 9213 - DNA, 220 bp, Gossypium hirsutum
  Clone ID: LIB3120-054-P1-K1-D2
tgcatttgctgtacaaatatggtgcattgacagaggtggccctgtcttcgttgctgtttatcagcctgttcagactctcgttggtgctattatgtcttccgttgctttaggtgaagagttctatttgggaggtatcatatgggcagcgctgatcataacgggattatatttagtgctatgggtgaaaagccgagaaagaaaattcgcagctcaaggaaaa

SEQ ID NO: 9214 - DNA, 351 bp, Gossypium hirsutum
  Clone ID: LIB3120-054-P1-K1-D3
aaagcaacccaaaagaaaaaaaaagaaagaaattatatccgttttgatcacaattcacacagcgcgagccccgttatagaatttgtcttaaaaatacaaaagggtttgagaattttcagttttgtttatatgtttgaaaaatgggggtcttgtgttttttttagtaaagatttgaagagagattcatttccaattccagggacaaacaatctggaataaacccatgttgtgttatgaacacaacaagacattattctatacaaaaacataccacaatatgattcacatttttgttgctttccttctttgttccactttgcttggcccttgcttgtctttacaaccagtacc

SEQ ID NO: 9215 - DNA, 405 bp, Gossypium hirsutum
  Clone ID: LIB3120-054-P1-K1-D4
atcacacagaacacgagttgcttccatacatccacaggttacagtcaaaggatctctccttgtgtcatagtatgattccgttgggatcttgtacgatgaaactaattgcaacggttaaacggatcccggtacaagggctgtggttacgggcaatcaaccctttggcccttaagggcccgctcaggggtattaagaaacgttccattatttaagggaacagtattgtgccttacaggggtgagtcattctcttttaacctaatgccggggctgctgtcgagaatgctcgactaatggcttttcgtgcgtattatatgtcaagaggggaccatcatcgcaacgtgtgcatcataccatccttctgcacatggtacaaattctgcaagagctgctatttttggaatga

SEQ ID NO: 9216 - DNA, 157 bp, Gossypium hirsutum
  Clone ID: LIB3120-054-P1-K1-D5
cgtcggtcaatccctgaatccaaatggttgcatgctccaccccatacaatggcagggcttaatggaggctgtattcagaagtcagaaccctgttatcctttttgagcatgttttgctttacaaccaaaaggagagaatcccatacttaggatattat

SEQ ID NO: 9217 - DNA, 459 bp, Gossypium hirsutum
  Clone ID: LIB3120-054-P1-K1-D6
cccacgcgttcgcccacgcgtgcgcatgagtggtgttacatgctgcctccgtttcccgggtcagctaaactcggacctccgcaagcttgcggtaaacctcatcccgttcccccgactacatttcttcatggtcgggttctcgcctctcacgtctcgtggttcccagcaatacagagcactaacagtcccagaactaacacaacaaatgtgggatgccaagaacatgatgtgcgctgctgatcctcgacacggtcgatacctcacggcatcagccgtattccgtggcaagatgagcacgaaagaagtcgacgaacaaatgatcaacgtccaaaacaagaactcatcctactttgtcgaatggattccaaacaacgtgaaatccaccgtttgtgacattcctccgagcggattgaaaatggcatcgacgtttatagggaactcgacttcgatccaagaaat

SEQ ID NO: 9218 - DNA, 255 bp, Gossypium hirsutum
  Clone ID: LIB3120-054-P1-K1-D7
cccacgcgtccgggcacaagcaatggcatctatgactggtttacgtggctcttcacaagctgggttggagggtattctccaactcagtggccaaacttcgttgaacgtttttagcaccaacagattggctgtggctagaccctttttaaccgttagagctaaacaggtccttctcttactcttaactgaacacatagctttcctgggttttgttttttttacatttggcttactgttttctttttttaaaaactg

SEQ ID NO: 9219 - DNA, 286 bp, Gossypium hirsutum
  Clone ID: LIB3120-054-P1-K1-D8
cccacgcgtccggatcaatgttgatgagctggtgggcatgtcaaagttgagtttgggagaaagtattggtgatggcggctcatcatctctttcattaaaacttgatggctcatctaggcagtctgcttttcatgccaatcctgcttcatctggtaattctaacatggattcaagtgggaacccaatccatgcggtttaagataaaaacttgatctgaaattaatgtcgaaggttaccttagggtttgtgagcagtacaggttaatattggtggtagtagtacacta

SEQ ID NO: 9220 - DNA, 109 bp, Gossypium hirsutum
  Clone ID: LIB3120-054-P1-K1-D9
tctaaactcctctcttcccctttctctcctccacataacttctctttcaaggcttccttcgtgtaccactattacttttcctactcgttgttaaaactaaatatttttt

SEQ ID NO: 9221 - DNA, 196 bp, Gossypium hirsutum
  Clone ID: LIB3120-054-P1-K1-E1
cggacgcgtgggtgaaaaaatggttggggcttggaatggaagtgaagctgagccgaagcctcgaccacatggataaattctgatccgaaaccattaatacacgcaggcttgattggttgagtcggattcaaggggggatccaacacaacaccttcctgtccgtttcatgaaaaaaaaggaatcctactaaaatgaa

SEQ ID NO: 9222 - DNA, 242 bp, Gossypium hirsutum
  Clone ID: LIB3120-054-P1-K1-E11
gcacaggaacttgggtccactatacggtgagcacaccatcttacttgaccggtgagaaccctgtgtgactatggcgggggcgagtggtggactctcaaatcatcccgagacctttgctaggaaccgtgagctcgaagtcattcactgcagatgggccatgttgggagctcttgggtgtgttttccctgagctgttggctaggaacggtgtcaagttcggtgaacctgtatggttcaaggccg

SEQ ID NO: 9223 - DNA, 186 bp, Gossypium hirsutum
  Clone ID: LIB3120-054-P1-K1-E12
caatgatgcatgtgaatagcatggcttctctatcaaactcaaaggggccggggcaatatttccattattataataagcattccagcacgtgttttaaggtattaacacccagaaaatcagagctgcaactgcaaattgtaagggctccttcttcagctgctgctcctgatgttgatctcaacaccc

SEQ ID NO: 9224 - DNA, 224 bp, Gossypium hirsutum
  Clone ID: LIB3120-054-P1-K1-E2
cccacgcgtccgagttcgttaaaagcagtggcaaagaaggcgaaggttaatagcaaaaaaaaaagatggcgacgaatcgggtgctcactcctcagccgcttgctttttcaaaattctctgtttcaaccaaaaaagtagcgattaatagccaaagagcgacgagattcgtcgtcaaagccagtggtggagaagagaagaacgaccagaaaggcttcactccgttt

SEQ ID NO: 9225 - DNA, 390 bp, Gossypium hirsutum
  Clone ID: LIB3120-054-P1-K1-E3
cgactactaaaacatacttcgtagaatttgctttgcactttgcaatggcattcgagataacaaatgaaatgctggttggcagtttaatgccagttattgtttattgggtttatggtggactgtatacaattttaggctactcttgtaacaattacaggttgcatcctaaagaagatgaggatgagaagaactttgcctccaaaaagaccgtcatcaaaggcgtccttgggcaacaatttcgtcagttcatcgccactaacctattatatatgataacaagaggaaatgatcccggagcttctttagggcagtcaacttccttttttgttatagcaagacagtttattgtagcaatgttcgtatttcatactaaccaatattttctttaca

SEQ ID NO: 9226 - DNA, 270 bp, Gossypium hirsutum
  Clone ID: LIB3120-054-P1-K1-E4
cccacgcgtccgaccagctcctgcttatagtatctatcctccccattccccctttccccactaggattagatcttcactcaccattgttccaagtttgttgtaaaccaagctagaaccagcagccaacatggcctcattagcagcctccaccgttgccgcctcccttggcgtctctgaaatgctcggtaaccctctgaatttcagtggtggagctaggtcatcggttccaacaccatccaactcatccattttcaagaccgttgctcttt

SEQ ID NO: 9227 - DNA, 243 bp, Gossypium hirsutum
  Clone ID: LIB3120-054-P1-K1-E6
aacatgctaaatgtaaaagataaatagactaaaattttaaaaataaaaggtaaaaaatttaaaggtaaatatataacaggaaaaaaacgatcactctagaactgagtgcttcacatgggcattataaatatataggaacattttaggttttgatgagttatttatgaaattcgaaagcccacaaaaattcatggatgggaggactaaatcatattttaagactaacttctgatgggtttttaa

SEQ ID NO: 9228 - DNA, 328 bp, Gossypium hirsutum
  Clone ID: LIB3120-054-P1-K1-E7
cattttcagagggcagctggtggttttggtagctttattatcaacaagggacctataattccgattccttttgacactcctgatggggacattgccattttgatgggtgattggtacacgcgaaatcacacggctttgagaaaggcacttgttgccggaaaaggtctagggatgccatatggagttcttattattggcaaaggtactcaccgatataaggatactcttgtcgcttgggtgttctattattaaacaataaacgttcattcaggtaaaacttatggtctttaagttcacaacgtgggaatatcgatctccttgaatttca

SEQ ID NO: 9229 - DNA, 58 bp, Gossypium hirsutum
  Clone ID: LIB3120-054-P1-K1-E8
cccgggcgggcgccagccccggctatagaaccaatcctccccattcctcctttcccca

SEQ ID NO: 9230 - DNA, 114 bp, Gossypium hirsutum
  Clone ID: LIB3120-054-P1-K1-F1
ttctgtggagaggaacttctatcatgggcattggatcccaaaacaggtgctgggccttcaacatggggtcggacagatatggctttaacgtgacgccgaaccttttgccctcat

SEQ ID NO: 9231 - DNA, 380 bp, Gossypium hirsutum
  Clone ID: LIB3120-054-P1-K1-F10
ctcactcttacttactcccctcttttatccatacacagaagccgcctcctcttagtgtaccggtgacatctatgcagatgccatttcatcaccagcctcaggtttccattcaatatggcgggcctaatccacaaattcagtctcaaagtgttactgctagttcaatgcaaatgcctatccatatccccttacctatgggaaatggacctcaggtgcagcagcaagtctttgttgaaggatttaaggctcttccattgccacctcatggaatgacccataagggggggggcttaattttacccccacctattggtggccagtttacgccaaatttggccacttgggggatgggcattgcccctcaatttttttaaacataa

SEQ ID NO: 9232 - DNA, 482 bp, Gossypium hirsutum
  unsure (1)..(482): unsure at all n locations; Clone ID: LIB3120-054-P1-K1-F11
tttatattatttatttaacttntataaatatataattttttcatgcgntaccgttggattccggtttgatgatacgttttattttttttttatttatattttttttatttttttttttttatttatttattttattgtgtgtttatttattattattataaaatatattattaatttttatttattattattcttttttattattttttttttattacatattgtaattatgtttatctttttatttttttattttttaatatttttttatatttttaccttttttttaaatttatattttattttattttattaatatacttaatcaatttttaattttttttttattatttaaaatatcatatattttattttttattttgaaatttattatttttaaaaatttattatattttttttttattttttcttttttttattattatttattattttttattaattttattattttttttaat

SEQ ID NO: 9233 - DNA, 226 bp, Gossypium hirsutum
  Clone ID: LIB3120-054-P1-K1-F12
cccacgcgtccgcattcagcaacttctcttttaagggagtgtgttatcaacaaggggcaatgggtgtggatgaacagttcaatgaaataaacgttttgaagacggatgcggttttttcaattgatgatgatgttattttcccttgcacttctgtagaatttgctttcactgtttggcaaatggcctaaaatccaatggggggatatgttcttcgtttgcattgggt

SEQ ID NO: 9234 - DNA, 160 bp, Gossypium hirsutum
  unsure (1)..(160): unsure at all n locations; Clone ID: LIB3120-054-P1-K1-F2
ccccgggacggcgggggcctnacctcnccttcttccaccactaccacctcctctttttccgctcgagggggacctacattgcggccttcaggcgtcgctagccttaactcttctccttctcctccgactcttatccaagaccgcccggtgtttgcggccc

SEQ ID NO: 9235 - DNA, 119 bp, Gossypium hirsutum
  Clone ID: LIB3120-054-P1-K1-F3
cacagaccgaaaaggaccgatggaaagggttgttttacgatatttcggacgaccaacaagacattactcgagggaaagggatggtggattccttgttccaagctcccatgaatgatgga

SEQ ID NO: 9236 - DNA, 343 bp, Gossypium hirsutum
  Clone ID: LIB3120-054-P1-K1-F4
aaagaaaatggctatcctttgtgcttcaacctcaaccattttctcttcttcagagagaacttcgtttggttccttgaaaaagactattcccagtaaccaaagctcatttcttgggttcttccctgtagcagcattgtccaaacctggctctgttctgccaacaacactgtctttctctaaacgagatttccgggtttgttgccaggacctctctcttgtccttgaaaaccaacgttggatgttcgaagaatccgaggctgatggccctgacatttggaacaacacatggtttcccaaagctaaagatcacataattccagaaaaaacttggtttgttgttgat

SEQ ID NO: 9237 - DNA, 241 bp, Gossypium hirsutum
  Clone ID: LIB3120-054-P1-K1-F5
gcggtgagactctgttgtatacctgtagcatatagtaatagtaagcagtaatagcaatggcctacgtgcatgatctcatcggcaaccattgtcaccgtgaaccgctccttcacggtacaggccagcatggtggtccatttaaccggcctaaaatctgaacctgctatcccagccaccacgaaggccagcatctacatcacttctgttgtaagcgacgggggtagagtgcacagcatgcagg

SEQ ID NO: 9238 - DNA, 130 bp, Gossypium hirsutum
  Clone ID: LIB3120-054-P1-K1-F7
acgaccaacttcaacactgtttcatcatattgatagtttctctgcaaaagagaaagcatggtcaaggactgaaccttattgtgttacagaaaacaaaccctgtattgagtggcttcaaagatacttcata

SEQ ID NO: 9239 - DNA, 212 bp, Gossypium hirsutum
  Clone ID: LIB3120-054-P1-K1-F8
aaagaaaatggctatcctttgagctccaaccccaaccagaatgatatataatgtgagcctcaacgagcggaaccaatggggggacgattagcatacaccacacagtccctcattggaacttgtccagtcacaacaccagccaaaccctgtttttgttttgacaaaaaggaagtctttttttatacgagaatttccaggttagtggccagacc

SEQ ID NO: 9240 - DNA, 57 bp, Gossypium hirsutum
  Clone ID: LIB3120-054-P1-K1-F9
cccacgcactcgggtccactttccggtgattcaccatcttacttaaccgttaacttt

SEQ ID NO: 9241 - DNA, 248 bp, Gossypium hirsutum
  unsure (1)..(248): unsure at all n locations; Clone ID: LIB3120-054-P1-K1-G1
ctcgtgtcgtgtctgacgggtttcacttgcatagctagcanagctaaagagttcgcaaaatgggggccttgaatggctgtgggcagttggggaatattcttcaaggccattaaaaggcttcaaaggttacccatgggtggttggtggcttttaaatggctgtgccgaccaagaccaaaggtggaccccttaaccaacttggtttttttaaaggttccacccaaataaaggccaggggtaaaatttgtt

SEQ ID NO: 9242 - DNA, 365 bp, Gossypium hirsutum
  Clone ID: LIB3120-054-P1-K1-G10
cagcagcagacaggcgaagctcaggtatttcgatccctcatctttggcttatttccgaggatcgcccctttcattttagtccgaaatgattttgaggagtgcatcaacgccgttattcaattcattggttccacactctaaggagccatcgccggacctcgagtttccgtaccagatttctcgaacccgaaccgtttcgttcacggtttcgtgttcgagctcgatttcggttgcatcgagcgacgattcgactcggaggatgacgagggcggtgtcggagacggatctcagggacctagtggttccgaaaattaaaaccgttcagaaaaatggcggcatcttgaatggggtttgcgttgaggaag

SEQ ID NO: 9243 - DNA, 276 bp, Gossypium hirsutum
  Clone ID: LIB3120-054-P1-K1-G11
tacattcagcaagccttgcacaatggccaccatcacctctgccgctgtcgctatcccatctggcaccggccttaaagccggtgcaaccgcagctaaagttagcgccacagccaaggttgcagcctctccagtcccaagggtcagcatcaaggcctccctcaaagacgtcggtgttgctgttgcggcaactgctgcaagcgcaatccttgccaacaatgccatggccattgaagtcttgttcggcagtgacaatgggggtctgcctttcattccaaa

SEQ ID NO: 9244 - DNA, 407 bp, Gossypium hirsutum
  Clone ID: LIB3120-054-P1-K1-G3
agcggagactagtggttgccaatgctgctaagggagctcaagtggagagtgtccagatgagcggtgagaggaaaacagagggcaacaatggcaggagggagatgatgtttgcagctgcagctgctgctatttgctcggttgcgggggttgcaacggcggagcctaaacgtggtaccgcagaggccaagaaggcgtatgctcctgtttgcgttactatgccaactgctaggatctgtctcaactgatgcagtgccattgcacattgtttgagggccatgagactatgcttgttatgggcaggggctgaaggatgtaatttaataatgcttgtaaattttcatttttataattgagaaacctaattttaatttgtgtcttttttaaaaaaaaaggattctatctttttt

SEQ ID NO: 9245 - DNA, 382 bp, Gossypium hirsutum
  Clone ID: LIB3120-054-P1-K1-G4
caccaccaccaccataattcaaccttttcataacaatggctgccatcacaaacgccgctgctacatcctccttcatggggacactcttccccgacgtctacacaagttcagggagattcgtcgccaggtttggctttggcggcaaaaaagcagctcccaagaaagtctcgaaacgaaccccagaccgccctctatggtacccaggagcagtggcgcctgattggctcgatggaagtttggtgggtgattacgggttcgacccgttcgggttagggaaaccggcggagtacttgcaatatgatttggattctttggaccagaacctggctaagaattcggttggtgagataattggaactaggaccgaggttgccgccttgaa

SEQ ID NO: 9246 - DNA, 128 bp, Gossypium hirsutum
  Clone ID: LIB3120-054-P1-K1-G5
gttctatcatcacttgtgtttaggagtatctgcgtgacgaaaatcgagtctaagtcactcagggttatgcagatcaggctggttttataggacgacgtagggactgctatgtattatttagtatttgt

SEQ ID NO: 9247 - DNA, 202 bp, Gossypium hirsutum
  Clone ID: LIB3120-054-P1-K1-G8
gtcttgcttatgatatctccgatgaccaacatgacattaccatagggaaaggtatggtcgagtgattgttccaagctcccatgaacgatggtcctcactatgctgtcatgagctcctatgattacattacccaaggccttctcacatacgactggaacagcaccttggacggatttttctttgccccagcttttcatggaca

SEQ ID NO: 9248 - DNA, 78 bp, Gossypium hirsutum
  Clone ID: LIB3120-054-P1-K1-G9
acccggtccaattcccccgcgacgaccgcacgcgtccgcagcctctggttaatggaacaacgtctgtgttgtaagtcg

SEQ ID NO: 9249 - DNA, 361 bp, Gossypium hirsutum
  Clone ID: LIB3120-054-P1-K1-H1
ggaactgttcttaggccaaccccatttcttggccaaaccaaaaatgctaaccctcttagagatggtgtctctttgggcactcccaaatatgcaatgggaaatgaactatggtatggaccagacagagtgaagaactggggaccattttaagttcagactccatcttacttgattggagaatcccctggtgactatggttgggacactgttggtttggcagccgatcctgatgcatttgccaggaatagggctcttgaggtcatccatggaagatgggcaatgcttgggagcactaggctgcattacaccacaggtccttgagaaatggcttagggttgattttaaggaaccaggattgttt

SEQ ID NO: 9250 - DNA, 257 bp, Gossypium hirsutum
  Clone ID: LIB3120-054-P1-K1-H11
cgcacgcgtgggggagaagcgtccacatcaaccttgttgtcattggccatgtcgactctggcgggtcgaccactaccggtcatttgatctacaagcttggtggtattgacaagcgtgtgattgataggttcgagaaggaggctgctgaaatgaacaaaaggtcattcaagtttgcttgggtgcttgacaagcttaaggctgaccgtgaacgtggtatcacaattgattttgccttgtggaagtttgaaaccaccaaa

SEQ ID NO: 9251 - DNA, 252 bp, Gossypium hirsutum
  Clone ID: LIB3120-054-P1-K1-H12
cccacgcgtccgcccacgcgtccgataaaacctttttttttaaatatttttcattgccaatgagtccctgattaataagtagagtatttccacaactggtttaattcccttcatgcactgtgctccatagccttggaacccaaggacagaagactcttttaacatttcaccgcaaagatggagataacaaatgtgagcgagattaaagaaattgcgaagcaaaagttgccaaagatggtgaatgactactac

SEQ ID NO: 9252 - DNA, 485 bp, Gossypium hirsutum
  Clone ID: LIB3120-054-P1-K1-H2
cccacgcgtccgcccacgcgtacgcccacgcgtccgattacactttcggaaaaaaatcatggcgaccgtcacgacgcaagcctctgccgctgttttccggccatgtgcatcgaaaacacggttccttactggttcttccggtaagttaaaccgagacgtttcatttaaaccagtggcttctacatcgactagctcattcaaagttgaagcaaagaaaggggagtggttacctggtcttccttcaccagcttacctcaatggcagtcttccaggtgataatggctttgatcctcttggattggctgaggaccctgagaacttaagatggtatgtacaagctgagcttgtgaatggacgttgggctatgttgggtgttgcagggatgcttctgcccgaagttttcactaagattgggataatcaatgctcctcaatgggacgatgccggtaaagccgaatacttcgcatcgtcctcgaccctgttcg

SEQ ID NO: 9253 - DNA, 127 bp, Gossypium hirsutum
  Clone ID: LIB3120-054-P1-K1-H3
cccacgcgtccgctctttcctctctctcctctaccaccaccttctctcatccttcttccaccacgtgcacaactacttgccaaggtattttctttggcccccttcaacaccacctttcccaacaaaa

SEQ ID NO: 9254 - DNA, 154 bp, Gossypium hirsutum
  Clone ID: LIB3120-054-P1-K1-H4
accggaccgagaacttccgcatcacccaacaaaatcaactgctttacaatggcctctacaaccatggctctttcttccccatcagtcgccggtaaggcagggaagttcttccctttcacccctgaaatccaaggaactggccgtgtttccatga

SEQ ID NO: 9255 - DNA, 387 bp, Gossypium hirsutum
  Clone ID: LIB3120-054-P1-K1-H5
atttgatccccccttttctgttgctggtactgagagtcccagatccaattaaaaaaaatgaaggtgatagataagatccagtctttgtcacaggaccaagggaaagtggttttttcctttgagttcttccttccaaagactgaggatggagtggacaacctgtttgagagaatggatcgaatggtggctcataatccatctttttgtgacatcacatggggtgctggtggttccactgcggatctcactttggacattgttaacaagatgcaaaacatgatatgtgtggaaacaatgatgcatttcacttgcaccaccatgcctgttgagaaaattgaccatgctcttgagaccattaagtctattggcatttaaaatgtccttgcc

SEQ ID NO: 9256 - DNA, 236 bp, Gossypium hirsutum
  Clone ID: LIB3120-054-P1-K1-H6
gtactatcaccttgtgcgtttaggaatatcagtttgacgaaaatcgagtcccggccacacggcgagaggccgatccgtttgatagatgacaccaacggaggaaccggcgatcatatgaagtatatgttctacgtggattctctaagtgtacatgacggaactgatagcccaaaacgctgtacttgaggcccattagctcacttccttcttgatactatagcgcagagacccaatgg

SEQ ID NO: 9257 - DNA, 276 bp, Gossypium hirsutum
  Clone ID: LIB3120-054-P1-K1-H8
cccacgcgtccgcttccagtggatcgatttgaggaaaaaaaagcagcaatgatcgctgcagctgcgacagtattaagcccttcaaccagtttaaggaacagccttaacagctaccctaactggatgaaatggcaatcctctctttggtagagcactaccttcgttatccctcacgctggtgcctgtgcccacactggcgaaggccaccataatacttgacccgagggttaaaaagcttcttttgcaactccagttactacaacaacaaactgaatc

SEQ ID NO: 9258 - DNA, 185 bp, Gossypium hirsutum
  Clone ID: LIB3120-054-P1-K1-H9
cccacgcgtccgcccacgcgtccgaaagaccggtgaatgagtactcgtctctgaaagatgggcctctgtcttcatggggcgaactgggaccaggccaatttttccttcgactaggaggactctggttggtaactttcacggtctttggagtcccaatagcagatgcaggctttaatccttcaaaa

SEQ ID NO: 9259 - DNA, 283 bp, Gossypium hirsutum
  Clone ID: LIB3120-055-Q1-K1-A3
ggcccgaaggtgaagtacaggttggggtaaccggacaccgtcacgctgcggtaggcgtacgcccccgaactccattccgcggccagttcacgcccgcccgatccgatgaccggaaacggcgtcccggctttcgacacgtcgaaaccggtggcgaagacgatggcgtcgaactggtgctcgataccttccacggtacgaatcccgcgcggtgacagccgcgcgatcggccaggtcaccagtttgcagttgtcggcctgcaacgccgggtagtagtcactggaca

SEQ ID NO: 9260 - DNA, 150 bp, Gossypium hirsutum
  Clone ID: LIB3120-055-Q1-K1-G3
tccacaccactgccggccgttactattggatcggaaccgtctccgcggtcgtcgagggggacaccgactgcggcaacgaactgcacggcttcgggatctacggccagcgagactttaacgcctggatggccaacatcacctgttagcgaa

SEQ ID NO: 9261 - DNA, 366 bp, Gossypium hirsutum
  unsure (1)..(366): unsure at all n locations; Clone ID: LIB3120-056-Q1-K1-C4
acccgggcgccaactgctggaccgagctcaccagcaggtcccgatgctcgggcacccactgcaaggcggcgttggagatgacgacatccgtctcgggttcgggtgaccagtcngcgatgctgcccaatcggacatcgagtccgcgttcaccggcggcggccaccatttccggtgacgagtccacacccgacaccgatgccgccggccagcgccgactcagcgtctcggtcaggttttccggcccgcacccgaggtcgaccacccgacgcggtgcgtccgcggccacgcggttcaccacgtcgaagaatgggcggccgccgtgatcggcgaacgccagataggtatcgggattccacataccccgag

SEQ ID NO: 9262 - DNA, 330 bp, Gossypium hirsutum
  Clone ID: LIB3120-057-Q1-K1-A10
tttctcagagtacgtctgagtggttgttagcgcgacggacactcgtagaaccttagtatatcggtggttgccatcagcggactagtaagtgcgcgtagattgacgttacgacggtgtactcgatttggtcgtaggagactgttgactagtatgatggcaattgcgtgtcgggaatgtttggtcattaggttagttctgatcacgcggctaatgtgtcgtgtgataagggccctgaggcgtaaattttggaccctgaggcgtgtactttgcctgttgaggattttaatggctgaggcgctaggtattttggcggtggtttcgttgacgagt

SEQ ID NO: 9263 - DNA, 447 bp, Gossypium hirsutum
  Clone ID: LIB3120-057-Q1-K1-A11
gtctgagtggttggtagcgcgacggacactcgtagaaccttagtatatcggtggttgccatcagcggactggcttcgtgcacaaatgggtacttaagtttgattagcctggcgtgattggtcgtgtcgttgtgggcacggttaacgtgaccgctgagaaaagtaacatgagaacttgtatgatacgctgaagagttacgtcgtatatttcagcggggttcggctggtgacttgggagttttactgcggttggggcacggctgaatggtgtcgggtcgtatggcctagtttgccgttagacctcgtgtcggtgtatgcgatgacgatgaggggtttggtggtttggatcgtgagattaatgacgttgagtgtattagattaattgatactgttaattgcttggggttggacattatgctcggttgtacggtcgccggcatcggttggt

SEQ ID NO: 9264 - DNA, 464 bp, Gossypium hirsutum
  Clone ID: LIB3120-057-Q1-K1-A12
tccccgacgtacgtctgagtgggtggttaagcgacaggagacacgcggaaccctagtatatcggcggttgccttcagtcaacgcaccgtcctccggaatgtcccgggttgatcgaggaccggtttggttgtgacctagcgtggacgtgctggataccgcgttcggccgtgaatcgcctaattggggtgtgaatagtcggggagctgactgtgctgagccctgtggttagttagaacctgaagtgtgttaggagcctactgtgccgcgggagtagtttgcgacgccgtaggaggtcgtgtaggcgactgacgcggtggttggacttcgttgtcgcgaggttgctgcgggctagtggcgccgcgttcgaggtgaccttgttgagtagccttagtattcggacgccgtgcccttaggctaggacgtctctgggttgacttatggtgtagagcatgctgacgagcgtc

SEQ ID NO: 9265 - DNA, 444 bp, Gossypium hirsutum
  Clone ID: LIB3120-057-Q1-K1-A9
gtctgagtggttggtagcgcgaaggacactcgtagaaccctagtatatcggcggttgccatcagcggactgacttcgtgcacaaatgggtacttaagtttgattagcctggcgtgattggtcgtgtcgttgtgggcacggttaacgtgaccgctgagaaaagtaacatgagaacttgtatgatacgctgaagagttacgtcgtatatttcagcggggttcggctggtgacttgggagttttactgcggttgcggcacggatgaatggtgtcgggtcgtatggcctagtttgccgttagacctcgtgtcggtgtatgcgatgacgatgaggggtttggtggtttggatcgtgagattaatgacgttgagtgtattagattaattgatactgctaattgcttggagttggacattatgctcggttgtacggtcgccggcatcggtt

SEQ ID NO: 9266 - DNA, 387 bp, Gossypium hirsutum
  Clone ID: LIB3120-057-Q1-K1-B10
cgtctgagtggttgttagcgcgacggacactcgtagaaccttagtatatcggtggttgccatcagcggactgatagtacatactgtcgtccgtggtgtagtgggcggatttggccgcgtaggcatcggcgtgtgaatgagacgcgttgtgttcgtctggtgatgcgaactagtacgataagtcttacgaatggacgtacggatccatttcatcataagatgcctcctcgggcgcggctgacggggcttcggcgggttagaatcttgaagacacatgggacggggaatggattcggacttactgatacgactggccgtagttatcatagtagtctgggtacattgggcatgcttatatctacgtgggctagtacccatcggggtacta

SEQ ID NO: 9267 - DNA, 244 bp, Gossypium hirsutum
  Clone ID: LIB3120-057-Q1-K1-B12
gtttctcagacgtacgtctgagtggttgttagcgagacggacacgcagaagaatcgtagaacatcggttggtatgccatcaactaagcgggccttgctgcgagttagtctggagcgacagagggcgtagatgcctctgtggatttggaatggtctattgtttactccaaggataaatgatcggcttacggtgcagtttagtctacggcgtgtagctatatttaaatacgtggtggataattggg

SEQ ID NO: 9268 - DNA, 249 bp, Gossypium hirsutum
  Clone ID: LIB3120-057-Q1-K1-B9
gacggacgctcgtcgaaccttagtatatcggtggctgccatcagcggactcggcgtgtgttacgcgtgaggttaatgttgattatccggtgattggttcggactgggttactgaaccgtctattgatgtctgtgattattcgtctatttatattccggcggttgtgtcggctgagcttcgatatgttgcttgggcctgccatgaaagtccctgcaggtttgatacgtcgaaggctcttacgactctggt

SEQ ID NO: 9269 - DNA, 453 bp, Gossypium hirsutum
  Clone ID: LIB3120-057-Q1-K1-C10
ttctcagacgttcgtccgagtgggtgttagcgcgacggacactcgtagaaccttagtatatcggtgggtgtcatcagcggactacttctcatattcttggaatgatggctgtgttgaagggtgcgtcgccgagttattacgttactgttgatggtccggatgggtcggtgtaggttcgggtgcggatactggttgacattgcggtttatggttctttgtcgccttatatttatggttcgacttctggtgcgtcgggactatcctatactggtctgtgctcggcttatattggtaaattgattttgtagtgccatgttgagattgttgttattacgcatcctggtgcgttgatggctcggatttgtactatttgtgatgagctgcttgttatggtgtcgcttctggtgtggtcgtcggctagtggtagtgtcttgccgttggcgttggcgcctg

SEQ ID NO: 9270 - DNA, 245 bp, Gossypium hirsutum
  Clone ID: LIB3120-057-Q1-K1-C11
ttttctcagagtacgtctgagtgggtgttagcgcgacggacactcgtagaaccttagtatatcggtggttgccatcagcggactccgctggtgcatacgcgcattcgattggatatgccgtgtgtggtgtggttgacggctcggaccaggtcgtgtggtgattgtaggaagtttcttccgctggtggcttaggaccgttattagtgatattcctggtaggcttaagtttctatgaagtaggccga

SEQ ID NO: 9271 - DNA, 263 bp, Gossypium hirsutum
  Clone ID: LIB3120-057-Q1-K1-C9
tttctcagacgtacgtctgagtggttgttagcgcgacggacactcgtagaaccttagtataatccggtggttgccatccagcggactgattgcggttattttcacgctggcgatggcgatgcgcttcctgatgctgtaagttcgtttggccatggaaagtcccttggttattgggctaataacgcttattagggtaagggtgctgccttgggcaaatggaactagggtgacccaatttcggggaaggggtttaagttggggaa

SEQ ID NO: 9272 - DNA, 461 bp, Gossypium hirsutum
  Clone ID: LIB3120-057-Q1-K1-D11
cgggtttctcagacgtacgtctgagtggttgttagcgcgacggacactcgtagaaccttagtatatcggtggttgccatcagcggactgttgttatggcgatattgtagaagccggtgtgccggtcgttatgttgtttcgttgtggtgacctcgattgtgggtgcgggggttgtggtgccgtttggccgcgaacgtggtctggccttgactgtttgatggtcgcctggtgttgggattgctggggtcgtggtgtcgatgcctacgtcggttgtatttgtgactaatttggccgcttcggcagttatggttgccgtgccctttggtgagttgtcgtcggcgtcggtgtggcgctcggtgctaccgtctattgtggcgataacgggcccttcgcggatatgtcctggaagattcgaccgggctattaggatgccgttcgtgtttgtgtttgatgatgagctct

SEQ ID NO: 9273 - DNA, 376 bp, Gossypium hirsutum
  Clone ID: LIB3120-057-Q1-K1-D12
tttctcagagtacgtctgagtggttgttagcgcgacggacactcgtagaaccttagtatatcggtgggtggcatcacaggactacggagcctgtggctatcgcgttggttattacgtcgccgtgggattgggcgtggccggctgaatctattggtgctgaaacggtttaatctgatgatcgtgacgtttcgtcggcgtttattactattggttatgtgatgactgttgacgcgattgttgacttggcggtgtctaacctatagacgggcgctcatattaatccccgtaattccgacgattcgcgtgttgcgtcggcgtttgttggaaatgacctggtgggagtataatctggggcgagctctcgcgtccgtgtagg

SEQ ID NO: 9274 - DNA, 412 bp, Gossypium hirsutum
  Clone ID: LIB3120-057-Q1-K1-D9
ctttctcgtcgtacgtctgagtggttgttagcgcgacggacactcgtagaaccttagtatatcggtggttgccatcagcggactattgatcctggcgttcatggattgcattggagtcggcttggcattgatatgactcctcatgtgatgatgatggtgtcgctgtgtcttggatttgctattggtatttcggcatccctgatggcggggactgtcctggtgatgggtgctctctatgttggtcgggttgcatcggttgctcatcattattgtccgtgttatcgcggaggtgagtatacagatcccctttgacctgaggtggcggcttaggtttctgacttggttcctggcgtttacggataggttgtcgctggatctaaatgtattgctggacggtgcggctgtttgagaa

SEQ ID NO: 9275 - DNA, 476 bp, Gossypium hirsutum
  Clone ID: LIB3120-057-Q1-K1-E10
agggtgcaccgggtttctcagacgtacgtcgtgagtgggggttatcgcgaggggcacccggagaaccttagtatatcggtggttgcctccacggaatcggaacctgacgcgggtgtagcagattggtacgaatgaggatggggctactggttccgacttgagtctggcattaagtccgacgtacagtccgagcacctcacagcgctattcaaacagtccggtgcaactacggctacagtcgcccttcgcgcgaaaccgccacttgtctataaccttatataatacatgagttggaagtacaaagcgcaaagttcggggcgttcaacgagcgagtcaatctataccaaccgtgccgtgtctatcgtttgtcccttagctgggaaattcgctgcgttagtcgtaccaacgaactggttaatgtgtggagagaggttgcccgtgcaacgggtgtctccctgtccatccgtctatcgatc

SEQ ID NO: 9276 - DNA, 415 bp, Gossypium hirsutum
  Clone ID: LIB3120-057-Q1-K1-E11
ccgggtttctcagacgtacgtctgagtggttgttagcgcgacggacactcgtagaaccttagtatatcggtggttgccatcagcggactgctgacgctattttgggttgggcgtgtgacgtgtcggatgatggtgctactgcgtcggctgttggaccttagggtgctagttaggatagtaaggacgctattattacgggttgtggtggtctggacattattgttgctgtgtcggttgtcgtgtcgaatgttgatgctcgtgagactcatattgatgctgatcgtactcctattgctgatttttgtactgcgtttaatgtttgttattcggattatgctcttcccgacgagacgccggagacggttcgtcgtggcgttaaggcgtcgacgtcgtgtcgtgcggaacatgtgtgttg

SEQ ID NO: 9277 - DNA, 371 bp, Gossypium hirsutum
  Clone ID: LIB3120-057-Q1-K1-E12
tatatcgcgtggtgccatcagcggactactgttcctccttgcggtgaaatagggaatgtggctcggcctgctactgtagtggcgcgtattcacgctactggccattgtcctcatgtttgctctactgagacgaagactgctacattgtgtgatgactatgttatttttgttgaggcgcctgagaatggtattgatcatacgtttattgattggtgggcgtcgcctggttattatcctgttggtactgttggtgttggcttgacggctggcttggcgtcggttacgtagacgggccactcgttgggtattactcggactactactggtgtgccggctgttgggcgtgcgtacgatcattcggcgtcgctgac

SEQ ID NO: 9278 - DNA, 232 bp, Gossypium hirsutum
  Clone ID: LIB3120-057-Q1-K1-E9
cgggtttctcagacgtacgtctgagtggttgttagcgcgacggacactcgtagaaccttagtatatcggtggttgccatcagcggactgaggagatttagatgaccgcggctggtgcactgtactattaggtttagtgtatgacttcgactcgtctggaggtgtactataccacgttgtagggagtttttgtaatcggagacgtcgtcctgtatcagaatattgacgtttat

SEQ ID NO: 9279 - DNA, 464 bp, Gossypium hirsutum
  unsure (1)..(464): unsure at all n locations; Clone ID: LIB3120-057-Q1-K1-F11
gtttctcagacgtacgtctgagtgggtgttagcgcgacggacactcgtagaaccttagtatatcggtggttgccatcagcggactgttcatattttgggtgcagtttaggctagttgtgtgactgtcgttgacgtgatgtcggttaagaagcatattcgggttaattggtcggcggttgctgctagcgatggtagtgttgcgtcgggttctggtgacactggtttggttgttctgtcgttggctacggagggtaagagtgtgtcgcctaagattcctggtggttcggatctgactttgactgcgtcggatattaaggattttgatgagactgctgagatgtcgacttggtcgtgtttgatgcctggngtggcgaattcggaggatactctggtgttgcgtcgtcctgagactgagtgttgcgctactgacgtgccggatcgcttggctacgtatgatgattagt

SEQ ID NO: 9280 - DNA, 453 bp, Gossypium hirsutum
  Clone ID: LIB3120-057-Q1-K1-F12
ttctcagagtacgtctgagtggttgttagcgcgacggacactcgtagaaccttagtatatcggtggctgccatcaacggactcctgtggggtaatccgtgtttgcgactgggaagggtaccgattactttgtgtaagtgtttgcgtgtgtttggtccggtggtaattaaggggcctggaacggtgcggggctgccttgctctgggcctttgttgtcgtagtagacgagttatgatgattctgctggtcggactgggttgatatccgtaagtcactctgggggtcgagatctcgtttggtcgggtatacatttgactcgggtattaagtccgatgtacattgagagcaccacacagcgatattcaaacagtccggtgcaaatacggatacagtcgcccttcgcgcgaaaccggcacttggctataaccctatataatacatgagttggaagtac

SEQ ID NO: 9281 - DNA, 403 bp, Gossypium hirsutum
  Clone ID: LIB3120-057-Q1-K1-F9
cgtgtttctcagacgtacgtctgagtggttgttagcgcgacggacactcgtagaaccttagtatatcggtggttgccatcagcggactagtcctatgtggtcagtggtagcggagtcggtattgtatgatacctgggctaatggtcctattcatagtgttatgtaatcttaaggaccttgatggcgaggttgctccgtgtggtgtggtcgtattggattcatttccctggaatgaccctcctggctctacgtttacgaattggccgttatggtttagtcgaccatgcgttgattgtggcgccttcggttcttgatgatctggtgacgactattggtagtaatactattgcggatggtggtgttattgctaagcatcggttgtcgacgttatactgacgatgct

SEQ ID NO: 9282 - DNA, 317 bp, Gossypium hirsutum
  Clone ID: LIB3120-057-Q1-K1-G10
tacgtctgagtggttgttagcgcgacggacactcgtagaaccttagtatatcggtggttgccatcagccgactgctgatcggggcgattggccttgcgtgttctgatacagttgacttgagtctcgcattaagtccgacgtacagtctgagcacctcacagcgatattcaaacagtccggtgcaactacggctacacgtcgacgtcgcgcgacacggccacatgccgataaacattatatagtacctcacgttggaagtccaacgcgccaagttcgcggcgttcaccgagcgagtccgtgcataccaaccgcgccgc

SEQ ID NO: 9283 - DNA, 398 bp, Gossypium hirsutum
  unsure (1)..(398): unsure at all n locations; Clone ID: LIB3120-057-Q1-K1-G11
gtttctcgncgtacgtctgagtggttgttagcgcgacggacactcgtagaaccttagtatatcggtggttgtcatcagcggactgtatattgatactttgtttgttgatcttttggtgacggctattccgcttgggctattattgaatgtcgcgacgcctctgcgtatttactgtagtgttgttcgtcggctggttaggttgcatccgttgatgttgattggatcgtttaatgttggaccggtgagaaactttaaggtacatagttggctacacggggcgattattatgacgctattatgggtcatgagttagtgggtgcagcatacggtgttgccgttggcgacgacagagttattgcggacctatattactattggttgaagggcgcctctgggcg

SEQ ID NO: 9284 - DNA, 460 bp, Gossypium hirsutum
  Clone ID: LIB3120-057-Q1-K1-G12
tttctcagagtacgtctgagtggttgttagcgcgacggacactcgtagaaccttagtatatcggtggttgccatcagcggacttgagtctggcattaagtccgacgtacagtccgagcacctcacagcgctattcaaacagtccggtgcaactacggctacagtcgcccttcgcgcgaaaccgccacttgtctataaccttatataatacatgagttggaagtacaaagcgcaaagttcggggcgttcaacgagcgagtcaatctataccaaccgtgccgtgtctatcgtttgtcccttagctgggaaattcgctgcgttagtcgtaccaacgaactggttaatgtgtggggagaggtggcccgtgcaccgggtgtctccttgtccttctgtctatcgatctgtcgtgtctggctgcctggtcgtggtgagtggcactagtctatctaaaggtggcaaca

SEQ ID NO: 9285 - DNA, 416 bp, Gossypium hirsutum
  Clone ID: LIB3120-057-Q1-K1-G9
tacgtctgagtggttgttagcgcgacggacactcgtagaaccttagtatatcggtggttgccatcagcggactggcgtttcgttggttggtgctgtgtcggtttcatctggtcttgctgttgtgcgtgtgtttgtattgctgcttgttgattctgatgattcgtagattggacctgattgggtctgtcttgatagtgagccggttggcgatgtggtgatggtgtcgattggattgctgtgttagctgtaggctgttgtgtcgattctgactgttgttgagtgcctggtttatgttgatgtgtcggttgttgagactattaggtcgattgtgggtgagggtttgatgatggtgattagtatgattttgattatgatggtgttcgatttggtgatggtttttattgctgttaaggctg

SEQ ID NO: 9286 - DNA, 270 bp, Gossypium hirsutum
  Clone ID: LIB3120-057-Q1-K1-H10
agtacgtctgagtggttgttagcgcgacggacactcgtagaaccttagtatatcggtggttgccatcagcggactggtggcgcgttgattatatctggggctagctcgttgtattcctcgcttgttaaggctgaggtgcgtgttcatcctgcggcggctgaggtatcgattaatgcggttaacaatgttcatcttggttagcgtcgtgatatagcttcttctgatctgacactgaacgtctcgcacgctatgcggcctgatcatcggtgt

SEQ ID NO: 9287 - DNA, 328 bp, Gossypium hirsutum
  Clone ID: LIB3120-057-Q1-K1-H11
tttctcagagtacgtctgagtggttgttagcgcgacggacactcgtagaaccttagtatatcggtggttgccatcagcggactgccaccggacatactgcagatgcggctggtccccgggtgttagatgcatatttctctgtaggtatactacattggagtgattcaacactcggaccatgataggttactgtaaagctgagcactgaggagtttgacaagttgacagtgtcagcggcctatagttaaggacttgacacccgcgttcgtactgcgtgtggtggatatcgggctgattagtacctagagggctacaacgacttgagtct

SEQ ID NO: 9288 - DNA, 365 bp, Gossypium hirsutum
  Clone ID: LIB3120-057-Q1-K1-H12
tttctcagagtacgtctgagtggttgttagcgcgacggacactcgtagaaccttagtatatcggtggttgccatcagcggactcatagttagggtatgtcgtatttgtcgtttgttggtatttcgtagggggcgtttgtgtacgttgagctggcggttggaccggctgatgaggtgattgctgtatggacagttgatgaattttgttgtttgtcgaatcggtggttgggtgtggactttctggctgttgagtcgactggggattgtcctggtgtttaggctgctattaggctggcggaattgtcgtcgattggcgctcatgttgggctggttgctattactggggcgtgtgtggtgcctttggtg

SEQ ID NO: 9289 - DNA, 217 bp, Gossypium hirsutum
  Clone ID: LIB3120-057-Q1-K1-H9
tacgtctgagtggttgttagcgcgacggacactcgtagaaccttagtatatcgctgggtgtcatcagcaggatactgatcatagtcattattcctggagtaagatctcgggtgctacggctatgcatgagtgataggtgtcgacgcttacgttagattctcaagtacatgtatgttatgatgaattaagttaatgatttactgtgtgatggtgctac

SEQ ID NO: 9290 - DNA, 407 bp, Gossypium hirsutum
  Clone ID: LIB3120-058-Q1-K1-E5
ctgcagcacggtcccgcggtcgccagggcgaccgatacattcagactcccagcccaccggccgtccttactatttgagcctgagcgagcaactgtgaggcgggcggaccacgcgggcgacgagggtggctgccaacacgctgatcgcactggggttgctggccgggtgcgggcgctccaccgaaggcaccgtgtcgatcaccaccatgccgcggcctccgtttaccatcacgaccaggaccgatcctccggtgatcgccgttctgaccacatccactgcctgccccatatcattatccaggtatttcccactcggggctcgaacgttctggatgtctggctgacacccgatgcgctgacgattacgtgcgcttactacaaccaactcgacgaggtcacccaaaaggt

SEQ ID NO: 9291 - DNA, 362 bp, Gossypium hirsutum
  Clone ID: LIB3120-058-Q1-K1-G2
gcaaggtcgcgatgaatccggggcgggcgtcggcacacgaatgaatcattgcgcgcaccgccccgtcagtcgatcgacggatagttggccaaaacgaacactactgagtgaatggacttctaccatccgccgtatgcggaacccgacctacatcgcaatcgcatcagtggcagtgctcacagccgcctgcggtgccacaccggaagctgccaaaaccagcacctctacggtcaccaacaccgtcaccgtagctgcgcctcaagcaacgagcggtccggcgcctgaggtcgtcagcgcgacgtggacaatgcccaatctgattggcaccaatcttcatcacgcacagaatgagattcaacgca

SEQ ID NO: 9292 - DNA, 408 bp, Gossypium hirsutum
  Clone ID: LIB3120-060-Q1-K1-A1
cttgttttctcagctcagttcccatggctttcgcttcggttttccgtaaatcagctaacgcgttggctccactcgcgattcgactcacccgagtccagaggaactaccactcttcgatcttcagggctttgaaccatgggttacagtctcagaaaccggccgttaaccgtttttacccaaatagcttccatttctctaccgccgttgcttccaagaaaccctcttctgatgagtctctcatccgagttcttgagtccgagattcagtttgctgagggtgatagctctgatcaggttgtaggaactcctagtggattcccttttgaagtcgaagataaccctgggactcaaattgtaacattgacaagagaatataatggtgagctcataaaagttgatgttcacatgc

SEQ ID NO: 9293 - DNA, 456 bp, Gossypium hirsutum
  Clone ID: LIB3120-060-Q1-K1-A10
cccacgcgtccgcccaaaataagaagaaaaacaaaaatggccatggcaatggcgcttcgacgactctcctcttccattgacaagcctctccgtcctttcttcaatgccccttccctctattacatgtcgtctttgccaaatgaagctgtgtacgagaaggagaaacctggcgtcacttggccaaagcaactgaatgctccacttgaaaccgttgatcctgaaattgctgacatcatcgagcttgaaaaagcgcgccaatggaagggacttgaactcattccatcggagaacttcacttcggtgtcagtgatgcaagcagttgggtctatcatgaccaacaagtacagtgaagggtatcccggtgctagatactatggagggaatgagtacatcgacatggcagagacattgtgtcagaagcgtgctttggaagcattcacgttagatcctgaaaaa

SEQ ID NO: 9294 - DNA, 421 bp, Gossypium hirsutum
  Clone ID: LIB3120-060-Q1-K1-A11
cccacgcgttcgaagaatactgttaaaagcatatgcgtcaagtcgtcaatggtcaatagacacagaaatggcgaatccctcatgtgcttctcctgcttctagggaacctcaagcactgtcttcttccgatggtgccactacggtgagacctggtgagcgatctacgccgtacgcatctaacgttatgcgctttctagaaagcgtcgggatttccaatcccatcccggacaattacagttcagaagactcttattctgatttcttatgtaaccaccttaagaccgacactgtacgacgtggacacatcacctgcttcaccaccgtctagccctctatactcaattcgatgggtgggttacacggacgggtaattgcagcaatattcagaaagagtggcgattgcgacagctaaaaacggggt

SEQ ID NO: 9295 - DNA, 431 bp, Gossypium hirsutum
  Clone ID: LIB3120-060-Q1-K1-A12
tcgcccacgcgtccgcccacgcgtccgctttttcccaaatagccatggctatggcgatggcgggaactgcaaccttcagtatctcatcagctacttcaatcttccggacttcatcttcacttaaattctcttcaaaaccaatgcttattccaatgcgtttttctccaaaaacccaatctcctcccagaactctccggatttacgctttgactagtaacgatatcaaagtgggtactaaccttgaagttgacggtgctccttggcgaattttggagtttcttcatgtgaaacctggaaaaggggctgcatttgtgagaaccaaaatgcgcaattatatcactggaaacaccgtggagaaaacgtttcgagctggaagtacgattgaggaggcaaacgttttcaaggaatcgaagcagttcacatacaaagat

SEQ ID NO: 9296 - DNA, 450 bp, Gossypium hirsutum
  Clone ID: LIB3120-060-Q1-K1-A2
cccacgcgtccgaggaaatcggaccatttcggattaataaaactggctcatccctttatcttaacaaatattcatggaatatggaagcaaacattctattcctggaatcacctgctggagttggattctcctacacaaatacgagctccgatcttaaagactctggtgacgaccggacagctcaggatgctcttatatttctcaccagatggatgtcaaggtttccggcctacaagcaccgagaattttacattgccggagaaagttatgcagggcattatgttccccagttggccaaaaaaatccatgattacaataaagctcactcaaatccaatcatcaatcttaaaggatttatggtaggaaatgctgtgacagacaattactatgacagtattggaacttgtacgttttggtggagccattccatgatatcagatagaacatata

SEQ ID NO: 9297 - DNA, 379 bp, Gossypium hirsutum
  Clone ID: LIB3120-060-Q1-K1-A3
aaaaattctcaagcaagatcttgctgctgatttttctggaggccggctaccatgttcttgatgaatctacacattttagcagtgatcttcagccatcatccaagttcctcaggaagcagagcatagggattctcgaacttgggattttgagtgcaaagaatttgcagccaatgaagatgaaggatggtaagttgactgatgcatattgtgtcgcaaagtatggaaacaaatgggtgaggactagaactcttcttgatactctgtatcctcgatggaacgagcagtatacttgggaagttcatgatccctgtactgtaatcaccattggagtgtttgataattcccacaccaatgggagcaaagatgatgcaagggatca

SEQ ID NO: 9298 - DNA, 272 bp, Gossypium hirsutum
  Clone ID: LIB3120-060-Q1-K1-A4
ctgtgcgtgttaacaatggcgatgactgtaaatgccgcagtgtctttaccatcttccaagtcatgtaccctgtcatttaaaaactcagtcactgtccctgaaagaatcaacttcaacaagagtgttttgtgcccaaaaaatgtcagccttggtggaaatgtggtttacattagagctgatgtcactacagaagctcctgcaaaagcaccaataatttccaagaaagatgatgagggtattgttgtgaacaagttcaaaccaaaagaacccta

SEQ ID NO: 9299 - DNA, 452 bp, Gossypium hirsutum
  Clone ID: LIB3120-060-Q1-K1-A5
aaatgtcgaagcgaggacgtggagggtcagctggaaacaagttcaggatgtcactgggtttaccagtggcagccacagtgaactgtgctgataacactggtgctaagaacctttatatcatctcggtgaaaggaatcaagggccgtctcaaccggttgccctctgcttgtgttggagatatggtgatggctaccgtcaagaaagggaagcctgatctcaggaagaaggttttgcctgctgtcattgtgagacaacgcaagccatggcgcagaaaggatggtgtttacatgtactttgaagataatgcgggtgtcattgtgaatccaaaaggagaaatgaaaggttctgctataactggtccaattgggaaggagtgtgccgatctttggccaaggattgcaagtgcagccaatgctattgtttaggaagtcaaaatctgtgctttggactat

SEQ ID NO: 9300 - DNA, 444 bp, Gossypium hirsutum
  Clone ID: LIB3120-060-Q1-K1-A6
cccacgcgtccgtttagctgcggcttatataggcgaatccatggagggtcatcattgactagtttttgtttttgaaatagtctagcccttttttagcttagcttggtccaatccaatgtatgcgcaactcaagataatctacttacttagggaccataaatatacaaatacgacgatctagagtaataacaaaaaagattacgatattagagaattgtaataaaaaaaggaaagagatctaattgaaaagatctttttcctaaaattcagggttggtccattttttttattacttatatttatatcatatttaccttcgatcaatattatccgatcaatattatctttatcttgatattgttttgtttattcaatttcaatattatgagtcctaaatagaataggaattcttatggtatcaatttagggtctattattttaaaa

SEQ ID NO: 9301 - DNA, 442 bp, Gossypium hirsutum
  Clone ID: LIB3120-060-Q1-K1-A7
gttcgccggcgaaggtaaaaacaagagcgactcgcctgaagcgacgtcgaacaattcaagtgcaaatctccagaaggcagtgaagagtgaaccggctgagaccgagtcgtctcagccgttaatttccgatccaacggtggagaaccggggtatcaagagaaaagaccgagaaaaggtgaaagggcagacgaagaaaagcaaaacaacggcgaaagagagctccgacgacgccgagaagctgccttacgttcacgttagagctcgccggggacaagcaacggatagccatagcttagctgagagagcaaggagagagaagattaatgcacgtatgaagctcctacaggagttagtaccaagatgcaataagatttcgggcacagcgttagttttggatgaaatcatcaaccatgtgcagtccctacaacgtcaagtggagttc

SEQ ID NO: 9302 - DNA, 446 bp, Gossypium hirsutum
  Clone ID: LIB3120-060-Q1-K1-A8
cccacgcgtccggaaccccaattggttccaggggacagcagatgcggtgaggcagtatttatggttgtttgaggagcacaatgttttggaattcttggttcttgctggggaccatttgtatagaatggattatgaaaagtttatccaggcgcatagagagactgatgctgatatcactgtagctgcattgcccatggatgaaaaacgggctactgctttcggtctgatgaagattgatgaagaagggcgtataattgaatttgctgagaaaccgaaaggggaccaacttaaagctatgaaggttgatacaacaatattaggtcttgatgatgtgagggcaaaagagatgccttacattgctagtatgggcatatatgttgttagtaagaatgtgatgttggatcttcttagagaaaacgcttccggtgccaatgattttggaagtg

SEQ ID NO: 9303 - DNA, 450 bp, Gossypium hirsutum
  Clone ID: LIB3120-060-Q1-K1-A9
caaaccctttaattcaaatgaaccaaaattttgatttttgctagggcttcatttagcagccgccaaaccatcatctaacttgatgatcgatggtgcactagcagtgtccagatcttgccaacgaaggccacgcccatagagatctggtaagctattctttctttttaaaaaaaaacctttaaatccaacattattcttaaaaaacgtagcaaaattcgaagggaaatgcttcaacaccattcgaccctcgcccgtatctccatacttctgagatatttgggcttgcataggtatcgtttcaggtatttttccatttttctcatgcgaaatattgcaaacaaatcgaaaaaaaggaaagaatccaaaaaggaatatgaaaacacctcttaaaaattgctttcgaaatgctcttttttgatatcttgtgtgcgtaaccttacaaagatgaaa

SEQ ID NO: 9304 - DNA, 378 bp, Gossypium hirsutum
  Clone ID: LIB3120-060-Q1-K1-B1
cccacgcgtccggtcccctttgtcgttcagggcagaccacacaggctttaccttttgccacatatatctcttgtttttgtgaaagctccatcaatgagccccatacccccaaattttctctccatttctcaacttcatttccatgtcttggtgagtttcttctcttttagtcttcactattttttcaatgcttacaagtgttaatggcttgttatgtttcaaatccttggatgcaattgattttctgagttggggattattaaaaggctaaactttttatggtaaagctttttttttttgaagatccacgtttggttttggagtaggtattaaaagaccctttattgaaatttccatggatactttacttagaacaca

SEQ ID NO: 9305 - DNA, 431 bp, Gossypium hirsutum
  Clone ID: LIB3120-060-Q1-K1-B10
cgaagattgtgttcagcttgttaaagctaattccatccaaggcaacaaggtgaataatattggtgttgtttacactccatggtccaatttgaagaaaactccttcaatggatgttggtcaagttggctttcacaattccaagatggttcggactgtgagagtggagaagcggattaatgagatagtttacaggttgaacaagactaaagtggaaaggaaacctgatttgaaagctgagaaagaagcagtttatgcatcggaaaaagccgagagaaagcaacagttgagggaaaaaaaacgccgagaggagatgcaaaggcttgaaaaggaaagacaagcagaaataagaagctacaagggtctgatggtctttgaaaagatgacattcaacaaacaaattgcagcaacaagcaagtctttccatgaagtag

SEQ ID NO: 9306 - DNA, 325 bp, Gossypium hirsutum
  Clone ID: LIB3120-060-Q1-K1-B11
cttttagacactcagctttcttaatgtttcttacccacatcaatacttggatctgggtgttgacttatttacgtgtgcaagggccccatacatacatttcgataattgtgtcatttacattgtcggtgctgcgagccccaaaatactcagcccattcaacttgatgaagcgtacgaattgttttatgaaagtataagttttgtctggaccttattgggaccatgttttggggtactggaaagcatctaaggaacgtgcagacaagttaaggctcttgaaatacaaagacctggttgaagatactgtctcggatcttaagaaaaca

SEQ ID NO: 9307 - DNA, 451 bp, Gossypium hirsutum
  Clone ID: LIB3120-060-Q1-K1-B12
tcgcccacgcgtccggtctgcctctgctttcccagtcaccaggaaggccaacaacgacattacttgtctcgcaagcaatggcggtagagtgcaatgcatgcaggtgtggcctcctactgggaagaagaagtttgagactctctcatacctccccgatcttacacccgtgcagttggctaaggaagtagattaccttcttcgctcaaaatgggttccttgcttggaattcgaattggaggagggattcgtgcaccgtaagtactcgagcttacccacgtactacgatggacgctactggaccatgtggaagctgcccatgttcgggtgcaccgactcggctcatgtgttggaggagcttgaggaatgcaagaaggcataccccaatgcattcattagaatcattggcttcgacaacgtgcgtcaagtgcagtgcattagtttcattggctac

SEQ ID NO: 9308 - DNA, 414 bp, Gossypium hirsutum
  Clone ID: LIB3120-060-Q1-K1-B2
cccacgcgtccgattcaaaggaaattgaaactcgctcaggtccataaacaaaggaaagcaaagagaaagaagcttttcatttcaagggttttagcaatggcaaccaatacgcaagagcagcaatctcaggctggtaggcaccaggaagttggccacaagagccttttgcaaagtgatgctctttaccagtatatcctcgagaccagtgtgtatccgagggagcctgaacccatgaaggagctcagagagttgactgccaagcacccatggaaccttatgacaacatcagccgatgaaggccagttcttgaacatgcttcttaagttgatcaatgccaagaacaccatggagattggtgtctacactggctattctctcttagccactgcccttgctattcctgatgatggaaag

SEQ ID NO: 9309 - DNA, 422 bp, Gossypium hirsutum
  Clone ID: LIB3120-060-Q1-K1-B3
ggcttacatcaacggatggtgccttaccttctcttatttctgcaccaccacctcctctttttgcgctcgtcgacgacctacattgcggtctttggtcgacgctagccttaactctttttcttctactccgactcttatacaagaccgcccggttttcgctgcccctgttcctttgctcaccccgagagaagagatgggaaacaagttctaccacgaagccattgaagctctcaagaaacttctcagtgagaaaggagaactgaaagctgaagcagctgtaagggtagatcaaataacagcagagttaaacacagcatcagctgacggcaaaccatctgactcttatgttgagagactgaaagaaagcttcgtttacttggacaaagaaaaatatgaaaagaatcctgctcctgatggcgagc

SEQ ID NO: 9310 - DNA, 437 bp, Gossypium hirsutum
  Clone ID: LIB3120-060-Q1-K1-B4
cccacgcgtccggttccaagtttgttgtaaaccaagctagaaccagcagccaacatggcctcagtagcagcctccaccggtgccggctcccttggcgtctctgaaatgctcggtaaccctctgaatttcagtggtggagctaggtcatcggctccaacaccatccaactcatccattttcaagaccgttgctcttttctccaagaagaaggccgctcctccaaagcccaaggctgctgctgtcgccccggccgatgaagagctggctaagtggtacggtccggacagaaagattttcttgcctgaaggtctgttagacagatcggagatcccagagtacttgaacggagaagttcccggagactatggatacgatccgtttggtctgagcaagaagccagaagactttgcaaaatatcaagcatatgagttgataca

SEQ ID NO: 9311 - DNA, 447 bp, Gossypium hirsutum
  Clone ID: LIB3120-060-Q1-K1-B5
cccacgcgtccgcccacgcgtccgcccacgcgtccgcggacgcgtgggcttttttacttagtggaaactgaaaaaacccttgagttgctttttcctttttccgatttactgtttgccccactacttttgaaatctcagttttggtttcactttttcttttccatccatcaatccacattttcattagacttttcatccctttcaatgggtatgaaaagggcagaaaagcaaccaacttttctgcttttaaataaactttgattaactcttcaaggggttgtcaagttttccctttgcttgttttttttttagggtcacaatggaagctgcttttgggttccataattagcagtgggagataaccccacttctttttgtttcttataattgcatattctttgcatctagtcggtttccttttccttttttttttgtgtgttaattata

SEQ ID NO: 9312 - DNA, 420 bp, Gossypium hirsutum
  unsure (1)..(420): unsure at all n locations; Clone ID: LIB3120-060-Q1-K1-B6
cccacgcgtccgctgatattggagatagcaccaggtgcgaagaacatgttcagtttcttgagggagtcagaggagattcctcagaataatccaaagctcaaagctcatgctgtcaaggttctcaagatgacatgtgagtcagccatacaactgagagagaaaggggaagtggtagtggctgatactactttgaagtatttgggcactgtccatgtcaagagtggtgtcaaagacccccatttcgaggtggtgaaagaggcactcttaaggacaattgaagaagcaattggagaagagaaatggaatgaagagatgaagaatgcttggggtgaagcttatgatcaattggctgaagctattaaggctgagatgaagaaccaccatgatgaaactgcttaattacccttttacttncttcaa

SEQ ID NO: 9313 - DNA, 372 bp, Gossypium hirsutum
  Clone ID: LIB3120-060-Q1-K1-B7
aagagtcttagcctatgttggtttaatgactaaattatgttttaattgtgtttcatttgaaggcagaaggaatatttcggattgatgccgaaaatagtcaagaagagtatgttcgagacaagttaaacaaaggtatcttaccgcacggaatcgatgtccattgtttagctggtttgataaaggcatggtttagagaactttctaatggagtgctcgattggcttacacccgagcaagtgatccatttcaacaacggaaaacaatggctttaacctggtaaagtgctttctttaacaaaagcttgtttacttggatgggcttataatttgattgcaaattgttgtggagtttgaccattccaccaaattgaat

SEQ ID NO: 9314 - DNA, 425 bp, Gossypium hirsutum
  Clone ID: LIB3120-060-Q1-K1-B8
ctcctccccggcacaggccaacatggtggcccccttcaccggcctcaagtctgcctctgctttcccagtcactaggaaggccaacaacgacatcacttctcttgcaagcaatggtgggagagtgcaatgcatgcaggtgtggcctcctcttgggaagaagaagttcgagacactctcatacctccccgatcttacacccgtacagttggctaaggaagtagattaccttcttcgctctaaatggattccttgcttggaattcgaattagaggagggattcgtgcaccgtaagtactcgagcttacccacgtactacgatggacgctactggaccatgtggaaactgcccatgtttgggtgcactgactcggctcacgtgttggaggagcttgagaattgcaagaaagaataccccaatgcattca

SEQ ID NO: 9315 - DNA, 449 bp, Gossypium hirsutum
  Clone ID: LIB3120-060-Q1-K1-B9
ctactccatgtatactcccaaaatctctaaaaagggaaatactagtcctttcgagggcaactgaaagaggagaaaaaaaaatctattggttttgatttgtgaggatggtaatcgatacaaccaacgtcaagggacttacgggacgctggggcatggcagcaaagacatgcgacacatgttaatcagcggcagcggctattttctgtcgttctgattccgcttttatgtgcctcagctgcgattccaggatccactctgctaatgacaggcttgtttcttgtcgtcacaagagggtgtggatgtgtgaggtgtgcgagcaggccccagctgccgtcacttgcaaggccgacgccgctgccctttgcgtcgcctgcgattccgacatccactctgctaatcctttggctcgtcgccacgagcgtgtccctgtccagcctttctttgactct

SEQ ID NO: 9316 - DNA, 384 bp, Gossypium hirsutum
  Clone ID: LIB3120-060-Q1-K1-C1
tctgtctctaccactgaaaacaaagaaaaaatggcaacggagatggcccttgtgaagcctatctgcaaattcagtacaagcagtccaatttttagcaactcccgatatgggaagttcaccaccgtcagaatgtcatctacttcccagtcaacaacaaaggccgccgcgaagggtggcaagaaagctgccaaaaccgccatcaaagagacccttttgacaccaaggttttacacaaccgactttgatgaaatggaggcgcttttcaacactgagattaacaagaaccttaaccagtccgaatttgaggcactgctgcaagagttcaagactgattacaatcagactcactttgtaaggaacaaggagttcaaagaaactgctgat

SEQ ID NO: 9317 - DNA, 434 bp, Gossypium hirsutum
  Clone ID: LIB3120-060-Q1-K1-C10
cccacgcgtccgcgaaaaggttatagagaaattgcttagaaaccacctgtgttcttccctggagattttgatctgtttttctccttcattctcatattcttattgcttctagtttctttgagacgtatcgaacgatcggttttctgattttaaacactacatcgagatatattcttcttctcaaacatcgtcatgttgtcattaccttcaacttcctcatacatttctagaaagaaatatgatgttttcttgagttttataggtgaagatactcgcaaaaacttcaccgatcatctctatgctgctctaaagaggaatgggatcgtcactttcagggatgacccaaacctggaggccggagaagagatctcattaaaactccttaaagcaattcaacaatcatggtgctcggaatctgttttttaaaaacttat

SEQ ID NO: 9318 - DNA, 380 bp, Gossypium hirsutum
  Clone ID: LIB3120-060-Q1-K1-C11
ggcacactttcggtgatttatgcacaaatactgaaggtgcttgataaagggaacctactggatattgttgaagcaggatgggacattattgacatgaagctatctgaaacgggggctaaggccaaggtttaatacattgatctggagaagcaaccgagaccctaacagaaatgcatggtcacactctatgcaatatacgattctgactctaatgcatggtaaccactgtgcaactgccagcattggtgaacaagagaccaccttagaacaacggcaggcggtgatcatagacatctaagagtggaaagacaaaaacaacgcgtacaactgggttgtagctgtatacgtgcaaacactgataagtatcagcatatatatca

SEQ ID NO: 9319 - DNA, 425 bp, Gossypium hirsutum
  Clone ID: LIB3120-060-Q1-K1-C12
tccacgcgtccggaaagagaaggccggagtgaaagacaagacacagagagagagacagagagagagatgtcgggaggaatagcgcgtggttgactcgccgaggaacgtaaggcatggaggaagaaccatccccatggtttttttgcgaaaccagagacgttgcctgatggaacggtcaatttgatggtgtggcattgcacgatccctggtaaagcaggaactgattgggagggtggctacttcccgctcacgctccatttcagtgaagattatgccagcaagcctccaaagtgtaaatttccccagggctctttccacccaaatgtttatccatctggtactgtttgcctttcaatcctaaatggtgatagtggttggagaccagccataactgtgaagcagattcttattggaatccaagatct

SEQ ID NO: 9320 - DNA, 450 bp, Gossypium hirsutum
  Clone ID: LIB3120-060-Q1-K1-C2
cccacgcgtccgagctaattgagctccatttccctagtaaacagagttctttttttcacagcaatggcagccatgaactccagtgttttggcatgcaactatgctatctcaggcactggatcatctgagcttaatgccaagcttgcttcagcaccatcagttgcttccccagttatgtgcggtggtcacaagttgcctgtgatcagagcccagcaggctaaattttctgattccaaaggatcaggtgccagtgaaggaagaagagctgctatgctctacttggcagctggccttttcaccacagctgttgcttcttctgcaaatgctggggtcattgacgagtaccttgaaaagagcaaagctaacaaggaattgaatgacaagaagaggttggcaacaagtggagcaaacttttccagagcatacactgttcaatttggcacttgcaag

SEQ ID NO: 9321 - DNA, 454 bp, Gossypium hirsutum
  Clone ID: LIB3120-060-Q1-K1-C3
cccacgcgtccgaattcagttaacaatttcacagttgttttcttcagtctctctctcagccatggctgcagccatctccaccgtcgctgccgctgccgccgccaaccgagctctgggagtgtcagtcccaacctcagctttcatggggaagaaagtgagctcaagattcaacagcaccaggcaggttccttcgggaagttttaaggtgatggcggcggagaaagagatagacgaagagacacagaccgaaaaggaccgatggaaagggttggcttacgatatttcggacgaccaacaggacattactcgagggaaagggatggtggattccttgttccaagctcccatgaatgatggaactcactatgctgtcatgagttcctatgaatacctcagccaaggtcttaaaacgtacaatttggacaacaacatggatggtttctacattgctcct

SEQ ID NO: 9322 - DNA, 360 bp, Gossypium hirsutum
  Clone ID: LIB3120-060-Q1-K1-C4
cctggacaccgtgactttatcaagaacatgattaccggtacctcacaggctgactgtgctggggtcattattgactcgaccactggtggttttgaagctggtatctctaaagatggtcagactcgtgagcatgctttgcttgcttttaccctcggtgttaggcagatgatttgctgctgcaacaagatggatgcaacaaccccaaagtactcaaaggcaaggtttgatgaaattgtcaaggaagtctcttcttatcttaagaaagttggttacaaccctgagaagatcccatttgtcccaatctctggttttgagggtgacaacatgatcgagagatctacaaaccttgattggtacaag

SEQ ID NO: 9323 - DNA, 374 bp, Gossypium hirsutum
  unsure (1)..(374): unsure at all n locations; Clone ID: LIB3120-060-Q1-K1-C5
cccacgcgtccgcccacgcgtccgcaaaacctagcacaactgcatttccttctagcggtttgggtgcatttggggattttcaggatgcttcaaaaccaagcacaatggcgtttccttctagcggttttggttcaacttcgaatacgaatgattctggtatgcctgcaaagaatgttggatctcaaagtcaaccatctgttcaaagctcgggcggtgatcctctcgatatgttcttctcgtcatcttcagcttctggaggttctgctcaagcatctggtggaggtggagggcagcaattttctgaagttgatgattggggattggattctgagtttggaggagcangaggaggaaatgatggtggctcgacaaca

SEQ ID NO: 9324 - DNA, 453 bp, Gossypium hirsutum
  unsure (1)..(453): unsure at all n locations; Clone ID: LIB3120-060-Q1-K1-C6
cattctcatagctttcatcatcttcaaatggctaaatcacttgtcattgttatgttatgttggctcttagtaattgttttactgggagaaatccaggcatcaagcccttctcaaaaacaaagacaaggcaaccatggaaatggaatgtatggtgccacccaagggagccttcgtcctcaagagtgtggtccaagatgcacacagagatgctcagctacagcatacaagaaaccatgcatgttcttctgccaaaagtgttgtgccaagtgcttgtgtgtgcctccaggcacttacggcaacaaacaatcttgcccttgctacaataattggaagaccaagagaggaggccccaaatgcccttagatccctaactatatctatgttgntctctagttaaagtgcttaattatccaattataggccatcgatcttcttcttttttccctaaatgat

SEQ ID NO: 9325 - DNA, 399 bp, Gossypium hirsutum
  Clone ID: LIB3120-060-Q1-K1-C7
cccacgcgtccggagactcttttgtatacctttagcatatagtaatagtaagcagcaatagggatggcgtcctccatgatcggaggcggcaaccattgccaccgtgaaccgctcctccccggcacaggccaacatggtggcccccttcaccggcctcaaatttgcctatgctttcccagtcaccaggaacgccaacaactacatcacttttcttgcaagcaactgttggagagtgcattgcatgcatgtgtggccgcctcttgggaagaataatttcgagactctctcataccttcccgatcttactcccgtacagttggcttatgaagtacattaccttcttcgctctaaatggattccttgcttgtaatatgaattatatgagggattctttcaccg

SEQ ID NO: 9326 - DNA, 450 bp, Gossypium hirsutum
  Clone ID: LIB3120-060-Q1-K1-C8
agaagagaaagaacaaagcaaaaggaaaaatttaagaagcctttgtttggggttcttcaactgagctttccatatattcatccatggcttctaagcttcttttgattgctgtatttgttcttgatctcattgcttttggtttagctgttgcagctgagcaaagaagaagcactgccaagattgtgcaggataatgaaattcaatacaactattgtgtatataactcagacatagcaactggctatggtgttggtgcatttttgttcctcatggctagccaagcccttataatggttgccagccgatgcttttgctgtggaaaggctttgaaccctagtggttcaagggcttgggcagtcatccttttcattgtttgctggttatttttcctaataaccgagatatgtttgttggcgggatcagtacggaatgcataccacacaaaatacc

SEQ ID NO: 9327 - DNA, 432 bp, Gossypium hirsutum
  Clone ID: LIB3120-060-Q1-K1-C9
cctggatcgaatcgctgttgtcggcgacctccactatgattggaaccttgaacaagatgcaggcgcccttcaatcccttaagccggatttggtgctctctcacaggcaggttcctctttcctctttatacaaccaatgggtgctatgatttttaacttttggagtctttcgtctaatatttttgcagatccaattggggattttggtaaagaaaatatcaaactagttcaagatgacgctgctataaactgtcccaaagcacttatttaggggaatcatgattcttggagcactcagacagatttcttatcagaagaaagatctacatcaacttcagctagaatgtctagctcaggaacatgtaagttacaaactactggactctcctttactaaagatgagccttgatggtggactgtcattttcatgtgg

SEQ ID NO: 9328 - DNA, 430 bp, Gossypium hirsutum
  Clone ID: LIB3120-060-Q1-K1-D1
cagcattgaaagtcttgaaaagcattggcaagttgggagaactaaaacgaccagtcgaggttattgcatttagtgatgaggagggagtgaggtttcaatctacctttcttggcagtgctgcagtagctggaattttacctgttacagcattgaagatatctgataagagtggtgtgacagtgcaagatgctctcaagggaaattccatagaaattacagaggatagcctgttggggttgaagtatgatcccgcatcgatttggggttattttgagcttcacattgaacaaggacctgtactagaatgggttggttttcctcttgctgtagttaaaggcattgcgggacaaacacgaatgaaggttacggtgagaggttcacaaggacatgccggaacagtgccaatgtcaatgcgtagggaccctatggc

SEQ ID NO: 9329 - DNA, 430 bp, Gossypium hirsutum
  unsure (1)..(430): unsure at all n locations; Clone ID: LIB3120-060-Q1-K1-D10
catacttgttgctctctaaacctgcaaagggtgttgagaagaccttttctcttctctccctgctccccaaaatcctccctatctacaaggaagttatatctgagcttaaggcagctggtgcttcctggattcagtttgatgaaccgacccttgtcttggatcttgactctcacaaattgcaagcattcactgctgcttatgatgatttggaatccactctctctggcttgaatgtattgatcgagacctactttgctgatcttactgctgaggcatacaagacactcattgggttgaagggtgtcactgcttatggtttggatttggttcgtggagcccagactcttgatttggtcaagagcaatttccctaagggcaagtacctctttgctggagttgtggatggaaggaacatttgngccaatgatct

SEQ ID NO: 9330 - DNA, 426 bp, Gossypium hirsutum
  Clone ID: LIB3120-060-Q1-K1-D11
atcatttctctttgcagcaatgtgtgaaaccaaaagcttctacttgtggcttctccaagtcattggcttgttaggcattcttgctctttgtctatggctagccatgcgtcctaaaagccccaactacaccatcgtcaacttttcaatcccgggggcaaatacaagcaacgaatccgatcacggttccatacaatacgaactcgatatccaaaacccaaaccaagattccggtatatactacgaagatatcttccttatgttctatcatggggaagataaagttgggagaaaaactataccttcgttttatcaagggaaggataaaactcgtcaagtgattgatcaagtggatgttgagacccgcttttggactgttcttcgtaaagcaataatgaatgcaacggctgaattaaaggtcgatttgtc

SEQ ID NO: 9331 - DNA, 445 bp, Gossypium hirsutum
  unsure (1)..(445): unsure at all n locations; Clone ID: LIB3120-060-Q1-K1-D12
cccacgcgtccggtacagaaagctacatgttcttcaactttaaaggattcgaagtttccagggtatcttatgcttaatcctggtggaaccgagtatgaaggaacttcgattgtgaaggtttgttcatatacttattgttcactcaatggtcatcatcatgctcctttgcctccattgaaatgtttcttgaaagcaagaagacgttcaatgaaagtacaaagaagcatgaaggtggaagctttgagcccaagaaaggcttgtggtgatggaacagaggaattgaactcctccatggacttttttgttgaaatatatggcaaaaacaaaggtgaggatagttctgaatgtggcaatgaaacagctccagagcctgaaactgagtcacgaggttcactaaacgctgagattgattntggtgaaaatgttgaacatggcagtgaagttg

SEQ ID NO: 9332 - DNA, 450 bp, Gossypium hirsutum
  Clone ID: LIB3120-060-Q1-K1-D2
cgggtataaagtccaaaccgacccggtaaagaatactattgacccggattgtggtggtgttggtatacttggtattgcttgggcttttggtggcatgatctttatccttgtttactgcactgctggtatctctggaggacacatcaacccggcggtgacgtttggactgttcgtggggcggaaggtgtcactgatccgagccctgttgtacatggtggctcagtgcttgggtgcaatctgtgggtgtgggttggtgaaggctttccaaaagacttactacaatagctatggaggtggtgccaacgagctccaagatgggttcaacaagggcaccggcttgggtgctgaaatcattggcaccttcgttcttgtctacactgtcttttcaaccactgatcccaagaagagtgcaagggattcccatgttcctgtggtggcaccactttccat

SEQ ID NO: 9333 - DNA, 446 bp, Gossypium hirsutum
  unsure (1)..(446): unsure at all n locations; Clone ID: LIB3120-060-Q1-K1-D3
aaacaatgctgctgttttccgcacacaggaaacactagaggaaggttgtcagttaattgataagacatgggaaagcttccatgatgttaagttgaaggatcgcagtttaatatggaactctgatttgatagaatctatcgagttggaaaatcttttgataaatgcctgtatcaccatgcactccgctgaagctaggaaagagagcagaggagcacatgctcgtgaagattttacgaaaagagatgatgagaactggatgaaacacacattgggtttttgggagaatgagaaggtgagactggattaccggccagttcacatgaacacattagatgatgaagttgagtcattcccacctaaagctcgtgtctattaaaactcgtgctgtaatgcanatgggttatgatgatccgacaattcagcccggcataagttatggagaacaa

SEQ ID NO: 9334 - DNA, 334 bp, Gossypium hirsutum
  Clone ID: LIB3120-060-Q1-K1-D4
cccacgcgttcgaccacgcgttcgaacacgcgttcgttagttctagatcgcgagcggcgccctggtttttttatttttatgtgtagttttttttttttttttatttttaatttttgttttttgttattttttttttataatataagtgttttggtacattatatgtttttaaagtgatccttgactttgttgaataataagatgtttgatgtaaatgatgtaatcaaataatcaataaaaaactactttgcatatctttataaaaatattttgccttggactgaatttagatctttttattataacttaaaataataataataatttttaatta

SEQ ID NO: 9335 - DNA, 424 bp, Gossypium hirsutum
  Clone ID: LIB3120-060-Q1-K1-D5
ctagctacccatctccctattctcaatggctttggcaacccaagcctccctcttcactccatgaaccctccgcaccccaaaatgcggcgaccgcatcgccgccgtgttacggaaacaaccaccgttcctaaccgtccctagcttcaagtccccaaaaagcatcatcgccccacgcaccatcaaagccgaagcaaccgaagagaaagccgagacaaccgccacaaaggaagcaccagtcggtttcaccccaccagagctggacccaaacaccccatcaccgatcttcggcggcagcaccggcgggcttttacgcaaagcacaattggaagagttttacgtcatcacatgggagtcacccaaggaacaaatcttcgagatgccaacaggtggtgcagccatcatgagacaaggtccgaacctgctg

SEQ ID NO: 9336 - DNA, 454 bp, Gossypium hirsutum
  Clone ID: LIB3120-060-Q1-K1-D6
ctctaatacacccactgtaaaaaaaaagagatataatttgatcagacggtgaaaatgggtggccttgaaactgagagaacaacaacaggatgggctgccagagatccttcaggagtattgtctccttacacttacactcttaggagcactggtcctgaggatgttttcgttaaggttatgtgctgtggaatctgccacaccgatcttcatcaagccaaaaatgatcttggcatgtcaaactacccaatggttcctgggcatgaagtggttggtgaggtgttggaagttgggtcagatgtaagcaagttcagagttggtgatattgttggcgttggttgtattgttgggtgttgcagaaactgccgaccatgcgactcagacaatgaacaatactgtcttaagaagatctggtcgtacaatgatgtttacactgacggaaaacccacccaagggg

SEQ ID NO: 9337 - DNA, 418 bp, Gossypium hirsutum
  Clone ID: LIB3120-060-Q1-K1-D7
attttgttccatgctggttctctgctagtgctggtgttcctttgcttgctggttctttgttcctctactggtgcttgttctttgttcctcttctccacttctcaaaagcctctggtactttgttcctcttctccccaccaccgatgagtacttcggcggttgaagttagtgatgaaaaagtgaatgcaatgtgggataagagattgactgaaatattttgtgatatttgtattaaagagatattgaaaggcaataggcctggtactcatttcacaaaaaatggatggttgaaaataatgaccacttttgagaaagaaacgggcaagggtttttcacaaagacaacttaaaaataggtgggatgccctaaaaaaagaatggaaagcttggaagaaacttaaaagcgaagatactggtct

SEQ ID NO: 9338 - DNA, 453 bp, Gossypium hirsutum
  Clone ID: LIB3120-060-Q1-K1-D8
aagaaatatttatacaagctaatcaagagcaaaagtcacgcagatcggaagattgagtaagggtgcaacatttcttactgactgtcatggggggaaaaggcgacagcactttgagctggtattttctatccgggtttcttagtttggacatggcatggaagtttatggtgggttttctatgttggcatataaagcaaagtgcttttgctatccaaagactcgtccaattttttcaccgccatcatcgtcatgtccgttccaagttttcctcctttttggcccctcgtgttgaaggcacctaaaaagaaaaaaaaggaagattgaaagtggctaagaagtccccattttatcgaggttcatacagatatagcaattacagggaaatctctcccaggtttggccagcatgatctgttggcttctttttaccattatagagtttacataccttttt

SEQ ID NO: 9339 - DNA, 445 bp, Gossypium hirsutum
  Clone ID: LIB3120-060-Q1-K1-D9
cccacgcgtccgtccacgcgtccgtttctcttttttgagtctccccatcgttcaaaaaagatgtgcaaaggtttagaacaaggagggaacagaagcagttcttgtctgaaacagggtttttcatcagggttggtgaattgtgagctctgtaattccagggtttccttatattgccaagccgatgatgcatatctgtgtaagaagtgtgacaaatgggttcaccaagctaatttcttagctctcaggcatatcacgtgtttcctttgcagtacatgtcaaagcttaacccagagatatcttatcggagcttcacatgaagtgatgctaccaacaatggtgacctcttctgaaacaagccactgttactctgacatggaaacccacctttcaacaacgctgaaaacaccttttctttttctctgactctaaaacttttctcttcttc

SEQ ID NO: 9340 - DNA, 452 bp, Gossypium hirsutum
  Clone ID: LIB3120-060-Q1-K1-E11
cagagttctttttttcacagcaatggcagccatgaactccagtgttttggcatgcaactatgctatctcaggcactggatcatctgagcttaatgccaagcttgcttcagcaccatcagttgcttccccagttatgtgcggtggtcacaagttgcctgtgatcagagcccagcaggctaaattttctgattccaaaggatcaggtgccagtgaaggaagaagagctgctatgctctacttggcagctggccttttcaccacagctgttgcttcttctgcaaatgctggggtcattgacgagtaccttgaaaagagcaaagctaacaaggaattgaatgacaagaagaggttggcaacaagtggagcaaacttttccagagcatacactgttcaacttggcacttgcaagttccctgagaacttcactggctgccaggatcttgcaaagcaaa

SEQ ID NO: 9341 - DNA, 452 bp, Gossypium hirsutum
  Clone ID: LIB3120-060-Q1-K1-E12
gacaaattgaagttaggaggatcggagctcaaagtgacaaggctcggaatcggagcttggtgttggggtgacaccagttactggaacaactttcaatgggatgatcaaaaattgaaggctgctaaggctgctttcaatggaagtcttgattgcggaattacgtttttcgatacagctgaagtttatggctctccgctcgccttatgtgctgaaaattctgaaactctactgggaagatttataaaggaaagagaaaatgataatcccggtgaagaggttgttgttgcaacgaagtttgcagctttgccttggaggtttggtcgtcaaagtgtcatcagtgcactcaaggattcccttaatcggcttggcctttcatcggtagacctttatcaactccattggcctggtatatggggaaatgaagggtatattgatggtcttggcgatgctgt

SEQ ID NO: 9342 - DNA, 373 bp, Gossypium hirsutum
  Clone ID: LIB3120-060-Q1-K1-E2
ctctccccctaaaagaaaatcaatacctgcgaattgtcttagctggttcttgtttggttgttgagaaaatgcaagaaagtaaagaccctgggatcaagttgtttggtaagaaaattcatttacctgctgatggagagatttcaactctctctgttgatgaattcgacaaggctcagtgtgggaacagagtagtagatgatgaagactatgaagaatttgatgatgatgatgatgatgatggtggtggtggtgatggtgatgaagaataagatgaacagaaagacaaaacagatcatgattctttagcagaacagattgctgatactggtctagaagatgacaacatctagccgttctatagagaggtattaac

SEQ ID NO: 9343 - DNA, 377 bp, Gossypium hirsutum
  Clone ID: LIB3120-060-Q1-K1-E3
tttttataatttaatccaaaacaggtctcacctgatgtggcctctatatttgctgctaaacaagattcttaaaacagacgaagatgaagatcgaatgaacaccacaacacgatgctacggttttgagcatcgaatcggccacaaatcgatgttgccacgatcccatttcgttcaagtgagcgaaattatgggattttttttgaagttaccttgggttacaagctgtaattatgaatttgttttaatggtgttttataggttccacatgtaaaccaattgttctcttgggattggggacttgcttgggtggtgaagggggtaactactattggggttaaagaatggagtattgaaaatttaactggacttttgtggac

SEQ ID NO: 9344 - DNA, 443 bp, Gossypium hirsutum
  Clone ID: LIB3120-060-Q1-K1-E4
gttcgtaacaatgtcggtctcacttcaagctgtagctaccctgatgcaaccaatcaaggttgctgcaccatcaaggaccaatgtgctgctcaggtcctcccagagcgtttctaaggccttcggtttggagcctgttggtgctaggctcacctgctctttgcaaactgacctcaaggacttggctcagacgtgtgttgatgctaccaagctcgctggtttcgctcttgctacatctgctcttgttgtctcgggagcaagcgctgaaggagttccaaagcggctaacctacgatgaaatccaaagcaagacatacatggaagtcaaaggaacaggaactgctaaccagtgcccaaccatcgatggtggtgtcgactcttttgccttcaagcctggcaaatactacgccaagaagttctgcttggagcccacttccttcactgtca

SEQ ID NO: 9345 - DNA, 298 bp, Gossypium hirsutum
  Clone ID: LIB3120-060-Q1-K1-E5
cccacacgtgctgaaatatgcacaacctactgcttatagcatgtgtttaggatatatgggggttctagaccagatgtgggacgacaccgaatacacacctggacccgatatatgggcttactgagctcctgaagcactacacttttactgtacagtctaacttctccaaggaaagtgatggcggccgtgtgagatcaaacattgatgagacgccggctgaaacaacgaaagagacacgtaccattatcatcgacaaaaccgcatgttaccagagccgaacgactcctgattcatcgga

SEQ ID NO: 9346 - DNA, 454 bp, Gossypium hirsutum
  Clone ID: LIB3120-060-Q1-K1-E6
cccacgcgtccgcaaaagattatccgtgacaattctcgagtgaaaataggtaagtttcaggctgtagctttattacggctggcgcgtccctcccttactcacctgtttttagggtttcattgatttgggtttgctgagcatcgtcgccccccagaattttctttacttccactttttgccagaacattctgcatctcgatatttggagtcttttgtttcttttaaggtttcatctcaaggcaagcagaaagaagaaccggtttctggtggttctttctaaaccgatcgattcatttctaggtccccagaactttgagggggttagggtttttgctttgatggctctgtaaatgtttctaaattcctgctgttttttgaagggagagcaggaattatctatgtttttagtactctaaggtttagatgtgttagaaagttatgagatattcttctg

SEQ ID NO: 9347 - DNA, 429 bp, Gossypium hirsutum
  Clone ID: LIB3120-060-Q1-K1-E7
cccacgcgtccgcccacgcgtccgcttggatttcgagacagtctccgacttgaagccggcctgtgtttatatgggaatgacatggagcaacatataacaccagtggaggctggactgacctgggccatagggaagaggaggagagcagaaggtggattcctaggagctgaggtaatccttaaacaactggaagaggggccgtcaatcaggcgagttggcttcaccttcaatggtccaccttctcgatcccacagtgagattcatgacgagaaagggaacaacattggtgaaatcaccagcggaggatttagttcttgtcttaagaagaacatatcaatgggatacgtgaaatctgggttacacaaggcaggcaccaaagctaagattttggtaagaggaaaggcttatgatggggttgtcacgaaaatg

SEQ ID NO: 9348 - DNA, 338 bp, Gossypium hirsutum
  Clone ID: LIB3120-060-Q1-K1-F1
gccgaagcttagtcatcatgatggggtgagaggatttggcttcgatcccaccacaaagaaatataaggttgtcgagatatcatataaaagaacaactcctttcacttttagtcaccgtgttgttagatttggcatgcgtcgatctcatcagacggaaacatcttcttcttctttaattgaatctgaggttcatatattgactgttggtagccccacttggagaaatttgggatgttttcctttccgttttatgtggcaaaaatctcaggttttggtcaataagaaacttcattggagaactactactaaccttattatgtcctttgacttggcaactg

SEQ ID NO: 9349 - DNA, 447 bp, Gossypium hirsutum
  Clone ID: LIB3120-060-Q1-K1-F11
cccacgcgtccgcccacgcgttcgcccacgcgttcgctcaaagcctgtaatctccattgctgcgtcatcatccttcttttccaaacccaaactcaaacaaatcccacaactttcccttccaaaactccccaccccaaagttcttgaaaacccaacaaatcccctcactctcctccaccactctcaaatctatctccctcttcacagtcaccactttatcctttggcccaccttctcttgctgcaaaaatagaaaaggccgctcttttcgatttcaacttaaccctccccatcatgatggtccagttcttgttcctcatgtttgctcttgacaaggtctactttaccccactcgggaaattcatggatgagagagatgctgccataaaggagaaacttgccagtgtgaaagacacgtctgaggaagtgaagcaacttgaagaacaagc

SEQ ID NO: 9350 - DNA, 436 bp, Gossypium hirsutum
  Clone ID: LIB3120-060-Q1-K1-F12
tcgcccacgcgtccgcccactcgtccgcccacgcgtccggaagagcagaattttattgcaatgatgaatgaagcaagagagaggcgagctaagttgaatgcggatgccccaactcttcccatggagattagagccgaaaaggctgttgatgccatttacgtctgttgcttcggcagagacccgatagaagaggaagacgagagcttgctaaatatcatgctatgtgcagctttcccaaccgtcaagcgatcaatgatacaaagaatcatcaaggacaaagcaataaaagtagcagaaggtggtgatgatgcagacatcgttccagaaccaaagccattatcaaaggaagctgtacaaatgcaaatgaaagaccttgaattccttaaacaaaacacggagacatgaaagaactgattttaatgaaaaaattggagtc

SEQ ID NO: 9351 - DNA, 413 bp, Gossypium hirsutum
  Clone ID: LIB3120-060-Q1-K1-F2
cccacgcgtacgctatagcatacactactagtacccactactagcaatggcttcctcaatgatctcatcggctaccattgccactgcctctccggcacaggctaacatggtcgctcctttcaccggtctcaagtctgcctctgctttcccagtcaccaggaaggccaacaacgacattacttctgtcgcaagcaatggcggtagagtgcaatgcatgcaggcgtggcctactactgggaagaagaagttagagactctctcatacctacccgatcttacacccgtgcagttggctaacgaagtagattaccttcttcgctcaaaatgggttccttgcttggaattcgaattggaggaaggattcgtgcaccgttagtactcgagcttacccacgtactaccatggacccttct

SEQ ID NO: 9352 - DNA, 325 bp, Gossypium hirsutum
  Clone ID: LIB3120-060-Q1-K1-F3
ccatcacccccaaaaaacaaagcaaattgtagaagatggcaacacaagcacttgtatcatcgtctcttacctactcagtggagactgcaaggcagattcttggagctaaacgacaaattgggtcttcaaggaaaggatcctttgttgttaaggcagcttcgactccacccgttaagcaaggagctgatagacctttatggtttgcatctaaacaaagcctttcatacttggatggcagccttccaagtgattattgatttgaccccttgggactcttaaaaccttgaagtccaagaagggtcattgagcctaaatggcttgccta

SEQ ID NO: 9353 - DNA, 380 bp, Gossypium hirsutum
  unsure (1)..(380): unsure at all n locations; Clone ID: LIB3120-060-Q1-K1-F4
cccacgcgtncgcccaaatctctctccatttttactaatcgaaatagatataaatttgagttggatcccagtttcctttgaaaaggaaaaccccacagaagaaaaaaaggtacaaattttattcattaaacttgaaaaagaaccaagtttttgtattggaggatggcaagtggggatctagagcgaggaggaaggaatgggaagaacagagcaaatagctatcaccaatcatcatctcctttctatgtagaaaacactgataagcaatggacttcatggcttgttccaatgttcgtggtggctaatgttgctgttttttttgtggtgatgtatatcaatgattgccctaacaacaatctgggatttgaaggcagctgcgt

SEQ ID NO: 9354 - DNA, 251 bp, Gossypium hirsutum
  Clone ID: LIB3120-060-Q1-K1-F5
cccacgcgtccggagagaccgaggaaaacctttaccttaaactgattttacatgaaaagatggaaggatggattctgtatatgtgcaaaaactgaatagtaaaaacagtattagattgaggattgggtgtttacaacaaatagggctgaatgctaaacattatcaaaggtaggagaagtatacgaatcagcctaggatagatgtaaatacagctagtgattggtgccttactaagtttaagaacatttata

SEQ ID NO: 9355 - DNA, 452 bp, Gossypium hirsutum
  Clone ID: LIB3120-060-Q1-K1-F6
cagagattttagagagaacaaacaacaatttttgctacatctggggctgtactaaatggatggggctcttcatttctttgtgggggaaagaggagccaagcccttttgggtgccagcattggggccaaaggctcgccctcccctactgctggaactagaaagttgatcgttgtggcagccgccgcacctaaaaagtcttggatccctgctgttagaggtggtggcaacttcattgaccctgaatggctcgatggatcgctccctggagactacggatttgacccactaggtcttggaaaagacccagcattcctcaaatggtaccgagaagctgagctgatccatggacgttgggccatggctgctgtcgtcggcatcttcgtcggccaagcttggagtggcattccatggttcgaggcatgagctgacccacgtgcgatagctccattctc

SEQ ID NO: 9356 - DNA, 449 bp, Gossypium hirsutum
  Clone ID: LIB3120-060-Q1-K1-F7
cttttgtatacctgtagcatatagtaatagtttgcagtaatagcaatggcctcctccatgagctcatcggcaaccattgccacggtgaaccgctcctccccggcacaggccaacatggtggcccccttcaccggcctcaaatctgcctctgctttcccagtcaccaggaaggccaacaacgacatcacttctcttgcaagcaacggtgggagagtgcaatgcatgcaggtgtggccgcctcttgggaagaagaagttcgagactctctcatacctgcccgatcttactcccgtacagttggctaaggaagtagattaccttcttcgctctaaatggattccttgcttggaattcgaattaaaggagggattcgtgcaccgtaagtactcgagcttacccacgtactacgatggacgctactggaccatgtggaaactgcccatgttcgg

SEQ ID NO: 9357 - DNA, 189 bp, Gossypium hirsutum
  Clone ID: LIB3120-060-Q1-K1-F8
tcgccccaaaccaaaacccatttttctcccattgtcttcaccaacacattgattaactttggcggggccaccccttttccttcaggggtttcctcttcaaagtccaaggtcttcaccgctaccccgttgcctaactttggcgccaatttttgtcaccctgttaacatgtctgctgacttgatgccttgt

SEQ ID NO: 9358 - DNA, 446 bp, Gossypium hirsutum
  Clone ID: LIB3120-060-Q1-K1-G1
aaaaaaaatagaacacacaacaatggccgccaacacactaatgagctgtggcatagccaccacatttccttcacttctttcctcatcaaagtccaagttcagtggcgccgccgtatcgttgcctagtgctgttggtaccaatgttggccaccgtgttagcatgtcagctgactggatgcctggtcaacctagaccaccttaccttgatgggtcagcaccaggtgactttgggtttgacccactaagactaggtgagggccctgagaaccttgagaggtacaaagaatctgagttgattcactgcagatgggctatgcttgctgttccaggtatattggtaccagaggccttagggttaggaaactgggtaaaagctcaagaatgggcagcaattccaggtggccaagccacttacttagggaacccagtcccatggggtacccttc

SEQ ID NO: 9359 - DNA, 423 bp, Gossypium hirsutum
  Clone ID: LIB3120-060-Q1-K1-G10
gtgagactcttttgtatacctgtagcatatagtaatagtaagcagtaatagcaatggcctgctccatgatctcatcggcaaccattgccaccgtgaaccgctcctccccggcacaggccaacatggtggcccccttcaccggcctcaaatctgcctctgctttcccagtcaccaggaaggccaacaacgacatcacttctcttgcaagcaacggtgggagagtgcaatgcatgcacgtgtggccgcctcttgggaagaagaagttcgagactctttcatacctgcccgatcttactcccgtacagttggctaaggaagtagattaccttcttcgctctaaatggattccttgcttggaagtcgaaattagaggaaggatttctgcaccgtaagtacttcagcttacccacgtactacgattga

SEQ ID NO: 9360 - DNA, 404 bp, Gossypium hirsutum
  Clone ID: LIB3120-060-Q1-K1-G12
acgcccactcgttcgcccacgcgttcgaaaaaaaagcgcgagttcctcaaatggggcgatccgaggggactcagcaactcgcttttgctttgttcaaccagtttttttgcttaaattttgcaaaaagacaatttgagatgggagttgtcagagtttctagttcagctgtccgaactccagtaggattaggcacatagttttctactcaaagatgtacatttagaagaccttgtattatggcatttaaagcagacaaatttaataatacggctctagttacgcttcgagaccataatcttttgccggtggaaacggctaaagagcacccgaagagacgcgggaaagcgaaaaaggcttccaagacttgtaaccgtgactttactgatgaaaagtctccgttcacc

SEQ ID NO: 9361 - DNA, 306 bp, Gossypium hirsutum
  Clone ID: LIB3120-060-Q1-K1-G3
cccacgcgtccggagacatggatgccgcaaaattaaatctgggttttaacttgttcttcatttttcagttaaaatttgtagtttttgcagctgtgggtggtggtggtggatgtagcagaagtgacttcccaccgggctttgttttcggtgcatcaacttcagcctatcagtatgaaggtgcggctgataaagatggtaggacgcctagcatatgggatacttttgtccatgctgaagggaattttaacgaaggcaatggagacatagcttgtgatgggtatcacaggtccaaggaaaatgttggac

SEQ ID NO: 9362 - DNA, 202 bp, Gossypium hirsutum
  Clone ID: LIB3120-060-Q1-K1-G4
gtcagtctttggtgaggttgcatatctgattggttctctttggcacaatcattagatttgaagtatacacttggcttttattttttaaaaacagagaaaaataacgtcagaagttagacattgaaaaatcattttgagctttggcacattttttcctatacaaagaaaaagcttaaacgatgagcaaaatctcatctggaat

SEQ ID NO: 9363 - DNA, 364 bp, Gossypium hirsutum
  Clone ID: LIB3120-060-Q1-K1-G5
aaaaaatttaaaatttatcaacgaaaagaaaggtcaaaagtctggtttccatggaagaagaagctgaatcacgcgaggaagtcaagcctaacgtcgtcgttaaagagactaatggagatattgtcggcgataacgatgcaggaaaattgggtaccattgaaacccctgattttctttcccagaaaatatcccataactgttccctaccgattctggcatctggagtaaataccacaagccttgctcaatcccaactcaccatcttttatggcggaaaaagtttctgtttttgatgcaatttccgctgaaaagattcaagaaattatgcttattgctgctgctgtggctgttgctgatgttggct

SEQ ID NO: 9364 - DNA, 457 bp, Gossypium hirsutum
  Clone ID: LIB3120-060-Q1-K1-G6
gtctctaccactgaaagcaaagaaaaaatggcaacggagatggcccttgtaaagcctatctccaaattcagtacaagcagtccaatttttagcaactcccgatatgggaagttcacgaccgtcagaatgtcatctacttcccaatcaacagcaaaggccgccgcgaagggtggcaagaaagctgccaaaaccgccatcaaagagacccttttgacaccaaggttttacaccaccgactttgatgaaatggaggcgcttttcaacactgagattaacaagaaccttaaccagtccgagtttgaggcactgctgcaagagttcaagactgattacaatcagactcactttgtaaggaacaaggagtttaaagaagctgctgataagattgatggtcctttgagacaaatcttcgttgagttcttggagaggtcttgtactgctgagttctctggttttc

SEQ ID NO: 9365 - DNA, 446 bp, Gossypium hirsutum
  Clone ID: LIB3120-060-Q1-K1-G7
attaacagttattcttgcccagatgagttggtttatgttaaatgcaaaatttctaatgcatggggttcttcagttgaagcagtgggtgtcacccacagatgtagaactgaaatatgttgaaaattctagcatatcttctgcagaagagaaacttgtggatttgtcaaaccagtcggttgaaaatgtaaataattacacagggatggagggacctgaaaccatatcaactattgacacaatacctgaaactccaactgcagcatctagctccgtgaactttgataatgattcactatccagtgtgaaaactggtcttgatgattttctggctggggttaacaagtttgcaactcttttctagacaagggagagaatgctgtgaaaaacttattggaaaaaattacttcttctataacttcttgtaagacgagtacttttgaagctgt

SEQ ID NO: 9366 - DNA, 328 bp, Gossypium hirsutum
  Clone ID: LIB3120-060-Q1-K1-G8
tccacgcgtacggtgaacgagctaagacgactttttcttcagctgcccagactgcaattgtgattgactctctctactaggggatcgattcatacacgacagttactctagctcgccttgcggagttgaatatggatctgcccaggaaacgtatggggccgcgacagaaatgcttgtgtgatgcgtatagggacaaaagcgcagtgcatgatgtggttctctgtctactggtaagactaagatcccaaacgttctaatacttgctgcgagactcattcaaccgtaaagagttctgtgagagcatccaccctgattaaactggggctta

SEQ ID NO: 9367 - DNA, 421 bp, Gossypium hirsutum
  Clone ID: LIB3120-060-Q1-K1-G9
tccactattctccaccaatagaagaaaaaatttaaaaaaaagagcagcaggctatcacatgggtccaacaatggcggcaccagaagaaaagctgatgaagaggaaccaggagttagaaaaggaattgaaggagagtacggaaagagaggagcagatgagaaaggaattacgaaagatgtgggaaaggctgacggtggcggaagaggcggaggaaaggctctgttctcagctgggtgacctggaagcagagtccgtcaatcaggcccgtgcttacaacgcccacatactttccctcatggaccagctctccaagggtagcaaccttctcatcaacagccacccatcccctgcatccatctccatcctctgatttttcttttggctggtgttttttttatctatctaagcaaaagcatggggc

SEQ ID NO: 9368 - DNA, 404 bp, Gossypium hirsutum
  Clone ID: LIB3120-060-Q1-K1-H1
cccacgcgtccggttccgatcattgtcaccggtaacgatttctcgacgctgtacgcgccggtcattcgtgacggtcgtatggagaagttttactgggcacccaccagggaagataggatcggtgtttgcacaggtattttcaggaccgacaatgttcccgttgatgacattgttaagcttgttgacaccttcccgggccaatccattgactttttcggtgctctgagggccagagtttacgatgacgaagtgaggaaatggatcggagaggtaggagtcaatagtgtcgggaaaaagctcgtgaactcgatggaagggccaccatcttttgagcaacctacgatgaccattgggaaagctgttgagtatggaaacatgcttggtggaaaaccaagagaacgtga

SEQ ID NO: 9369 - DNA, 343 bp, Gossypium hirsutum
  Clone ID: LIB3120-060-Q1-K1-H10
ctctcaggcatcaccatggcaacctctgctatccaacaatctgctttcgggggccaaacaggggtgtagcagtgcaatgagctcgtctgcatagatcggtgccgtcggtggtggtcgcgttcacatgcgaagaaccgtcaaaagtgctccaaccagcatctggtatggccctgaccgcccaaagtacttgggtccattctctgaccaaatgccatcatacctgaccggtgaataccctggggacatacgagtgggatactgctggaatatcagctgacccaaacacatttgccaagaaccgtgagcttgacgtgatccactgtatgtgggctatgcttggtgc

SEQ ID NO: 9370 - DNA, 329 bp, Gossypium hirsutum
  Clone ID: LIB3120-060-Q1-K1-H12
cccacccgtccgagaaaactgtggaagacaggtttcaactccgacaacctgacgctttgctgagtattctggtttccacataggaacactcgtctctttctttctttatttttttccttataatccttattgggtgtaacatacgcttcctcttttatcttatatctacccttcttttgagggacacactattataaacgcgtatattatttcaccgacgtctttcttaatagcctattgaatatacacttgaagaggggtatgacattgaaacagcttgcctaacttgtatgatggcatttgtgctctccagagaagcatctttatga

SEQ ID NO: 9371 - DNA, 441 bp, Gossypium hirsutum
  Clone ID: LIB3120-060-Q1-K1-H2
ctcaaatcttcaatcattagttcatctcttcaaaaaaatggcaggttccaacgttttcattttattagcttgtttcattttgttgggtttttcaagcatggaggtcagcctagcagctcgaaatcttcagcaagtaccattaccttcacttcctaatcctatcgttgttcttccaccactttctaaccttccgccacttcctaatcttccaccacttcctaatcttccgccacttcctaatcttccaccacttcctaatcttccgccactttctaatcttccgccacttcccaaattaccaattccaccggtttctaaccctaccattgttctttcggcactccccagattaccaaattcaccactttctaaccctaccaccgttctttcaccactttccattgtaccaattccaccactttctaacccttaacaacgttc

SEQ ID NO: 9372 - DNA, 276 bp, Gossypium hirsutum
  Clone ID: LIB3120-060-Q1-K1-H3
ggcaaggtcaagttcggggacagagcatcatacttatggcaaccacttccattatcattgaccacattaatatggaccgaggcattggtgagtggatacacatgagctctcaacggaatgctgagctcgaccctgaaaaaaggctataccctgcaggctataatgacccactaggcttagcttacagacccatgaaaaaactgatcacctcaagttggctgaaatcaagcattcataagcttgccaagactgctatcctcaactttggcattcaag

SEQ ID NO: 9373 - DNA, 345 bp, Gossypium hirsutum
  Clone ID: LIB3120-060-Q1-K1-H4
cttctctctcttctcttaccatggatccttacaagtttcgtccttcaagttcctttgattcggcgttctggaccaccaattctggtgctccagtttggaacaataactcatcacttactgtgggagcaagaggtccaattctccttgaagactatcatttggtggagaagctagctaatttcgatagagaacgcatacctgaacgtgttgttcatgctagaggagccagtgcgaaagggttcttcgaggtcactcatgatatatctcagctcacatgtgctgattttcttcgtgcccctggaatccagacccctctcattggtagattcttcacgggtattcatg

SEQ ID NO: 9374 - DNA, 214 bp, Gossypium hirsutum
  Clone ID: LIB3120-060-Q1-K1-H5
cccacgcgtcctaaattggttggtcaagaaatgaggagctttcactggtgaagttagtgcggggatgcttgtcaatttgagcgggctttgtattattattggtctttctgagaggatacttattttgattgagtcaaatgagttctttgtggataagggtgcttatgcactttctcaaggcttgaaagtgatatcttggatttgtggaaacact

SEQ ID NO: 9375 - DNA, 309 bp, Gossypium hirsutum
  Clone ID: LIB3120-060-Q1-K1-H7
atcaaaacaaactaccctctctttttttttatgtcctttctccatctttaagctaattggctgcttaagcttcagtagttaagtttttttagcataaaatgggggaaagaagcattaaatccaccattttttttgtgaattagcagtcacctgctcaaacagtgatattgttgaagtgaaactcctgccatggctactagcttcaacaacttcatagattcatcactgttcatccaaagattaatgttgaaagtggcattggtcactggtggagcaaccggcattggtgagagcattgtgcgtctattt

SEQ ID NO: 9376 - DNA, 403 bp, Gossypium hirsutum
  Clone ID: LIB3120-060-Q1-K1-H8
cccacgcgtccggttgatttttctttaatttctcaattctcaattctcttctatggtggtggccaccaaaccaaagcatggctatctctctaagttcagtgttcgggtttaatttaaagtatgtctcgagatcctgtattggaggagcttcagtacttaaggccaaccccagtgtatctccctttcaaatgtatggctcggggggacgtgtacaccaaaaaagaaggggcttatgtctttcagttgaagacagagaccgactagtcgcgaatagcagcataaaggattctggtgatgctgagaagctggtttctgatgatcgaagtttggccgtgaatcccccatcattggataatgaatcgcgctcccctacctctgagcctagtaatggttcaatggtttc

SEQ ID NO: 9377 - DNA, 495 bp, Gossypium hirsutum
  Clone ID: LIB3120-028-Q1-K1-E5.9C0
cctggctaaaaatatggctggtgagttattgcaactaggaccgaagttgccgacgtgaaggcgaccgcctgtttcactctcttacagcgaggtttttggtctacagaggtttagggagtgtgaattgatccatggacgggggcccatgttgtctactcttggcgcacttaccgttgaatggctcactggtgttacatggcaagatgctggcaaggttgatttatttgagggttcatcgtatctcggacacccccttctcttctcgatgacaacattgatttggatagaagtattggagatcgtattcatcgagttccaaaggaacgccgatcttgaccctgaaaagaggttgtaccccggaagaaagtactttgatcctgttggcctaaccgccgtcccggagaagaagcaactgtacaattggctgatatcaaccatgctcgccttgccatgattgctttcttggagattgctgaacaatctgctgcaacaggc

SEQ ID NO: 9378 - DNA, 950 bp, Gossypium hirsutum
  Clone ID: LIB3120-010-A8_FLI
cccacgcgtccggagacttatttactttaggaattttctagaaccttctcgaaggcaatggctgaggcgaccagcaccgagagatccactggcacagtcaaatggttcagcgcccagaaatgttttggtttcatagctcccgacgacggaggcgacgaccttttcgtccaccaaacctctattctttcccaaggctttcgtacactctccgataaccaacccgtcgagttcttcgttgatgtcggtgaagatggccgagctaaggccgttgatgtaactcctatgcctcgacctcgccgtccttcccgcggcggtggaagaggaggatattttggcggcagaggtagaggaggtggtggttacaggagaggaggttatggtggtggcggtggcggtggcggaggtagtggcgcttgttataattgtgggaggacggggcatatagccagggattgttatcaaggtggtggaagtggaagtacgagatacagtggcggccgtggagatggtggtggaaatagaagatacggtggcgatagcggtgatggacgaggagctgggggacgatgttttaattgtggagatgaaggccattttgcaagggattgccctaacaaataattcagaaaacaaaaccggacatttcctataatattttgtgagtataagtttttcttttacggtgttttggaaaggggtttatcagcaaaagaagaagaaaccggaaagttgtctattctttccgatcaggcttacttttcccgattccgattgatctggtaacatctttaaaaaaaaggtccattgttttgtataatgtgttgtaattgttgttattctcttaattcttatcgattcttctttctttaatcctctattcttagtctttgcattgacagtatgaacgggcaatcatttgtcttccttgaagcagatttcttttatttttc

SEQ ID NO: 9379 - DNA, 441 bp, Gossypium hirsutum
  Clone ID: LIB3135-023-Q1-K1-H11
cgtccgcttgctatattgctacttggagtggtggctctcgccactccctcttttggtacctatgagtctcccaactatgggaagccccctactcctgtttataaacctcctaaggtgaaacccccaccttatgaacatcctgtttataaacctcctaaggtgaaacccccaccttatgaacataagccccctgtctatgaaccaccaaagaaggaaaagcctgagcctaagccaccagtttatacacctgcaaagaaagagaagcctgaacccaaaccaccagtatatgaacctccaaagaaggaaaagcctgagcctaagccaccagtttatacaccaccaaagaaagagaagcctgagcccaaaccaccagtatatgaacccccaaagaaggaaaagcctgaacctaagccaccagtttatacaccaccaaagaaagag

SEQ ID NO: 9380 - DNA, 322 bp, Gossypium hirsutum
  Clone ID: LIB3135-002-Q1-K1-A1
gtgaaatcaatgcaccccgagatcatgttggcttacaatctctccccatctttcaattgggatgcatcgggaatgaccgatgaacagatgagagacttcattccaagaatagccaagcttggtttctgttggcagttcataacgttagctggtttccatgctgatgcattggtgaccgacacatttgcgagagatttcgccaggagggggatgctagcgtatgtggagaagatccaaagagaagaaaggaacaatggagtggacacattggctcaccaaaaatggtcaggtgccaacttttatgatagatatctcaagacag

SEQ ID NO: 9381 - DNA, 460 bp, Gossypium hirsutum
  Clone ID: LIB3135-002-Q1-K1-A10
cccacgcgtccgcaaagagcaggaaaacaagaaaagcagagccgcatcactttttgctagctaataataacgttatatattatataaatattatacatcctttttaccctacgactccatatataagcaagtaaaaataaatatggctcgctctgtttcttcctttaagatccttggtgcttctgtttttgatgctctttatgtctccatatcaaggagaggttactcaggtgcaccgccggcggcagtgacggctagctttggtaggcctggagcgatggggaaagtggaacgaagatatgcgatgaaagagtcgtcgtcgtcggagacaagggcttattcttcagcttgggcgcctgaccctgttacggggtattaccggccggagaactgtggggctgagatcgatgcggcggatctcacggagatgatgttgaatcacaggggtagatcacagtag

SEQ ID NO: 9382 - DNA, 309 bp, Gossypium hirsutum
  Clone ID: LIB3135-002-Q1-K1-A2
cccacgcgtccgcccacgcgtccgggaacgctgtcatttttgggcctgatgatactccttgggatggcggtacgttcaagctgacttttcagttcatggaggattatccaaataagcctccaaccgttcggtttgtctcacggatgtttcatccaaatatctatgcagatgggagtatttgtctcgatattttacaaaatcagtggagtcctatatatgatgttgccgctatactcacttcgattcagtctcttctttgtgatccgaacccgaactcttcagcaaactcggaaagcagctcgtattgtt

SEQ ID NO: 9383 - DNA, 244 bp, Gossypium hirsutum
  Clone ID: LIB3135-002-Q1-K1-A3
cccacgcgtccgggactgatcactgggattcccattaaagagaggggggagccaaattaaacatgagaaagatgccatgggtattttggtcccaagcttttgaccaacccttagggttcttccggttttcatcctagttggtggttttcctttgggtacttttctatggtatatgttggtggtgttggtttaatttctttgggattgtaaataatgagcaaattacatacttaaacttattatt

SEQ ID NO: 9384 - DNA, 120 bp, Gossypium hirsutum
  Clone ID: LIB3135-002-Q1-K1-A4
gtggtttcggtggtggtggtggttttggaggatctgtaggtggtggtgggcatggtggtggtgctggtggaggctaaagtaaaggtggtggatattgaggtaagattgtcaaaggatgtg

SEQ ID NO: 9385 - DNA, 318 bp, Gossypium hirsutum
  Clone ID: LIB3135-002-Q1-K1-A5
caccaccgaagacttgaaggaaaaaaataatgatgttgtggaataccacaaagtatatcaattgcgacatcaaaaagtgacatcaatctattttatagatgtaatcaataataaagtctttaaaaagtagttttttttactgaaaaacaaataaaactcaaaaaataataagattattacttaatatcataaagtaaatatacgatagatttacattgaatttcattacacataattcatcgctctagatatgacttggatcaaagtcacgctaatcacgttaccgttaaagttttactctttaattataatttatca

SEQ ID NO: 9386 - DNA, 342 bp, Gossypium hirsutum
  unsure (1)..(342): unsure at all n locations; Clone ID: LIB3135-002-Q1-K1-A6
gggctgaactggaagtccggagtagcgccggaaaatcgttctgggatttcaaattgacctaagagctttttaaaagaagaatggataggctatcgaatgcgttttcgttgctggatattgatgtggacgatcatcatcctccaccggcttcatcatctgcttccaaaccttcaggtaagagcataaacaatgggaagggcccaactgaactgaaaccggcattgctttcggaaaactacaagttaccccttgtttggattgacttggaaatgactggtttgaatattgagactgatagaatattggagatagctngtataattacagatggctatcttacca

SEQ ID NO: 9387 - DNA, 306 bp, Gossypium hirsutum
  Clone ID: LIB3135-002-Q1-K1-A7
ctcgacaagcgacatgaagaagtacatggtaccatatttggaggaccaaacacttgcatgaacaaggcagacaccgacagaagcttcatcgtatcaatggatttcaaaagtcgggcacttttttaaagacttaattggtctgagcgaagatcaacctttgctgcatattgtgtactaaaactgtaactttcttggggtacaatccacgttattattggttttaagccactattattaccatatatgtgaaagattttgacgttcttatcattttatgattatgataataatgactttcgtacaaaa

SEQ ID NO: 9388 - DNA, 296 bp, Gossypium hirsutum
  Clone ID: LIB3135-002-Q1-K1-A8
gaagatggttaagatagaagttaaccatttcttcagcacgtcaaggatgacagtaactcgttgttattgtaaaattctttcttcttcctttttatttagttttttttctctctctggctcttatttgtaatttatccgcttgttctcaacaagagcacttgtaagattcccccattgatcaacactgtggacttatcagggtacaggacgaggaggtagaatacactccctgcccaaacccgacctattgacatccctcaccagtactaaattttctctcaacttccgagatgatt

SEQ ID NO: 9389 - DNA, 411 bp, Gossypium hirsutum
  Clone ID: LIB3135-002-Q1-K1-A9
cccacgcgtccgcacaatcgattttgccgccggggaaacaaacgtttcgactcggagagggagagatggtaatgtcaccggtggttaacacgtaccctttgtccagctacacctttggtaccaaagagccgaagatggagaaggacacgtccgtcgccgatcgccttgctcgcatgaaagtcaattacatgaaagagggcatgagaactagcgttgaagcaattttattggtccaagaacataatcatcctcacattcttcttctgcaaattgggaacacattctgcaaacttcctggtggacgactgaagcctggagagaatgagattgagggtttgaaaaggaagctgaccagcaagcttggagctaattcacctgctcttgtgccagactggcagattggtgaatgcg

SEQ ID NO: 9390 - DNA, 387 bp, Gossypium hirsutum
  unsure (1)..(387): unsure at all n locations; Clone ID: LIB3135-002-Q1-K1-B1
cccacgcgtccgcccacgcgtccgcacctgttcaaaggccaaggaatagttggtagagcattgacaacagacaaacaatgttttgcaactgatataactgccttcagtaagacaaattatcctctctctcaccatgctaggatgttcaaactgcgtggcgcattagctattccactacaaagcatttttactggattggttgaattcgttttggagttattcttcccaaaagattgccatgaaagcgaagcacagcagcagatgctgaactcattgtccagttttatgcaacaggcatgccagagctttgcatgtngtatggacaangagcttgaagaagaagtgatacttgcccgtaaagaaagcggtaagtgccttctgatggga

SEQ ID NO: 9391 - DNA, 430 bp, Gossypium hirsutum
  Clone ID: LIB3135-002-Q1-K1-B10
gcgctctcatgcaaggaccaagcccatactgtcctttcgcttccattttccggagaattcaatgtcgtacacatcgactatatggtccaaagtatatggctcaacgaccctgatcattgcacccccaaacgtctccttcatggacttaacctatccagcactccttttgatttgctatatcctcgaagcttcacgtttttcaattcctccgacgctgcatcaacacaacttcatcaagcaaagtatatatcttgtctcatgggcacaaacttttatgacgtggctctaccggcagcccgactcgatacgactgcatcagtggcaacggctgagcatagcagatagcgacggttcaggatccgagatccggaacggattaggcgaatcatgggaatggtctgatgaagacatggactgaaccgaagcgcct

SEQ ID NO: 9392 - DNA, 364 bp, Gossypium hirsutum
  Clone ID: LIB3135-002-Q1-K1-B11
ggcgggaataatgtctgatgcaaatatcctaatcaacactgctagggtgcaagctcaacgatacacatatgcttaccaagagccaatgcccgttgaacagttggttcaatctctctgtgatacaaagcagggttatacccagtttggtggtctccgcccattcggtgtttcatttctttttgcaggatgggacaagaactatggattccaactttacatgagtgatcctagtggtaactacagtggatggaaagctgcagctattggtgcaaataatcaagcagctcagtcaatgttgaaacaagattacaaggacgatatcacgagggatgaagccttacaactcgcgctgaaagtgctgagt

SEQ ID NO: 9393 - DNA, 419 bp, Gossypium hirsutum
  Clone ID: LIB3135-002-Q1-K1-B12
gaaattaaggctgctatcaaggcggaatctgaaggcaacttgaagggaattcttggttatgtggacgaagatttagtctcaactgacttcatcggagacaacaggtcaagcatttttgatgccaaggctggaattgctttgaatgacaactttgttaagcttgtgacttggtatgacaacgaatggggttacagttcccgtgttatcgacttgatccgacacatgtctaaggcttaagtgagtgagtgattgtgctttgtgtatccaagctttagcaattttaatttagaagagatgttatgagagaataaacgaattgtacggagcatatttttgtgtgaagaagggttgtttcagttttattaaaaaaaaaaaaactttaaaaaacatatattaaaaaataaaaattcaaaatagat

SEQ ID NO: 9394 - DNA, 376 bp, Gossypium hirsutum
  Clone ID: LIB3135-002-Q1-K1-B2
cccacgcgtccgttctttagaagttgttttaacaatcttttgattgtgggagccatcttcaacgttcttcttgccatcgatattctttggaggggagattagagccgtttgaagagatttgtgaaatcttttaggatttcaaggatctttaggacttatcctttatttcttgctgttttcgatttctttctttacttttctttgcttatacttgtgccgatttctcatctaatattttgctgttcttgtttggttttcagcattgattaaacttaagatctcatcatttaaagttgttcctctattggcaggacccattccaaatccaaaaatcccaatttctaagggttggcccaatggatttcttcaatttggg

SEQ ID NO: 9395 - DNA, 390 bp, Gossypium hirsutum
  Clone ID: LIB3135-002-Q1-K1-B3
tgatgagcaaccttccaacttctttaacagactcttcttttacccttttcaagcttgccattgcttcttctgatccttggcctttctctctccttctcttataaccccctttatctatatattactgtttgtttcatctttggccttcttgctttttggggctttgcttgctgaagatcaaaattcaaaaatggggattggaggagacaagcagcagcacgtgagcttccaccttcatatgccgaaccttcatcttcatgggttccatcatcatgagaacaaggacctcaaagatatcccaaaggggtgcctggcggtcctggtgggtcaaggccaagagcagcaaaggtttgtgatcccgctcatctatatcacccaccccttgttcat

SEQ ID NO: 9396 - DNA, 265 bp, Gossypium hirsutum
  unsure (1)..(265): unsure at all n locations; Clone ID: LIB3135-002-Q1-K1-B4
tgtcttagcaacaaagtttgtctataaaaaaatcagctctgctatcgggatacaaaagactgccaaaagcggaggtggaagtttgccaacgcatattgaaaagttttatgaggcaattggtctggaagtgcagaatggatatggcttaacagaaacatccccttgcattgctggtcgacgaccctattataatgttcttggttctgttgggcatccaattccactcacagaattcanagttgtagattccgaaactggtgaaatc

SEQ ID NO: 9397 - DNA, 296 bp, Gossypium hirsutum
  Clone ID: LIB3135-002-Q1-K1-B5
aggaaatatatgtatggtcttgtaaatgagctgtagataggattctgtacccactcttaactgtatactcccctgatctttcgtattttcaaaccatcatatcctccgagcaactctcagaaatcgaaatagagaagattcgatatgctgtttcataattaaaaaaaaaaaaaaaaaaaaaaaaaaaaaaaaaaaaaaaaaaaaaaaaaaaaaaaaaaaaaaaaaaaaaaaagaaataaaaaacaaaaaaaaaaaataaatgataaaaattattgtataaaaaaaaaaaggggggc

SEQ ID NO: 9398 - DNA, 483 bp, Gossypium hirsutum
  Clone ID: LIB3135-002-Q1-K1-B6
ggatgcatgagtgtagatatgatataggatgggagaatcaattatgaggaatttgtagccatgatgaaaaggggaactcaagatggggatgggatgtgaaagacagatgagaaagaaacactgctgctgccactgcatgttccatgaaaagctaaaaaggaacttcaccaaatttagatcatcttgttggctacttctgggctctttctctttccatctttaaacaccaattatgacatgatgatcatcattccgaatccatgtagtttttagcttttgttttgtatgtagatagaaatggcatctcaaatttctcaacaaaagtgggaggaaaggtaaataaaagaaaaagagtgtgtttctctctcccccaaatcatgtactctgtaatattattatttttcatatggagaaccgtgggtttctgagttcaaagatcatttttttttttatttggaaactttcgtacttcagaagagacag

SEQ ID NO: 9399 - DNA, 365 bp, Gossypium hirsutum
  unsure (1)..(365): unsure at all n locations; Clone ID: LIB3135-002-Q1-K1-B7
ggaaattgctgaattatacgagtctgaacagaacattgagcaggccatggattattttgaaaaggctgctgatttcttccaaaatgaagacgtgtcttcttctgccaatcaatgcaagcagaaagttgcacaatttgctgctcagatagaacaataccagaaagccattgagatatatgaagagatagcgcggcaatcacttaccaataacttgctgaagtatggagttaaaggtcatcttcttaatgctggcatttgtcaactctgcaaaggtgatgttgtagcaatcaccaatgcgttagagcgatatcaggatctggatccaactttttctgggacgcgagagtatanattatnggctgaca

SEQ ID NO: 9400 - DNA, 216 bp, Gossypium hirsutum
  Clone ID: LIB3135-002-Q1-K1-B8
tccacgcgtccgcggatctcgagaaccgtgtaggtgttggtggatatggttatccagctcttggagccttgaacgtcaagaaaggagcatatgctccactcataagtgcatttgagctcgagcatatcattgagtttgtgaaggaagcagggcgcggaggcaagggaaatttaccactggagggcacacccgagattgcaaagacagaagcatggg

SEQ ID NO: 9401 - DNA, 340 bp, Gossypium hirsutum
  Clone ID: LIB3135-002-Q1-K1-C1
gcggagcggaccaatcttccgcaccgcccccttactctctctctctataaaaaaagcctgcgggaagcgcgaagagctaagccactaataaaaaaaaaaaaaaaaaaaaaaaaaaaaaaaaaaaaaaaaaaaaaaaaaaaaaaaaaaaaaaaaaaaaaaaaaaaaaaaaaaaaaaaaaaaaaaaaaaaaaaaaaaaaaaaaaaaaaaaaaaaaaaaaaaaaaaaaaaaaaaaaaaaaagggggggccttttaaaaggcccaaagttaacaacccgggaaaggcaacgtaaaagtttttaaaaggggccccaaaaaaaaaataaaggggccgggtttaaaa

SEQ ID NO: 9402 - DNA, 304 bp, Gossypium hirsutum
  unsure (1)..(304): unsure at all n locations; Clone ID: LIB3135-002-Q1-K1-C10
gaagggaaacaagggagcgcaaaacgggnggnacgaaggngaaagcggacagggaagagcgcccgcccgaagccgacatgcnagcagcacaagaaggaacacaacgccgcaaggagngggggagaacagccccccaaacaaagcnncgagccacgggagggaacaaaaccaagacaccagggccaggggcccaggcagcacggagagcccacgcacgggccggcacgaaaaagggacgcanagaggangncacccccaaacccaccgaaagcacacggagaaagggcggcagacgcggaagaag

SEQ ID NO: 9403 - DNA, 406 bp, Gossypium hirsutum
  Clone ID: LIB3135-002-Q1-K1-C11
cttagtggaaggccaaggcactcgagttgggttctactcgacctcatgccctaaagtcgagtcaatcgtaagctcaacgggccaatctcatttcaagtcggatccaactattgctccggcgttgcttcacatgcactttcatgactgctttgtacaagattatggaccgacaattcgaccaagacgtttgtgcaacgtttcttgggcgttagagggttgcttggattgaccttcaacgttgaatttggtaaatccatggtgaagatgagcaacattggagtgaaaacgggaactgctggtgaaatccgcaaagtatgttctaaagttaattaaaatgaacattgaagattaagaataatgctatatacacaagtggctgatcaaagggaagtgcttgagtgtatac

SEQ ID NO: 9404 - DNA, 295 bp, Gossypium hirsutum
  Clone ID: LIB3135-002-Q1-K1-C12
accacgcgtccgctcacacgtgcgaaccagcttgcgcgcgtttaagaccagtgaaaatatctacgctagagatgccatcgagccgaggcgataatgtggccatgaatgtaagaagaacaggagcagaaggtatagatgtgaaacgggccggagagctgtggaaggcgtccgggactgtaccgaatgatgatccacgtcgtgcaactatgcatagcatgtatgactgcggatatcagcttaaacaatggaccaacatgagttgatccgatactgaaactggctacttaaaactaga

SEQ ID NO: 9405 - DNA, 186 bp, Gossypium hirsutum
  Clone ID: LIB3135-002-Q1-K1-C2
attaactcatccacccactcatccatccaagcgcaccaatttttttctccacaaacatactctctctctctatcaaaaaaacctctgggaagggctatcatctaacccagtaatagcatattctacccataaataaatctttttaaatcccctcatttcataatcaactttctattaaaataaaca

SEQ ID NO: 9406 - DNA, 419 bp, Gossypium hirsutum
  unsure (1)..(419): unsure at all n locations; Clone ID: LIB3135-002-Q1-K1-C3
cggtaaggtagccgtttttgctttcagaaaatctaccgcagtttgcagttgagaggatggtgagagtcagcgttttgaatgatgcactcaagagcatgtacaatgccgagaagaggggcaaacgacaggtcatgatcaggccttcctccaaagtgatcattaagtttcttttggtcatgcagaagcatggttatattggagagtttgagtatgtcgatgatcacagatctggaaaaattgtggttgaattgaacggaaggctgaacaagtgtggggtgattagccctcgtttcgatgtcggagttaaagagattgaaggttggactgctaggctacttccttccagacagttcggatacattgtgcttaccacttcagctggtatcatggaccatgaagaagcangaagaaggaatgtc

SEQ ID NO: 9407 - DNA, 433 bp, Gossypium hirsutum
  Clone ID: LIB3135-002-Q1-K1-C4
ctgaaataagtatggttgggttaacagagcctcaagcaagggagaaagcccagaaggaaggatttgaagtaggcgttgccaaaacaagtttcaaggctaacacgaaggcacttgccgaaaatgaaggggagggacttgctaagttgatatacagacccgacaacggcgagatactcggagttcatatatttggcttacatgcagcagacctcatccatgaagcatcaaatgccatagctttaggaacacgtattcaggacataaaattcggccgtcacgcacattcaacactttctgaagttctggacgaactatttaaatcagccacagttaaagctgctgcttcgagccacggtccagtaagtgaaccggttgcagtctaaacccttaatcgacagttttcggattaaaaaaaataggtataaattttttg

SEQ ID NO: 9408 - DNA, 212 bp, Gossypium hirsutum
  Clone ID: LIB3135-002-Q1-K1-C5
cccacgcgtccgcccacgcgtccgcaaaatgctagtcccctaagtggatatgcattagtgtcatttgtatcttcactaacagtcgccatgactcgtctctaacaagtatattgaaaatgtctcaaaatgaggttctctgcaaaaaaaaaaaaaaaaaaaaaaaaaaaaaaaaaaaaaaaaaaaaaaaaaaaaaaaaaaaaaaaaaaggaaaa

SEQ ID NO: 9409 - DNA, 457 bp, Gossypium hirsutum
  Clone ID: LIB3135-002-Q1-K1-C6
cggccaaataccggatgctagttggaatggtggatgtcatattttctgatgttgctcaacctgatcaggcgaggattctagctttgaatgcatcatttttcctaaaagctggtggtcattttgttatttcaatcaaggctaactgcattgactcaacggttccagccgaggcagtgttccagagtgaagttaagaaacttcaacaggagcaattcaaaccttttgaacaagtgacgctcgaacccgttgaacccgaccattcctgccttggtggtgggtaccggatgccaaagaaacagaaagctgcaacataatggttttgtagtcttggttttaatccctaagtttcgtggctttggattaaaaatgatgaacatgttttgggatcgaacatctttcttttttggactaaaaatcaaacttatttctactgatgaaaaagggctcttaattagac

SEQ ID NO: 9410 - DNA, 390 bp, Gossypium hirsutum
  Clone ID: LIB3135-002-Q1-K1-C7
atttaatctcaatatttacacatctacaaacataatatgggtgaaatctattaaattaggatcaaattgataggatgcctaaattattaagagctaaatgtatattatatcaagctaatttatgttaatttgatgaaaaacattaacctgtaactgtccttaattgttcattattgcaattgatgggaattaattgctgtaactaagaccaatatgctcaatgttaaaattgaaagagatggaaaaaatgtatataccacatcatataagaatgtagctgataacagtatcatatgcaacctctcaaggaatataaagtttgtttagctcggaagaaatctgatttgggaaggtaaaaaatgaatattgatggtgcatataagttttcta

SEQ ID NO: 9411 - DNA, 285 bp, Gossypium hirsutum
  unsure (1)..(285): unsure at all n locations; Clone ID: LIB3135-002-Q1-K1-C8
ccaaataatccttgccgtgtgaagaccattcctcgcccaattccggagaagaaatggtatttgaccccctctgtggtgtctttgatgggaggacttctgccatttggcagcatattcattgaaatgtattttatncttcacgattcttcctggaattacaaggtttattatgtatatggctttatgctgctggtcttcctgattctcatcattgtaactgtttgtgtgacaattgtggggacatatttcttgctaaatgctgagaattatcactggcagtggaca

SEQ ID NO: 9412 - DNA, 407 bp, Gossypium hirsutum
  Clone ID: LIB3135-002-Q1-K1-C9
cccacgcgtccggatttgagctactccgaggcttgcgattttcactttttgttcatcgatatagtgagaaaatttgatagcctttctggccttttgtgcttgaattttcctcttccaaagtagcgatgcatttaccagattgaaactgaattaagacttgaacattttctttggaaaaaacaagcaacacaaacacaataaaataaaaaaaataaaattgaattgacaaccccaattacatatagattataaaaatatttttatgaattaaagcaattgggtttagttgcttagtgcttttttggacgcacgaaagatgattccttggggtgttctcaattgctagttgagtgctgctgctctttaccttctcggcagaagcagtggcagggatgctgaaattctta

SEQ ID NO: 9413 - DNA, 391 bp, Gossypium hirsutum
  unsure (1)..(391): unsure at all n locations; Clone ID: LIB3135-002-Q1-K1-D1
atctgagtcaagaagcttgggtaagctggaagaagtgacccgagagatggctgaaagaaaggaagcactaaaaattgctatggagaaggctgagaaggccaaggaagggaagttaggtattgagcaggaattgagaaggtggagggctgaacatgagcagcggcgtaaggctactgaattgaatcatggagaaaaccctccaagggcaatctctgagggaaagaaagaaacaaagaactttgaacctgtacctgctgctcctactctggccgataccctagcaagcccaaaggcatatgatcacgggagcaccacagaaactgaatcatncccggaaccgaaggtttgtaaagaaaaagaaaagtcattggtcccgaagatttaaatgttt

SEQ ID NO: 9414 - DNA, 418 bp, Gossypium hirsutum
  Clone ID: LIB3135-002-Q1-K1-D10
gcgcccacgcgtccgctgaaattttcttgaaactatggcatgtatagactagtttggaattggttcttttgagagtatatttgtattaaagccatgtgaatatggcttaattagcttgctctactcgattttggattggattaaaggccatgcacattttggtgttggtacgacattataggtgtgcgtggattattcgaactaggtatgagcttaatatatatataacatggatataggtgaaaggatacatgattttagagagggatgatgatgttggattctttttgcctggcagtttcagacaggtagaccaacaaggagctggtgttaatgttggacatgctcaaagtgcaaatgcttgtttaattccaatggtgcctactccaccacaagcttatacatctcctgatctcac

SEQ ID NO: 9415 - DNA, 457 bp, Gossypium hirsutum
  Clone ID: LIB3135-002-Q1-K1-D11
cttgttccttgctttgagttgaccctggaagccttaaatctttaccatgaagaacttggtgttatccgggataatatgattgatttgattgacaggctttgcaaattgttgatgcttaccaaggataggatccttcctttacagactattgaccagctgaaatgggacttggggttgccttacttttacatcgataacttgattccaaattatgctgatttattttctttgtttcgccttcctgatgatcggattggtttgaaacttttatcatgggatgatacacttgctgtctcccagttggagaagaatgttgcccggcaaacagaagaagatttgaaaaataactgtttagcctttcctatagggtttacaaggggttttggactgaagagaaagtgcatgggatggttagaagaatggcagaaattaccatatacttcaccttatgccgatg

SEQ ID NO: 9416 - DNA, 471 bp, Gossypium hirsutum
  Clone ID: LIB3135-002-Q1-K1-D12
agaaagaagagaaatctcaatggcgccgaaagccgagaagaagcccgctgagaagaagcctgccgagaagccaacggaggagaaaaagtccaccgtcggcgagaaagccccagcggagaagaagccaaaggccggcaagaagcttcccaaggaaggtccaggggccggagataagaagaagaagaaagccaagaagagtgttgagacctacaagatctacatcttcaaggtcctgaagcaagtccatccagatatcggtatctcaagcaaagctatgggaatcatgaacagtttcatcaacgacatcttcgagaagctggctcaagaatcttcaagactggcaaggtataacaagaagcccaccatcacttccagggaaatccagacggctgttagacttgttcttcctggagaacttgccaaacacgccgtttctgaaggcaccaaagccgtgaccaaatttactagttc

SEQ ID NO: 9417 - DNA, 411 bp, Gossypium hirsutum
  Clone ID: LIB3135-002-Q1-K1-D2
cttgtatacaaggtctatacagatgggagatctaatatatctagacgtggaaggaaggcaacaattagagagttttacggtgttatattaccatctcttcaaaggctccatggtaacttgggggagttggatgatgataaggaggctggtgggagttctgccaagaaaagagtcgacttagataatagacatgggaatattgattttgagagggaagatgaatgtgggatttgcttggagccttgcacgaaaatggtcttgcctaattgttgtcatgcaatgtgcataaaatgctattggaaatgggaccccaaattctgagtcttgtccgtcctgccgggtaagttggaaaggggccaatcttgaaaattaatggttcctaacttgcaccgttaatggggttgccattaa

SEQ ID NO: 9418 - DNA, 326 bp, Gossypium hirsutum
  Clone ID: LIB3135-002-Q1-K1-D3
cccacgcgtccgggaaaagatgcagatattcgtgaaaaccctaactggcaagaccataactctcgaggtcgagagcagcgataccattgacaacgtcaaagccaagatccaagacaaagaaggaatcccaccggaccaacaacgtctcatattcgccggaaaacagctcgaagatggccgtaccttggctgactacaacatccagaaagaatcaacacttcatcttgttctgaggttgagaggtggaattattgagccttctttgatggctttggctcgcaaatacaaccaagacaagatgatttgccgcaagtgttatgctcgtc

SEQ ID NO: 9419 - DNA, 297 bp, Gossypium hirsutum
  Clone ID: LIB3135-002-Q1-K1-D4
gagcttcgaaaagaagatgcaggcaagcgataggtttaacatcaattcccagctcgagcatctgcaagccaaatacgttggaactggccatgctgatctcaacagatttgaatgggcggttaacattcaacgcgatagctacgcatcatatatagggcattacccgatgttggcttacttcgctgtggctgaaaatgaatccattggaagagagcgctacaacttcatgcagaaaatgcttctgccttgtggtctgcctccagaaagagaagatgattaagaactgctgggtgggct

SEQ ID NO: 9420 - DNA, 363 bp, Gossypium hirsutum
  unsure (1)..(363): unsure at all n locations; Clone ID: LIB3135-002-Q1-K1-D5
cccacgcgtccgcggacgcgtgggtttgtttatctaattagactcggttttaactagataaacaaatcttataaaacataatcaagcttgaatttggccctccctaggctccatagatacaacaagtgcctggagcatatcaagctgtaattatggcaacattgttgtgcaaccctttgtcgtgaaagctgtaatatttaaagatacatcatcccgaatttcttaaataaaggccaacatttaacttgagcaaattagaagacatctaaaatataatgcactgccccgtactccatggcttccaaaaacgganaagaagtaagctctctactctntcccaaaatcagtactgtagtgtgcact

SEQ ID NO: 9421 - DNA, 337 bp, Gossypium hirsutum
  unsure (1)..(337): unsure at all n locations; Clone ID: LIB3135-002-Q1-K1-D6
cccaaaatcaatggcgtcttcctcgtacaagaaatacgaaatcagaaagcgagatccaaaccctaaaaccaccgctttgttagtgatcgacatgcaaaactattttgcctccatggccaaacctattctcagcaacgcaattaccaccatcaacctttgccgagaagcttccatccccattttcttcactcgccactgccacanatcccccgccgactacggcatgctcggtgagtggtgggacaacgacctcatcttcgacggcaccgttgattccgaactgatccccgagatcggacggctttcgaaacccgacgaggtgggtgagaaaaacacg

SEQ ID NO: 9422 - DNA, 426 bp, Gossypium hirsutum
  Clone ID: LIB3135-002-Q1-K1-D7
gagagcttcaaatatctctccgaattctccacctcttaacatagatttgatttctcttttagtcaagttatgtcagggaagagaccacgtccgatgatggggaaattgtctgaattattggtttccggcaaaaaacccggatttttggatgctgttgttacaagccctaggagtccattagatttgaagacaccatcacctagaagttcgaagagatatgatgttggtggggttggactagggatcgcttttgcactggataacaagtgtagtacccattcctgcaggcatactatttgtagctcaaatgtaattgttgtgaaatctggtgggaagattttagagatggaaagcttggaggattttacgtatgtgactacccatggatctggcaagtcgtctacaaaggtgtttaatgatggaggt

SEQ ID NO: 9423 - DNA, 206 bp, Gossypium hirsutum
  Clone ID: LIB3135-002-Q1-K1-D8
acctagagcttcaaaaatctctcccaagactttttttttcaacatacacacgatttgtatctgggaggcgttatctcatgtacgagacctcctcctatcatcagaaatttatctgcagtctacatttaccgcgacaaacccgcatcttatatatagcgctttccaaggtctactcactcatcattgtcgaagacacaatcccctag

SEQ ID NO: 9424 - DNA, 259 bp, Gossypium hirsutum
  Clone ID: LIB3135-002-Q1-K1-D9
ggatgaagcacgaaatatagaatgcatatgggtgtttaaagcctaggaacattgtttcaattgttaatgggtttcttgatttggctcctatattgaaggaatgaaagctaagagtctttagggtctaaaaaaaaaataacgaagagaaatacataaacggcgaacgacgcgctaaatccagatactgagtacattcgcaaattaaattcacggacccattatgcggcttcaaagagtacttctttgatcacctagaatc

SEQ ID NO: 9425 - DNA, 432 bp, Gossypium hirsutum
  Clone ID: LIB3135-002-Q1-K1-E1
gccactctaactgttttgatcagtttcgcaagtcattttcagatacctcctcgacaacaccacaaaatcctcaacaaggagctcaacttgtaaccacaaacctatcaccagttgtgaatgcaacttcagaatcaactatctccgagttgcgggaagaaaggactgaggaaggtccctccaacccatctattatctcatgtgaaaaccaggtgctcccaaaactagtatgccctctatgtcgtggtgaggtaaaagattgggttgttgtagagcctgctcgtcatttcatgaatgccaaatctagaagctgttcctctgaaacatgtaattctactggttcctataaagacctaaggaaacatgctagactagagcacccttctgcccgccatctgaggctgatcctgagcgacaacgaaactggaggaggtt

SEQ ID NO: 9426 - DNA, 449 bp, Gossypium hirsutum
  Clone ID: LIB3135-002-Q1-K1-E10
gcgatttggttccgacgggaagaggtttgagcatcttgcatttcttaacttggcgcaaaatgtggtctgcttagtttggtcttacataatgataaagctttggtccagtagaagcaatggtggtgctcccttgtggacttattggagtgctggaatcacaaatacaattggtccggccatgggtatagaagcattgaagtacatcagctacccggctcaagtgttggccaagtcctcaaaaatgattcctgtcatgctgatgggcactctagtttatcggattcgatacactttccctgagtatatctgtactttccttgtggctgtaggagtatctgcttttgcacttatgaagactagctctaaaacaattagcaagttggcacaccccaatgcaccccttggatatgggctctgtattctgaaccttgcatttgatggctttacaa

SEQ ID NO: 9427 - DNA, 327 bp, Gossypium hirsutum
  unsure (1)..(327): unsure at all n locations; Clone ID: LIB3135-002-Q1-K1-E11
caagaaaacacatngagccagccttaaaaatcatgtttttggatgtccccaactagccttgaaaaatctcttttggtgccttgcaaaatcgtccccttcgtggccaataatggtggtgtgccgccctaaaccaccattaggggctactgaattttattatttttaccacctttttccaaaaagtctttaatccgtattaccctactttaataagcatttaatcatgtgttatttaggaataatcgatccctatcattcgacaactcagatctgggtaacggattgagtaaaatgcactatcatgcgagatcttgcactggtttgatt

SEQ ID NO: 9428 - DNA, 470 bp, Gossypium hirsutum
  Clone ID: LIB3135-002-Q1-K1-E12
cccacgcgtccgattggcatctctggaaactattgttccgacaaaaaaccggctgcggtaaattggattgaaggacgaggcaaatctgttgtctgtgaagccaccattaagggtgatgtggttaggaaggtcttgaagacaagtgtggaatctctcgttgagcttaacatgctgaagaaccttactggatcagctatggctggagctctgggtggatttaacgctcacgccagtaacatcgttgctgcaatctacatagctaccggccaagatccggctcaaaacgtcgagagctcgcattgcatcacgatgatggaagctgttaatgatggcaaggacctccacgtctctgtcacaatgccttccatcgaggttgggactgttggtggtggaactcagcttgcatctcaatcagcctgtttgaacttacttggagtgaagggtgcaagcaaagagacaccaggagcaaa

SEQ ID NO: 9429 - DNA, 376 bp, Gossypium hirsutum
  unsure (1)..(376): unsure at all n locations; Clone ID: LIB3135-002-Q1-K1-E3
gatttccaaaatacatcaaaaaagctgaaaatcagaatcttttctgtgcaaaaaatctggtgatagataaaagcattcaagctgcttatatacaggctatcagatctgcccagcattacatatatattgaaaatcagtattttcttggatcttcatatgcatggccatcatataaaaatgcaggggctgataatctgatccctatggaactggcactaaaggttgctagtaaaatcagagcaagggagagattcgcggtatatatcatcattcctttgtggccagagggtgatcccaaaactgccactgtacaggaaattttgtattggcagagtcaaacaatgcaaatgatgtatgatngttgtgcacaagaact

SEQ ID NO: 9430 - DNA, 416 bp, Gossypium hirsutum
  Clone ID: LIB3135-002-Q1-K1-E4
ccctattagagaaggccgatggatagacccaatatctatcagtactcgcgatctggggagtacctaggcaacttataaggcctctacattgagggaaaacctgctctacgtgaaaaaaaaagggaagttaacttttgcataacctctgttttattttccttgggcattggaacaatcacaagtgcaggaaataactggttgatataagaagatctctgaccatatggtcttaagttgagtatagtactcagcaacagtcatattcccctgactaagattgggactttctaatcaaacctggataatctaatagaaataaagggccgctctcaactaggcctaaactttggaaccacttgatccctatgcctttcctcattccttataaatggaaaagataattgctttgctttttt

SEQ ID NO: 9431 - DNA, 422 bp, Gossypium hirsutum
  Clone ID: LIB3135-002-Q1-K1-E5
cccacgcgtccgcccacgcgtccgacataagccacctgtctatgaacctccaaagaaagaaaaacctgaacataagccacctgtctatgaacctccaaagaaagaaaaacctgaacccaagccaccgatgtatgaaccaccaaagaaggaaaagtccgaaccaaagccaccagtttatacacctccaaagaaagagaagcctgaaccaaaaccatcagtatatgaaccaccaaagaaggaaaagcctgagcctaagccaccagtttatacaccaccaaagaaagagaagcctgaacccaagccaccagtgtatgaaccaccaaagaaggaaaagcctgagcctaagccaccaagttatacaccaccaaaggaaagagaaagctgaccctagccacccagtgtatgaacccgccaaagaagga

SEQ ID NO: 9432 - DNA, 279 bp, Gossypium hirsutum
  Clone ID: LIB3135-002-Q1-K1-E6
ggttcctatggcaaccacggaagggtgcctggtggctagcactaataggggctgtaaggctattcatttgtctggtggagctacaagtgttctattgaaagatggtatgactagagctccatgtgtaaggttcggtactgcaaaaagggcagctgatttgaagttgtatttggaggaccctgataatttcgagaccttgtctgttgttttcaacagatcaagtagatttggcaggctccagggtatcaaatgtgcaattgcttgaaaagaatctgtata

SEQ ID NO: 9433 - DNA, 365 bp, Gossypium hirsutum
  Clone ID: LIB3135-002-Q1-K1-E7
gccttcacttccaatttagggtttgcacgagccgtagtgcgccgttcgcatcaggaagaaatggcggtccctttgctgtctaagaagattgtgaagaagcgtgtcaagaagttcaagaggccccaaagtgaccgcaagatctccgtcaagacaaactggcgaaggcctaaaggtattgactcccgtgttaggaggaagttcaagggatgcactttgatgcccaatattggttatgggtccgacaagaagactcgccactatcttcccaatgggtttaagaaatttgtcgtgcataacgtccaagagctggagcttctcatgatgcacaacatgacatactgtgctgagatagctcatgatgtttc

SEQ ID NO: 9434 - DNA, 454 bp, Gossypium hirsutum
  Clone ID: LIB3135-002-Q1-K1-E8
gactccgatggatacttgcatcttgttggtcggatcaaggagctcatcaatcgtggaggtgagaaaatatcaccaattgaggtagacgcagtgttattggctcacccagctgtaacacaggcagttgccttcggtgttcccgatgagaaatatggcgaggagataaattgtgcggtgattttaaggggaggaagcttggatgaagcagaaatcacgaaatattgcaaaagaaatcttgcgagtttcaaagtacccaagaaagttttcatcacggattccgtgccgaaaacagctactggaaaaatccagagggggatagtagcagagcatttcttggctcaaacgtctgccgctaaagtacccaaatttggagcttaaattcagcattgcttgtctattgcttaggtacatatttaagcgactgcaatttattgtttgtgtaaaaggggattac

SEQ ID NO: 9435 - DNA, 114 bp, Gossypium hirsutum
  Clone ID: LIB3135-002-Q1-K1-E9
cggacgcgtggggtttcaacataatcagcgaaccataatttgagataaagatagcagggactctgaattctataagattcgctcgatcaaccaaatggccaaatttttcatttc

SEQ ID NO: 9436 - DNA, 376 bp, Gossypium hirsutum
  Clone ID: LIB3135-002-Q1-K1-F1
ggaatggttacgcagctgccttcaagtgatgaaacttcaactagtaagaagcaattattagctcgtcttgatgtttgtatgggaggaagagttgcagaagagctcatctttggccaagaccatatcacaactggggcaagtagtgatctgcacacagctacagagcttgctcaatatatggtatcaaattgtgggatgagtgatacaattggaccagttcatattaaagagcgaccaagttcagaaatgcaatctcgcattgatgctgaagtggtgaagcttctaagagaagcatatgatcgcgtgaaagccctgttaaagaagcaagagaaggcattgcatgcattagcaaatgcacttttggagtatgaaacac

SEQ ID NO: 9437 - DNA, 150 bp, Gossypium hirsutum
  Clone ID: LIB3135-002-Q1-K1-F10
ctcttagtagtttataggcagttgttgcttgatgaatatgggtatttgcagttttattttgttgaacatgttgaattgagtttgtgggagatttcgatggactaactaaaaagctctttcgtaataaataatatacaatttattccatat

SEQ ID NO: 9438 - DNA, 457 bp, Gossypium hirsutum
  Clone ID: LIB3135-002-Q1-K1-F11
ctgctgcaccctctgattctcctaccatatttgacaaaatcattaacaaggaaatcccagctaccgtggtgtatgaagatgataaggtcttagcttttagggacatagctccccaggctcctacgcacattttaattattccaaaatcaaaggatggcctaactggtttgtctaaggctgaggagaggcactgtgaaatccttggctgccttctttatactgcaaagcttgttgcaaaacaggaagggctggaagatggattcaggattgtgatcaatgatggccctaaaggatgtcaatctgtgtatcacattcatgtccacctccttggatggcgccaaatgaactggccttcaggctaaataaagaagttatagttgatataggtatttcatgataacttcaataacgaaagcctgcatgtgggctttcatcgatgatcaatggtatacgctct

SEQ ID NO: 9439 - DNA, 293 bp, Gossypium hirsutum
  Clone ID: LIB3135-002-Q1-K1-F12
aagagaggatgctatgttgttatcactcttattttatcaattttcatcctgtgttaaggtgagtttggataagtttggatagacggtgtgtttatctacaggtagtgtaaaaatagggcggtgagattagatattataatataagataaaaagtaagttaaacgctccgcatcgtacctgattgcctattcaaactcactcttaatagatttgtgttatgagctgtaggatttgtgtacgaaaaaaaaaaaaaaaaaaaaaataaaaaaaaaaaaatgataattttgaggttt

SEQ ID NO: 9440 - DNA, 296 bp, Gossypium hirsutum
  Clone ID: LIB3135-002-Q1-K1-F2
gcatgttcttggtttacatgcatatatctatttttcgttcttttcaagcaaataactagacttgttaataccattgtcaaaattcttacaggatcgaatgatgaaagaacttcattcccaaggtataagaattgaggatattgcgactgttctgaaaagatcaccaatacatccccgaatcatcgaagctattaaatcggctcatgctttaggatgtgatttgaagattgtgagcgacgcatacactttcttcattgagacaatctttggagcattcacggcctgaaggaatcctt

SEQ ID NO: 9441 - DNA, 340 bp, Gossypium hirsutum
  unsure (1)..(340): unsure at all n locations; Clone ID: LIB3135-002-Q1-K1-F3
atcttgtctttacagttttttgtctgaaaagaagaaaatggctactgtaggaagaaacgcggcagctcctttgttgttccttaacttgatcatgtatttcattgtgttgggatttgctagttggtgtattaataggtttatcaatggccaaactgctcatccaagtatgggtgggaatggagcaacaggtttctttttaaccttttcaatcttggctgctgtggtgggtatagtatcaaaatttgcaggtggtcatcatattaggtcatggagaagtgatagtttggctgcagctggttcttctgcacttattgcttgngctctaactgcattagccttt

SEQ ID NO: 9442 - DNA, 437 bp, Gossypium hirsutum
  unsure (1)..(437): unsure at all n locations; Clone ID: LIB3135-002-Q1-K1-F4
cacaaggtcggcagcaccaccaccaccaccaacgactcgtcatcttaagatggcctatatactcttctcagagacacagcgataaaaagatataatggttaagaggaaaagagcttctcctagtcttttccctattgaaacaattattattatagtgtatctttatgatagatgtgggatggagttttttattttttatttttgacatttatttgcttgccatctttgtagctttaatgtttcttgtccctttttaagagttttagttttaaaaaaaattatttttnttttttatttaaatattaatttttttaattatttttatatttattttttcaatatttaattttattaaaattttaaatcttatataatttttttatattattttttactattattttatatttttttttttttttttctccaattttaaa

SEQ ID NO: 9443 - DNA, 431 bp, Gossypium hirsutum
  Clone ID: LIB3135-002-Q1-K1-F5
ggagaacatccccgtggaactccaaacaatctcatgccttacatgcagcaagttgcggttgggaaacgacctgccttgactatcttcgggaacgattattccaccaaagatggcacttgcgtacgtgattatatccatgttgttgacttagcacaaggtcatatcgccgcactgcgaaaactatctgatccgaaactagcctgtgaagtctacaacttgggaagtgggaaaggaacgtcagttttggagatggttgctgcatttgaaaaggcatgtgggaagaaaattcctctgggtatggctgccaggcgacccggtgatgctgaaatactttatgcttctactgaaaaggcaaagcgtgagttgaattggaaagcaaatatagcattgaggacatgtgcagggatcaatggaactgggccaacaacaac

SEQ ID NO: 9444 - DNA, 314 bp, Gossypium hirsutum
  Clone ID: LIB3135-002-Q1-K1-F6
cccacgcgtccgcccacgcgtccgcccacgcgtccgggtgattcttggaaaaccaaacgtttctgatattttcccggtgcttgcaaggtttgacatacagggattggagaaagagatgactaaaatcgttaattctttcgataagcttttcaactccatgattgaagaaagagagaactttagcaacaaattgagcaaagaagatggaaacactgaagcaaaagacttcttgcagcttcttttggaactcaagcagaagaacgatagcggaatatcgataacaatgaatcaagtcaaggccttgctcatggaca

SEQ ID NO: 9445 - DNA, 438 bp, Gossypium hirsutum
  unsure (1)..(438): unsure at all n locations; Clone ID: LIB3135-002-Q1-K1-F7
cccacgcgtccgcccacgcgtccgagcaatattatcacaagcagcagctaaaaaaaaaggcaagaagaaaaatggcgtcagagcaatatcaagctatgaggaatgcaccacaagaggatcactgagcttttgaaagtcggtaaggacaagcgagctcttaaggtagctaaaagaaagttgggaactcacaaaagggcaaagaagaagcgtgaagagatgtccagcgttctccgcaagatgagagcccacggtggaggtgcagaaaagaagaaataaagctntattttcttggtttctcacccttgtcgtgctcgagtttctggttaggagcagctagagggttgttagcatatgttcaattttggtgtttgaaacttgaatcaggtttggaacctttgttaattgagtagagatgagaaatggaagaagtattacttt

SEQ ID NO: 9446 - DNA, 376 bp, Gossypium hirsutum
  Clone ID: LIB3135-002-Q1-K1-F8
ggaattcagtggacaagtgaggaagaagagaagttcaaggctaaggttatggaggcatatgagagagaggggaatccgtactactcaacagctaggctctgggatgatggtattatagatcctgctgataccaggaaaattgtggggctctgcatctctgcttccatgaatcgcccattagaagataccaaatatggtgtattccgaatgtaaatggaatcattaacttgtcaatccgtactcttctaacctgaaaagaaaatatggaaaacaggaagactatgcaataaaaaatctggataataatgcaatgcatgtcatgatcaataattccttggttcaaatgtaaaagtcctggtgtaagggttcaggtgcc

SEQ ID NO: 9447 - DNA, 301 bp, Gossypium hirsutum
  Clone ID: LIB3135-002-Q1-K1-G1
ctgccgcacaccagcctagcgtttccatcaggtagaaatggcggtccctttgctgtcgaagaagattgtgaagaagcgtgttaagaagttcaagaggccccaaagtgatcgcaagatctctgtcaagacaaactggcgaaggcccaagggtattgactcccgtgttaggaggaagttcaagggatgcactttgatgcccaacatcggttacgggtcagacaagaaaacacgccactatcttcccaatgggtttaagaaatttgtggtgcacaatgtccaagagctagagcttctcatgatg

SEQ ID NO: 9448 - DNA, 164 bp, Gossypium hirsutum
  Clone ID: LIB3135-002-Q1-K1-G10
atcaatttggactgaaatttaaatttttaggggtaatttcaggtaatgctccaaatattgtgaggttggattattttgaatttgtgtcaattggtttggggtcaaccaatttgaggttaagtcaattaaattttccggtccaaaaaaaaaaattgttggaaata

SEQ ID NO: 9449 - DNA, 453 bp, Gossypium hirsutum
  unsure (1)..(453): unsure at all n locations; Clone ID: LIB3135-002-Q1-K1-G11
atcgctagaaacatgtgaagtgtatggctaacccaataacgaaagtttcgtaaggggactggagcaggctaccatgagacaaaagatcttctttctaaagagattcgattcggaactattatatgtccaaggtccaatattgaaataatttcagaggttttccctgactttgtccgtgtcaacaaacaattcgaaatgcctcgactcttttagaacaggtccgggtcaaatagcaatgattcgaagcacttctttttacactatttcggaaacctaaggactcaatcgtatggatatgtaaaatacaggatttcctctatctaacggttagcttctcttagctgcctttcgattcttggattgagttgttaaagcactagaaaccatcgtttctgaatctaattcaaacccatatttgnagaagattcgatcgttcttagtttgggatttttc

SEQ ID NO: 9450 - DNA, 397 bp, Gossypium hirsutum
  Clone ID: LIB3135-002-Q1-K1-G12
gttgcaggaatgatctggtatggtaatgcctcctccaagcccggaggaaaggagcgttggacttattcagctccaagcgacaaatcacaaaaaccagacaatttattcggttctactgaaacagacgagaaggtttaaagattcgattacaggtttaacagttaaaaagggcaaagataaaagagacgaaaactgagccatttacacagaggatcggaattattacaacttttcgttccttttttatttctttcttttgttgcactcataatggttaatcattttcatgttcctttaatttataatccaaggtgaaaattatgctgttgatagaggaagcaaattccctgtaaatccagcgtcgttttcctctaataatatttgcttatagtaattt

SEQ ID NO: 9451 - DNA, 312 bp, Gossypium hirsutum
  Clone ID: LIB3135-002-Q1-K1-G2
cttcctcttccgagtccgggcccttccgctccagcaagctccaataattctgatgctgattctttcggcatcaatgttatattggagagttggccaacaaccgaaagcgaaagacagtcgtcagcctcagcagaaacgggcacgtcggtgaataagccagaatctggacgtgtgccgcctgctaatcaagtacctccccgggggaacgaagctggtccatcgaatcagcccccacaaggggtcccctatccgtatcaagaaaatcaaattatagggggggattcgatcctagcgatcgaacggcgccttttg

SEQ ID NO: 9452 - DNA, 368 bp, Gossypium hirsutum
  Clone ID: LIB3135-002-Q1-K1-G3
gtccatgtattttctctatgttttttcaggtcatatgggaaacaaggcaggaagaagaagaagaagaagaacaagaagattcaattttcaagcagggaaaccttcggcctcggaagaagcagcagagttgctggaaagaagctgcggcagcaccaccgcaggcgccggcttaagcggatggaaaccgaactggcaaagatgaaagcggagatgagggactcggctgagtccctaatggcaggtaaagtagaagctgatcaggctaaggctaaacttcaagtgctgaagttgaagcttttggcagtgaaggaaattgaagcttttctcatgggttttctttgacttaatggaagttaggaccttcatgt

SEQ ID NO: 9453 - DNA, 410 bp, Gossypium hirsutum
  Clone ID: LIB3135-002-Q1-K1-G4
gccacaatgaggcttcgagcatgttaaagaaccccatggacaggcacgagattgttcgccaagacgttaaacaagttatttgttcggtttgtgacacagagcagccggtcgctctactttgttcaaattgtggtgtcaacatgggagaatatttctgtgcaatttgcatgttctttgatgatgataccgagaaggagcactttcattgccatgattgtgggatctgcagagtcggaggtcgtgataacttttttcattgcaaaaagtgcgggtcttgctatgccattgcgttgcgagataatcatttgtgcgtggagaactcgatgcggcatcattgccccatatgttatgagtacctattcgattcgttgaaagatacgactgtgatgaaatgcggtcacacgatgcac

SEQ ID NO: 9454 - DNA, 380 bp, Gossypium hirsutum
  unsure (1)..(380): unsure at all n locations; Clone ID: LIB3135-002-Q1-K1-G5
gtaatcctatgaaagactcgtctggtgattacccttctgagaagagatctaagcgtgagaatgaccagtcttacataccatctcagaatcctcaacaagcctcagttccaccattctcgcatcctgaatcacaccaacataatgttgtgaccaccacccagcagttggctctaaatgaggtgccacctcctccatcatcgtctcctccacctctgccaccactgccgcctatgccaccgtatgctgtgccccagtacatgccaactgctggatcaataaatggngtgacatatagctatagcatgacatcacagcagccttcctttgcctggtattccatagctggagctgcaatgagtggcatcttcctaattggcaca

SEQ ID NO: 9455 - DNA, 184 bp, Gossypium hirsutum
  Clone ID: LIB3135-002-Q1-K1-G6
gatcgacaatagctaagcattgcggccattacatgttcaagctacgtatggctggcgtacaagctacgggcttcttagccaaagaaaacaacaaaaaaaaaaggatgcctggtttggtacctttagtccaatcttagacaaagagaaaggtggatatgaagcactgctgggtagaccatggtcc

SEQ ID NO: 9456 - DNA, 272 bp, Gossypium hirsutum
  Clone ID: LIB3135-002-Q1-K1-G8
attcctggtaccgatgtagcaggagaaatcgtacaagttggatcaggtgtccagagtttcaaagtcggggatacagttgttgccgtacttggtaatggaggtgcactagctgaatatgctgtggctaaggaaggttccacagctccaaggcctccagaggtatcagcccctgaagctgcagctttgccaattgctggccttgcagctcaccagtcactcacccagcttgctggactcatacttgatggatcctgtctacaagttaatgctct

SEQ ID NO: 9457 - DNA, 376 bp, Gossypium hirsutum
  Clone ID: LIB3135-002-Q1-K1-G9
cacactcgtcagaactggtatatgcagagtacgagagcaacatcaggtgaggggctttatgaggacctagaaaggctgtccaacgacatagctgacaaggcctgaaactatgaagaagatctttgcaatgagggaagtcctggaagcaggggggagcatgataccgtctgattagtattataatgtcattcgccgaatccctattgaccaagatcggaggcagagccgattggaagagatgccacatatatgcatcttagtgatgatcattagagctaggatgtgaacttatcggctatatgcggaactaagtaaactgtcgctggctggatatataatacgcttttggataaattattcctttgcgactggatct

SEQ ID NO: 9458 - DNA, 257 bp, Gossypium hirsutum
  Clone ID: LIB3135-002-Q1-K1-H1
atcggcgacatcatagatcaacggatgatggtttgatagcaacttttaactgaaaagagcaacgatgcttgaaaaaaaaaaaaaaaaaaaaaaaaaaaaaaaaaaaaaaaaaaaaaaaaaaaaaaaaaaaaaaaaaaaaaaaaaaaaaaaaaaaaaaaaaaaaaaaaaaaaaaaaaaaaaaaaaaaaaaaaaaaaaaaaaaaaaaaaaaaaaaaaaaaaaaaaaaaaaaaaaagggcgtaccatcaaatagacaaaa

SEQ ID NO: 9459 - DNA, 272 bp, Gossypium hirsutum
  Clone ID: LIB3135-002-Q1-K1-H10
cccacgcgtccgggttaccttagcttctcatctaagcgaaaaagacgaaggagagtctcgttcctttccatttctgtttccgtttccaaaaacctgcgatacttcctctctccctttcctccgattccatatctctctctctttctgctagggtttgggagttagtgaagaaggggttgttatttcatggggcaacaatcggtgatctacgcctgcgtggcacgaggcaccgtggtcttagccgactagacggagttcaccggaaactgcac

SEQ ID NO: 9460 - DNA, 416 bp, Gossypium hirsutum
  unsure (1)..(416): unsure at all n locations; Clone ID: LIB3135-002-Q1-K1-H11
cccacgcgtccggnctaatctttgcgttcttgttgttggagcacttggtggacgatttgatcatgagatggggaacctaaatgtcatatgccgtttctcgtccatgcgaatagtccttttatccaacgatagtctcattcatctccttccgaggacttactgtcacgagatacatatccaaacttccgttgagggcccgcactgtggactcatccctattgggacgccatcaaaaagcagtacaacgaccgggcttcagtgggacctgaataacacagcgatggaatttggtggtctagtaagcacatcgaatatagttaaggaagagaaagtgacggtgcaatctgattgtgaccttctttggaccatttccattaagatgttatagtagtggctgttatttattatatacatat

SEQ ID NO: 9461 - DNA, 344 bp, Gossypium hirsutum
  Clone ID: LIB3135-002-Q1-K1-H2
gttttgtaataatagataaggttttgggggaccttttgtttgtatatgaactagatttcgggggtttctttgtcattggagagatctatcaaacaaataaggaaaggtaacaaagcaaatcccatatcggttttgaattttattgctttttttgaatcttctttgttgtttttggcttgtaaaaaaacatggcttggtgggctggtaatgtagcaatgagaggtggtattggtccaataccttcttcaaccccatctcttcatcttagaaacccatctgaagatcatcaaatggctgtttttagagctaatattcgtccttcaaatgaagatcatcatcatcaa

SEQ ID NO: 9462 - DNA, 427 bp, Gossypium hirsutum
  Clone ID: LIB3135-002-Q1-K1-H4
gttttttgggactatgatcctaatttcatggctgccagtttggatgaagcttaccttgatattactaaggtttgcgaaaaaagaagcattactggtgcagaaaatgctaaagaactcagatctagagtatatgaagagactggtttgacatgtagtgctggagtggctccaaatcgcttacttgctaaggttctattttctgttcttggcacataattgcagttgagaaggtgcatctgcaattgtcatcactatgaatttagctattgtagcattgtcaaatcaaaatttgaatattgcattttatgcagaaattctacaattttccataggatgttatttcttcaaattgatgaagtcagtaatgatgttggacgaaaatgtgacaactcttttggtgaataacaatactttggtcctgactggt

SEQ ID NO: 9463 - DNA, 401 bp, Gossypium hirsutum
  Clone ID: LIB3135-002-Q1-K1-H5
cccacgcgtccggctggtgctgccattagctctcatatggacattgataaaactgataagaagcaattcgagaaaatcctatcatacatcgagcatggcaaaagagaaggagctactttactaacaggaggcaaacacattggccaaaagggatattacatacagcctaccatatttgctgatgttaaggatgatatgatcgtagcaaaaaatgaaatttttgggccagtaatgtcattgatgaagttcaaaactatggaagaggggattaagaaggcaaacaacacgacttatggtctggcagctggggttataacgaaagacttgaatgtggcaaacacttgttcgagatcggtccgtgctggtatcgtgtggatcaacttgtacgctgggttcgatat

SEQ ID NO: 9464 - DNA, 325 bp, Gossypium hirsutum
  Clone ID: LIB3135-002-Q1-K1-H6
ccgatctgtgaatccaccgttatccttcaatatatcgatgaaatttggccgcagaatcctttgctgccggctgatccctatgacagagctgttgctctgttttggatcaaatttgcagatgacaagggtcttttaatgtcaaagctttatcgaggcaatggcgaagaacaacaggcggcagtgaaggagtggttggaaatgttggaagtcatggaagaacatgcgctgataggagtgaaaaagttcttcggcggagacgagataaacatggtggacattgcattttcctttgttgctcactggcttgggattctcgaagacgtac

SEQ ID NO: 9465 - DNA, 287 bp, Gossypium hirsutum
  Clone ID: LIB3135-002-Q1-K1-H7
atttatttgaatatgtttttcagtaatacgccaacgaaatcgatcgttgaccaaggaagagatcgaagcttattggaaatcaaagaagcaaacggaggaagaacatcttaaagctacttttagtccatcatatacctgcactcactcttacctggaaacaccattggaggagcatggaagtaagaatctgagatcaaactccagccaggaggatgcagaaacaagcctggagaatatcataaagaaaaatggctggtggacaaggagcaattgggcattcttgaatg

SEQ ID NO: 9466 - DNA, 360 bp, Gossypium hirsutum
  unsure (1)..(360): unsure at all n locations; Clone ID: LIB3135-002-Q1-K1-H8
cccacgcgtccgcccacgcgtccgatcctccagcataaaaaaaccccctttcatctctcattatgcatgtcccattgatttcactctacctttgcctccacttcgatcggggcttcctctatccaaaacctgggtgaagcgtgcctcctcctttcctcgactagaatgtgtgctgtttcatttgccttcctaggtacgtatctaaaatcaatcaaagcaaaccccctaactcgttctttgatttctttaattaaaatactaatggttgatttgtcttcctcaggagattttagcttattgataatcgttagggcatccccctncaccaaaatatttcaaaaccctagctcctcaataaaa

SEQ ID NO: 9467 - DNA, 460 bp, Gossypium hirsutum
  Clone ID: LIB3135-002-Q1-K1-H9
caacgaagggcatacggctagatgcggaaggtgatgcatctttggaagacttagcgaatgctggagctcagggtactggggtcgatccatctccagatcctgaaaaagccaagtccagtaataaaaagagaaaaagtgcttctgaaaggcaaacatctgctaagcaaaggatttctcagaagacaagtgaacctagctttgtggataatgagttagatgatgcccttcaagatgatatgcaatcacagagacccaaaaggcctaagagaccaaagaagagtgtaaatgaaaacctataaccagcaattactactgcagctgctgcatcagcttctggccaggtacctggaaatgagtttggtcctggtggttttgggactgaaatggggcataacatggcgcagagtaatatgtcaacgtgttaacttgacgaaaggaaagcatggtacaccttaattgc

SEQ ID NO: 9468 - DNA, 460 bp, Gossypium hirsutum
  Clone ID: LIB3135-003-Q1-K1-A1
cgaatcctacaaacccatccatagaattggggcctgaattcaagaaggttggtaacttcttaagtcgattcaagtcaatcccgagcatcattgagcttgatagccttaaggtgactggtgatgtttggtttggtgctggcattgtgctcaaggggaaagtgagtatcgctgcaaaacccggggtgaagttggagattcccgatggagctgtaattgagaacaaggaaattaatggccccgaagacatctgagagaggcccgtctgccagccgaagtttccctgattttggtgtgttgcagtagataacgaacgcatcttttatatagataggaagtaaaataaaataaaaatacttggaacagaagtagtatttgcgtttcatatcacatatatatgttgtatgtcttgcgggagtttcccttgaattactatttttcgaggtatgaagaaaaacagtgt

SEQ ID NO: 9469 - DNA, 373 bp, Gossypium hirsutum
  Clone ID: LIB3135-003-Q1-K1-A10
cttgatcaaccacgtgaaaaaagggacgcctaagaagcctggaaagcctatagaagcgtggatttttgccatgtttgatgagaataccaaaacgggcgaagaaatcgaaaaacactggggactttttcttccaaataggcagcctaaataccaaataaattttaactaaatagctgcacagaatctgtagatgaagggcatttcaaccatgctagctattctactttgccaataagagcgtatcacttctccctaggaagggagggtaaacaatgcatctatcaatttcaaaatactattcaaaataagatgatgaaaatcagtcccatatgttaaagtattcaaaataataagattatctcctatttagatt

SEQ ID NO: 9470 - DNA, 461 bp, Gossypium hirsutum
  Clone ID: LIB3135-003-Q1-K1-A11
tgaacctacccttgtcttggatcttgactctcacaaattgcaagcattcactgctgctgatgatgatttggaatccactctctctggcttgaatgtattgatcgagacctactttgctgatcttacttctgaggcatacaagacactcattgggttgaagggtgtcactgcttatggtttggatttggttcgtggagcccagactctagatttggtcaagagcaatttccctaagggcaagtacctctttgctggagttgtggacggaaggaacatctgggccaatgatcttgctgcttctttcagcactttgaaggagcttgaggctgttgttggcaaagaaaacctggtggtgtccacatcatgctcgcttctccacaccgatgttgatctagtgaatgagactaagctagacgatgaaatcaaatcgtggctcgcatttgctgcccagaaagttgttg

SEQ ID NO: 9471 - DNA, 272 bp, Gossypium hirsutum
  Clone ID: LIB3135-003-Q1-K1-A12
tttaaaaaagactctttttatattaaatttttttttttataaaaagaaaaattattttacttttgaaacatacaaaactctaattatggaaaaatgtatcattacttattgtttttattttatattttaaaacccaaaatctaaatcttttcaagaccattttctttaaatacaagttcctcttttcttcaattttgtacaaaaaaaacatttttatctatcatctatatacttttttaaccacttttaaatatcttgactctttttttttt

SEQ ID NO: 9472 - DNA, 360 bp, Gossypium hirsutum
  unsure (1)..(360): unsure at all n locations; Clone ID: LIB3135-003-Q1-K1-A2
cccacgcgtccggccacgcgnacgctgacttggttttccaaggcgagctcttgctggctactgggcgcacttgattgagcccatgttttatactgcctgtgtgcactaattttgggcgacattactagccgcgttgtgccctgatgatttatatgcatatgcatccctcattaaagagaatatcattgggtttatttttcagttacagattgattttaagtctcgtgccactttgctaccaaaaaaagatgttattgaaaatgcttctatcagtcgatgcttacatactttagggttcacttacgaagagaaggggtttctctgataattgggatgttaaaaaaataaaaatacttggaa

SEQ ID NO: 9473 - DNA, 326 bp, Gossypium hirsutum
  Clone ID: LIB3135-003-Q1-K1-A3
ggcgacccacgcgtgcgttacgcacataccacattttaaatggatgcatcatacaacacgatatcttccattgtagtgttggagcatatgaagaaccatcacgaccttctcaagaatatatcaaatttgctgaaagaggatagacttctttttcctcattatttctgccataaagcatttgcttaccactttgaatacataaatgaatatgactggataaccacattcttctttacaggaggtacaatgccttcaacaaatctgcttctatatttccaggatgatgcttctgttgtcaaccattgtcttgttaacggaaaacatta

SEQ ID NO: 9474 - DNA, 361 bp, Gossypium hirsutum
  Clone ID: LIB3135-003-Q1-K1-A4
cccacgcgtccggctaagagaaatggaagtcgcccacgccatttctgcaagagcagtggatctgttgctcgtcacatacttcagcaattgcaggatgtcaacatcattgatattgatcctaaaggtggtaggagaatcacatcaaacggccaacgggatctggaccaagtagctggaaggattgcggttgctatctaagaaattttaactttctgtttttcatgttcctgagatttagtcgcttgaaaattgggttttcataggaagctgttttaaacattttccgttttggtatattaagttctgaatttattttgattttgatttttattgaaaactgatgtatgctatattttctttc

SEQ ID NO: 9475 - DNA, 452 bp, Gossypium hirsutum
  Clone ID: LIB3135-003-Q1-K1-A5
cccacgcgtccgcttcgtgaagttggacttacatttcaccttctcaaggatgttcccggccgaatttcaaagaacattgaaaagagcctagctgaggcatttcaacctttgggcatttcggattggaactcgctcttttggatcgctcaccccggtggtccagccatattggatcaggttgaggcgaagctagcccttaaacccgaaaaactccgagccacgaggcacgtgctttcagaatatgggaacatgtcaagtgcttgtgtgctgttcatattggatgagatgaggaagaaatcaaaggaagatggacttggaaccacgggtgaagggctcgagtggggtgtcctgtttggtttcggaccagggctcactgttgagaaccgggtgcttcatagaatctctgcttaaacaagggtctaatgttcatgttggctagcccaggctgcact

SEQ ID NO: 9476 - DNA, 306 bp, Gossypium hirsutum
  unsure (1)..(306): unsure at all n locations; Clone ID: LIB3135-003-Q1-K1-A6
gtcagactcgcttttatggatctgaatctgannncactcttctatacttttcaaaaagggaggaataaaaaaaacaaaaactaaaccacaaacataaacaaaaccaccaataaaccccaaaatatattatctaatccccattatatttcttcatcctaaaaaacacccacaaataaaatcaaattacagtctaacaccctaaaatggtccccccttacttatatttccaaacaaacctccccccccaataaacaaaacactccttttctatattccccccaaaaataatacaccccccctccttta

SEQ ID NO: 9477 - DNA, 456 bp, Gossypium hirsutum
  Clone ID: LIB3135-003-Q1-K1-A7
cccacgcgtccgaaaaaaaatggcttcgtttcatatgattacaacccttctttttctgctagcaataatgctgggtgcatcaaatgctcaactcagtgccccttttatgccaaaacctgccctaatgtgtccaccattgttagtaatgtgctgcaacaagctcaaggaaatgatatttggatattccctaagatcgttcgccttcattttcatgattgttttgttcatggttgtgatgcttcgttactgttgaacggtacggatggtgagaaaacggcaaccccaaacctttcgacggagggatatgaagttatcgacgatatcaaaacggcgttggagaaagcttgccctcgtgtcgtctcatgtgccgatgttttggcacttgctgctcaaatttctgtttccttgggtggaggtccgaaatggcagttccgttagggagacgggatagtctga

SEQ ID NO: 9478 - DNA, 194 bp, Gossypium hirsutum
  Clone ID: LIB3135-003-Q1-K1-A8
tatcaacaaacaccacccatgcctctttttatatgatcacgaccatctcttatcggggaggggaaatcttggaagcacaacatgcacaacctaaagcaccaccaaaaacaaaccccgacctaatgtgcatcttatttttattcttatgacatattaaactgacaaaaaacaataatgggacctccctacaaacc

SEQ ID NO: 9479 - DNA, 320 bp, Gossypium hirsutum
  Clone ID: LIB3135-003-Q1-K1-A9
cccacgcgtccgagaaggcaaagaaagcagaagtagcggcaaagcaacaaaagactcagggcaagggtaatgttccaaagggtggagcaccgaaaggccccaagctcggtggcggtggcggaaagcgttaagttgttaaagttattatctgtttttccctagccagaaaaaaatagggttagtatgttttttttgaagccaattttatggacttaatggcattgatggccatgatgtttttgcatttatgcttgatcctatactatgaacccagtgttgaagttttgtgatgaagtgcttttatggattttgaatttatt

SEQ ID NO: 9480 - DNA, 460 bp, Gossypium hirsutum
  Clone ID: LIB3135-003-Q1-K1-B1
cccacgcgtccggttttaaagcttctgcgtggggatgctggactttttcttaccaacatgcccagagatgaagtcgaaagctgctttaataaatttgaagaaaatgactttgcgaggacaggaaccattgcaactgaaaaggtggaacttttggaaggtcctttggatcagttcacacatgagatggagccatttttgcgcaagcaaggcatgcctgttcggttgaacaaaggtgttgtagaacttgtttcagactttgttgtctgtgaggaaggaaaacctttgtcacctgagtctgctcggatactgcgcttgttggggatcaagatggctactttccggctaaacttgatatgcagatggagccctgaggatttcgagctttataaaggactagatgaatcggacgtagaatgtgcctaaaccaacattttcagagtgaatatgatctcattaatgt

SEQ ID NO: 9481 - DNA, 445 bp, Gossypium hirsutum
  unsure (1)..(445): unsure at all n locations; Clone ID: LIB3135-003-Q1-K1-B10
aantacgcgtgcgcagacacttgggctaacatattatgctgcgtttgatccttttgaagggggcatttttgcatgaagtatttctccccttttagatacctacaaaccaattcacactgcatctacaaggttcatcggtgcttaccccaaaaatatcgacactttgaagatagaaccattgtcccgtatctataatatatactctaaactatccattttcaataccaaactgatggttaatgctcctatatccacacttgacggtgctgaattgactattcgttatgcaaacttgattattttgatagagaaactactttcatcgcctcacttcatcactctcgatgcatgagacgacctatacactatgctacctacacactatgaaaaatgctctttcttttaaactgaacacctccgcatagtctttatctttatcaatata

SEQ ID NO: 9482 - DNA, 302 bp, Gossypium hirsutum
  Clone ID: LIB3135-003-Q1-K1-B11
cggttacacacccttaatgccgctgctggtgctgattcagaggaagaggattgagtgtgggaatgctcatttcaaagcactaaaattattccatgcttttctttattatacattgctgttgactgcagttttgtccagaactgagttgcattttgtaaggggttgaacttatttcgcattttgtttcaattttgttaagaatttttgttattttttgcaattctagtgtaattgaattattagatttttggatcaaaaaaaaaaaaagaaaaaaagatccgaaaaaaaaacacgaacagact

SEQ ID NO: 9483 - DNA, 433 bp, Gossypium hirsutum
  Clone ID: LIB3135-003-Q1-K1-B12
gttgaagaaaatgtttcctgatgcaactgagccggtacaatatctggtgtcacattggggaacagatccaaactcccttggctgttattcatatgatccagtcgggatggcaggagatgtgtatgataagcttagagaacctttggataatcttttctttggaggggaagcagttaccgaggagcaccaagggtcggtgcacggagcttactcttctggagtcctggctgccagaaactgtgagaaccatctcttagagagattaggtgactttagaaagctccagctgatctcctttagtggtgatgcattattagaacccatatttcctctccagatatctaggatgtgaactttattttacccattacaaagacttgagtgagttgtcgtcattttctaattagatttaaaaaataaaatccaacatgtt

SEQ ID NO: 9484 - DNA, 128 bp, Gossypium hirsutum
  Clone ID: LIB3135-003-Q1-K1-B2
cttcatttacgcaactgaagttgtatctttggtgtttggtgttatacatggttattggtcagggttggttattatatcaatcctgtggtattaatctatttaataatacgtactcatatatttataat

SEQ ID NO: 9485 - DNA, 457 bp, Gossypium hirsutum
  Clone ID: LIB3135-003-Q1-K1-B3
gggaaagcgagttgaatctatggcgtcctccaagttacaggctctgtggaaccaccctgccggacccaaaaccattcacttttgggcaccaacttttaaatggggcattagcatagcgaatgtggctgactttgctaaaccaccggaaaaactttcctaccctcagcaaatagcggttactgcaactggaattatctggtcacgctacagcactgtaatcactccgaaaaattggaatctcttcagtgtaaacattgctatggctggaacaggcatataccaactaacacgaaaaataaaacatgattacttttcggaggcagagccagccgttgcatctgaatgatgacgaaatcttctgaaatcctttgtttttaatggaacaaattatcagttatcttgccttgtttttctgttaattaaaagttacactttggccctatggctttgaattatt

SEQ ID NO: 9486 - DNA, 428 bp, Gossypium hirsutum
  Clone ID: LIB3135-003-Q1-K1-B5
ctgtaactgcttactatatgtcatcggacggtccaaatcacaacgagttcgatttcgagtggctaggcaataccacaggtgaaccttacctcgttcagaccaatgtgtacgtcaatggtgtaggcaacagagagcaaaggatgaacctttggtttgaccctaccaaagactttcactcttattccatcctctggaaccagcgccaagttgtatttttagtggacgagaccccaataagagtgcacaccaacatggaacacaaagggattccttttcccaaagaccaagccatgggcgtatatagttcaatatggaatgccgatgattgggccacacagggtggcctagtgaagaccgattggagccatgcaccattcattgccacttacaaagggtttgaaatcgacgcgtgcgagtgcccagtttcg

SEQ ID NO: 9487 - DNA, 384 bp, Gossypium hirsutum
  Clone ID: LIB3135-003-Q1-K1-B7
gacacacgttcgcccacacatacccttaggctgaagaaaatacccgtaccctcgcgagaggggttggctcttagagctggccacacgatccccaagcccatactccatgacttgtacatcactgctagagcttactcccttaagaacactcgtctcctcatgcacaagctttgcacatacctatgaacggctaacctggagagcctaccctatgcgaccaacatcgagactcagcactcttacaaccaaggctaatccgaatgaataattaacacaaaacatgaacaccgtccctacggacgctttcacaatatcattcctgccgatggctctcaacttctaagtgatgatattacagcgagcgcgaataaatcggcgaagtaa

SEQ ID NO: 9488 - DNA, 382 bp, Gossypium hirsutum
  Clone ID: LIB3135-003-Q1-K1-B8
atcaaggctccttcagttttcactaccagaaatgtggggaaaactctcgtcacccgtactcagggtaccaagattgcttctgaaggactcaaacaccgtgtgtttgaggtttccctggctgatcttcaaggtggtgatgaggatcatgcttacagaaagattcgtttgagagctgaagatgttcaaggaaaaaatgttttgaccaacttctggggaatgaattttacaactgacaaactgaggtctttggtgcgtaaatggcaaaccctgattgaagctcatgttgacgtgaagacaactgacaattacactttgagaatgttctgcattggattcactaagagacgcccaaaccaggttaaaaagacttgttacgctcagt

SEQ ID NO: 9489 - DNA, 406 bp, Gossypium hirsutum
  Clone ID: LIB3135-003-Q1-K1-B9
cggacgcgtgggcggacgcgtgggcgagcaggtcatgctgcgtttggtcctttggaaggatgcatgttggcaggaagtatttctcccgttttagatagctacaaaccaattggcactgcatctacaaggttcagcggtgcttaccccaaaaatatcgacaatttgaagatggagccattgtcccgtagctataatatatactctaaactatccattttcaataccaaacggttgttgaatgctcctatatcgacacttggtggtgctgcgttgtctctccgttatgcaaacttgattattttgatagagaaactagtttcatcgcctcacttgatcagtgtcgatgcaagagacgacctatacactatgctacctaccactatgagaaatgctcttcgtgttaaac

SEQ ID NO: 9490 - DNA, 456 bp, Gossypium hirsutum
  Clone ID: LIB3135-003-Q1-K1-C1
cccacgcgtccgcccacgcgtccgcccacgcgtccgcgagactgtccctgttgatttgcttaaaggagagcacaaagaccctgaatttctcaagctccagccttttggaacagttcctgtcactcaagatggagattatgttttatatgaatcccgtgcaatcataagatactatgcagaaaaatacaaatcacaagggactgatctactgggaaagacagtagaggaaaggggtcaagtggaaaattggctagaggttgaggcacacaatttcaacccaccaatttacgccttgaccctacatttgatgtttgcttccaagatggggttccctcctgatgaaaatttgatcaaggaaagcgaggaaaagctaggcaaagttctggatatttatgaggagaggctgtcaaagaacaagtacttggccggggatttcttcagccttgctgatctgag

SEQ ID NO: 9491 - DNA, 175 bp, Gossypium hirsutum
  Clone ID: LIB3135-003-Q1-K1-C11
cccacgcgtccgaagattactaatgctattataacaaagattattgggaccacaatggggtggtatgacctccacatacatatggagaacgagacagatctcataccacttactggagctgttgcggaaaataatgctgcgggagctcttgaatgatgactgactaagaatcgga

SEQ ID NO: 9492 - DNA, 435 bp, Gossypium hirsutum
  Clone ID: LIB3135-003-Q1-K1-C12
cttaaacatgctccctcctctgtaaatcctattagacgtcaatttcccctttcataaatctttgggttttcatggaggaaatcaattgggatacccttctgctcgaggttgacttacccgatttcgggaatatcttagataatgaaccggtaacggaacctcctcctcaaccttgttcaacccagaatcccgatgaagaaccggcggtgtcttcgtggatcggggcgatcgagaaggttttgatggaggatgataattttgatcctagggttgagactcaacctgtctccgatgatgatttcttggccgatttactggttgattcacctcctagtagcggcggcgatgtggctggcgtcgacggtgctgatttgcacaaacagagccagacccacaccgacgtcgataaagacgatcccattattaagaaacaga

SEQ ID NO: 9493 - DNA, 449 bp, Gossypium hirsutum
  Clone ID: LIB3135-003-Q1-K1-C2
cagctttcctcgtaagaatgttcccctagaagacaatgcagcctctcaaataatcatatttggcttttatatcatccctttcagaggtgtttgatatgctcggatgcttacggctgtggaaggttagagagaggctttttttctcgctagttaaattggttgcctgaaggaggagcatgttgagtgccgcaactgcttctctttatgcttgcttgcttttcatctccttttgtatgtagtttctgttattatttttttctttcctatttgttaaatgttacacttaacgcatttgggttgggcatgtaattgagtttccttgtctttgacagttgactcacgtgaactggatttatgcgcaatttatgcttgtcttggaactgagttgtactaaatttatactttggtctttctataaataggtgaaacactcaacacttggtgactcc

SEQ ID NO: 9494 - DNA, 298 bp, Gossypium hirsutum
  unsure (1)..(298): unsure at all n locations; Clone ID: LIB3135-003-Q1-K1-C3
gccgctttgtttggaatggagtgctttgcatggtattgcgcacgtgagataatgggaaggggtttgactttcaccgggtactatgtttaaggggagtttggatgttttttcgccattgcacgattgaattacggccacactggatgtgcatttttgttgtttttagagatttttgaagctgagaaatcagtgaattaacactcggtatagcctgaataagttgttatagttgaaagttgaaacggcttatgttggttnaaaacaaacaatttttatacaacaaatgtatgccttaaaa

SEQ ID NO: 9495 - DNA, 456 bp, Gossypium hirsutum
  Clone ID: LIB3135-003-Q1-K1-C4
gtgggcccaagaaatggttcccaatacggggccccattcaaggaagaggagtggagtgacgacgagcaggcagatgtgcctggtgctggttccctttgcggcctgtctacagtagctgttggtggtgataatagctcctgtgtccccgagagtgtatgtgctgggccttctgtcgagtcaagtgggtggtgtacacaaccatcgatgggtcatactaatggcgatgttaatgtcaccactgccattgatactaatgcttatgctgcccctacatgcgcggatgcccctgaagttccagtggtcgctgttgctgaggatgttcctacattgttggaggcgcctcaacctgctctggttcctcaagatcaagaatcgaatgataacatgttatctatgttggagtgcttctttgaagagggtgcatttggtacacatgaaagtcagaggaggggcaat

SEQ ID NO: 9496 - DNA, 435 bp, Gossypium hirsutum
  Clone ID: LIB3135-003-Q1-K1-C5
tgcatatcaaagttggcttgaagcacaagaatttaaacatctccaatcctcgagtagcttgggagcatgaacagttctcaaggctgagagttactgctgccactctttctgaaatttcgactgctcctgaactcctacaaggcactggaggtctgtttgatagcagacaatttgtgaatgaaactgcaatcactagaggtgtaaagttagttgctgaaagtcttgcgaggcatatctatggccaccagggaaaaaatgtccaaatttttgcagatggcggtagtttggctgtaaatcctgcttatatacaatcttggctggatcttttatcacaaacacctcgtgtggctccatttctttcaaagaatgacccttttgtcatggctttgcagaaagaattagctgatcataccgatgaagtgaacatgcaacatg

SEQ ID NO: 9497 - DNA, 388 bp, Gossypium hirsutum
  Clone ID: LIB3135-003-Q1-K1-C6
gtgaaattactggacgccatccattccgtccaccaccgctatcctctgcaatgtcagaccggacaggcaacgagggagggatcgcgagagataccgagaccgagagcgtgaccgcgaaacgaatcgcaggcgatacagagatgttcgcgaccgagagcgagacagagacagggaacggacgcgcagcaagagatcccgcactccggagcgtacccgatcccgtcacacgcgctcttctacgcgttcccctgaccgtgaacggtaccgttcacgctcccactcttaggaacgctccgtccaccgtcattaccggcaccggcaccgaacaccgtcagatgaacccccgaggaaatgttaccgccatgaaagcgaggaaagggagaatgat

SEQ ID NO: 9498 - DNA, 433 bp, Gossypium hirsutum
  Clone ID: LIB3135-003-Q1-K1-C7
gtctgatcactctaccatcaccatgaagaagattctcgatacatatgatggtttccaaggggtaaaaacattggtcgatgttggcggtggtaccggtgccacgcttagcatgatcgtctctaagtaccccaccataaaaggcattaactttgatttgcctcatgtcattgaggatgctcctagctgtcctggtgtggagcatgttggtggagacatttgtaagtgtaccaaaaggagatgccattttcatgaagtggatatgtcatgattggagcgacgaacactgcgccaagtttttgaagaactgctatgaagctttgccagacaacgggaaagtgattgttgccgaatgcattctttctgattaccccgaccctagccttgccacgaagttggttgtccatattgattgcattatgttggctcacaaccc

SEQ ID NO: 9499 - DNA, 363 bp, Gossypium hirsutum
  Clone ID: LIB3135-003-Q1-K1-C8
cccacgcgtccgcccacgcgtccgcaggctacttatgataagcttttatctgaggctcctagagataagctcatcactccctcaattttgtctgatcgtatgaggattaatggatcccttgctaggaaggctataagggaattgatggcaagaggatcgattcgtttggtgtctgcccattcaagccagcagatttacactagggcaaccaacacctagatgttttgctatagttttgcttaaattagttctatgcagtatttgcctttcttgactatctgtgaacgacttttccttttgctaaagacctccatctataatgtgtgagctacagcttcttgttggtctggcttaatggataat

SEQ ID NO: 9500 - DNA, 458 bp, Gossypium hirsutum
  Clone ID: LIB3135-003-Q1-K1-D1
cccacgcgtccgcccacgcgtccgcccacgcgtccgcccacgcgtccgcccacgcgtccgggcacgcgttcgcccacgcgtccgcccacgcgtccggttttacagttacagacacctcaagaagaattttaacagagaagccatgattgaagtcatcctccattgacgaccagatgaaatactactaaagaacaagcaagcaaatcgatgctaaccaggagaagcaaaagccaacctgagaatctatccttgttgctagcctagtcctgtaatgatacaagaaaaggtttgtaatattattttacagtggtttgtgttgtacccgtacgagtgtagtaacttaaagagcttgttaaagggattagagtcataaagtactacataccattagtgtctgttatatttcaagccaaaacagaggcgtggaaatcgagtctatatcaacagctttgatttcg

SEQ ID NO: 9501 - DNA, 462 bp, Gossypium hirsutum
  Clone ID: LIB3135-003-Q1-K1-D10
cactgaaggaacagaatctcccaaaggacgacaacctaagaaagaaataaagggaccttgctctgaagatgagaaattggaagaatctccagttttgggccttctgtctgacaataaaactgtgaaaaatgataataaagaaaataaagaagtttctgagagtaagataaagaaagctatcagaaatagagcttcatatctgaaagctaattcggaaaaagtcacaatggctggactccgtcgtcttttggaggaagatcttaaacttgataaatatacacttgatccatacaagaagtttatcgctgaacaattagatcagctattgaagtctgctgaagtttctgcacctgcaagtgaggttaagaaaaaaaacctcaagaaaaattctcagagcaaaacttctgaaaagcttagcaagaaagtaatttctgcttcatcaggaagcgagaatgatgaagt

SEQ ID NO: 9502 - DNA, 458 bp, Gossypium hirsutum
  Clone ID: LIB3135-003-Q1-K1-D11
cagcatcatccattgattcccttcccttctgctccctccctcttccattaaaagagaaggcagaaagcagctatcaaaatggctactttgctagcggctgcaggtcgtagagcaactactctatctcgatccccggctctgtctcaagccgcttctctcattcctcgccgtggtcttgccggcgctgcggatcaccatggacccccgaaggttaattgttggcaagacccaatgaacccatctaaatggaaagaagagcactttgttattgtctctttatccggttggggcctgcttttctttagcggatacaagttcttcactaaaggcaaaggcaagaaggaagagaacatggtggaaacgacacattaatgaggttggagtttctaaattttacaaatagtccatgaataatgtgttgctggaacttccatgtccttgggcatcatcttcacttt

SEQ ID NO: 9503 - DNA, 455 bp, Gossypium hirsutum
  Clone ID: LIB3135-003-Q1-K1-D12
gtaagacacatatcgcaatattacatctacctttgccttacctacagaaagccttcgcacagatttccttccaacgtttttagcaaaggcccggagagaaagcatagtctagttagtagtcctacagaagccagaatcaatcctatagattataaactgtaacctataatcttgatgcactataatacctaaaatattatatgcatatcctcaccagggaatatgcgcagaaaaaagcaccttttttcactttatcactggattgcgaacttacttatccttttgatgagaatgcaactactcttacttactatcttcaaacccgcctattggcgtgtctggatcaggtgaatcgcttggctagatatctccttaagcgagatatcgttaactccttagttccttagaaaaggataataagggagaagcacgaaaaaccctagctttctgtcgat

SEQ ID NO: 9504 - DNA, 331 bp, Gossypium hirsutum
  Clone ID: LIB3135-003-Q1-K1-D2
tgttactctaccttcaaggtattcaaatttcatcagattataaaaatgaaaatataaatatgatggtcctaagggagtttcagaaggtaaggggaaaggaaaagatgatgactaaagcagctgttgaactatgctaccattgccatcttcacaattttaattccaagaaaaaatatgaaatcagtggcagaattaggtaatcggttgatatgccgacgtttgatttgatacagacagcatagaattgttgtaacaatagaatttgttattctttgttttacaccatttccccctttcgagcttctaggtgaattaatcggatatatttcgt

SEQ ID NO: 9505 - DNA, 337 bp, Gossypium hirsutum
  Clone ID: LIB3135-003-Q1-K1-D3
cccacgcgtacgattcaacctttattaaattctatataaattacattgaaaaaaaaaataagaaggggctaaaaaaaaaataaaaaagcaaaaaaaaaaaataaacttatatacacacccttctgaaaaatctatactacctctaccatcttaacaaattggcccccccttttaaaatatcaaatctttctttcccttacttgcccactttaaactctcctcttttgaccccaaactcacattctatgcccttccttttacaacctcttgccttgaaaacccctgcactatccccccttattcctcttccataactttcctttttcctccattgcgt

SEQ ID NO: 9506 - DNA, 383 bp, Gossypium hirsutum
  Clone ID: LIB3135-003-Q1-K1-D4
atccgctccgggaacaatccgtggtgactttgcaattgacattgggaggaatgtgatccatgggagtgattccgtcgagagtgcaaggaaggaaatcgccctttggttccctgaatgccctgttaactggcagagcagccttcacccttggatctacgagtagaaatcatttggtagaagctgttgaccgtcatggctctgtcccggttgtttgttgttgttgttgccagccctttgatatttatgttactattatagtttgaagtggtgaaagctctgtagcattttgggtgtataggttaagttggagttgtgttgaaagctcctattacaacgccacagtggaggtgaacagcgtttgaataatcaaagctattttgtgt

SEQ ID NO: 9507 - DNA, 282 bp, Gossypium hirsutum
  Clone ID: LIB3135-003-Q1-K1-D5
acaatttatccaaccattctgtcttttatttatgaggaatcccttcaaaaccttgcgaacggtgaccttcctttccgtaacccactgcaacttaacccatgcatacacatttgatataataaacaactgccctatacaccgaatgggctgccgccatctctactagtggcaatgagacttgaccaaggtcaagcaaggcaaattactttgacctttgtaaccacacaagcccgaatcttggtctcaaccaaatgcaattctaatgcctacgtcaaagtctca

SEQ ID NO: 9508 - DNA, 322 bp, Gossypium hirsutum
  Clone ID: LIB3135-003-Q1-K1-D6
aaatatttaaaattctttattttataaaaaagaaaaaattatttgttggtgctatttcatttttaaaagtatattgaaaaaaaaacattattactaaaacatctctttaactattctaccattttcatcttttcaaatttaatttccataaaaaaaattaaataactgtcccaaatatttaatctttttataatcccactctttatttttttcacacacctttaattttttaacaaaataaatatttatattttcttattttataaccaatattctccctttttaacattctatattaaaaaaaaactcatatatatttttt

SEQ ID NO: 9509 - DNA, 434 bp, Gossypium hirsutum
  Clone ID: LIB3135-003-Q1-K1-D7
gtctgatcactctaccatcaccatgaagaagattctcgatacatatgatggcttccaggggggttaaacattggtcgatgttggcggttgtaccgctgccacgcttagcatgatcgtctctaagtaccccaccataaaaggcattaactttgatttgcctcatgtcattgaggatgctcctagctgtcctggtgtggagcatgttggtggagacatttgttagtgtaccaaaaggagatgccattttcatgaagtggatatgtcatgattggagcgactaacactgcgccaagtttttgaagaactgctattaagcttttccagacaacgggaaaagtattgttgccaaatgcatacttcctgattaccccgaccctagccttgccacgaacttggttgttcatattgattgcattattttggcctacaaccct

SEQ ID NO: 9510 - DNA, 312 bp, Gossypium hirsutum
  Clone ID: LIB3135-003-Q1-K1-D9
cggagatcattgtattatcaaacaatacaccgttcttgaagcttgttattatggggatggctcgccttcaacgtacactagcttcttcggtgtcctacacggctgccttaaccgtgcctgaatatatggtgtcaaacgaatacagcatgacggaaactcataaacgtagctacagcaaacactgacccgttcgcccaacactccagggtcttattgtccgacaccttctctaagcttctctcatgatggacacaatattcctaaactaatgatagagtcaatgcatcactatatcagataacttccggaaag

SEQ ID NO: 9511 - DNA, 390 bp, Gossypium hirsutum
  Clone ID: LIB3135-003-Q1-K1-E1
gaaaaggaaaggaaagatgggaagctatataaggagctacgagacgggcttcgacttagttggatcgttgtatacctcgaagttaaacaagctgctaaccttgctagctgcagccctctttgcagacatagacattggccaacacacaaagatttcgtgataaggttcgggattgggcttcctgccaaggacattcttccatgtctagtagtgtaatgcattctgataatgaatttcatagtcgagaacacagaaggggacgccgtagagacgacactcaaatcgacagtgctaatcatgcagctggaagatctggaaggtgcacatgttaacgcaagaaacagcttgcttattactgaagatactctgaactgcacgataagctaaaac

SEQ ID NO: 9512 - DNA, 449 bp, Gossypium hirsutum
  Clone ID: LIB3135-003-Q1-K1-E10
aggaaaaccagcatcctccccacggtggtgttgaagcagaagcagtcggcggcggcgccgggaacctcatcggcctccgccaccacaatttcttcaactccgtcttcatgttcgttagaccatcaaaattaattcactttcacatcccaatttttacaacgccattattaatttgtttcaggctaatgctgccgctcgggatataattaattaatactagtaatataatattaagcggtgtccgagccgagctgagctgtaaagtgtaaactgtacttaactatttctattgttttgttcttatatgggttggggtgggggtggttggagttgagacaatagagaagactgaagaagcttctgctctattattattattggtattattgtatagtcagacataatatagtccattggtgatggaatggactacatttatttttctctcc

SEQ ID NO: 9513 - DNA, 444 bp, Gossypium hirsutum
  unsure (1)..(444): unsure at all n locations; Clone ID: LIB3135-003-Q1-K1-E11
atatggtatctgcgatagctttgcttgctgaacttgaccttgaatccctcatgaagaggagaagaagatcatcatatgtaagaatagtaagcaagcagatggtaggaattttcctcactatatgggttcgtaggagtttgcgcaggcatattcagaatctgaaggtgtctactgttggtgttggtgtaatgggttacattggtaacaagggatccatatcggtcagcatgtccatatatcaaacacttttctgttttatatgcactcacctgacatcaggtgaaaaagatggggatgaacttaaaagaaatgctgatgtgcatgaaatacttcgacgaactcgttttcattctctttcagcaattggacttcccanacgcatccatgatcacgaaagataatttggatgggtgatctaaataccgtatcacctgccatatgaca

SEQ ID NO: 9514 - DNA, 444 bp, Gossypium hirsutum
  Clone ID: LIB3135-003-Q1-K1-E12
caacgctccaaacttggaaatcttcgtgcggtgtttcagctagtgggatactgaggatcgtctctgctacatcctccggaaaggatttgaatctggtaacggttccaatcccataagcctcgcaattatgcttggtggctaccattgtttattgttgtcatcctcctcatcttcgcgttggtttgcaaataatatggaggcattcgcatggatctcgtggggcttaaggcttcttttggcatcaaagacaactctgctatccagagagagcatcagaacttccttgaaaaatttccatggcgaccttgcgctactttctttgtactaaaaaacaggaagggggaaaggtgacttgctctaattgctatgcgtgggaagttctgatgccgaatatcggagctcgaatgtaactagagattgcttcgaatggtctagtgacgctgc

SEQ ID NO: 9515 - DNA, 472 bp, Gossypium hirsutum
  Clone ID: LIB3135-003-Q1-K1-E2
gcgtgtgtgtgtgggagggcgcgcatgtatgtatatgtcctatcatcatctctaaatgtgtatgctgtgtatccagtccccattttcgatataaaatattaaaattaattatatattaaataaaaaaaaaaaaaaaaaaaaaaaaaaaaaaaaaaaaaaaaaaaaaaaaaaaaaaaaaaaaaaaaaaaaaaaaaaaaaaaagagaggacgtaaaaaaaaaaacaaataaaaaaaacacttgaaaacaaaaaacaaaaaaaatatagggggggggcccttttaaaaacacaaaccttcctatccctgctttggaaaataaaaaatttttttatgttgcccaaaaaaaaaaatattgggcccaattttaaaaacactgagaaggggaaaaacccgcggggtccccaacttataaactttttaaaaaaaaacccttttttaaaggtgggaaaaaaacaaaaaggtcccccccctt

SEQ ID NO: 9516 - DNA, 194 bp, Gossypium hirsutum
  Clone ID: LIB3135-003-Q1-K1-E3
gaactgctcttgccttcgttacgttacgcgcctacggagagcgtgagttcatgttctataggaatcctagcgccgatatgctgttgaagccggaggaattgaaccttgatcttattaaaactttccagggattttacttttgaacaataaggttgatcggggagccctgccgataaacttatttaaagggcatg

SEQ ID NO: 9517 - DNA, 407 bp, Gossypium hirsutum
  Clone ID: LIB3135-003-Q1-K1-E5
cggacgcgtgggctttgatcagttccataagaaagaaagaaagaaatcaaatatgggttccgagttccaagagtttccttctccttgcccttttagctgctactgttcttctcatttcatcggaagtggcagttcagaaccttgttgaacccacccttgaaaaaaccatgggggagggggttcctgaaccacccaaggttgaggttaagtgtaagaaggccaaatatgaatatggtgaatccggaacccgtggaggttatggaggatacggagggcgcggtgggtacggaggatacggagggcgtggtgggtatggtggtggttacggtggacgaggacgtggacgtggacgtggaggttatggaggaggttgtgcctatggatgctgtcattcaaattattacgga

SEQ ID NO: 9518 - DNA, 327 bp, Gossypium hirsutum
  Clone ID: LIB3135-003-Q1-K1-E6
accacgcgtatacacacacctccgccttcgccttccaatcaaggcatacatcaagcttcgggttgaacgtactaacaaacgtcatattgatgcataggatgaagaatgctgcctaggccgacaaggaagacatgaagtactggtaccctttagctgacagtgttttgttatttggcttgctgaacagaccctacattttgtattcattttgtcaagagaactgatacatctttagaaaactttattattatgacaaggatccattttgttgagcattttattaaattgagaagtttcttgcaaaaaaaaaaaatatggatttgatat

SEQ ID NO: 9519 - DNA, 77 bp, Gossypium hirsutum
  Clone ID: LIB3135-003-Q1-K1-E7
acgttctttcgtatattttaacatacgctttttccgtccgatcaaggctaacttcaatccgggggggtacatcacta

SEQ ID NO: 9520 - DNA, 450 bp, Gossypium hirsutum
  Clone ID: LIB3135-003-Q1-K1-E8
gcagagcagacagactagaaaagaagagaagatggagcaaacattcatcatgatcaagcctgatggggtccaaagaggcctggttggtgaaatcatcggcagatttgagaagaaaggcttcaatttgaaagggttgaagctcatcagtgtggatcgatcttttgccgagaagcactatgctgacctgtctgcaaaacccttctttaatgggctcgtagagtacattatctccggtccggtcgttgctatgatttgggaaggtaagaatgttgttaccacaggtcgcaagattatcggagccacaaacccagctgaatctgctccgggaacaatccgtggtgactttgcaattgacattgggaggaatgtgatccatgggagtgattccgtcgagagtgcaaggaaggaaatcgccctttggttccctgaatgccctgttaactggcagag

SEQ ID NO: 9521 - DNA, 249 bp, Gossypium hirsutum
  Clone ID: LIB3135-003-Q1-K1-E9
tcgctttcatccgaaggagaaaagctgaattccatgaaccttcttctttacatggcggggagaggtggcgtatttctacttccagcaacactcattatggaagaaaaagtggtgggtataacccttgcccttgcccgcgaagatgtcaaaaacctattggaactactattcaattaaccacttccatcctttggaaatttaccaactttttggtcacgaaacacaccaacgccctaactttgcaggttc

SEQ ID NO: 9522 - DNA, 436 bp, Gossypium hirsutum
  Clone ID: LIB3135-003-Q1-K1-F1
tcgcacccctctcttctctttctctcatatcatctctttgtccctctggaacaactttcttgagaagaggttttccttctttttctaggcaaccaaacaaataagaatgggtgatatactgagtgaagaacagattgttgagttcaaagaagccttttgtctgtttgacaaagatggagatggttgcattactgtggaagaactggcaactgtgattagatccttagatcaaaatcccactgaagaagagcttcaagatatgataactgaagttgatgctgatggcaatggaaccattgaatttgcagagttcttgaacttgatggccaagaaaatgaaggaaactgatgcagaggaggaacttaaagaggctttcaaagtttttgacaaggatcaaaatgggtatatatcaactaatgagctgaagcatgtgatg

SEQ ID NO: 9523 - DNA, 450 bp, Gossypium hirsutum
  Clone ID: LIB3135-003-Q1-K1-F10
cccacgcgtccgtcaggttgtatctggcttatccttgcccttacgcacagcgcgtgtggagcgccaggaattgtaagggtttgcaagacaagattaagttggttcctttgaaccttcaaaatagacctgcttggtacaaggaaaaagtttaccctgaaaacaaggtgccgtccttggaacataatggcaaagtcattggggagagtcttgatttgattaaatatgttgatagcaacttcgaagggccgtctcttctacctgatgatgctgacaaaaaggagtactttgagacgacgttatcacacatggacgaatttctagggctggtgtatgctacatttaaaggagactcaacaaaggatgctgatgctgcttttgatcacttggaaactgctcttgcaaaatatgatggtccattcctcctaggcaacgagtttactctggcggaca

SEQ ID NO: 9524 - DNA, 383 bp, Gossypium hirsutum
  Clone ID: LIB3135-003-Q1-K1-F11
cggacgcgtgggaaaaatttccccttttcgattcaatcatgagtaacgaatatgagtatctgttcaagcttctgcttatcggcgattcctccgtcggaaaatcctgcttgcttctcagatttgctgatgattcttatgtggatagctacatcagtaccatcggtgttgatttcaaaatcagaacagtggagttggacggcaagacaatcaagctgcaaatttgggatactgctggacaggagcgttttcggactattactagcagctactaccgaggagctcatgggataatagtcgtctatgatgttaccgagatggagagcttcaacaatgtcaagcagtggttgaacgagattgacagatatgctaatgacagtgtatgt

SEQ ID NO: 9525 - DNA, 452 bp, Gossypium hirsutum
  Clone ID: LIB3135-003-Q1-K1-F12
tgaagttaagtctgttgagatgcaccatgaatccctcccggaagctttccctggtgacaatgttgggttcaacgttaagaacgttgctgttaaggatcttaaacgtggttttgttgcttcaaactccaaggatgatccggccaaggaagctgccaacttcacctcacaggttatcatcatgaaccaccctggccaaatcggaaatggttatgccccagtcctcgactgccacacctctcacattgctgtcaaattttctgagctgttgaccaagattgacagacgatctggcaaggaactcgagaaggaacccaagttcttgaagaacggtgatgcatgtatggtaaagatgattcccaccaaacccatggtggttgagactttctccgaatacccaccactcggacgttttgctgtccgtgacatgcgccagaccgttgctgtcggtgtca

SEQ ID NO: 9526 - DNA, 459 bp, Gossypium hirsutum
  Clone ID: LIB3135-003-Q1-K1-F3
gccacctccagtggagaccccttgtccaccaccaccacctgtgctatatccaccacccccggcacagcaaacatgccccattgacactctcaagctaggcgcatgtgttgatgtgttaggtggcttagtgcacattggtatcggcagcagcgccaaggacacatgttgcccagtgcttcaagggttgctagacttggatgctgctatctgtctttgtaccacaatcaaggccaagcttttaaacatcaatatcataataccaattggccttcaggtcctcatcgactgtggcaagactccacctccaggattccagtgtccagcataaggatagtacccctttttggacaataacatcatgttcatctcatgacaagaagttataattgtcgaaaatttcgagtttccccgtaaagatatattgaagcatgacaagatgtgctgatgtatttcttaata

SEQ ID NO: 9527 - DNA, 458 bp, Gossypium hirsutum
  Clone ID: LIB3135-003-Q1-K1-F4
actcttcattttgtctaaaaaagaaaaatgccaggcctcaccattggagacacagtgcccaaccttgaagttgaaaccacccacgggacattcaagcttcatgactacttcaacaatgggtggaccatcattttctctcatccttctgatttcacgcctgtgtgtacgacggaactggggaagatggcggcttacctgccggagtttgaaaaacgaggggttaagcttctaggtttctcttgcgatgatgtgcagtcacacaaggagtggatcaaagatgttgaagcctacacgcctgggtgcaaggtggcatacccaatcgtggcagatcccaagagagggatcattaagcaacttaacatggtggacccaaatgaaaaagactcttcagggaacgagctcccatctagagctctgcatatcgtgggctctgataacaagataaagctgagcattct

SEQ ID NO: 9528 - DNA, 405 bp, Gossypium hirsutum
  Clone ID: LIB3135-003-Q1-K1-F5
atttcatcgctcccactatctgatccctcaaagcctacagaaaaaaaaaggagagcaaaaaggggcagaaagaggcggcggagaacgtggcgcttttaggcgcggcttcggtggaggaaggggtgaccgtggtccaagaggcaggcgccgtggccgcaaggacgaagaggagaaatgggtacccgtcacgaaactcggccgtttagtcaaatccgggaaaatcacgtccctcgaacaaatttacctccactctctccctatcaaagagtaccaaatcatcgaccagctcgtcggcccttccttgaaagacgaagtcatgaagatcactcccgtccagaaacaaacacgtgccggccagcgcacgcgtttcaaggccttcgtcgtcgtcggagacggaaacggaca

SEQ ID NO: 9529 - DNA, 420 bp, Gossypium hirsutum
  Clone ID: LIB3135-003-Q1-K1-F6
gctgattacaacatccaaaaggaatccaccctccacttggtgcttcgtcttcgtggtggtgggcagatttttgtgaagactcttaccgggaaaaccatcaccttggaagttgagagctccgacactattgacaatgtcaaggccaaaatccaggacaaggaaggtatccctccagaccaacagaggttgattttcgcgggtaagcagcttgaggatggcaggacacttgcagactacaacattcaaaaggagtcgaccctccatttggttcttcgtcttcgtggtgggatgcaaatttttgtgaagacattgacaggaaagaccatcactttggaagttgaaagctcggacactattgataatgtcaaggccaagatccaagacaaggaaggaatccccccagaccagcagaggttgatc

SEQ ID NO: 9530 - DNA, 444 bp, Gossypium hirsutum
  unsure (1)..(444): unsure at all n locations; Clone ID: LIB3135-003-Q1-K1-F7
cccacgcgtccgggtgatctggagctcttcacatctgttgctgagaagttctcaagtgcttggagttcagaccggacccataatttgattgtaaggctgcggcataatgtcattcggactgggctacgcaacataagtatctcatattctcgcatctcactggttgatgttgccaagaagcttagattggattctgttgctgatgctgagagcatagtagccaaggcaatcagagatggagctattgatgcgacattggatcatgcaagtagatgtatgctgtcaaaggagactggagacatctactctatgactgagcctcaaacggtattcaattctaggattgctttctgnctcaatatgcataacgaggcagtgcgtgcactttcggttccacccaattcccacaaggagaaagaaagtgctgagaagcagagagaaaga

SEQ ID NO: 9531 - DNA, 355 bp, Gossypium hirsutum
  unsure (1)..(355): unsure at all n locations; Clone ID: LIB3135-003-Q1-K1-F8
nncnnttttcttctttctttctttttttggctttctcanaaccnaaactaaaaaacatcgcgggcaggtaaggattacgatttttcatcattgacgcaagggatgttcacaaaacactgattcaggtctggtttccgatgaccaatggctttgtcataattactatacccaaaaannnnntttcacaggaatttatagctaattaagggcccctacagggaatttgattgtaaaccatgtgtagatgcagtttcagttggggnnnnncgccnnncttttcatatttgagtgatgtatgagtagatttatatgccaatactttaataaaagatagtttaggttgaattggctttct

SEQ ID NO: 9532 - DNA, 153 bp, Gossypium hirsutum
  Clone ID: LIB3135-003-Q1-K1-F9
tggattttgttttaattttgtttattattttgtgttttgtgtttaaggccaggggggaagggggcccatacagatatcaatccaaactcctgccccggttcagccgaaataaaataaatatatggaatacgaaagaaattaaacaaacataat

SEQ ID NO: 9533 - DNA, 424 bp, Gossypium hirsutum
  Clone ID: LIB3135-003-Q1-K1-G1
tttagatcttcatgacattgccttatacttttttccagtagacatggaaagatctcaaaggaattacaacaaactacttcagctcatggggatggaaaattcagtgatgataagttacattgatgatttggagttgttgatatttacatctgaacagttacatgcagattcgtggggtgtgtttaccgggtcaaataaggagttttttggtggagtcttccgccgagtgaaggaacatcagaagcttccttcattggtttcttgtacacaagatgcaggtgaagctgatgacatggtaagtggaaaaatggtagggatttcgaacatggctctttcgaaatgaagagaaggcagatagatttgtgtgttggtgaagtaaaaaacaatttagtgtaacacactttgtaagactgtacacatattt

SEQ ID NO: 9534 - DNA, 362 bp, Gossypium hirsutum
  Clone ID: LIB3135-003-Q1-K1-G10
cccacgcgtccgaaaagccccagattatacaagagtacgaatccggaaaagctgggcctgaccaacagattataggtaaactcgagagggcacttggtgcaaagctgagagggaagaagtgaggagggtcttgtcgttaatcaaacagaagttgaatatggtgtccagttcttgagtcctaaaaaatggtgatgtaaataaatgcgctctactgttactatggctcgcatgtaataacagcgtcttcgatgttatctgaagactgactatgactatgactgatgaaatgaagtgtgttcttgactgttgcaagggaaaaaaaaccctttcgaaatctccgttacaaaaagaaggggagttat

SEQ ID NO: 9535 - DNA, 458 bp, Gossypium hirsutum
  Clone ID: LIB3135-003-Q1-K1-G11
aaaaaatggagaaattgagagtttgcatagtggtgttagcttgcgtggtggtatgggcggcagcccaaagtgcttccaatgtgagagctacttatcatctttacaatccgcagaacataaactgggacttgactgctgcaagtgctttctgcgccacatgggatgccagtaagcccttagcatggcgtcaaaaatatggatggactgctctttgtggtcctgctggtcctcaaggtcaagctgcttgtggccgatgcttaagggtgaccaacaccgccactggaactcaggcaacggtgagaatcgtggatcaatgtagcaatggagggctggatttggatgttaatgtatttaaccaacttgacacaaatgggattgggaatgctcaaagtcacctcactgtcaactatgaatttgtaaactgtggtgactaaacccactttctaataaataaaatg

SEQ ID NO: 9536 - DNA, 461 bp, Gossypium hirsutum
  Clone ID: LIB3135-003-Q1-K1-G2
gagatgaactgcttgtgacagaactgatttttaatggtacattcaatgatcttgatcatcagcaagtagtagcccttgcaagttgtttcattccagtagataaatcaagtgaacaaatacagttgaggacagagattgccaaaccattacagcaactccaagaaagtgcacgaaaaatagcagagatacaacatgaatgcaaattggatgtaaacatcgacgaatatgtagaatcaactgtgagaccatttttgatggatgtgatttattgttggtcgaagggtgcaacttttgcagaggtaatacagatgaccgatatatttgagggtagcattattaggagtgctagaaggcttgatgagtttctgaaccagcttcgcgctgccgcacaagctgttggagaagtcaatttggagagtaagttcgctgcaacaagtgaaagcctacgtctaggtatcatg

SEQ ID NO: 9537 - DNA, 459 bp, Gossypium hirsutum
  Clone ID: LIB3135-003-Q1-K1-G3
cttttccctagtcagtgcttgtggctcttgctcttcacccacccctaaaccaaggccaaaccgcaaagcccaacacccccacccctactgcatccgcacgaggcaggtgccctagagatgccctcaaattaggtgtatgtgccaatgtgcttaacttagtcaatgtcaccgttggttcacctccagtgatgccatgctgttcccttctcaatggccttgtcgacctcgaagctgctgcttgcctttgtactgctatcagagctaacatcttaggcatcaaccttaacatcccagtttctcttagcttgctcctcaacgtttgttcaaggaatgttccaactggcttccaatgctaattaagtcatcactttttccttcattcttttctaactttcttggggtcgttttgcgttcggttttttaataaagtatgatgtcataacttcattgttttaattt

SEQ ID NO: 9538 - DNA, 345 bp, Gossypium hirsutum
  Clone ID: LIB3135-003-Q1-K1-G4
ggtgaacagacattgctcaatggaacaaggtaagcgggggaaggacgccaaagggatccagtcccactctaaaaggaatgaactctatggctgtacaacgagggtgccagaaaccaacccgctaactgtcgattcactgatagagctggtcccgacaccagagcggatctacctgtgcctgccggcggacggactgctaacatttacctcggtggccttaccaagactacgaacaattatctctgaacttgtgccgacgaagctaatccgcctgtttacataaaacacagcattgctatggtccctgctgatgctcacgctatgtgaattgtggacagagctcta

SEQ ID NO: 9539 - DNA, 258 bp, Gossypium hirsutum
  Clone ID: LIB3135-003-Q1-K1-G5
accaagcgttcaattgtttaaattattattttttaaagcacacaaattcaacccaccgagtggcgccttaaccctacaattgatgtttcctataaaaatgttattctttattaaataaaatattttcaaataaagacatttaaagctattcaaattcattcatatttatgatgagagtttaacaaagaacaattactagacccttagatttcttcactcttcctgataggatccaactaccatttacttattacttac

SEQ ID NO: 9540 - DNA, 439 bp, Gossypium hirsutum
  Clone ID: LIB3135-003-Q1-K1-G6
cccacgcgttcgggcacgcaaaacaagcatcaagctcaggagcttctgtgaaaaatggaacgacaaagaatgctaatgtgccatctggaggccagtcttctggaggtgcacgaggcgatgcaacacataaacctgaatttgaagccaaagttgccaagcttattgagttggggtttgcaagagaaatggtgatagaagctcttaaattatgtgatggtaatgaagaacaagctgctggaattctctttggaggctgaaaatcacttccaattttctttcatttctttttagaactaatgttctgatttcagtcacccaattacaaacttttaacgcattgagatttatgtacttcgattatctatttcattcgaactgttcatacacaattgccaaattgttgcaattcaaaagaaaactgaaattactctttttaaaa

SEQ ID NO: 9541 - DNA, 338 bp, Gossypium hirsutum
  Clone ID: LIB3135-003-Q1-K1-G7
gctacttattattgttgttctgtatcggcaaggacttgtattatttgataaagttgcagctgccaaggacaggtaaaattttctcgagttgtatacttttttttttcaaggtcatcatcagcagtgtgtttattgagaaaaaaaaaggacagcaaagcatagtaccatggatttgccttgcctacaatcatcgtcaatatgtcatttatactaattttgatacagtgttcttgcactttcttaagtgtgaaagcatttaattaataataatagtagaatctaaaatgtttgcttcggagacagcaactctaatgactgatacctaaacatgaaagaat

SEQ ID NO: 9542 - DNA, 415 bp, Gossypium hirsutum
  Clone ID: LIB3135-003-Q1-K1-G8
gaaactttataaaaaaaaaaacagttatattaaatggttgatatatcccatttcaattaaagaaaaaaaaaaaaaaaaaaaaaatataaaaaaaaaaaaaaaaaaaaaaaaaaaaaaaaacaaaaataaaaaaaaaaaaaaaaaaaaaaatagtggcgtaacaactaaacatttaatactttacgccaaaaaacatttaaaacttttgattttttttaaatacaaaaaaaataaaatcactgtctgtacattttaaacaacattttatcaaaaaatctcaattaatctatcatatatgactgaaaacatatacactcttactcatttttaaaagaaatataaatttagaattgatttctacatccaaataaataaccactcaaaacttgcacttttattcccaccttatttacac

SEQ ID NO: 9543 - DNA, 114 bp, Gossypium hirsutum
  Clone ID: LIB3135-003-Q1-K1-G9
cttttttgtcaatggtcagagaactctaggattggatgtgtctaatttcgagtaggcaagtttacattttcgtttacaaaattagaaataaaatctaggtttgcttgcttgttt

SEQ ID NO: 9544 - DNA, 445 bp, Gossypium hirsutum
  Clone ID: LIB3135-003-Q1-K1-H1
cccacgcgtccgtgacctgccattactcaaagatttcttagtgattcaatccgtcgatcaaagtagggggaaaaaatgggagggggagagcatgggcatgggcatgggcatggagttcaagatttcagggagaaggtgtggagcatgtcggggggtccgtactgccggcccaagcactggcgccgcaacactgccattgccatgttcggcgttttcctcatttgcatccccattgccatgaaatcaaccgagctcgagcaacgacctcatcagcctgtccgtccgattccttcacagctttggtgcaagaacttcggaaacaaagattattgaagtctgcctggggctgttggagtaccgatggcatatcagagcagcctatgatctgtatttgagaccctttcaccaatttagctttgttcgtgatcaataagttgtgcttgtt

SEQ ID NO: 9545 - DNA, 255 bp, Gossypium hirsutum
  Clone ID: LIB3135-003-Q1-K1-H10
accaaacgtactgactgttgtgacaagcctgtggatccgaagacgattcatggactgaaggacctgtcgctggatccatcggagatgactaaacttgacttttccgagactgatacacgggaggatttgagaggagatttgtgatcttcttgaatcttacaaaaagaatggaccaacggcccagcagggtctgcaccacccatagctgaacctgaggagctcagatggtcaatctaacactggaatgagcatcac

SEQ ID NO: 9546 - DNA, 461 bp, Gossypium hirsutum
  Clone ID: LIB3135-003-Q1-K1-H11
cccacgcgtccgccattttatggccatagatctcctattctatctatccctaatggcttgaattttgaggtaaattgattcttgtaaccaatatgaatcttggtgggagttgttagggttttctttctcacggaacggaaggctgcaaattacacgcattccactgagatggctcatctttgcgtatgttaatgtggtgttgaaggttacgttttggtatcagtttcattttgtggttgagaattgagataggaagaaaactcaaaacttatctgataatcacagcctagtttgaaacagtaagagaagggacgaaatttgactcggattggatttccgttattaggaaaagaggctttgagttgaaatatcaaaatttattgattgggggtgatgtcaaagtttactcttctccagaaaatcacatcagcaaatagcagtttatgtttacgttttcattt

SEQ ID NO: 9547 - DNA, 454 bp, Gossypium hirsutum
  Clone ID: LIB3135-003-Q1-K1-H12
cccacgcgtccgcttccttcttctcaagaccgtttcttctcacgaatcctccagatttaagacagtcttcctgagttattagaggtttatcctaacaaatctgtgaagggttgagaaaaaataaacaactatttttaatggcatctagagtttcattaaagactaaaggtaaaggagggaaggggtctaagggctcggatgagaaatcaactacgcagtgcttgaaagagtggagcacatgggctatgaagaaagccaaagtggtaacgcactatggcttcattcctctggtgatcattatcggcatgaactctgaacccaagccccaactttatcaattgctaagccctgtctgattcagttgcttatttcttaaccacccaaatcttggtttaactatgtaatttgtttgttgcctatctgtcgaaactacatggtaatatgttaggcatat

SEQ ID NO: 9548 - DNA, 464 bp, Gossypium hirsutum
  Clone ID: LIB3135-003-Q1-K1-H2
gagaaaatggctactttgggtggaattagccaggtcgatggaagcgccaatagcctggagagtgaagacctcgctcgttttgctgttgatgaacacaacaagaaagggaatacgatgctacagtttaagaaggtgacgaatgtaaaacaacaagtggtttctgggactatttattacataacattggaggcgatggatggtgacaagacgaaagtttatgaagccaaggtgtgggacaagccatggatggatttcaaggagttacaggatttcaaggttattggcgatgctcccgccggttgtacttccaccgcttaaggtgactggagattgtagaggaaaggatatcaggataccgaatgcgggttttaaataaatgtaactgtcttatgttaatttggatttagactactaaattcagtggtattgaacttaagcttatctagaacaatgaatgaataacg

SEQ ID NO: 9549 - DNA, 326 bp, Gossypium hirsutum
  Clone ID: LIB3135-003-Q1-K1-H3
cccacgcgtcctcaattagctctgctttctgaatttaagaaagcatataatcccttgttttgggggcataaagtattgtcaagcttatatgaataaatgtggatttggaggtacttatttggtaattttgggtgtgataagtttgttataaacgtcattaacagattatttgggaaccaaatactggggtttaatttttactgggttcttctgctttccaaaccaaagtaggtgtaaattactattatagtgtttctagaaattacatgatttgtaggttatttaaaaaatcttctttctgttaaaacctttgatcttttttaaat

SEQ ID NO: 9550 - DNA, 462 bp, Gossypium hirsutum
  Clone ID: LIB3135-003-Q1-K1-H4
cagaaggaaattttgtgtaaaatcgacatctggaatatgggtttcttggtaacaaccctgagttttgctgtaattgggataattgcatcgctttgtacgagaatctgctgtaacagaggtccctctgctaatctgctccacctaacactggtcattacagcaacggtctgttgttggatgatgtgggcaattgtatatcttgcacaaatgaaaccactcattgtccccattttgagtgaaggagagtgaaattcttcgcacgagatcgtttgcgaggttatcagtaaacaagctgtagtcatattgattgtggattagcctctgaatttagttgtcatgtaatatgtctttctcatgtcgcttctgtaagtaaatccttgttcaaagcttgaactttgaatttggtattatgttagcagtactttattatttggttctcatttggtcaagttctcataaaaa

SEQ ID NO: 9551 - DNA, 458 bp, Gossypium hirsutum
  unsure (1)..(458): unsure at all n locations; Clone ID: LIB3135-003-Q1-K1-H5
cccacgcgttcgcttctttccacacttgaaaatcttcatggttagcttctgcaagagggagtgggcaagattctttgggcaatttctgtttgaaagatcacatttcctcttccaactctccaacaaagtccatctcgaagaagaccctttgctacccaaatactcttccaggtaaatgaagatgcacatctccaccttggctatctttcttcaaactgtaggagacaaatgtgcaagatgcgccgacttcaagcaatataaaacaaaaaacagcagataaacctataactcttgccagagacgacagacaataacgtgctggggtagcaaaccnttctttttatatttataataaaatttaccaatactatacatacatgaaaaaaaaagtataaaaattccaatttctttcttttcattgttgttgcttttcccacttctgttctttctctttccct

SEQ ID NO: 9552 - DNA, 296 bp, Gossypium hirsutum
  unsure (1)..(296): unsure at all n locations; Clone ID: LIB3135-003-Q1-K1-H6
cactaaaatgcctcgccaaagagaaagccgagtgtggccgaataaaatgtttgtttggtgaggttcttttccaagagacgagtttgttaatgtgcaggtgagtaatggtgcaatggtactggtttgtaacgatcgatccattgcatttttcttttagcataagccaggttgccttctcttgatgttggtcatgggcttggtggatgtaaggattgatgtaatatatgtattgaaggatggtgttgactgtgttnaaaataaaatattttatagttttttattaaacttcctacaat

SEQ ID NO: 9553 - DNA, 142 bp, Gossypium hirsutum
  Clone ID: LIB3135-003-Q1-K1-H7
tgctctctctcattctcttctctattttcatatgtttacaaaagtgaaagaagaaaaaagaggaaaaaaataaaaaaaaactagacgaaaacgaatttaaatcctgctttgcttttgattatataagaatgagagttatcat

SEQ ID NO: 9554 - DNA, 437 bp, Gossypium hirsutum
  unsure (1)..(437): unsure at all n locations; Clone ID: LIB3135-003-Q1-K1-H9
aaaacccgtgtttgtgaaagtagatcagctaaaaccagggacaaaaggccacaccgtaggggccaaggtattgtcctctaacatagtccttcaaaagggtcaagccgcttctcgaaatctccgccaaacccgcatcgctgagtgccttgtaagaaacgagaccggcactgtcctcttcactgctcgaaatgaccatgttgacttgatgaagcccgatgacactgtaattcttcgtaatgcgaagatcgatatgtttaacggttctatgaagctgactgtcgacaaatggagccgcatcgaggtcactgaccctgccaactttgttgttaaagaggataacaatctatcgcttgtcgagtatgagatggctcttgtgcttgaaaatgacgagattgctgagacctatgctgctggataccgaaagagntcttatggat

SEQ ID NO: 9555 - DNA, 256 bp, Gossypium hirsutum
  unsure (1)..(256): unsure at all n locations; Clone ID: LIB3135-004-Q1-K1-A1
gcagaactggcgatgcgggatgaaccggaagccgggttacggtgcccaactgcgcgctaagctanaacccacaaagggtgttggtcgattaagacagcaggacggtggtcatggaagtcttttagcagcacttgcggaggctgcattccttattggtctggaaaagaacagcgatgttgtgcatatggctagctatgcaccactttttgtgaattccaatgacagacggtggaacccagatgcaatcgtcttcaac

SEQ ID NO: 9556 - DNA, 470 bp, Gossypium hirsutum
  unsure (1)..(470): unsure at all n locations; Clone ID: LIB3135-004-Q1-K1-A10
natttgctatggcaatgaaaaagttttggctttcttcgaatttgnatttcgaaccgcatgaggctgattgcaagatcaatgggtctttactaccctctcatctgcttcttcttctttggatgtgttgggctatgttgtggaatgttaggaccttgaaatcttctgaaaggaaagggaatctattattgcttgatattaatcatttggcgttgtctgctgttgttgcatgtgctgaacatgatagcagctttgatttatggaattgttatatagtatgcttggatgttcagcttcccgtgggaaagtttcttaattgtgcaataaccactgcgccaatactttcatactgccttacacaatatgttaatagaagacttcaaatctcggttcttgcagaagatgaaacatgatcttcaaaatctatttcatgaaatttgttttcaaacgcatttcatgctttacttttaaca

SEQ ID NO: 9557 - DNA, 161 bp, Gossypium hirsutum
  unsure (1)..(161): unsure at all n locations; Clone ID: LIB3135-004-Q1-K1-A11
gncaacggatatctcggctctcgcatcgatgaagaacgtagcgaaatgcgatactgcgtggtaattgcagaatcccgtgaaccatcgagtctttgaacgcaagttgcgccccaagccattaggccgagggcacgtctgcctgggtgtcacgcatcgtcgcc

SEQ ID NO: 9558 - DNA, 466 bp, Gossypium hirsutum
  Clone ID: LIB3135-004-Q1-K1-A12
cttttacttgttcggtttttgaaatctgctttctattcaatctttcactgaaaggaaaaggaaagaaaaagaagcaaagcgttaaaaatgaagtcggactttgtactgctgcttttctgtatgctttgaaactgtggtgtgttgactaatacttctttcctttttggtaatttctccttatgctttgaacttgtgaacagtgtggactaggtgatgcatttcgctgcagtacatgcccatacaagggtcttccaccattcaagctgggcgagaaggtatctctgtcagggaacttccttgcagcttgcatttgaactcccaaattaatggatttttggccaaaattttagtttttgaacccctcaaaacattagatactgattttggtttagtgtttaaatgtggaagtttaaaaaaatacatgcagttcttatgtaagtgttcaagtggatattttatttttaat

SEQ ID NO: 9559 - DNA, 214 bp, Gossypium hirsutum
  unsure (1)..(214): unsure at all n locations; Clone ID: LIB3135-004-Q1-K1-A2
tncagaacaatgggacatattgtttcaaggcatcaatctgttgtgattacagacgcgcaactgctaaccgacttacgacaagctcttnatgctcttccgattaagatggttaaagcggaaatatcaaccttgggtagtcggctgaggaaagattttgtttttaccggttgccgaaccaccgcacatggtgatgacgccgagtcatggcaacatc

SEQ ID NO: 9560 - DNA, 342 bp, Gossypium hirsutum
  unsure (1)..(342): unsure at all n locations; Clone ID: LIB3135-004-Q1-K1-A3
cggaacgaccgacgcgaccacgacatantaagagaggtgagcacttacattatttattagaaacctagtaatttctttgcgtacactgaatagcatatgatttctaggagcagaaaaaatcgcctatgaatggatctttcttatagtcattctattaataagtttcattattttatatcgggaaataaataaaaaaaagaattggattcttttgttgctaatccattttttgttagtgattttggcttttatcttacgctctttcctatccgagatgatttcgactttgctaggagtttctttggttttttgcttttcttcggactcgagtgggggtggaca

SEQ ID NO: 9561 - DNA, 441 bp, Gossypium hirsutum
  Clone ID: LIB3135-004-Q1-K1-A4
gcatattgctgctggagatttactgagagcagaagttgccgccgctagtgaaaacgggaaggtagcgaaggaatacatggagaaaggagaattagtccctgatgaaatagttgttatgatggtcaaggagcgtctgctgcaacctgattctcaacaaaggggttggcttttagatggctatcctaggagctcatcccaggcagctgctcttgaggattatgggatccgtcctgatgttttcattttgttggatgtttctgaagacattcttgttgagagagtggttgggcgaaggttagaccctcttacggggaagatataccacttgaaatattctcccccggaggacgatgaaattgcatccaggcttacacaacgatttgatgatactggaaaaaaaggtaagttgcggctacgcacacatcaatcaaaatgtggatg

SEQ ID NO: 9562 - DNA, 228 bp, Gossypium hirsutum
  Clone ID: LIB3135-004-Q1-K1-A5
cccacgcgtccgattgtttgatgaaaaccaaaaatcgggtccagagctagagagacactttggcttatttttaccaaacaagcagccaaaatatcagctccgttttggtgggggaaggcattgggatattgcttctaaggaatataatgcaacatttcctcttaaatatgatatgtaaaaatctgcaaagcttggggaatttggggagttttggtcgctttgtttatt

SEQ ID NO: 9563 - DNA, 409 bp, Gossypium hirsutum
  unsure (1)..(409): unsure at all n locations; Clone ID: LIB3135-004-Q1-K1-A6
gtcccacattaaagaagaggtccttgtgcctggacctctgtgttctgcagggactacattggagaatggaacagatcatgttgtcaagactgaagaggctcctataggagcatttcattttgttggtgcattgccagaagagaacaaagaatcaaaaaattatacgagtaagaaagtactggatgcagtggctgctgctgaggcaagaaagcggaggaaagaacttacaaaactaaaaaaccttcatggccgacatcgttcaccattgagtttgtcggcaaaaatctagacatttgtgactatggctgcaagcatatctctcagtcaattttcaaggctagaggtattttttctcaggctntcctttttcctttttttaagacagatttacattccccgttttttgttt

SEQ ID NO: 9564 - DNA, 245 bp, Gossypium hirsutum
  unsure (1)..(245): unsure at all n locations; Clone ID: LIB3135-004-Q1-K1-A7
gcgaccgacgcgtccgcccacgcgtccggccaatgggacatattgtttcaaggcatcaatctgttgtgattacagacgccaactgctaaccgacttacgacaagctctcgatgctcttccgattaagatggttaaagcggaaatatcaaccttgggtagtcggctgaggaaagattttgtttttaccggttgccgaaccaccgcacatggtgatgacgccgagtcatggcaacatttngactgtt

SEQ ID NO: 9565 - DNA, 409 bp, Gossypium hirsutum
  unsure (1)..(409): unsure at all n locations; Clone ID: LIB3135-004-Q1-K1-A8
cggaacgaccgaggcgaccgacgcgtacgggaggccaacagggggaaccctgttcgcgagaacgccacgttctctctcggggctgacggggaccttgtcttggctgatgccgatngtcngattgcttggcaaagtaacactgccaacaaagctgtggtagggttccaattgttgcctaatggtaacatggtgttacacgattccaatggcaagttcatttggcaaagttttgatcatccaactgacacactcttggtgggtcagtcgcttagagccggaggggcgacgaagcttgtgagccgngcttctgctcaaacaatgtcacggagctatagcttgtgatgagctaacagtggtttgcagacaaggatgactctctaacactgttacttaatatcgttggcaatca

SEQ ID NO: 9566 - DNA, 378 bp, Gossypium hirsutum
  unsure (1)..(378): unsure at all n locations; Clone ID: LIB3135-004-Q1-K1-A9
aagaaccatgctctttgaagaaatgtgaccacatctttgaacccgcagcacactttcgcaagactgtggtcccatgcttatatctatgaaacagtgtgttcagcactttacttacaatccaagatacacacggacttgtaacccggaattagtgagatggatcctgttagatggtctggttcaaaatggagatgcctgctggtatggttgcagacattgcttatacatttccaaaatatgttcaacatctgagtggactgaaatttgctcttctgcttctcttgtacttttttacatcatggtatgtactagttntgttactataggtctgattttgcttaaagattttagctgaacctttaaatgaaatgcaataca

SEQ ID NO: 9567 - DNA, 361 bp, Gossypium hirsutum
  Clone ID: LIB3135-004-Q1-K1-B1
ttttatttgtattcagtatgcaaaaatgtgcttgtgttcgtaaaaacgaagccccacaaaggaaaaaagatacaatgctttatagtcgagagaagaaaataataaaaatatacaatttttctgctattttcttgggtctgttgtctctttgtgtttggtgtgcaggtacggaatgcgttggcatcgtacggaggtgcggccatagcgtacgagggctgcgcactggccgtacggtgctgaaggcttggcgtggttactggaggttggagtgtacggaagcgcttgggggctcggctgcggcgcaaagtggaagagagccctagggtttctgaaatgttgacatttgggcttttgggcctat

SEQ ID NO: 9568 - DNA, 433 bp, Gossypium hirsutum
  Clone ID: LIB3135-004-Q1-K1-B10
gcagttgcggccaagacctagagctactaatgtcgcttttgagtgtggctgattgatgggtgaagcaacttagggtcgaacaccatgacttcaattatttcaccggaattcgacgtggctaaaacataaatttactttacaagtaaattttcttcgtgaaaccaatcccatggattaaagcgactgatcactaattaccaaaaaaaaatacaaaaacaaaaaaaaagagagaaaaaaccaaaaaaaaaaaagaaagaagagaaacctaagtacgggttttattctggttttgtgctttgtgaagtaatagggggacctttaaaccttatgagcatttgtggtttgcacttaatatcgaaaaccctttcaaagtgtccaatctgaggccacccatacaagatacagcaagtggagctgttttagccctgtttcg

SEQ ID NO: 9569 - DNA, 366 bp, Gossypium hirsutum
  unsure (1)..(366): unsure at all n locations; Clone ID: LIB3135-004-Q1-K1-B12
cacttcatccaccacttgcnccatctttttcttcgctttctcctgcttaacgttttttggagcttattcatgtttactggccgcatcatcaaaaaacgcataccacaccaagtacagaggaatctttggcggagaggacatttcatgtgctacactgaggaaaggcgtatttgctgctggagctgctctaactttgttgtcattggtggcatcagtcttctattactgggctcactctatagcttatactggtggattgcagaaacatcttaattaaggctttggaatgacatatcagcctcccgaattttgtaaggtctgactcttattttcctcactgctttttaatttcctaaaatttttttg

SEQ ID NO: 9570 - DNA, 358 bp, Gossypium hirsutum
  Clone ID: LIB3135-004-Q1-K1-B2
gcagatctgtggttctgtgagtcaaaagccgcgtcaaaaaagatggacttatttgcccttggtacccggtgtctgggccttgcgctgacttctaagattccccacagctctcaacaaaatcccaagcactgttcattcgtccctacgctgaagatccaggaaagccaactccataaatcaaaatggttattgttaagtacccaggggaaatttaactaactccaaatttctttcactataaggcatctttggaaaacgtggaagctgtcttctacttcctgaccgcatctcggacaacggtcttcagtcataactcttttcagcttaagagtaattccatagtgtaattttaattttt

SEQ ID NO: 9571 - DNA, 399 bp, Gossypium hirsutum
  Clone ID: LIB3135-004-Q1-K1-B3
gcttcacacactatccacatttcctcagtggcttacaacacacttttcctcggagaatttgtgcaacctgattgggatatgttccatagcttacacccagctgcagattaccatgctgctgctcgtgctgttggtggatgtgctatgtatgtcagtgataagcctggcaaccacaattttgagctcctaaagaagctggtccttcctgatggatcagttctccgcacccaattgcctggcaggcctaccgttgactgccttttcgctgatccggctagagacgggattagcttactcaagatttggaatgtaaacaagtgctccggtgtggtgggtgttttcaactgccaaggtgctggttggtgcaaggtcaccaagaaaacccgaattcatgatgca

SEQ ID NO: 9572 - DNA, 336 bp, Gossypium hirsutum
  Clone ID: LIB3135-004-Q1-K1-B4
gcggggcaaaccatacgttttggtaatcccttattcaacacaaggccatgttattcctctcgtggaactcgcccaaaacttagccaaacaaggcatcaaaatcagctttgttaacacagtgtttaatcacaagagggtcctagatgcattcggcgagaaggtggatgaaaatggcttacttcatctactttcagtccccgatggactggaagatggggaagataggaatcagttagggaagttaactgaaagattatgccaggttatgcctactcaactcaaagagctcattcataaggttaatggatcagattatgataagaattcctggggttt

SEQ ID NO: 9573 - DNA, 294 bp, Gossypium hirsutum
  Clone ID: LIB3135-004-Q1-K1-B5
ggcatggttgcacttagaggcaacgactgatcagctgaagcttgctgagccagaacgctcgggtgcgcgtagcagatatgacaggtcgatagaactccctggcctttacccatatatgctgctgacctacatggacacataacgtacgacttgtgaatgccatgctacatccgcagcagaccgatcagcatctgctacacattcttggaagttcatagaacctaacgtaaatgcatacaagcgatgtgctaccatggacccccagaggcctctcaagctctgaagtcaagacac

SEQ ID NO: 9574 - DNA, 255 bp, Gossypium hirsutum
  Clone ID: LIB3135-004-Q1-K1-B8
cagccttggtgagaatcgaagtattgcagcacacactgtggtcttactcatgaggaagtagagtactggtatcgtatagcattgttgtttactgtcatagacaactccctgtattcagttggatccgaacttgagcaataattatatgtttcgaccggccacagtttccaaatcggtcattggtctatgaaagtttgtcaacgactcaacattacaaagataaatttattttaaaattccatgtgttcaattcct

SEQ ID NO: 9575 - DNA, 470 bp, Gossypium hirsutum
  unsure (1)..(470): unsure at all n locations; Clone ID: LIB3135-004-Q1-K1-B9
ntccacccttacttttacataattataccgatataacaacaaaaccttcaanttgttcttttgttaatattaatcagaccctacccaaaaacacttttatttttataattttatatatactaataattatattaattattttttaattaaaattatatatatatattttattttttttttattttttttcttattttttttttctatttacttacttttattaaatatttaattttttttattctacccaatatttcctatttttcaacctttttcttcttccctcctttttatttatttacaattttggggggatatctacattttttaatttttatatatttttatttttcttatcattttttatttatctttctattttaatttatatttaaatttttttactttttcattttttaatattattttatatttttatttttattccaattattttttttaattattta

SEQ ID NO: 9576 - DNA, 410 bp, Gossypium hirsutum
  Clone ID: LIB3135-004-Q1-K1-C1
tagaaaactcccacattttcatctctttcactcacaaacaagcacctccaaatccaatgggggctgcagctccacccccaccaccatccgccgcccctgaaccttccatggcaccacctgaaacaaccccgataggccaccccgtcttcaccaggatccgcctagccaccccttcagacgtccctttcatccacaaactaatccaccaaatggccgtctttgagcggctgacccacctcttctccgccaccgaatcttccctatcttccaaccttttcctctcccctcctttccattcattcacaatttttctactcgaactttcctcttcccccattcctcctctcctttccccttcaccatctttcactcccatagaaaagacattcaacttcgacatccccttaaac

SEQ ID NO: 9577 - DNA, 355 bp, Gossypium hirsutum
  Clone ID: LIB3135-004-Q1-K1-C10
ctttcacgcttcctctacctcactcgctgtgccaacaaaaccaggcatgtccatggattctgttctacatgtaaaaggtaagaagcctaaaaaaaattttatatgggttcaaattctttgcaccatcaatttttatttttatttttacgatttggctttaaaattaagatataataataataataataataataataataaagaaacacggaattttgatttaggctattcttgcttatctttgatgggcaagaatagtgagagagtgcccttgataaaacacacaatggttgataagcgagacttttcatttcaatgtaattcgctatacatttcctctgaggaaaagaaatat

SEQ ID NO: 9578 - DNA, 287 bp, Gossypium hirsutum
  Clone ID: LIB3135-004-Q1-K1-C11
ttcacactttcttaatgattgtaggtttggtcaacaatcaatgataaacgatggggtatggtgcaaaaaagggattctgtaaactgaaaaaataatgaccttttgtatatgaattatgtggcttaagtggaaatgggggagagagggttgataaagagaattgaaggaggtggggagagattgtttgttaacaaaaaaaaatgtggaaggggttggggccttttagaggttccaatcattactgctatcatttttgtaccttattaaattacagtttgatcctttaa

SEQ ID NO: 9579 - DNA, 361 bp, Gossypium hirsutum
  unsure (1)..(361): unsure at all n locations; Clone ID: LIB3135-004-Q1-K1-C12
cccacgcgtccgcccacgcgtccggcgtgttgagtgtgtcatggttttgaatctggacaaagtatanagagaggactaaattagtgatagtagtgtggggatgaatctgttgcaagtattggtctctagggttcctttgacagcttaagatttgctaagcttttgtgctgtatacagatctgtatgacggatttttcttctagtggtggctttttctttttcttttttttggtaaaccannnnaaaaaaaataaaaaaaatattaaaaataatataattatttaattatataaataattatatgaggtgttggtttttatattattatatatatttatttattttcttcttttattatatt

SEQ ID NO: 9580 - DNA, 417 bp, Gossypium hirsutum
  unsure (1)..(417): unsure at all n locations; Clone ID: LIB3135-004-Q1-K1-C2
gaaagaacaggaggatggggttcgatcagctggaggatattccagaggagagagaaggaggaggtgagagggacggtggattctgttgcacttgtggagaaacggatagtgggggagaagaggtggatatagaagcggcgggtgtaagctgggcctttgatgtgggcatttggatcatttgcttcggggttggatattttgtttctaaagccactgccaaaagcttgaggcgcatgcgattactttgacagtgttaaaaaaaaaatttaccttggggaatttatattctaaggttgtgttaatcttttatttgttacccaaatttagaaattttgtgaaactccaattcgagtgatttattgtaacaaacgaattattggggaaaaagtactttgcaaaaaaaaaaatntaatttaa

SEQ ID NO: 9581 - DNA, 405 bp, Gossypium hirsutum
  Clone ID: LIB3135-004-Q1-K1-C3
tatgaatcccgtgcaatcataagatactatgcagaaaaatacaaatcacaagggactgatcgactgggaaagacagtagaggaaaggggtcaagtggaaaattggctagaggttgaggcacacaatttcaacccaccaatttacgccttgaccctacatttgatgtttgcttccaagatggggttccctcctgatgaaaatttgatcaaggaaagcgaggaaaagctaggcaaagttctggatatttatgaggagaggctgtcaaagaacaagtacttggccggtgatttcttcagccttgctgatctgagccacctaccatttactcagtacttggtgggtcaaatgggaagggaatacatgataaccaacaagaagcatgtgagtgcttggtgggatgatatt

SEQ ID NO: 9582 - DNA, 304 bp, Gossypium hirsutum
  Clone ID: LIB3135-004-Q1-K1-C4
cccacgcgtccgcttccaagtaccctttctttgatttacatctacagggaaaattatgaacgagagaggagcaataaggcctcaagcagcctaccaggctgtcgactacggcgatgttttcggtgtcaccggtgctacgccttcatttccaactccaacgggtgcggttggtgaaagtggcatcaccattggagaagctttggaggcaacagctatctctgttggcgacaaaccggttgaccgaggtgatgcagctgcaatacgagcagctgaggccagagctgctggtggtaacgtcacccaa

SEQ ID NO: 9583 - DNA, 344 bp, Gossypium hirsutum
  Clone ID: LIB3135-004-Q1-K1-C5
gcgcccacgcgtccgcactcttggttataaaacagtgcttaagtccctcaggagctccaaaggggagactgagtatcatttcgaacaattgtccaccgctgaggaaatctgagattgagtactatgcaatgctctgtaaagtcggagttcaccattacaatggaaacaataatgatctaggaactgcttgtgggaaatacttccgtgtatcctgcttgagtattgtcgaccctggtgattctgacatcatcaagtctctaccaggtgaccactaagtcaatgaaggtctggttctctatcacagcagaatgatgatgtttctttacttcctcacgatattattt

SEQ ID NO: 9584 - DNA, 320 bp, Gossypium hirsutum
  Clone ID: LIB3135-004-Q1-K1-C6
gcgggccgtactttgaacctagtcaatggatactacataacaccccaccccctacagcacacgggtgctcgacgcaatagcatccgcaaatattacacacctactcttccaacaaactacaaaaaccgcaactactcactaccataaacaatgtaccttctatattaacactcgtttcactgaaataccttatcaactaccatactgtcattttcattgtacttgcatatagcatgcttacacatcttgttgtaaaaattatgtaacagcactcacttctgcaccctattcccaataagctggcatttacacccacttct

SEQ ID NO: 9585 - DNA, 469 bp, Gossypium hirsutum
  Clone ID: LIB3135-004-Q1-K1-C7
cccacgcgtccgcccacgcgtccgggcaacttgtaatgatgattgtaagtctcgagattcgagtgagagcagcaagagatcactttcagcattcgttaaggataagaggggctgttacaagagaaagaggtttgctcaaacaaagatagtggtgtctgataaaatagaagatgggcatgcatggagaaaatatggacaaaaaaatatcttacattctaaacatccaaggagttacttcaggtgcagtcacaagcatgatcaaggctgtagtgctatcaaacaagttcaaagaatggaagatgatgcccaaatgtaccacatcacatacattggtacccacacttgcagagaccagtactcatccatggctacaccacgaatcgacagtccgagtccgatattaaaactcgaatccgaggaacaagcgacgacaccaagcaatgttacggatttggattcgatgaccatg

SEQ ID NO: 9586 - DNA, 325 bp, Gossypium hirsutum
  Clone ID: LIB3135-004-Q1-K1-C8
tcccacacatccacaatcacaaccccatatttcaaaattacacaattttaaaatgtcctcgggagatttaatctccaaaaaacgtaacatgtcatccaatgccatatctttatgcagttcatttttgccactttgatgccactgagaccaaagctttcagactccaactagttggtgacattagtggagataaagtccatgctcttgatgtttgccatatggatacttcttgttgtagcaccgatcatgctgcttttcgcatgcttggtattaagcaaggaaacgctttttgccatgtcttttctcagggtaatcttgtttggat

SEQ ID NO: 9587 - DNA, 425 bp, Gossypium hirsutum
  Clone ID: LIB3135-004-Q1-K1-D1
cccacgcgtccgacgtgcagcatgttaatggcctctgtttcttccttctcttgtgttctcggcgtttggcatctcatgtttaatggaagaacttgataatgcaacacgtggaccattcagctggggacctgattcatctattgcaaggattgcttagatatgaccctattgacaggctgacagctcgggaagccttaaggcaccctttcttcagtagggaccaatttaggcgattgagcttggctggcattggttggcctggaatgaatgaatatctaagaaagtagacaaggattcatatatgtaaatattactaacctgtaatacttgttaacactagcaccttctgtgtgcgttaaaggactgaattgtggtgcaaacaacagaataaaacaccatttagttagattgtgactaaacccttt

SEQ ID NO: 9588 - DNA, 406 bp, Gossypium hirsutum
  Clone ID: LIB3135-004-Q1-K1-D10
tactttctaatattgctactttcattggggtttttcaccactccctctttaggttgctatttttctacttactatgggaagccccctactcctatttataaacctcctaacgttaaacccccaccttattaacatcctttttataaacctcctaatattaaaccccctacttattaacataatccccctttctattaaccaccaaataattaaaatccttaactctaatccatcagtttatacaccttcaataaaatatattcctttacctcaaccactattatttgaacctccaaaaaattaaaagctcttacctaatccaccattttatacacctaccatttaaatataatctcttacttcataccatctctatattaaaccccctaaaaattaaattccctta

SEQ ID NO: 9589 - DNA, 315 bp, Gossypium hirsutum
  Clone ID: LIB3135-004-Q1-K1-D11
taaaacaacaccactgaatagcttttgtcataacataattcaaatctctctctccctttctctcttttagaaaacccatttttctatcttttttatttcttttaaaaaacataaaataatacatattaaatttaatatatatcatcattattatcatcatattaattatccttcattttattcttcatgtctcaatatcttaattatatttttccatatctttcattattttataacaacaactttctattataaacttctttaaacttatttatattttttataattaaattttattactttccccatcctttt

SEQ ID NO: 9590 - DNA, 359 bp, Gossypium hirsutum
  unsure (1)..(359): unsure at all n locations; Clone ID: LIB3135-004-Q1-K1-D12
gctcttcatcggcatgagttacttcttttaaagggttgtatcatatggattacnggtgtcagtgtttcaagaaagagcgcattggcattctcgctgtgccatgccttgtattcaaagggaaagttaacttacatttcttgatggtgataatgttcggcatggcctaaaccgtgaccttacttttaaagcttaagatcgtgcatagaacattctaaggattggagaggtggcaaagctctttgttgatgctggcatcatctgcattgtcagtgtgatatttccctaccgaaaagaccggcatgcatgccgcgcgctgttaccagatggagatttcattgaggtgttcatggatgttccaa

SEQ ID NO: 9591 - DNA, 333 bp, Gossypium hirsutum
  unsure (1)..(333): unsure at all n locations; Clone ID: LIB3135-004-Q1-K1-D2
caaaactgcanctggtgatcattcacagctgtcaggaatgcagaatcaacatcccaatgggggttctggtggagtggctggaaatctctcaaatgtaaaaatattgagcaaatctaatggagcaaattctgagagatcaagtctgaaaaatgttgaaaggcaggcctctggtcagggaaggtctaattctaattttgctggaaaacagcagggcaggtatgtggcttaatctttcagcggatagctgatggttatttataagtatgtttgtatgcctcaacttgttaaagcttaactgtcctgtacaatggcagggcaactggggcagcttta

SEQ ID NO: 9592 - DNA, 444 bp, Gossypium hirsutum
  Clone ID: LIB3135-004-Q1-K1-D3
aacttctttgctttctttgtattagcagcttgtgtagggggaaaaaattatgaagagggtgtcctttgttgccttgtgtgtggtggcactcgcggtggtgctgttttcgggtgaaagtcgcacggcggaggcagtgacatgtaatcccgtggagcttgccccctgctcgccggcgcttacgtcgtcctcgcctccatcaagcgcttgttgcagcaagctgaaggcgcagcagccatgcctctgtggatacattaagaacccatctcttaaacagtatgtcaacagtcctaacgctaaaaaggttgcttcgacttgtggagtcccatatcctaagtgttaaatgttgcttaatggtgtatctactatctactggcagcaaataagtgattctttttgctgtcaagtactgttcttgaataaaagaataatgattaaatatttgat

SEQ ID NO: 9593 - DNA, 339 bp, Gossypium hirsutum
  Clone ID: LIB3135-004-Q1-K1-D4
gcaaatgttgggagctttagtttcggcgtgaatgcataagtagatttccttaactaacttggatgacgtggtggacagaattacatttgaagctatataaggaatgaccttttttatccatcaaggcgaattccccgtatttacataagtattccaaacattgattctgtaggttcaagtttgaccctttttaatttactcccatttgtttttctgttgtctatttctgcccttttttttatttttattttaaaataattaatatgtttgagagttgtcatttagttagtcacctactttttctttattaatgataattattacacggcttctattttt

SEQ ID NO: 9594 - DNA, 398 bp, Gossypium hirsutum
  Clone ID: LIB3135-004-Q1-K1-D5
tgattcatggctcccccactgctcaacctgcctccgctgaaaaacaaatcgatcatgaagagaacggtgctgtttcagataacaacaggtaactttgtgaatttaataaaataacagagtgcagcactttgtaaattgttatcttatttatgatcatgtgaaatgattgtgggtgaggcctcagaaaatacaaagatgatgcaaagggttgattctgcatattttttaggctttgattttttagataatgttttgttataactacttataagctatttgtcactaatacttcaaaaaaatttctatttgtttttaacaaactatatggccttttgtgcgaccatataagaccaattttttctttgaagagtacttatattaaagagctaattttgggg

SEQ ID NO: 9595 - DNA, 372 bp, Gossypium hirsutum
  unsure (1)..(372): unsure at all n locations; Clone ID: LIB3135-004-Q1-K1-D6
cggacgctttnnctccccggtataactgatttcccttttggtataaaagatttcgggtactgcatatggaccataacgcacagcaaaagaaccggcattgatctattgtaccactttcaagaacccaggacaaagacaaaagatatggctactgtcttcctcttcaagtctgcaccgaggacaccaagcgtactttgttactttcttagatcttagattaactagtaaatgaatatagttccaggaaattcgccagaccagcatctttattttacctggtatctgtaaatcctataagttctaaaagaaatttcttgtttcgggtagtaaaagataaacattatgattcaaggctgcattatgtaatggttt

SEQ ID NO: 9596 - DNA, 372 bp, Gossypium hirsutum
  Clone ID: LIB3135-004-Q1-K1-D9
tcccacgcgtccggtcaaagtttctctctctctctctctctctctattgttgaacgtcataggcttttgtatcaatggctgaagtccttgaccgcaacctgcctcaccaagttcaagttcacccacagtaccgtttcgacaatacaaccggaggcggttacggtgcaaagaactatcacagtggaccatcaacaagccaagttctagccgtccttacacttctccccattggtggtacactgcttgcattagccgggttaacactggccggcaccgtcattgggctgatgctagccacaccgctgttcatcatcttcagcccagttcttgtcccagctgccattgccattgccatggcagtgactgggttct

SEQ ID NO: 9597 - DNA, 432 bp, Gossypium hirsutum
  Clone ID: LIB3135-004-Q1-K1-E1
ccttcagccaattccatggctcttcaactggtttcatctgaccctgatttatctcaaagggggttcttgcacacttcagatataatggatattacaaatgatttgaaggactatgatgttgtgttcttggcggctcttgtggggatggacaaggaaacaaaagttcgtgtcatcgatcatgtggctgagtacatgacccctggggctcttttgatgctgaggagtgctcatggagctagggctttcctttatccagttgttgatccatgtgatctacgcggatttgaggtcctctccatattccatcccactgatgaagtcattaactctgtggtcattgcacgtaaaattccaatcactaaacaatgctccgttgagtaccctcttgccccaacaaaagcttccaacacgtgttttgacaatgaaatgttc

SEQ ID NO: 9598 - DNA, 330 bp, Gossypium hirsutum
  unsure (1)..(330): unsure at all n locations; Clone ID: LIB3135-004-Q1-K1-E10
cccacgcgttcgctaaaacagagttcagtatcagcagccatgggaatcataacggtagccggtggatacgccttgtgaacctggatnttgttattttccatgccgctcttaaagaatttcacctccaaaatcgtcggtttcctcggcgcccaaacgttgcctttggcgactcttatggtctcgactgtcttagtcagtattttagtcatgattttcagctttatcggcaacgttttcggctgcgcaagcttcaatcccgcggcttctatgacttttcacgttgcgggtctcaagaaaaacgactccatcctcttcatggccgtcagattt

SEQ ID NO: 9599 - DNA, 376 bp, Gossypium hirsutum
  unsure (1)..(376): unsure at all n locations; Clone ID: LIB3135-004-Q1-K1-E11
cccacgcttccgcccactcatactcccacgcttacgtaaacaccccacctacgcgcgggagggttattgtctacatggatcacatttcntatacatattacaacacaacaaccaccatattgtctaaagaatccttcccaagacatgtccaaaaagctcataatttacaacaaccaactttgcaacatattcatctatatgacagccattctccatccccttattaaatgttaactcatacctaagagtttcaacttctaaaactatctataataagcaccatcccattttttaaaaaaatattacaccacccctttttatccatgacaagttgatactcttcttaatatatagaacatggatgagctttttcttt

SEQ ID NO: 9600 - DNA, 363 bp, Gossypium hirsutum
  Clone ID: LIB3135-004-Q1-K1-E12
aaaaaactaattcttccatttcctttttttattgaatacttaaaccctaacatagacaaaggtttaattcaatccagacaaattcttatcactactataaatactgccaacaacattccatctcacaatacaacaaaaagccccaccttttgcctaactctaaacatagatggaatatatggtaaaacctcttaacatgtaatccataatatcccaaattttcatgaatatatctaggactaaacaagaaataacataattgctattctaaatacatttaaccaacgtttaacccgataaaactatcctgtatcctctatattaactactcaacaactaatatttcttattacataacttcta

SEQ ID NO: 9601 - DNA, 349 bp, Gossypium hirsutum
  Clone ID: LIB3135-004-Q1-K1-E2
aaattaatgaacgttgtttttcatctaaaaaataaaaaaaaaaaaaaaaaaaaaaaaaaaagaaaacttgaaaaattaaaaaaaaaaaaaaaaaaaaaaaaaaaataaaataaaaaaaaaaaaaaaaaaataaaataataaaaaaaaaaaaaaataaaaatgccccccccctttaaaaaaaccaaatttattatcccctttatcccacataatatttttttttttatgtcccctaaattaaattaacattccccctttttaaaacctctatacttgaaaaaccctttcttttcccaactaaattatctttcataaaattccctttttcctatattttgtaataacaaaa

SEQ ID NO: 9602 - DNA, 373 bp, Gossypium hirsutum
  Clone ID: LIB3135-004-Q1-K1-E3
gcagtcgactctgacgattccgacgatgtcttcgtctgcgagatatccaagaataggagagtttcagggaggaactggaatggcaagatttgggttgatattcgtgaattttatgtcaaggatggtaaacaattgcctggcaagaaaggtctttctctaagtctggaccagtggaatgttctacgtgatcatgcagaggcaatcgataaggcacttgctgagaactcgtaggaagtagacatatggtataccaagggaatctaagtaccttttcatatatgttggaaagttaacttgctggaagcctaggttttgttgtttatgacagatcttaactttgtttgaagttgctatacttggaagatattttatg

SEQ ID NO: 9603 - DNA, 145 bp, Gossypium hirsutum
  Clone ID: LIB3135-004-Q1-K1-E4
ggaatataatggaacttttcctcttaagtcttatctgtaaaatctaccaagctcgacaaatgtggtcgtttcattgggttttggcttttattttcctatatgtatgtgccttaaataacagaaaatcccatggtgttaatttgct

SEQ ID NO: 9604 - DNA, 328 bp, Gossypium hirsutum
  unsure (1)..(328): unsure at all n locations; Clone ID: LIB3135-004-Q1-K1-E5
cggaancccggncgacgacgcgtccggcaagttcatcaggacaactagttaggagccatatgaagtacaatacgtcaagtaaggatggctcctgggcaacttaatgatgacctgatatttgggataaaagtggctatctcccatggtagaaacatactaaggagacaaatccctttgtaataagttaaagcactatgtaagtttctttatttattttgtatttttgttctttgctttcttttataatatatatttaatacaaatatttgtttatgtattctgatattattttttttaatattattttttatttttttattttttttta

SEQ ID NO: 9605 - DNA, 374 bp, Gossypium hirsutum
  Clone ID: LIB3135-004-Q1-K1-E6
gtcaattgccaacacaaaaggagggcgaagaggtggactttagaggtgtcctgcatcgtgagggctcggttcttatgtctgtttcccttgatcacttgaaggcaccggaacctttatataagtcacttgcagcaaagctggtcgtaggcatgccatttaaggacttggcaacagtagactcaatcatactgcgggagcttccaccagtagatgacgctgatgctcggctggctcttaaaaggttgatagacataagcatgggtgtcattacacctttatcggaacagctaacaaagccattgccaaatgctatggctctagtaaaccttaaggaattatcaactggagcttacaagcttttgcccgaaagtaca

SEQ ID NO: 9606 - DNA, 344 bp, Gossypium hirsutum
  Clone ID: LIB3135-004-Q1-K1-E7
gatacattacttgtatctatcctttatacctacacaaactcaacaaccccaacagcctactggatctaataagatctaccacaccccgtccatattctcgtttcgccagcaaaataaatgaaggccccatgaaagaaggcagatttggacatcaaaacagttcctttttaagtccatggaataaggttctaagcattacagtggagagatacaatttttataattcatgcctacatgtaacttccacttctttggttgccatgttacacatgctttttatttattgtagtggcattagaaggtattgtgtgttttttctattttaatcacttgatttttacttt

SEQ ID NO: 9607 - DNA, 397 bp, Gossypium hirsutum
  Clone ID: LIB3135-004-Q1-K1-E8
gaggaagtgaagaaccctccaagctccggcctccggccttcatcgcccacgcgcgatacgcgccaccgcccacggcggttggaaggtgaaaagcctccaatttttcaggcgaaacacaggtgacgacaagagaatgggcaacaatcgtacgttgatgatgcgaatctgccggtggtgggattggcacaccgattgcggcgtgaatttaagatcctttgtctgacgcttgcggtgcccagggtttctgaaaccctaggccttctgtcttctgttaatgatttgggcccccttgggccgtgtttaggtgttgggttgggtgtaaccgggtatttgggttttaaactaattgggctatgtacatgggctactgtaaaaggacttttattcacaaattaaa

SEQ ID NO: 9608 - DNA, 347 bp, Gossypium hirsutum
  Clone ID: LIB3135-004-Q1-K1-E9
cacactctggtgtaaggtgccacatgtagaggtccgggtttgagggaccatggactggcaacgctctcatctttgacagctcttacttcaaggagcttttgtcgggagagaaggaaggccttcttcagctaccaactgacaaagttctcctgtcagatcctgttttccgtccattggttgaaaaatatgctgccgatgaggatgccttctttgctgactacaccgaagctcacctgaagctctctgagctaggatttgctgatgcataagctgatggttgcggaataaaaatgaacccaacaacattttgcctccacaaaatgaatgtattggggttttgtcgtctc

SEQ ID NO: 9609 - DNA, 463 bp, Gossypium hirsutum
  Clone ID: LIB3135-004-Q1-K1-F1
ccaggatttattctttttcatcatcaatagacagcccggcgaaatctgactccatggacaggtacatgagaaacagattaagagaattattttagaccctttagatggtagccgtcaaaccaagaaacttttgaaaacctagacttgccaaggaggcagacagaaacatgctagggtagcatacgtaattttgggttcccgaggttggatttcatggtcacatatttttttcggatgggatctgtatcaatccgagtaaagtttctgacattgctaattggaaagctccgaaaaatgtttcagatgtgagaagttttctgggcttagcaggttactattgtcattttattaagaatttctctatagtttcttcaccgctgattagattgttactgaaaaatgttgagtttgtttaaatagacaagtgccaacaaaattttgatcaagttgaaaatatattgac

SEQ ID NO: 9610 - DNA, 443 bp, Gossypium hirsutum
  Clone ID: LIB3135-004-Q1-K1-F10
gcgacgacacaaaaaaactggcagaaaggattgccaaactatctggtggtgttgcaggcattaagctgtgttctgcaactgagactgaactctaggatcgcaagctacgtattgaagatgccaagaatgctacctttgctgccatagaggaaggtattgtacctggtggtggtgctgcattagttcatctctcgacttgcgtccctgcaattaaggataagcttgaagactctgaagagcgcataggagccgacattgtgcagaaggctttggtagcaccggcctcgttgatagctcaaaatgcaggaatggaaggtgaggtagtggtggagaaagtaaagaacagcgattgggagatcggttacaatgcaatgacagacacgtatgagaacatgctggaagctggagtaattgacccggcaaagtgacaagatgtgcgttgc

SEQ ID NO: 9611 - DNA, 333 bp, Gossypium hirsutum
  Clone ID: LIB3135-004-Q1-K1-F11
accacacctacatacataccagattaatcagaaatatactcaaagaaaaacctggcgtctgtggaataaataacaactctacactttaaaactgaactttgaatcactgaagctttccaaattctcatcacattccagaatcaataacatcaacactttctaattcatactaattttattatcgatattaataacatgcaagaatcctccaaaatatttttgataatcaaaattcaactttagataactttaaggtatcattttataaccctcctaattcatcaactactttaaatgctaccaaagatgctccaacaaaaaattaactttaat

SEQ ID NO: 9612 - DNA, 378 bp, Gossypium hirsutum
  Clone ID: LIB3135-004-Q1-K1-F2
cccacgcgtccgcccacgcgtccgcccacgcgtccgctcaaaaatgccgttcaagaggtacggggagagtggaagagtagctctggttaactacggaaaggactacggcaagcttgttgtcattgtcgatgtcgttgatcaaaacagggctcttgttgatgcacctgatacggtgagaagccaaatgaactttaaaagactaactctcactgatatcaagattgatattaatagggttcctaagaagaagaccttgattgatgctatggaaaaagctgatgtgaagaacaagtgggagaacagttcatggggcaggaaagctgatcgtccagaaaagacgggcatcgcttaatgattttgataggttcaaagctcatg

SEQ ID NO: 9613 - DNA, 467 bp, Gossypium hirsutum
  Clone ID: LIB3135-004-Q1-K1-F3
cccacgcgtccgctccaagccctggttcaacaccacctgcctcatcttcggttctgctctgggtacctgcacgacagctatggtgggagacatgctgggatccgacaaaccatcagcaggtaaactggcgtcgatgtactcgccttttataggatttgggttcctagccatactgcgagggctgctttcggaatcccccaacgcttccaaaaccatggccaacggaccaacgtcggctttgaaaaagaaagcctgaagttgacacatgaattataaaacatcatcttcttccttgaaatgcgatatccatgttacaacaataaggatcaaaattcaaagtacaaaaaattacaaatactactagcaatctaatagtacttgtagttggttctttgtcatgtttagaaagtttttattttaaaaggtgtgattatgagtaataattttaatgcattgcctttttttcc

SEQ ID NO: 9614 - DNA, 394 bp, Gossypium hirsutum
  Clone ID: LIB3135-004-Q1-K1-F4
cgagtcggcaattcagccgagccagtagcggcgtcaacgatgatgaacttgctggaatttcaatgagggaaatgtttgctgaaatggtgatacacgaaagacctgtaagaaacatctgaattcaatatttatgtgaaatcgaagctcaactcagcttatttatatcattctataaatctttatatcgaactgtacgcaaaagatttgatatttgtatagaatagttatttagtttattcatgtttaatttttctgcttaaaaaaaaaaaaataaaatattaaatattttataatatttttaatatttatgggttgtttgttttatatttttttgatttttttttttattatttttttgggtggtcgtcttttaaatatatatgttattttattc

SEQ ID NO: 9615 - DNA, 455 bp, Gossypium hirsutum
  unsure (1)..(455): unsure at all n locations; Clone ID: LIB3135-004-Q1-K1-F6
ggaannnnccgggnccgacccacgcgtcgcgcccacgcgntccgggcatagctaaaacctaagatttactatggtctctagcagtaccgcaaccctggagnggggaattggggttgtcatgatattgcagtcctacaagggaagccctatcatnatagctacgaaggaagaaaacgttctttccagcacattacatttgatggctgttaggttatttgtcacacacacaaggttgtttttcacaggcgatctttatagctggagaaactgttctgatttgattgataaagggaacactaaagatatcntgatttttggccttagtcattgncctcaacatattatnggaaggatggccttactgcatactaacatgtggaagtctcaaactactgtcgcgcccagagaattttggcataatagaggggtatgattggtgcccacttcagacatat

SEQ ID NO: 9616 - DNA, 441 bp, Gossypium hirsutum
  Clone ID: LIB3135-004-Q1-K1-F7
attgaattatattgatatgaattaaaaatgagatagtgatttgaagtatgaaaaaaaaagtgtgttgtgattaaataagaaagttatatactcatgaattgaatgttgaatggataatgccatggtataaaaaattgtggcttgatgtgtgaaaagctatttatatagtaagtgtgtgaattgggatatttgttaaataaattgaatatgataacatgtataaattgaatatagtaagaaatgatatgctattatgtatgaattcaaaagggtggcatatgttagttgtgatattagacattaatacttgtttataattcaattgtgcattttgtattctcttatctttaaatgttcaaattatagaaatattattgagttttacttagcgtacggttttggttttcgtgcacaaattagatatttttcttctgatagtcg

SEQ ID NO: 9617 - DNA, 381 bp, Gossypium hirsutum
  unsure (1)..(381): unsure at all n locations; Clone ID: LIB3135-004-Q1-K1-F8
cgggcgaccgacgcgtccgcccacgcgtccggcanagtcatctatagaaactgcatccactggaacattttctgcggatggaattctacatctcagacgtcttctatccnaacttgactcttcctcgaatccaatatccaattttgtaaaagtcaggtaatgcctttaatgctcacaataatactgactcatggatgattgattttggtgtgaatagacataccacaggttcctctaatttttttaattactccccaaattaaacaaaatatagtgccaagatagccaatttgtcttttattcttgtaataagataaagttttgtaaattttacacctaatatcaaactatcctttgttcttttaaaaaaatttattattt

SEQ ID NO: 9618 - DNA, 65 bp, Gossypium hirsutum
  Clone ID: LIB3135-004-Q1-K1-F9
cccacgcgtccgaaaaaaaaaaaataaaaaaaaaaaaaaaaaaataataaaaattggaaaatgta

SEQ ID NO: 9619 - DNA, 471 bp, Gossypium hirsutum
  Clone ID: LIB3135-004-Q1-K1-G10
gctttggcctcagctcttgcaaatgctactccagaacagcaaagaacgatgcgtggggatgatctctatccacttgtcgagcagctggaacccgatgcagcagccaaagtaacagggatgcttctggagatggaccagacggaggttttacacttgctcgagtcaccagaagctctaaaagccaaagttgcagaagcaatggaagttctgaggactgtagcacagcaacagcagcaagctggtggagctgctgatcagctggcttcattgtctttaaatgataaccttgtttcatgagttggtagtagtgttggcctataatgtgctaaaaatgagttggcttggttagaaggatgatagctgggttcttttttattgattcagtactgttttggaactttgaaaatactgtcactgttatggtgttatagttgtgactgaacttggttttcactcttatttttatctttt

SEQ ID NO: 9620 - DNA, 382 bp, Gossypium hirsutum
  unsure (1)..(382): unsure at all n locations; Clone ID: LIB3135-004-Q1-K1-G11
acggtgggctttcagagtttctcggttggacggatcagcagagagctcaagctgccggagaatgctggggttaccgattactctactcnattcgcctggttggagtttttgtggttgccgatgccttgttcattggtgcacagcaagtgggtcgttatcttcaggatatacggtctcactaaagttatattgatcttcttgaaggcattcgattaaaagttaaaccatctgaaagatggcagttgaatttgtgatcatctataagagactgaagatgttttgaggatcccaattttgaaagccacagtagttagcagagtttcatggtgttgcctgtttcttacgtgcaaatccttgtgattacatatgtacttcaatcaca

SEQ ID NO: 9621 - DNA, 482 bp, Gossypium hirsutum
  unsure (1)..(482): unsure at all n locations; Clone ID: LIB3135-004-Q1-K1-G12
gacccacgcgtacttatcgttcttatgttnaaattactattaaatataatttccatgtcaaaanttctgtntttgttaaattttaatttggtctcttattctataaaaataacttatttttatttttttttcattttctttattttatattatttatatattttcctttcattttttttttttattatacttctttttttttatttttttttttttttatttttttttttttttttttttatattttttatatttattattatatcttttattttttattttttattttttttttatatttttttaatattttttatttaatattatatatattattctattatattatatttttatttattatttttattttatcttttattttttattatatatttctttttttttaatttttttttcttttttttttttatattttattttttttttatttattttattttttttattatttatttttt

SEQ ID NO: 9622 - DNA, 412 bp, Gossypium hirsutum
  unsure (1)..(412): unsure at all n locations; Clone ID: LIB3135-004-Q1-K1-G2
aatagcggcagttgtggctctggctgtggtggtggctgtggaggttgtggaagcattatcgatagcggtggttgttgactcaaagagcatcattangaanagcattaccaccaccaccaccaccaccaccaccaccaccaccaccgtcatcattaccatggagaggaagaaagggatgagacagaggagcacgagggcggcttcatggagaagttccggaagtattttattcatttttgaatataccctgcacgttttctaaaatgatcatagtgatctaangttgcatctatctatatgtttatttgggtaattttcactctctagtcaccagcccttaaggtatgcgtgcatattactatttagtgggccttactattggttgtaaataaaaatgcacttctttgagatg

SEQ ID NO: 9623 - DNA, 513 bp, Gossypium hirsutum
  Clone ID: LIB3135-004-Q1-K1-G3
cctacgctttcttaaaaaaaaaaaaaaaaaattaaaaaaaaaaaaaaaaaaaaaaaaaaaatgttaatatataaatttaataaaaaaaaaataaaaaaaatttatataataaaatataatttatataattattatatttttttatattattatattatattttattttatattattatattttatatatttttttatataattttttgacctcttttttatttttttttattttttttttctttttttatattttattattttttttatatctaatcataatattatattttttttctttttttttttttttatttttattttttatatatatttttttttttttataattttatttttttttttatttttattttattttttttttttatttttttttttattattattaattaatttttctttatatatttattttctctctattaatatttattttttattctttttatttatttattattttttatttctttttttttatttttatatt

SEQ ID NO: 9624 - DNA, 409 bp, Gossypium hirsutum
  unsure (1)..(409): unsure at all n locations; Clone ID: LIB3135-004-Q1-K1-G4
gcgcacttctccagtgaccaaaaaagcttcattgtctcttctatcgaaaaccccatggctgctcgtaagctggtttgtgctctagtgttgtgcatgttggtggttgagcccattgccacaaccaccataacatgcggcgatgtgacaagcaaagtggccggttgcttatcatacttgcacaacggagggaacgtgccgaaggcttgctgcgacgggatccggtccctgaacaacatggctcgaaccacccctgaccgccaaaccgtgtgtgggtgcttgcaagctgccgctaaggctgtcaaaattaaaggcaacttggctgagacccttccagccaaatgtagtgtcaacatcccttacaagatcagcacttccactaactgcanaaatgtgaagtgagatggattaa

SEQ ID NO: 9625 - DNA, 405 bp, Gossypium hirsutum
  Clone ID: LIB3135-004-Q1-K1-G5
cccacgcgtccgtggcaattggacatccattgggcgcaacaggtgctcgttgtgttgctacgcttctggatgaaatgaagcgtcgtggcaaaaactgccgattcggagtggtttcgatgtgcataggcacaggaatgggggcggcagctgtcttcgaaaggggtgattgtgttgatgagctgtgcaatgcccgaaaagttgaaactcacaatctcttatctaaggatgcccgataggatacctagttttcttgttaaaaatatcctaaatcgagttggaaaatttaataaagcaatgtaataagtcaccgatcatgttacctcataaaagagtagtattcagacgttctggctattaactttcataaaattatatttcaactttataataagtgtcaactttttt

SEQ ID NO: 9626 - DNA, 233 bp, Gossypium hirsutum
  Clone ID: LIB3135-004-Q1-K1-G6
gcgaagttttgaaacccagcaagaaaggacaagaaaaatttctatgccttgcacgaggagctttgaatgtggagcactttacatgtccgagtcaattcccctagaggaaacccaataagaacaagaataacaaaggctgcttctttgattgcagtagcaaatgtgaagtcacttgcatatggaggaaaccgaactgtaatggatattggtctctcttctactatccaaggttt

SEQ ID NO: 9627 - DNA, 355 bp, Gossypium hirsutum
  Clone ID: LIB3135-004-Q1-K1-G7
cccacgcgtccgcccacgcgtccggtttcagggctagaaattgaggtcaaggacggccaggggatcaagttatctaatttatctccttcttcttttgtcttcgttgttggacatcctctcaaggcatggagtaatgggagattgaaagcggtgaatcatagagtgatgatgagcggagataaagatcgatattcaatagccgccttcgccattccaggtgagggtaccataattaaggcacccaaagagcttatagatgagcaacatcctcagctttacaaggactttaatttcatggacttctttcgttttgccttttccgaccgcgcaaagaacatcgaattcggccaacaac

SEQ ID NO: 9628 - DNA, 470 bp, Gossypium hirsutum
  Clone ID: LIB3135-004-Q1-K1-G8
agaaaacttctgctgccatttccttgtttcggcgaatccttaaaccctaacgaaaacaaaggtttgatccaatcagaggaaattcttggtcagggctgtaatggctgccaacaacatgccagctggaatagacaaagagcaggcctttggcatggcggaaacagagatggaatatagggtagaactttttaacaggtaaggcagaattgcccaaattttgatgaatatgtttagggttaaacaagaaatgtcataattgctatgcgaaatgcatgtaaccttcgtttcgccgtgtaaaactccctgtatgctcgatattatctgctgagcaaggaaaatttcttagtagagaactttgaaagaggacctcaatggcccggtttgcttctgtgttatcaatagtgtggcagtattttctgttactttgcaagcttttatgccaccaatccttgaatttctgaattcagcat

SEQ ID NO: 9629 - DNA, 466 bp, Gossypium hirsutum
  Clone ID: LIB3135-004-Q1-K1-H1
cccacgcgtccgcaaaaaggagttgttatggagaacaagagccactatccggttccacatagcaagcaggggctccaccatctgctgccattgtgaacaaagtattggggtcgatgaacaaaccggtttacttgctcgacataacgacgttgtcacagttgagaaaagatgctcatccttcgacttatagtggtgaccattcgggtaatgattgtagccattggtgtcttcctggtttgcctgatacatggaaccagcttctatatgcagctcttggtatgtgaaaaggtccacattgggcaacatagaatttacctctttttcttcttcatatgaattatacaatattcaaaggtgatgaaagttatcatatactacttgtaggagataattggtgggggggggggtaagatcaaatgtaaagtgattggatttaatcaaaataatcaatgctcttattaatctc

SEQ ID NO: 9630 - DNA, 235 bp, Gossypium hirsutum
  unsure (1)..(235): unsure at all n locations; Clone ID: LIB3135-004-Q1-K1-H11
acaaaacccattttattaaaatttttcnttttaggaaccatanaaaatcacccgttagttgtgttatatattaaaagtccttcttatantcatcaacaacatttaccttctcataaacagtattcacaacctttaaaagaacatgtcatgaatcctatcccttagtactacatcttcaactaccatcctttcaacaagcttcaaagtaatgtttcattaattacttgatgttatt

SEQ ID NO: 9631 - DNA, 299 bp, Gossypium hirsutum
  Clone ID: LIB3135-004-Q1-K1-H12
gcgtgcgcccacgcgtcctcaaaaatctttttctaactaattttttccatactcattcccggtttgatgcaactgctttcaccccttcacttctttctcttaacaatgttgctaaaagagagcaaatttctaggatgcaaggaaccaaatactatgacaaactatgtactgaaaaattccaagattgtgctgattgtggagcgctacttgttaaccctagctgtacttttccggcttttggggttccctacggagctgtaacttatcatgcaaatttatatgcaagaaactcggagaac

SEQ ID NO: 9632 - DNA, 476 bp, Gossypium hirsutum
  unsure (1)..(476): unsure at all n locations; Clone ID: LIB3135-004-Q1-K1-H2
attccctgggaggaggaactggatctggaatgggaacactgttgatatcgaagataaggggggaatacgcagataggatgatgctgactttctcagtcttcccatctcctaaggtctctgatacagttgtggagccttacaatgccactttgtctgttcaccaattggttgaaaatgctgatgagtgtatggttctggacaatgaggccttgtatgacatctgtttccgcacacttaagctaaccactcccagctttggtgatttgaaccatttgatatctgcaacaatgtctggagttacatgctgtttgcgattccctggtcagctcaactccgatctcaggaaacttgccgngaatctcatcccctttcctcgncttcactttttcatggtgggttttgctccactcacttctaaggggtctcaacagtaccgagctctaacagtacctgagctcacccaacaaatgtgggac

SEQ ID NO: 9633 - DNA, 259 bp, Gossypium hirsutum
  Clone ID: LIB3135-004-Q1-K1-H3
gtgcgttctgttatccatgctaaaaatctctcatctgcttcctcatcaccgaactcttcaggcttcctgatatctacattcatagtggttccatcaatgctcctgtcacccctccattgagctcaccaactgcgctaactccacgaaccaatactgattgggaggacctgactgcccctccaggttggagtgcacaacaacactctttcctgccctcttcaactccacctatccctggtcgtcacatcgttcctgaccc

SEQ ID NO: 9634 - DNA, 416 bp, Gossypium hirsutum
  unsure (1)..(416): unsure at all n locations; Clone ID: LIB3135-004-Q1-K1-H4
gcgacacgcgtacaaccactcgtacagaagacacataagttattgttcaccactctactgcaagcccggtggacaacgctgacatgctggacttcgataatatcctattcaaactcaaagatgcatatcacgggcatactctcaagcttcctatttctttcgctagacgtgcaaacgatacaaccgatgctataaccatgatacttgacatgctccaagctgaactggctctatataactgatcacactcttcaaagggagccacgtggatatcacgcaacaacttcttataatcacgttcacaatatatgaccagcaaagatctttcgtgntaatgctttggaaggatgtgatgttgtcatcattccaaccggggtgcctagaaagcccggatgactcgtgatgatcttttaaca

SEQ ID NO: 9635 - DNA, 488 bp, Gossypium hirsutum
  unsure (1)..(488): unsure at all n locations; Clone ID: LIB3135-004-Q1-K1-H5
cgcgtgcgggaaattacgcgcacatcattaacctattctgcatgggatctttcggcctctaaagatcgggaacgcggtgnatggcatcctgtgacttataagttttctgatgccactcctgtgctaatcaaatccataaaggatattgacaatatcaattatgaaactgaaaacagaagagaatggtgcagtagcaaagggaagccagccccttgcttcctttttgcgagaaaattcaccaggcctgcggctctccaccttcttaatttgtcagttctgggagctcgccgaggagcanaaagtgagacataacaatacagagggtaattttctgtactttggctaatgttaggtaggatttgttaggcttaacctattgtattttttgcagtaaaaaataatagagggagctgtaaatttagagagagggggaaaatgaaatccaatgcttgttgttgtataataaaaatatcattttctaaataaaa

SEQ ID NO: 9636 - DNA, 363 bp, Gossypium hirsutum
  Clone ID: LIB3135-004-Q1-K1-H6
gcgcccacgcgtccgggatgctggcaacagaggtcacagcttcttggaggtattcttatgaatcggtctcgagcatccctcaaaagtcgctctacttcaatgagcaatacttgaatgtgaaaaaggctttggttgatactttctttggtcctcctgaacggggtgtatatagtgcatctgttcaaagcactcttttgcagatggcaaaggctgtacttggcaggtttggtgacatatcatcagttaaactaaaaatgccgaatatccatttcttacctgttaatatatcaagcaaggatcactgccagcattgtaaagttcaatgatgatgtatatctttcgacggacgaacctcacggatcg

SEQ ID NO: 9637 - DNA, 367 bp, Gossypium hirsutum
  unsure (1)..(367): unsure at all n locations; Clone ID: LIB3135-004-Q1-K1-H8
cttcgttctcccactctttctatctctgttctgtctgtgtgcgcagaagtgttcgcgcaaggcggcatccagaatttataatgaggggataaattttagaaggtgatgataatttgtttattcagagtgccgtatgcatctattatatactcgtattcgatttgttcataacgtgaggtgttcttttaattattattgttattattattatttaggttcttgcatatatatgttgatggtcttcttgtatctttttttgtctaaatttaatcataaccttatcttccttccttttnaaaaaaaaaggagggaagaaaaaaaaaaaaaaaaaaaaaaaaaaaataaaaaaaaaaaaaaaaaggggggc

SEQ ID NO: 9638 - DNA, 83 bp, Gossypium hirsutum
  Clone ID: LIB3135-004-Q1-K1-H9
gctttcaataaaaacaaaaagtcctataatcttgcaactgatttacatagaatagtactgtgtcataaataagtttatatgtg

SEQ ID NO: 9639 - DNA, 353 bp, Gossypium hirsutum
  Clone ID: LIB3135-005-Q1-K1-A1
gagaacatctctggtagtagcttccatggctgatctcagcactgtgctcgtcactggagccgctggcagaacaggtgagatagtttacaagaagctgaaagagaggtcggatcagtttgtcgtgagaggactcgttagaactccagaaagcaaggagacaatcggtggagcagatgatgtgtttgttggggatatcagggataccacctctctggttcctgccatgcaaggaattgatgcactcataattcttactagtgctgttcctagaatgaaacctgggtttgatccgacgaaaggcggaaggcctgagttctattttgaagatggagcatatcctgagcaagttgact

SEQ ID NO: 9640 - DNA, 371 bp, Gossypium hirsutum
  Clone ID: LIB3135-005-Q1-K1-A10
cccacgcgttcgggcggcctcaaagaggatgtggaagatgatgttcctgtgtttccttcatgagataggaaaaagaagtcgaagtctgctaggaaggttggtaatccattcagtgccgccgcacttgatgaagttgaaagcgattcggagttgaaagaggatgaggaagatgatgttgcttctttttctttctcagataagaaaaagaagtcgaaatcaatgtcttctaagaagagtggtaattctttcagtgcagcattgcttgatgacgaagatgaaagagatgcttcggtatctgaatccactggtgctgctgctattgatgattatgatgacgatacttccatgggtgcattttcacggtagaaaaa

SEQ ID NO: 9641 - DNA, 308 bp, Gossypium hirsutum
  Clone ID: LIB3135-005-Q1-K1-A11
ccattgtcggtcagattggaaaccgctggtggtgttatgaccgttttgattccaaggagcgcctgcattcctaccaaaaaagaacaggtcttctcaacctactccgacaaccaacctggagtgttgatccaagtctacgaaggtgaaagaacaaggaccagagacaacaacttgctcggtaaatttgagctctctggcatacctcctgcttctagagttgtcccacacatcactgtctgctttgatatcgatgctaatggtatcttaaacgtctctgccgaagacaaaaccacttgacaaaaaaacaa

SEQ ID NO: 9642 - DNA, 296 bp, Gossypium hirsutum
  unsure (1)..(296): unsure at all n locations; Clone ID: LIB3135-005-Q1-K1-A12
gaanaaaaggaacgacccacgcgtgcgcccacgcgtccgtttagttctaaatatgaatacgccgccgaaggaaaagataaaaatgtttgttgtgtttattctttccaaatcatgggacaaagcnggatcaacttatgtaaagatggcgaattgccatttgaaatcagacagcaagcatgaaacagctcaagcttatgttgatgctgctcattgttataagaaaacagctacaaaggaggctatatcttgcttgcatcaagcaatgaacttgttttgtgatattggaaagctaaaca

SEQ ID NO: 9643 - DNA, 383 bp, Gossypium hirsutum
  Clone ID: LIB3135-005-Q1-K1-A2
cccacgcgtccgccttgcaccatatccagttatacgcgatttcacccaatgcttacaggatgtcggggcggatgttgagattgtaaagtggaatggctctcctcatctagaacactacaagcattatcctatccaatacaaggctgccgtggccagtttccttgagaagacaactttggtctattcccgcaggatccgaaatctcagggaaatgaatggtatgcatgatgagatctccgagttaatctatggcctgcagaaagcagcagtcgactcgaaccaaagctttaggagagttgctcttggtcctagtgaccactttttcttgccaagttcagccaaatatcataatagtagagagtctggatctcttcaagatgaac

SEQ ID NO: 9644 - DNA, 251 bp, Gossypium hirsutum
  Clone ID: LIB3135-005-Q1-K1-A3
gcgattacttgtacccctgatctcataactgttctctttcaatcaacaccctgtctgaccacatgtgagtgtttacaataatcctttacagaactcaaatcacttcctcaatagaagactccattctactccataaatcaaagacacattacgtggagctcttgatgtctatgttggcgatatcatacataccacctctctggttcctaacatacataaaattgatgcactcatacatcttactaatgcta

SEQ ID NO: 9645 - DNA, 389 bp, Gossypium hirsutum
  Clone ID: LIB3135-005-Q1-K1-A4
cttgagcaacagcatcccaaagcaaagtcagatcttggaagctgtgactgttgaatatgctgctggtccgaatatagcatcttttaggcttgttgcatcaaagacaacaaccgatgcattagaggaacttcggggttacaaagtgatgaaaaacttgttgcttagtgaagggggtaaggcttacacatctaatgttgcctctgcagctgaacattccagtaccagcaaaggtacatgagaattatcgattctgaactactatattggtatatattgctcaaatgtacagctttaggtttcagagattactacatgttatacagctgaagccattatccccttttctgtagatagaagtatactataaagttttggataagaatcatgct

SEQ ID NO: 9646 - DNA, 192 bp, Gossypium hirsutum
  Clone ID: LIB3135-005-Q1-K1-A5
ctcacactgcgcttgtatatacacctattgtacagctttccaaaaccatattaaaagtgtggcgtttaaaccttcaaaatagaccctctttatacactgaaaaagattaccctaaaaacaatgtgcccccactcagaacataatttctaaatcattcacaagagtcttcactctattaatactattcatatc

SEQ ID NO: 9647 - DNA, 154 bp, Gossypium hirsutum
  Clone ID: LIB3135-005-Q1-K1-A6
cccacacttccttcaaatatccacatcttgcccaactaagcaccacattataaactgtcgggcttaaaacctacattctacaccctcttacttcaccgaataaaataacatactaaagcatcctcccatacttacaacattttggcccactcat

SEQ ID NO: 9648 - DNA, 53 bp, Gossypium hirsutum
  Clone ID: LIB3135-005-Q1-K1-A7
tctacatctctatcatcctcccttttttttttttttttttctttttatttttt

SEQ ID NO: 9649 - DNA, 271 bp, Gossypium hirsutum
  Clone ID: LIB3135-005-Q1-K1-A8
gagcaacaacatcccaaaacaaaatcatatcttttaatctcagactgttcaatatgctgctagtcctaatataacatcttttagactcctttcatcaaaaacaacaaccgatccattagatgaacttctgggtcacaaagtgattaaaaacttcttgcttatcgaaaggcgtaaggcttacacacctaaagttgcctcttcatcttaacattccaatcccaccaaagacacttgagataattcctctcttctattatatataggtatatat

SEQ ID NO: 9650 - DNA, 381 bp, Gossypium hirsutum
  Clone ID: LIB3135-005-Q1-K1-B1
gggctgttttctcatcttgctggctatgccgccggacattatcctccgcctggatcctacgctccacaaggatatcctcctcaaggatatcccccacaaggatacccaccggctggatatcctccaccatcgggatatcctcctcatggcggatacccacctgcaggatatcctcctcatggaggataccctcatccacctcatggtggatatccaccagctggttatcctggacacggttcgcatggacctgggatgggaggattattagccggggctggggctgcggctgctgctgtttacggggctcaccatttgtcacatggagctcatcatgttgcacatgggggatactatggccatggtcacggaaaattcaaa

SEQ ID NO: 9651 - DNA, 425 bp, Gossypium hirsutum
  unsure (1)..(425): unsure at all n locations; Clone ID: LIB3135-005-Q1-K1-B10
ggaaaaaccggaacgacccacgcgtgcgcccacgcctncnncaaaaatgaaatttctcattttaatcaggaggagcgggctggcaaggtgtaggaaagcccagaatctgatggctggggtcctaacaaagcccaaaagctgaatcccgcaaagccaattgaacaatctacagaggccaccatgaggaaagctcgtgtttctgttcgagctcgatcggaagctcccatgatcagtgatgggtgtcaatggagaaaatatggacaaaagatggcgaaaggaaacccctgtcctcgagcttattaccgatgcaccatggcacgttggtgtcctgtccgaaaacaagttcaacgctgcgcttaaaatagaacaatattggtaacaacatacgagggcaaccacaatcacccacaattgcagcaacctta

SEQ ID NO: 9652 - DNA, 377 bp, Gossypium hirsutum
  Clone ID: LIB3135-005-Q1-K1-B11
gcgcctttgattttttttgaaaagaacttaagaattttttgaaatgttctctcaactcatgcacgcattgtgttctcttcatcagacaccacctccgacaaaggtcccatgtgcaatggccaccgacgacatgagcacaactccggtataatggacgttgagcgtgggtcatgcttcacgctagttgtccacacatgccacgtggagtgcatggtggtggacaacgttggtagcggaagcatggaagcacttggaggctaaggtcttggctgaaaatgttttatgcgttgctgtgttaaggttaactatttgagctggaaaatttaatctgcttttggtctatggggatagcatttagtttaaaaatttgtggcttt

SEQ ID NO: 9653 - DNA, 239 bp, Gossypium hirsutum
  Clone ID: LIB3135-005-Q1-K1-B2
cagccgactacatggggaggagaccttcaaggtgttatcgccaaatcaagaataagccataggccggatctcgatactgccgtggtgtcccacatcctaagatcagaatttatgatgttgggatgaagaaaaaaggtgttgatgagtttcctttctgtgtccatcttgtgagttgggagaaggagaacgtctcaagtgaggcattggaagctgtccgtattgcctgcaacaagtacatg

SEQ ID NO: 9654 - DNA, 386 bp, Gossypium hirsutum
  Clone ID: LIB3135-005-Q1-K1-B3
gtggattccaccccaggtgcgactcctacatcttgcaatggcagcacttcgtccgtaaccggcagcgcgacaccctcttctgctttgtcggagcgccgagcgtcgccatgaagaacgatttccgaggcttgctgttgaaccaatgtatgaacgcttccggcttatgccggtcctgtgattgcgccagtacccgatgctccaacgggacatcgtgcatcctcgaaacattcttgaattccgacttttgcttgcaacccagaggcgacagtttcacccgcaggtcaattttctactgcatggtcgccggttccatactcgtcttattgtggcaccgaacgggttatctgcagtaccaatggtttttaccgaatgatcccaaaagttac

SEQ ID NO: 9655 - DNA, 368 bp, Gossypium hirsutum
  Clone ID: LIB3135-005-Q1-K1-B4
gtcgccggtcaccatcagctgatcgcctcctcttccagcaatggcggaagctcaaacagaggctccgccttccctatctgagcaatattcactgaaggagaaagcggagaaatcagatgtggctacaaaagtagctgacgcagaagaggtcgaaaattcagcgagtacttcttccaaggaagtggtgaccgaggaagttgagactcctgctcctcttgtggaaagtactgaggttcctcctgctgttgctgaagaaaacaccgaagccaatcctgttgctgagaacagtgttgaagatgctcaagttgctgcggaagaaagtaatgaacgtaccaaagagagctcatgtgatgctgaagaaacaccga

SEQ ID NO: 9656 - DNA, 373 bp, Gossypium hirsutum
  Clone ID: LIB3135-005-Q1-K1-B5
ctgactctttgtcggacgcgtggggttgaggcctgcgcacaaacagatagcatgcagaaagttgtattcacttcttccttaactgcagctatttggagagaaaacatttgttcacagacagatgtagatgagaggtgttggagtgatcaagatttctgccgcaaaatgaagttgtggtatgcccttgctaaaacactctccgagcatgctgcctgggctcttgctatggatcgaatgcttaacatggtttctgtgaatgctggactagttgttggccctgctgttgcacatcaaaatccttgttcaaccatgtcatatcttaaaggagctgctgaaactgttgaaaacggagttctagctgttgtggatgtga

SEQ ID NO: 9657 - DNA, 365 bp, Gossypium hirsutum
  Clone ID: LIB3135-005-Q1-K1-B6
ctcacacataataatacacatcagttttgcctcctgcgcacacacaaatctcatgcagaaagtcgtttttacttctcgcttaactccaactatttggatagaaaacattcattcacagacagatgtatataataggccttaaattgatcaatatttctgcctcataattaaattgaaatatacccttgctaaaacactctccgagcatgctgcctgtgctctcgctatggatctaatgcttaacatggtttctgtgaatgctcaactaatatttcgccctgctctttcacatcaaaatccttgttcaaccatgtcatatcttaaaggagctactgacatgtttcaaaacggagttctacctgttg

SEQ ID NO: 9658 - DNA, 382 bp, Gossypium hirsutum
  Clone ID: LIB3135-005-Q1-K1-B7
gtctactactacaggaatcggttgaagcagagaatggagggaagaagggtcattgggtggggtgccatagatgtatcatcacatctttcaccttattcattcactctcaggaaaacaggtccagaagatgtggtgttgaaggtattgcattgtggagtacatcacactgatctacaccatatgaggggtgagcttatgcccatcaactacccattggttccagggcatgaagtggtggtcgacgtcgtggaagtggattcagaagtaaacaaattcaatcttgtagacaaggttggagctgggtgcctggtaagctcttttgggaaatgctcgtcttgcatctccaataatgaacagtactgcaaccatagggtctttacat

SEQ ID NO: 9659 - DNA, 441 bp, Gossypium hirsutum
  Clone ID: LIB3135-005-Q1-K1-B8
attcatcatctcaacagtcttcaacttctgttactgaacccaacattcctgtggaagcttgctccccactgtaaaatgagattgagtcagggaaaaccaatcagcatgcagcttctcctgaagtggggttggataaaaaatctccaaagcatgactgcaatgcaagtgtagatggaagtgagagcgggagagctatcactaaggaatgaagctcaatgtgctgataatagtgtcacgcatagctgctaatgcaactccgagagacgagttcttgttgattagcacatttggctgcaatcctcaatgtgttgcgggcgaatgtaatgatcgtccccagtagagacattttgcatctgataaaacaccgtagattgagcttcaaacttttttcttgaaatttttgatttccaacttcaaaccattcattgcttttttttaccc

SEQ ID NO: 9660 - DNA, 388 bp, Gossypium hirsutum
  unsure (1)..(388): unsure at all n locations; Clone ID: LIB3135-005-Q1-K1-B9
gcgatcatgtanaagtcattaagagcaagtgtttggcatctcttcaagaccttgagtctttaccgctgaatggctgccaaaagatatctgacaaangaattgaagctataaccacttgttgtcttaaattgaaggttttttctatttattggaatgtaagggccactgatgaaggtgtgaagcatctggtgaagaactgcaaatgtatagttgatttgaactttagtggctgtaagcatttatcagacaaaagtttgcaattagtagctgacaattatcccgagctggagtctttgaatctgacgaggtgtgtcaagatgacagatagtggcttgcaacaagtattttgtaaagtgctcctttttccaaagtttaaatctttacgcac

SEQ ID NO: 9661 - DNA, 357 bp, Gossypium hirsutum
  Clone ID: LIB3135-005-Q1-K1-C1
ccgttgaataggctcatgttcttaccgagtggcatcctcaacctggtgataagaagccgagagttggacttctcacggatgccgttgcttctgaaagaacaacagctgaactgcttaactttgccattgcatatggaaaaactcctgtggggcctgccaacgattgcaacgttgctgtacaatatgcaaggctcacaagtgttctatggtccatagaaggacaagacgagctttatggcagaaacagcgcttattggaacctcagaaactcgaacgggctaagacattgcttggaagggctctgcgctcaccatccattgctcattgtacacgtgctcagaaaggacatattgaacg

SEQ ID NO: 9662 - DNA, 351 bp, Gossypium hirsutum
  Clone ID: LIB3135-005-Q1-K1-C10
cccacgcctccgatccaatattcaaactcggttacctctaagaaaattgggagttagcttcgtcacatagaaacagagtggaaacaaagcagaaaggaagagaagaagagctaaaaaatatatagatatttaaaaaaaaattcatcaatggagataacgaaccctaaaccatcttcgaaacgcctgctattcgaccggcgttatggttgggtgtttgatgaatggaaagacccatcggaagaagctcttgctgctggccgaggaatgtaagttttctttcttttcttccctaattaaatcaaatattagcaattgctgtacttaaccactcttcttttttgcgttttttct

SEQ ID NO: 9663 - DNA, 350 bp, Gossypium hirsutum
  Clone ID: LIB3135-005-Q1-K1-C12
cccacgcgtccgcccacgcgttcgcacactgtaacatttaaagattaatagaaggagaaggggcttgtgaaaacacagagagacatggatagaagatactctttctttttggtggcccttgccctacttttcatttccatggaagctagcaatgtgcaaggtagcaacagcaagaaggcaccctatgatgctgcttcaactcattatactgttttggcaccccagtactggacaggaaagagtttactgcctatcaagaggagcttgtaatggaaaggtactcacatgtccgagtcaatgcgctcaaaggaagcccaaaaaagaataagaaaggtcaaaaggatgctttc

SEQ ID NO: 9664 - DNA, 390 bp, Gossypium hirsutum
  Clone ID: LIB3135-005-Q1-K1-C2
acaatggatgttatccagtggacatccctgtggaatttatacaaggatgaatttgagaatgagaaggacatgcttggaggttctttgggtgacaaagctgcagaagatttgagaatgagaattattgaacataatatccttgttgtttcaaagtactactcgaggattacattgaagagacttgcagagttgttgagtctcactatccaggaagctgagaagcatctttctgaaatggttgtctccaaggcactggtggctaagattgaccgaccaatgggaatagtctgcttccaggtagcaaaggatagcaatgaaattctcaattcgtgtgcttcgaacttggataaacttcttgatcttgttgagaatagttggcaccatatacac

SEQ ID NO: 9665 - DNA, 423 bp, Gossypium hirsutum
  unsure (1)..(423): unsure at all n locations; Clone ID: LIB3135-005-Q1-K1-C3
gacagcattgacccttctcaagagacaccttttcaactaccaaggctatgtttctgctgcgggggggcttggtggtgtagatgtctctgggcctcatttgcatactatatatgcccatgggtcaactgacacattgccatttgctacaatgggttctggttccctggcacgcaatggcagtatttgaatcaaaatacagggaaggccttactagaaatgaaggaatagaacttgtcactgaggctatatgctctggtatcttcaatgacctcggaagtggaagcaatgttgatatttgtgtaataactaagggtggcaaagaatacttgaggaaccatctacaacctaatcctcgaacttacaccagctccataggctattctnttcccaagaagacagaggtcctcttgacaaaaatcatac

SEQ ID NO: 9666 - DNA, 377 bp, Gossypium hirsutum
  Clone ID: LIB3135-005-Q1-K1-C4
gaagcctccgtggataaatccgtgactccacctcctcctactgaagaaaagcccgccgactgtagggataagcctcccgaacccatctaaaaggcagctgagtcgactgagaagaaaagcacggaggtgtctgttgatcgagatgctgtgcttgctagagttgcgactgagaagcgaatttcactaatcaacgcttgggaagaaagtgaaataagcatagctgagtacaaagcacagatgaagctttcttctattgcggcttgggagaataccaagaaagcagctatagaggctgagctaaaaaggactgaggaaaagttagacaagcagaaggccgagtatgtggaaaaaatgaaaaacaaggcagccttaatcca

SEQ ID NO: 9667 - DNA, 362 bp, Gossypium hirsutum
  Clone ID: LIB3135-005-Q1-K1-C5
taaaaaaaacatattaaaaaacaccattaaaatatcaccaaactatcttaaaaatacaagaaagacttactcatacatgccacctcttaacctccttttcatactacatatccccactactctacccacacatttacatcttcttcacttgaatatccttccctttccccaacttcatcctttttatcaaaatacacccttctccctacttaataataatgaataaaacctctcacttcgcccttatcctcttttatacaaaatcacctcctaattccactcaccctttatattcacattaaaacccaaaggtgccaagaatactctcagaaccacctacacacttatcctcttacttacac

SEQ ID NO: 9668 - DNA, 424 bp, Gossypium hirsutum
  Clone ID: LIB3135-005-Q1-K1-C6
cccactcttccgatttaagaacaagcgtgtcttgatggaaagcatccacaagtccggggcggagaaggcaagagagaagacactctcacatcagtttgaggccaagcgagctaagaacaaggcgagcagggagagaaagatggccagaagggaagaacgccttgcacagggacctggtgtgaaagcagcacctgcagctgcaccgcaacaggccgagggagttaagaagtcaaagaagtgaatgaagtaatgttttgtttttctctgtaggagtttgaatgcaaaactcggttttcattttgtgttttagatctttagttttatataattatagaattttgatgaaaccactgagctgttataagaaatggaagatgtttgtggtattgtttattagtataatgtactattatgttgaatgtgc

SEQ ID NO: 9669 - DNA, 215 bp, Gossypium hirsutum
  Clone ID: LIB3135-005-Q1-K1-C7
aaccatcttaatcctaaagtgtgtattacttgaaagtagagccacaccatatccggagtagttttcaattgataaaaagaaaacgctcttactgacatacactttggtgcaaaccactacgctttgatatatgttctgcttatacataattttacttaaacttccctgatgtataatcaatctaaacttgctctaatatatcatttgttttatag

SEQ ID NO: 9670 - DNA, 406 bp, Gossypium hirsutum
  Clone ID: LIB3135-005-Q1-K1-C8
aaaaaaaaaaaaaaaacaaacaaacgttgccttagcaaactatgaggaagtgggcaagccggttctctttggttcttctttgccttctcagtctcctctcacatcatgggaaaaaagtacaagcaaatgccgaggaaggaggtgtacatcctcctaaagtcgatgaaaagatcggcgctgtgcctcatggcttacaaactgattctgatgtagttaaaagggaatcggaatccatctcttcgacatcgcttcgcaataatgcggagaagtttgagttccaagctgaactgtctcggcttatggatatcattatcaattctctttatagcaacaaggatattttcctgagggagttcatctccaatgcttctgatgcactggacaagattaggttcctttcactcac

SEQ ID NO: 9671 - DNA, 141 bp, Gossypium hirsutum
  Clone ID: LIB3135-005-Q1-K1-C9
ctgcttttaccgtcgcctaccctttttttacagcttcttaaatatcaaaaaaggagtataactaaaaacactaccctacgtttccttactaaaaagcctctatttacccaagactataaagaaacgattaatacaatgaca

SEQ ID NO: 9672 - DNA, 389 bp, Gossypium hirsutum
  unsure (1)..(389): unsure at all n locations; Clone ID: LIB3135-005-Q1-K1-D1
atcaatctgaccccatcccaaacccgcttttcatgcaaaacctaaaccaggcccagcagtagattggtcttcaccaaactatgcaaataccccatccacagggtcaagcaatggcccagccaagtagcagaaggggagttgagaaagttgagaatcacccaacaggttgaaaattctgcgtggctcactccagagtccagaaaggattcctctttctttcttaaagttctgtagtttgtctgagataaactattttgggtttcaactaggcattattattacaacgcactaacatgaatatatgtgtatgaatagtccctagtttccaattctcttaagttgttctattgtgaggtttnacattttaaaagaaataaatatgtataggt

SEQ ID NO: 9673 - DNA, 163 bp, Gossypium hirsutum
  Clone ID: LIB3135-005-Q1-K1-D10
cacacgcatccggccacccttacataaaatgtttattttattgatctttctaactttaagcgtaacgtttaatccacaactaagcttataataacaaaactattattttatactcccctctcccccaaatacatcaattataaacccccaactcgctttacat

SEQ ID NO: 9674 - DNA, 400 bp, Gossypium hirsutum
  Clone ID: LIB3135-005-Q1-K1-D11
cctaatggccacaacatccatcctgctgtgtgctgggttggcagccgtcatcagcagcactgacaccgtcaaaaagccactcaatgactctatattcggagctcacggggagttcatggtggttctcaagtacgtcacaatcctatgtatcttcctcttctcgttttcgtgccacaccttatctatcaggttcataaaccaagtcaacatcctcatcaacactccccaagaccccacctccattgttacccctcactacctgtccgacttgctcgaaaaagggttcctcttgaacactgtgggcaacaggctcttctacgctgcgctttctctcctgctatggatctttggccctgtgctcgtctttgttggctccatcaccatcgtcactttgctttac

SEQ ID NO: 9675 - DNA, 447 bp, Gossypium hirsutum
  Clone ID: LIB3135-005-Q1-K1-D2
cccactcgtcctcccacgcgtccgtatgcctcttcctcgagccaaaagcagttttcagaaagccctggactaaaactttgctaactaacaaatgtgctgtcttattcccctcacgaatttgcaggatctaaacgtcccaaagttggcccatcgtcgataattgtttctagagagctactctcggttcatggctaggaggctttgctggtgttagcgatttgcattccgtcagatttcaattaggtctcatggattcaagaaggttggcagcatccaggtttcaaatctcagctcagtaatgtttgaatcgtaagttgaatgctaaaatagagtcggcttgtacctagtgttgtaatttagtctttggagtcaattatgatgccctcgtatcttctatgccttaaaatattcaagttaaacatgttcaataatctaaatggtcgatga

SEQ ID NO: 9676 - DNA, 333 bp, Gossypium hirsutum
  Clone ID: LIB3135-005-Q1-K1-D3
ataagacctgctccatatcatacccaacactatttcaaatgctaaaaccatccctaaagcagctcggtgatttactaactacgcatattccccatccacagtatctagcaatgacccaaccaattagcagaatcgctgttcagaaagttaacaatcacacaacatgttgaaaatcatgcgcggatcactacataatccagaatggattcctctttctttcttaaaactctataatttggctgagatatactattttcgtttataactatgcaattcattattacaacgcaactaacatgtaattattatgctgctatggaaatagttacccct

SEQ ID NO: 9677 - DNA, 382 bp, Gossypium hirsutum
  Clone ID: LIB3135-005-Q1-K1-D5
aataaatcagctcttccatctcctatgaatgattctcatgatctcatcgctccatgagtatgtactaccataaatgtggccaagactctctttacccttactctgcacaccaacattgcttcataactactcaaactccgcgtatttcaggtctcactatctgatcttacccaaagtgatgatcatcactcctacacaatgatatcccttccaactcttacatcattaaggcaaaaatgctcaaaccaacttggcttgaatgaataatacataccacatactgatttcatcatttcgtctatcgcacactgtgatacatgctcacctgcacttactgacaacttacatcaaccctctgataatgcactgcatgaagttctct

SEQ ID NO: 9678 - DNA, 405 bp, Gossypium hirsutum
  Clone ID: LIB3135-005-Q1-K1-D6
aaactggtaacatcagatgaccctcccgtgctgtttggctgcttagacggggatatggtggaaaagtcagggctgcatacagggaaccttttacggcttgctattggtgatggaggattgagttttgcagatgggaagcttgagaaggctgatttgatttatcttggcaagtccaaccgggcacgtgcttttgcagatagttactcaaaggttttgttccagttcatggttcgacattctcctctaaagatagatgatcttctagcatcaattaactccgcaaatgatcaagaaaagacaccaagtgacatcgagatggttggttgactatatatatatatattaattatacgaggttcgatatttgtgttctgtgcgggccaagtttaaaacccattgtggagt

SEQ ID NO: 9679 - DNA, 353 bp, Gossypium hirsutum
  Clone ID: LIB3135-005-Q1-K1-D7
tatcaatcaagataagaacaagttcaataccccaaaatatcgtttggttgcaagagggaccgatatggatatagttgcacaaattatacatgctagtattgctggtgatatagttcttgcaacatcttatgctcatgaacttcaacgctatggactcgaagtgggccttaccaaatatgctgcagcttattgtgttggactcctcttggctcgccgaacactgaagcaactggagatggatgcttaatatgagacaaatgttgaggcaactggaaatgacttcactgtcgaaccaacacatacaaggaggccattacgcgcgcttgttgatgtatgtcttatcacatctacta

SEQ ID NO: 9680 - DNA, 406 bp, Gossypium hirsutum
  unsure (1)..(406): unsure at all n locations; Clone ID: LIB3135-005-Q1-K1-D8
gactttcanaaagcaatgtctgttatcaggcccagtttaaacaaaagcaagtgggaggaagttgaactatggaatcaggagtttgcctccaactaaaatcttgcttgcctctatttagcattattaccgttgtctgtttgaagaacagcttaagcaagggacaaaaagcaacccgtatcatcgttggcgccagactagttgtgtaattataagaagtcaaaactcgaagccgaaagccaaagctcaaacgttggtcaagaatgtattttgttttggataacaattctttgacaatgtgtcatagaaagtattgcttgatattttgtattttacaacaaaatgcatgattttgatgggtaatcaacagccttcttgcctatgattagagggttataaggaataaata

SEQ ID NO: 9681 - DNA, 448 bp, Gossypium hirsutum
  Clone ID: LIB3135-005-Q1-K1-E1
cctgaggaatctcttgcttcaacgaccgagaaccggttactcgtatatatcgagctggtgaatacgtcattctccaaagggctgacatttgccctggtatatcttccgttcggttgacttgctaactcgatccctacttttgaagaggatgctgacttcatcataccgggtgatggatatccattgatatccccctcgatgcaagaattttcagaactgaccatgattaaagatacctcgcccattcttgtcctgatattcatatattcccaagcactgtatgacatatacgattctgcataatgacctgttcctgctgacttatcattggtagttgacattacaagtttatgcatcatattgctgcaataagttcaaaactatgtgtgtagacaaggcccttggagcttatttaccataaatgaagggattttcggttgtaatctgt

SEQ ID NO: 9682 - DNA, 435 bp, Gossypium hirsutum
  Clone ID: LIB3135-005-Q1-K1-E10
cccacgcgtactcggacgcgtggggccggatttcggagaaaccgactttttgaaggcattcgttgcctttcagcaaaggcagagacgttacggtgtatgaagttatttgtgtacgactgttgacacttagttattgatggtgacatacgaagggggttaacaagaagctgtatttggcattggagtattagaatcaacttgcacagagcatatattttgcagtgcaatcaggtaagaaactaaatgtaatgtccttgaaactggaagttgatcgtaaacaaggttcaacactcgaaagaccccccattgtgatttgtaactgtcattaaattctccttaccatgacttccctctatattctctagggtgatagattaataaccacgtaaattacgtgtagtgaagtaagatttgcttcactctgtactcctaatg

SEQ ID NO: 9683 - DNA, 443 bp, Gossypium hirsutum
  Clone ID: LIB3135-005-Q1-K1-E11
gattaattgcattgaatacttcatggccggtgataaaccgtttctgatcagtggttctgggggttacactgctaagttatgggactatgaaaccaaatgttgtgtccaaaaactagaaggccatacacgtaatgttactgcaacaagcgtccacccacagcttcccattataattacttgttcggaagatggaactgttcgtgtctgggacaaaacaagttacaggcttgacaacacattggcatatggtcttgaaagagtctggactgttgcttacatgaaagactccagcaaggacgattgtggtcaaaattagtggctctaatggctcggattctgctgatgtttgacggcaaggaggcgtactggattgcattgtttatcatcagcttgaagatgcaaatttattacacggactggtttctatgtttagtgtgtggggc

SEQ ID NO: 9684 - DNA, 160 bp, Gossypium hirsutum
  Clone ID: LIB3135-005-Q1-K1-E2
atttttttttctgtgttaccatattgtatattgcaatcattgtataaatgcatcaattctggggggtccacaaatagattcaagaacaatgccaaataaaatcagagcttagtttgcatgtaggcattcgaataaagttttataaattttcccttctgcc

SEQ ID NO: 9685 - DNA, 317 bp, Gossypium hirsutum
  Clone ID: LIB3135-005-Q1-K1-E3
gaagaactgggtgtatgattttatttgtagatgctccaactgtataaagcgtgtgtaattgggcagaatcagtctttgctcatggttagacatgaagggggaagatgctttgattatggcgctggtgaagccaaagtttttgtggcaattcttcgtgataaaaaagggcgagaaaagaaagggcagggagagaggaagctacatgtccaatttgtatttgcacattttgaacgctgttttaagcagtcatcatcattgctcattcacagcttctatatctatctgaacgaggaagatgctcttacggctgtaaatag

SEQ ID NO: 9686 - DNA, 383 bp, Gossypium hirsutum
  unsure (1)..(383): unsure at all n locations; Clone ID: LIB3135-005-Q1-K1-E4
ccagaaacccctcccctctccttctacgcataggaatcaaaatcatgttgttcttttcgtgggcggagacttggtgggaagagaagtgacggtggagctgaagaacgatttggctatcagaggaacccttcattccgttgatcaatacctcaatatcaagctcgagaatactagggttgtcgatcaagacaagtatcctcacatgctttcggtaaggaactgtttcatcagaggctctgttgtgagatatgttcaactacctccagcggagtcgacattgaattgcttcatgatgccactagaagagaagctcgtggaggctgaaaaagcagcttttgttgacaaattcangtgtgctttaatgatttagattttttgcttca

SEQ ID NO: 9687 - DNA, 424 bp, Gossypium hirsutum
  Clone ID: LIB3135-005-Q1-K1-E5
gaaaataaaaaatcagactcactagctgaaatttgtataaacgaactccaaatggcgtttggtaatgttcccactactatcacaaatgatattggccatggccagcatctagtattgctttcgtcgagctacagacctatcccggataacatcactatttcagggaattctcagcaggaaatgccagacaactatgtgaacggagcttttgtgtatgacgtcggtgatggcttcatctggatcgttttctggaccaagaataatcaggtctctactaagatcttcatacgttataatgactccactgaacccaataattccattctctggcaccaagttgtaaacaatcttcacccccgcctcagcgaagattgcgcttttggatataccgcatgggcaaggattgaaccaaatgctaacggtc

SEQ ID NO: 9688 - DNA, 326 bp, Gossypium hirsutum
  Clone ID: LIB3135-005-Q1-K1-E6
caccatttcaagtgatagcagccttatcagggttctatgcgatgagacacccaaggtgccggtaccgcttgccagcagtgccgattaacttcttccgccggctgcctgccaggacggatagcatgttgtaacccttcacgggatgttttaaagactatcaagtgtttatccaagtcctaagtttctcctggtgtattatggttattatcagtaagtgttttgaagagattttgatccataaataatttgtgtttgcttttataagctgactcagaattagaataaagtgaagagtagtgtcaacataaaaaaaaaaaatacataat

SEQ ID NO: 9689 - DNA, 221 bp, Gossypium hirsutum
  Clone ID: LIB3135-005-Q1-K1-E7
acttatgacatcaacagcttggtaactggtatggaaatcactggttttgccagtttgaagggagcctcattgagccagcgaagcctcctatgagaagtaccgtgtatactttcttcccttcgaacttgttacagtaaaagttgaataatgtaaaaaagaatcctaaacagagtcaatgaacttattacagtagaagttaaataaattattgcttctgttgc

SEQ ID NO: 9690 - DNA, 242 bp, Gossypium hirsutum
  Clone ID: LIB3135-005-Q1-K1-E8
ttccactcttccttcttaaatcccatctgaattattgaaaggtttaggcaccaagttgatagatgacttttaggaataatttttatctgtctcttgtttacttgcattttgttctcctacaagtctcatcagagtttttactagttttacaattgtgacattaaaaatatttggtttgtgttatttaaattcttaagccattctctttagtttagagctttatatataaatccaaattatga

SEQ ID NO: 9691 - DNA, 480 bp, Gossypium hirsutum
  unsure (1)..(480): unsure at all n locations; Clone ID: LIB3135-005-Q1-K1-E9
ccgtccggcacgtgtctcacattcttaagaggggtttctgaagtgactnnntagaagaagctttctaggggaaatagctcgagagcgaatgccaatcgtttgtttaacgtccaacatttgtggcgtatatatatactgggttgagcatgnagaagcatgtaaataagcatttgtgggtcattagtttagatgattggcagtggaactgtgttggtaaaagcaatatgacaaggtgagactcgtgaaatcagctcattgtctgtgtttaagatgagataaatggttcgacgatcaccattgcagagtataagtgaaaggtagaattggctaaccccctcattgtattcgtctttagggggcattaccatatttcttctacataaaattttgtaatttagtattcaactccctcctttgtgttttgcttgtgtgtacctcattgatgcatctagcattcacccatgtatttgtattcgcatc

SEQ ID NO: 9692 - DNA, 339 bp, Gossypium hirsutum
  Clone ID: LIB3135-005-Q1-K1-F10
cccacgcgtcccataagttttaacctctttacaaattatatgtgaccgtcttcaatgtggtgttcatttgatctgaaggcagaagaagttataaccaatgtcggtgaggtatgtccacaaaattttgctttcagtgttgggtaggttcactgaaaatgcacgagctttcttcatgtggcttctttggttaccagaggcgggaacagaagactgatgcttgagattggagggtttaattagtgagatattgtgagtagcgcttcctcttattattgttctcatgtttgcaaatgtttggcacattgtggaggattatgcaagaaaagatgcagttaacac

SEQ ID NO: 9693 - DNA, 433 bp, Gossypium hirsutum
  Clone ID: LIB3135-005-Q1-K1-F11
cctaatggccacaacattcatcctgctgtgtgctgggttggcagccggcatcagcagcactggcaccgtcaaaaagccactcaacgactctatattcggagctcaccgggagttcatggtggttctcaagcacgtcacaatcctatgtatcttcctcttctccgttacgagccacaccttatctatcaggttcataaaccaagttgacatcctcatcaacactccccaagaccccacctccattgttacccctcactacctgtccgacttgctcgaaaaaaggttcctcttgaacactgtgggcaacaggctcttctacgctgcgcttcctctcctgctatggatctttggccctgtgctcgtctttgttggctccatcaccatcgtcactttgctttacaaccttgacttcgtgtttgggtttaagagaaac

SEQ ID NO: 9694 - DNA, 408 bp, Gossypium hirsutum
  Clone ID: LIB3135-005-Q1-K1-F2
gttggtcatagtatcagtgctcgagcaatgatggatgagttttatgtgggtgacatcgatgcatggaccattccctctaagaggaagtacactcctccaaagcagcctcactatgaacaagacaagacctcataatttgtcataaagcttctccaattccttgttcctctgctaatcttgggattggccttcggtatccgctcctataccaaaacaccagcttcatcttaagcattgagactcccaagagataatttgagcaatcttcacaataagattatgctagtttaaatttctttggaattttcacatactgcaggttggtaaatggttggatatttttattcaaacatttgctccaatgcagttgaaaaaactcagattcgcctccgattgtgataatttgat

SEQ ID NO: 9695 - DNA, 307 bp, Gossypium hirsutum
  Clone ID: LIB3135-005-Q1-K1-F3
gccacacatccaatgaatacaacaattattgttctatgcttatttattggctatattctggggtcgcatgcataattgaacaagtacctaacacgatactgtacttaacacgctcgggtacagtataaagcttaaggacagatggttactgtcgcttaaatactgatatgccacaatagagtcacctatggatcactaacttctatatgatctcgggctaattgaattatccactattatgctcattgcgcaaggatataaagtttgacttcgagcacatgaactgtatattatcaatgacaacgca

SEQ ID NO: 9696 - DNA, 421 bp, Gossypium hirsutum
  unsure (1)..(421): unsure at all n locations; Clone ID: LIB3135-005-Q1-K1-F4
gggaaagactgattacagggctaggattcgcttaaccaatcaagacaagaacaaattcagggggcgtaaataccgattcgttgttcgatttatcaacaaagatatcactgcacaaataatttctgctaatattactggtgatatgattcttgcctcggcttactcgcatgagcttcctcgttatggacttgaagtcggtcttacaaactatgccgctgcttattgcactggattacttttggggcgccgtgtccttaagttgcttgaaatggacgatgaatatcaaggaaatgtggaggctaccggagaggatttctcagttgagccaactgacacatggaggcctttccgagctctccttgatgtangactgatcatgacaaccactggaaacaatgtttttggtgcactaaaggggagc

SEQ ID NO: 9697 - DNA, 411 bp, Gossypium hirsutum
  Clone ID: LIB3135-005-Q1-K1-F5
gtccgaaaacatttcccacctcctatcccacatcaagctcctcatccgccgcataagcggcgggatcgctgcctcggatgccggcctatactcagaatccgtccgccatttctcgaaaatcgtcgacggccgccgccttgcctctcagggcttcctcgcagagtgttacatgcaccgagcctccgcttacaaggcctctggtcgcatagccgagtccatctcggattgcaacaagaccttagcccttgaccctacttccatccaagcgctcgaaaccagggccgaactgttggaaacaatacgctgtttgcccgactgtttgcacgaccttgaacacttgaagctcctttacaattcaatcatgcgtgatagaaagcttgcaggtccaccatggaagcgtcacaatgtgag

SEQ ID NO: 9698 - DNA, 395 bp, Gossypium hirsutum
  Clone ID: LIB3135-005-Q1-K1-F6
gttgttcaataagaatgatggtggttgtgatcgaactttgatcatctttgatatatggtgaaataaataaatatataaactggcaaaaaaaaaatctttacccaatctataaaaaaaaaaaaaaaaaaaaaaaaaaattaaatataaaaaaaaaaataaaaaaataaaacatacacaaaaaataaaaattacaaatactataataaaataaacaaaatccatctcagattacaacatagaacttaaccattaaccctacttccatccatgcgctcgtaactatggccgaactgttgtaaacaatactctgtatgcccgactgtttgcacgaccttgaacacttaaagctcctttacaattcaatcatgcgtgatagaaagcaaccacgtccacca

SEQ ID NO: 9699 - DNA, 315 bp, Gossypium hirsutum
  Clone ID: LIB3135-005-Q1-K1-F7
accacactcattttgcaaaccgcatctttatatgtttcatgtccaatactttaactggcgtgctaaatttatcctgatgatctcctactaaattcttaaataataacatcttcatatccacatgaaaccaccacagagatcctttttgcagccccgactaacattgctcactagactatgctaattcttaaacgcagacgttatattaactaaacacacctctagactcaaaaatatcatacattgacaactgaatcatcttgagacatgtcccgactggcacacgtgtctcgtcagctcatatcattatcggaa

SEQ ID NO: 9700 - DNA, 288 bp, Gossypium hirsutum
  unsure (1)..(288): unsure at all n locations; Clone ID: LIB3135-005-Q1-K1-F8
acccacgcgtgcaaacactcttacanccactctttctttttacttccaaccgacaaaaccaactccaaagcccagtttttctcaacccttaatccatcccatcaacttactttttacatcccaaataacaaattctcatattactcttgatattattcatccctctacttccacgcataatcactctcaccatatactctacaattctcttacaaaatctacccccctttaccccactatattacatccttcgcaccccatacttaattttctccaaaaaatctactc

SEQ ID NO: 9701 - DNA, 56 bp, Gossypium hirsutum
  Clone ID: LIB3135-005-Q1-K1-F9
aacttccccctccatccaacgtcatacctcttttatagtgtcaccaaaattcaatt

SEQ ID NO: 9702 - DNA, 290 bp, Gossypium hirsutum
  Clone ID: LIB3135-005-Q1-K1-G1
gctcattcatggtgacttggtttatggttttatctgttgttgttaaaatcttataaaaagagatatgtgttgctgctcttgggttgtatcaaaaaaaaaaaaaaaaaaaaaaaacaaaaaaaaaaaaaaaaaaaaaaaaaaaaaaaaaaacaaaaaaaaaaaaaaaaaaaaaaacacaaaaaaaaaaaaaaaaaaaaaaaaaaaaaaaaatggggcccccgtcttaaaaaaccaaaccttcactacccgtaaatccaaagcaaaaacctttttatattgccaccaaaata

SEQ ID NO: 9703 - DNA, 445 bp, Gossypium hirsutum
  Clone ID: LIB3135-005-Q1-K1-G10
ctgtttcaatgaggtacagagagtcaatttcaaagagtacaaggggttggaaggagagattgttctcgcgcaacacttccatggcaggtctgggttttgaaattaggagagaggttaatgatggcagcaatgcaacagtcttgcgcacgatagagcctgcagaaaccagagataatattgccagtcctactgtatcaagcagtttggaagatgggtctaatccagaatcaaataaccaccagattgtagatgccggtgtagaaactcctttgactgagaccagtgcccaagcttcatgtgctgcaagttctgcttccaaataagtaccggcaatgcatcaagcgaaagtggttttgtgtcgaacgtaaaccaagacgttgagaatttcttgcatgattccattatctacatttgtgttggagatatgtttacttcgatgttggat

SEQ ID NO: 9704 - DNA, 452 bp, Gossypium hirsutum
  Clone ID: LIB3135-005-Q1-K1-G11
aaacccatctctaaagacgacccaaagtccaaaacgaagaaatattggtggagaaatgctcgcttgttcttcaactggaaaaaatggtctccaaatagcaataaccagcatgatgatcgaacaaaggctaaagctttaagggcatcgaattcaggaccaatttacatgatcgagaccagcaataatggttcaaccactccttatcgaaccagtagccgaccatcttcaggccctttgactggaatttcgactccttatattagtcttagggaacttaacatggagcaacaacaacatagggtttctacttcttctttacccatatatttggtcacttaacccatcattttttttttgggttaagctaagtttttttttctttttcttttaagctctgtttatcatcttcttgggttgtacacactgacagaagtgtttgataaagtttgttt

SEQ ID NO: 9705 - DNA, 411 bp, Gossypium hirsutum
  Clone ID: LIB3135-005-Q1-K1-G12
gaaaaaaaaaacacccacgcgtccaaacccatcttaaagctacccaaaaccataacgtataatattcgtggaaaaaaactcgcttggtttcaactaaaaaaagtgggctccaaatatcaataaccagcaagatgatcaaacaaaggctaaagctttaacgtcatcgaattcatgaccatatttacatcatcgataccattaataatgcttcaaccactccttatctaacaaaatgcctaccatcttaaagccctttcactccaatttctactccttatattaaaacttattaacttaacatcaatcaacaacaacaatatgcttctacttcttttttacacatatattctggcacttaacccatcaaatttttttttgttaaactaaacccaatatctttatattttaatc

SEQ ID NO: 9706 - DNA, 329 bp, Gossypium hirsutum
  Clone ID: LIB3135-005-Q1-K1-G2
accacaccactaaccactttatttatacttttttctctcattccttccatattataaaaatagacatgttcttactcctctttaattacatcacaaaaaaaaaataaaaataaaaaaaaactttctcaaaatataacacctaaaataatatataacaaaaacataaaaaacaacaaataacactatatacacaacaaaaaacaaaaataaaaatgtgcccccttttttaaaaacccaactttattatccctctcctccaacttaaaatttttttttttttctcacctaaatcaattaaacttccccccttttaaaaaaaaatttaattt

SEQ ID NO: 9707 - DNA, 245 bp, Gossypium hirsutum
  Clone ID: LIB3135-005-Q1-K1-G3
cctgcaacccagttatctcactataaacactcgtcttattcaaaaccaaataccatactgggcggcgacattcttagatcaattctcataatacccatccatataatacaaaactcatttctataactcaacaattcacccattctacttatcttctccctatataatatactatcacaaccttcatagagattactcttcttcaatttgagccaaactatcaaacatatttctccctcattaat

SEQ ID NO: 9708 - DNA, 407 bp, Gossypium hirsutum
  unsure (1)..(407): unsure at all n locations; Clone ID: LIB3135-005-Q1-K1-G4
gagaaatctataattctctcatagctccggtctagggccatcactgctcatccttgagctgtgcggcgtgtggtcttagcgccgactctccatcctaagaaccaccgcacacggtggctaaggttcaaaaaaccctccctcgccagtcgtcgggaaaatcacgaagctcacggtggtaatctcgtcagcgttgatggaggcgtagaatctggttatgaggagccctgggtatgctaagaaggtgcattaatggcctcgattttagggagctagacagacgctcctcgaggcttctagaagacgttgcggcgctagaagaaagagggcagaaaccctatggtttcctgcttgggtctgtaatagtttgagccagttgggcctctntagtcctgggtctggttgggtct

SEQ ID NO: 9709 - DNA, 407 bp, Gossypium hirsutum
  Clone ID: LIB3135-005-Q1-K1-G5
tgttttccgatatggcttcagctgatgttgagtaccgatgcttcgtcggagggctggctggggccaccgatgaccgggctctcgaagaagccttcagtgtgtatggcgagatcgtcgaatcgaagattatcaatgaccgtgaatctggaagatcccgaggctttgggttcgtaactttccgtgacgagaaatctatgagagacgctattgaaggaatgaacggtcagaatcttgacggaaggaacattaccgtaaacgaagcccaatcacgccgaagcggtggaggcggcggtgaaggatacggaggaggaagcggaggctacaaaagaagtggaggaggcggaggatatggtcgccgtgaaggaggctatggaggtggccgtcgtgagggtgtattcgggaatggt

SEQ ID NO: 9710 - DNA, 166 bp, Gossypium hirsutum
  Clone ID: LIB3135-005-Q1-K1-G6
agaggattcaatctcttcaaactggtaaagccaacgcttagcacttcttcaagtgcgctggtatttaatgttgcattccatggtcctttatcttaatcggaacttgaatttttgtagctaccttagatactagcttctttaaccatgattgataattattatgtgt

SEQ ID NO: 9711 - DNA, 326 bp, Gossypium hirsutum
  unsure (1)..(326): unsure at all n locations; Clone ID: LIB3135-005-Q1-K1-G7
tccactcctacatttctctatctaatgttttatacccatacttcatctaatgccgtgcgctgggccacctatgaccgggctctccaanaagccttcagtgtgtatggctacatcgtcgaatcgaagattatcaatgaccgtgaatctggaacatcccgaggctttgggttcgtaactttccgtgacgagaaatctatgagagacgctattgaaggaatgaacggtcagaatcttgacggaaggaacattaccgtaaacgaatcccaatcactccgaatcggttgaggcggccgtgaatgatacggtggaggaagcggatgctacaa

SEQ ID NO: 9712 - DNA, 433 bp, Gossypium hirsutum
  Clone ID: LIB3135-005-Q1-K1-G8
gagaaatctagaattctctcagagctccggtctagggccatcactgctcatccttgagctgtgccgcgtgtggtcttagcgcctactctccatcctaagaaccaccgcacacggtggctaaggttcaaaaaaccctccctcgccagtcgtcgggaaaatcacgaagctcacggtggtaatctcgtcagcgttgatggaggcgtagaatctggttatgaggagccctgggtatgctaagaaggtgcattaatggcctcgattttagggagctagacagacgctcctcgaggcttctagaagacgttgcggcgctagaagaaagagggcagaaaccctatggtttcctgcttgggtctgtaatagtttgggccagttgggcctctttagtcctgggtctgtttgggtctgggtttgctggatgcttgtaactgga

SEQ ID NO: 9713 - DNA, 438 bp, Gossypium hirsutum
  Clone ID: LIB3135-005-Q1-K1-G9
cccacgcgtccggggtactgtcttcgaaaaaagagtcacagagttatctctggaggaatttgtatgctttggaccccagagagaagcagggaaacagggaaagagtttgttgaggaaaaccaaagatgggaaaattctcaactggaatgttgaaactgatgattcattttgtacattggctgaaaccttccagaaagttgatccttctttaggtttcaatattgaattgaaatttgatgaccatattgtttaccaacaagaccatctcatccatgtcctccaagtcatcttgcacgtggtatctgagtatgctaaagataggcccataatcttctctagctttcaccctgatgctgctcaactggttaggaaattgcagaacacttaccctgttttcttcttaacaaacggcgggactcaagtttactatgatgtaag

SEQ ID NO: 9714 - DNA, 360 bp, Gossypium hirsutum
  Clone ID: LIB3135-005-Q1-K1-H1
cgccagcactgaagacttcaagaaagtgtttgatatcaatgtgttgggtggtttcttgggggccaggtatgctgccagggtcatggttccggccaagaaaggttgcatactattcacatcaagtcttgcttcaaaaatcagcttcggtagcccccatgcatacaaggcatcgaagcatgccgttgcagggttgacgaagagcttggccgtggagttaggtgagcatggaattagagtcaactctatttcacctcatgcaatttcgactccaatgttccaaaaatcaattgggatacccgataagaagaagggagaggagatgattgcggcttcagcagtgttgaaaggcactgtattgga

SEQ ID NO: 9715 - DNA, 222 bp, Gossypium hirsutum
  Clone ID: LIB3135-005-Q1-K1-H10
aaaaacacccccccggtttaaaatttttttaaaaaaccccaaaaaaaaaaattttttggggggtttaaaaaaaaaaaaaattttttataaaaaaaaaacccccgggttttttataaaaaaaaacacccccaaaaaaaatgttttttgtttcctcccacactttttttttttgtttcacacaacaaaattttttttttaccaaaaaaaaaaatatattttttt

SEQ ID NO: 9716 - DNA, 275 bp, Gossypium hirsutum
  unsure (1)..(275): unsure at all n locations; Clone ID: LIB3135-005-Q1-K1-H12
gcacacatnctaaatttaaacattaacttttaatactcaaacactgcgataacaaacctcgcctgctttataaaaagtatgaaaatgcaacaacttcctgttaacttcaagccgatactatcaatctcttactttaacaaaactcctcatcatgttcttaacaactcccatgcttagatcatcaagactgacactatccatccttactaccaagtcaaactactgccgatcatcctttcttaccttaatcctctttcaaacaagcttctccacct

SEQ ID NO: 9717 - DNA, 172 bp, Gossypium hirsutum
  Clone ID: LIB3135-005-Q1-K1-H3
cgcatgcagatctaactttacttaccaactttcaatctaaattgcatctcgaatattccaggacggattaactataaagttcttccataataactaataatattcccttatacacaccaaaaaaattgccaaactaatcagcttatcacataaccatgcatacctatatatc

SEQ ID NO: 9718 - DNA, 321 bp, Gossypium hirsutum
  Clone ID: LIB3135-005-Q1-K1-H4
cggaattggaggttcgacccaggcccacgcgtccgatagacaaaaaaggcatatgttatgttgacgccggattacgatgccttggatggggcagagaaaatcggaattatctaagcagttggcgactaccttgttttgaatgctttattttttgtgttttgttgcaaggtgagactgttattttcagattcagctggaagatttaagcttagtttttttgttttttaaggttgtaatcttgctttactgccacttaatcatctttggtataaacttaagtcagaaggtatttaaccattcttaaatatttaattattatat

SEQ ID NO: 9719 - DNA, 325 bp, Gossypium hirsutum
  unsure (1)..(325): unsure at all n locations; Clone ID: LIB3135-005-Q1-K1-H5
tccactcgtttcttatatctctttctttattttataangtggtggtgcattgncccttagtaagacgttatttccatttgtctccttaactcccttaactaactatacctcatccttctaactatctacacagtaatcatcctcctttactaccttcttaaatatactatttccttttacgccaatgaatttttatacaataacacctctactcttacatatcttcttaatataatcctccccaatggaacttattctacctataatcccaccaaccaaatatcttcatcaccaccgtatttctatacatcaccgccgatcattt

SEQ ID NO: 9720 - DNA, 387 bp, Gossypium hirsutum
  Clone ID: LIB3135-005-Q1-K1-H6
ggtatattgggtggctggtgctttatctgctctttctgtattgctggtgaaaaaggctaggcgcagctaacttgctctatatgttcttccacgagccacagaatcgttgtggtatatttcagtaaatcggcaccttcttcctgatgttaaaattctgaggtggcgttattttgtgcatgcatgggaggaatcatgtactacctagaatatgaaccagatagcatatcaccattccttaagggtcttatccgccggttcctatctagcagaataagcaaccccggcagttcatttgatcggacagcttcctacacctacttgcagactcttgatgccatgaagaagccaaaaccagaggataatccaaagcttgatacttcagcttct

SEQ ID NO: 9721 - DNA, 290 bp, Gossypium hirsutum
  Clone ID: LIB3135-005-Q1-K1-H7
gttacatatgagattgatccaaagatgattaagcttagtattagcttgcttgtgtaggtggctttaatcatgtgtgaatatggtcatataaaattgctttggtcattggatataaacgttatgtaagtatttgaatcatggtatgaatgaataagaataaatggtgaaatataaacatgcatggaaagaatcatatactaacctaaaatatgaaccaaatatgataacaccatttacttaatgtatttatccgccgaatcatatctagcataataaacaggggcggccgt

SEQ ID NO: 9722 - DNA, 226 bp, Gossypium hirsutum
  Clone ID: LIB3135-005-Q1-K1-H8
aagctgctgctaaatagtgtttttctctttaattttattgttatatggtagatggtttttggtgctctttccttgtactcttaatggtttggttcagagtaaaccattttgttttctagaattcctattattattgtcaatggattagatgcatttttcccaaaggccaatagattgtcttggaatcctaatctatgcagtaaatcttatctacagtttaagttgc

SEQ ID NO: 9723 - DNA, 302 bp, Gossypium hirsutum
  unsure (1)..(302): unsure at all n locations; Clone ID: LIB3135-006-Q1-K1-A1
cccacgcgtccggtttggagcttgatctacaaatgggaagtggacattgaaacccttnttggtgtttgtttgaatttattttcaattgtgctacaaaaagattctgcttgttttgtagtctacttttgaacatttgagttgggacactggtttatgaatgaaaataaattgtccatgtaactcaatgggtaagacttgtaagggaaataaagactctgtgttggtgaaaaaaataatataatataattttcaataataaaaaaaataaaaaaaaaaaaattatttataaattaatttataat

SEQ ID NO: 9724 - DNA, 402 bp, Gossypium hirsutum
  Clone ID: LIB3135-006-Q1-K1-A2
ctcactattaaaccttctgcttagcttaaaaaatcttgaatccgtactctcctacttccctgggtatcgtcaatggcttcggacaagaagattaagatcgggattaacggatttggaagaatcggacgtttggttgccagagttgctcttcagaggaacgatgttgaactcgtcgccgttaacgatcccttcatttccaccgattatatgacatacatgttcaaatacgacagcgttcacggtcaatggaagcaccatgatcttaaggtcaaagactctaaaaccctcctcttcggcgaaaaacccgtcactgttttcggaatcaggaaccctgaggagattccatgggctgaagccggggctgagttcgttgttgagtcaactggagtgttcactgacaaa

SEQ ID NO: 9725 - DNA, 416 bp, Gossypium hirsutum
  unsure (1)..(416): unsure at all n locations; Clone ID: LIB3135-006-Q1-K1-A3
tcgnccacgcgttcgnccacgcttccgtcactttatccatattgattttgggttcatgctctgcgagtcaccttgtggggtaaattgtgagaattcaccattcaaattaacccctgagcctcttgaagtcattgattctgatgcttagggattgccaagtgaaattttttacctcctttaaggattttgccatccaaggtttctctacctgccgaaaccttccaaaggccttaattttttttttgaaatgttgcaggatttctgtttccctttcttaaaaggcggccctcgtccttttcaaattttaaaaaaacgattcctcttaaatttcacaaaaaaacaatgtgtgccattgttgctttcccttatcagcaacttttttaaatgccatggcgaaccacgccgttttatttttt

SEQ ID NO: 9726 - DNA, 127 bp, Gossypium hirsutum
  Clone ID: LIB3135-006-Q1-K1-A4
gacccacgcgtacggcctgtattaaatcctgattttaaaaaaattttcttgtaccaacttcaatgcatactttccgatattttttaatgttggtgtgaatggaccaaatacattttccccttttacc

SEQ ID NO: 9727 - DNA, 261 bp, Gossypium hirsutum
  unsure (1)..(261): unsure at all n locations; Clone ID: LIB3135-006-Q1-K1-A8
cccacgctnttctttactctttgtcatacgcttatttaaaatcaaatttctatgaccagatccaattcctttaatgatcggaaggctactaatatctaaagccaaatttcaaaggacgagtctatatctactaatgacggaaacctgacctaaagtctcattcaaacgcattatacattcgtaagtactctttcttcacgcttgacaaacttacaagtgtgtccgcatttttgcgaaaaaaatgacatttaaggttccatt

SEQ ID NO: 9728 - DNA, 301 bp, Gossypium hirsutum
  unsure (1)..(301): unsure at all n locations; Clone ID: LIB3135-006-Q1-K1-A9
aaaaaccggaccgaccgacgcgtacganagcttataaataatctttatcttccatctttctcttgtggagaagaaaagaaaaaaactgtatatttataaaaaaaaaaagaaccaaaccaaaaaaaaaaaaaaaaaaaacaaaaaaaaataaatacaaaaacaatacaccctcttaaaaaaataaaaactaaacaaaaacctaaattcaaaattatattacataatatttaatcacttaaaattaaatatctaatcaaaaaacattcaatctcccctttttataaaataaaataattttacc

SEQ ID NO: 9729 - DNA, 395 bp, Gossypium hirsutum
  Clone ID: LIB3135-006-Q1-K1-B1
agaagcagctgtacattgactggaaggcaagaaccgggttgggttctgttttggagaaccgggttcaaatggtcaggctatttggggtcaacatatttaaaatgcctggcagtgaaaatgttggtctagctggaggatgtaatgggaaaaggactagagaaatggagcttttagaattagagtgcagcaagaaacaaagggttattgatgctttgtaacatcacctaattaatttccctttttttttcttttttttttcccccttcttttgttgcttttggggcctttgggaatgttaaaagacggtgttggaagataaaaaaaatgggagggggggacatggatgtgctgtattagcaagttttaaaaggtgaattggatatttacaagaaaaa

SEQ ID NO: 9730 - DNA, 119 bp, Gossypium hirsutum
  Clone ID: LIB3135-006-Q1-K1-B2
attttccttttgtccaaaggatttttgctgctcattcatggtgacttggtttatggtgggatgtgttgttgttaaaatcttataaaaatatatatcgattgctgcttttggtttgtatt

SEQ ID NO: 9731 - DNA, 225 bp, Gossypium hirsutum
  Clone ID: LIB3135-006-Q1-K1-B3
aaaaaaataaaaaaaataaaaaatataaaaaattaattaaaaaaaaaaaaaaaataaataaaaggagagataaaataactaaataaaaataacaaaaatattaaaattcccctcccttttttaaaatcccatcctttctttcccttcttttaaacaaaatatttttttatttaaaaccccaaaaattaattaaatttcctctcatttataacatcttatctatta

SEQ ID NO: 9732 - DNA, 163 bp, Gossypium hirsutum
  Clone ID: LIB3135-006-Q1-K1-B4
ttttaaatctacacccgaatccaaaagatgtttttaaaaaggaagattgtttgttttgggatggcatacattgcggtgacgatcaggacaatgaagttcatgaccaacaagctcctttccagtaaacaattcgtcattgatgttttgcctccagggaggccca

SEQ ID NO: 9733 - DNA, 441 bp, Gossypium hirsutum
  Clone ID: LIB3135-006-Q1-K1-B6
tccatcctcactccacatttcactctctttttcaactttcccttcttctctttgttttaaaggggggcttgagttttagccaaagaaaactccatggctaaacttgttgctactttcttcttggctctcattgccatctccatggttcaaactttggttatggcatcacatggacatggtggtcaccattatgataacaaacgttatggacctggaagtctaaagccttaccaatgtccatctcagtgcacaaggaggggtagccagacacagtaccataaaccatgcatgttcttttgtcataaatgttgcaggacatgcctttgtgttcctccagggtattatgggaacaaacaagtttgcccttggtactacaactggaaaaccaaggaaggagggcccaaatgcccttaaattactcaaaaaaagaccctttttttt

SEQ ID NO: 9734 - DNA, 147 bp, Gossypium hirsutum
  Clone ID: LIB3135-006-Q1-K1-B7
tataatatatcccaccataccaacatcttttcatattcaccgtaaaacatcattaataagaccgttctctttcctatttcatcatccactattatttcaccctccttttttttcctccttctacttaaatttcattcaaatttttta

SEQ ID NO: 9735 - DNA, 433 bp, Gossypium hirsutum
  Clone ID: LIB3135-006-Q1-K1-B8
gtacggtccgaaaacagttcccctaattatgttaaagtagatcgggaaactgacaatgacgggaaaatgaaagttgtcggagcatgttcgacccatttggacgggattcaaatgagcgaggatgattcagacaacatagaagaagccggtccatcggagttgaaggagatacagtcacccacaattaaaccccgaaaaagagtacggtttatcgtgccggagagcccgaagatagagtccgaatcaatggaagagttgcgggaacttacggaagctagggaagccggggtagcttacatattatgacacacttgtcttagagctaaacaaggatctagcttgataaaaaaactcgtaatcgatttcggatatgaatttttgcggaaaaacaggcggacgtctacactcgcattaaccgtacctcatgtctcga

SEQ ID NO: 9736 - DNA, 220 bp, Gossypium hirsutum
  Clone ID: LIB3135-006-Q1-K1-B9
aatcaacatttcaacaattttcaactacatttacttaacccaacataccttatgttgcttttcttccaactaaaaaatgtcaccgaaacaacctaaaccaatcaccatgcatccacttttaaaacacgattttattaaaaatttccatttcattactgcaaataaaatttaaatacatcccctaatttataaaaccatattcaatgaaaaacccctttct

SEQ ID NO: 9737 - DNA, 170 bp, Gossypium hirsutum
  Clone ID: LIB3135-006-Q1-K1-C1
tcgcccacgcgtccgtgagaaccgaactgctataaccagagcttgggctgatcttaaacactttagggtgcctaatccaatgccgcgtggtgacaattgtggggtcagcataaactggcatctttattcagacttctttcgaggatggtgtgctttgatcacaatattca

SEQ ID NO: 9738 - DNA, 228 bp, Gossypium hirsutum
  unsure (1)..(228): unsure at all n locations; Clone ID: LIB3135-006-Q1-K1-C12
aaaacngggacgaccgacgcgtcacgcatgcataactctgcctcaaactttattattttctttataccaaaactatacttgtccgtgtttaatttaaacgaagtgaaccaaaaagactacttcttttctacgttcttacacctacctgtaactatagacgctggcgcacactcgcataggcacaacactcctaaagaacccctggtttcagccgcaatgtatattatt

SEQ ID NO: 9739 - DNA, 412 bp, Gossypium hirsutum
  Clone ID: LIB3135-006-Q1-K1-C3
cggtcgtggagccttacaatgccactttgtctgttcaccaattggttgaaaatgctgatgagggtatggttcttgacaatgaggccttgtatgacatctgtttccgcacacttaagctaaccactcccagcttcggtgatttgaaccatttgatatctgcaacaatgtctggagttacatgctgcttgcggttccctggtcagctcaactccgatctcaggaaacttgccgtgaatctcatcccctttcctcgtcttcactttttcatggtgggttttgctccactcacttctaggggatctcaacagtaccgagctctaacagtacctgagctcacccagcatatgtgggacgcaaaaaacatgatgtgtgctgctgatcctcgtcacgggcgatacttgactgcatctgc

SEQ ID NO: 9740 - DNA, 297 bp, Gossypium hirsutum
  Clone ID: LIB3135-006-Q1-K1-C5
tcgcgtctctctttaaaacaatcccttcatctataaacccaatacaactgttaacatacccggagattgattaatattaagtatcttccaactattaaagagagaaaatatatgggaattccacacacatgcacctagttgagtcaacttccatcatctaggaaatacagactatttttatttctagaaactatcatcgatgcgtcttttatttttctgttccttacatgcatattatatttaccaatctcattgaaatttagcacttttatatcccccaatgatcatacttattga

SEQ ID NO: 9741 - DNA, 401 bp, Gossypium hirsutum
  Clone ID: LIB3135-006-Q1-K1-C6
cttttgtttctgtcaccccatattgcccagagtgcacaacaaaatacgcgactttgatcaagggggagctgctctattgcctagcttcttctccacatcaggggcagctcggatttactactaacttccgatgttgaagattcacctttgtaggcagataattcctagatagcttccatattgtaaccttaattttagctggtagattcaggcaccatagttttttataaaaattcccatagatggtctgtaaagcataagctctaggattgtcagtcaatttttgtaatagttgataggcacttctgaccgtaaactcacccgaccgttcgcctccccagataagaaaatcatcatgcggcgtttgtgccagagggattctgaggattctagctgcgtcg

SEQ ID NO: 9742 - DNA, 431 bp, Gossypium hirsutum
  Clone ID: LIB3135-006-Q1-K1-C8
cccacgcgtccgaatggcccttcgatcattatccaccaggaaaaccctaaccttggctctggggtccaccaggttggctcagtctcgagccttgcagaccttctcgctccccgatcttccgtacgactatggggcactcgagcccgccatcagtggagagatcatgcagctccatcaccagaagcatcaccaaacttacatcactaactataacaaggctttggagcagctccatgacgctatccagaaaggtgattcttccaccgtcgttaagttgcaaagcgccatcaagttcaacggcggaggtcatatcaaccactcaattttttggaagaatcttgcccctattagtgaaggaggaggtgagcctccacatggttctttgggttgggccattgataccaactttggttcattggaatcattgattc

SEQ ID NO: 9743 - DNA, 346 bp, Gossypium hirsutum
  Clone ID: LIB3135-006-Q1-K1-C9
acccacctcccaactaaaaaaacaaacaaatcttccttacaaattataacgaaaacgccgtcccgtcttcttaagaccttctttcccccctcaaacaccactaaaatcattgcaaaaaatttcaatcaaattccttttaacaatatttctatccttctaaactctattaaaatatcttcactcttcctcatttcttacaaactaattcttatttatttaaaaaataatcttaattcattttttctacatctcttctcaataattctcaaaatttttatttccaatcttaattttctctacttattcatatcattatcaattctctttatatcaacaactatatttt

SEQ ID NO: 9744 - DNA, 443 bp, Gossypium hirsutum
  Clone ID: LIB3135-006-Q1-K1-D1
cccacgcgtccggtctgtctttgtcatgacatgtgaatctgcagtgcaactgcgtaaagcaggcaaagttacagtgagggaatcaaatttgaagaaattaggagctacccattttaagtatggggtagttgatgaacattttgaggtaacaaaatttgctcttttggagaccataaaagaagcagtaccagatatgtggtcagatgagatgaagaatgcatggggtgaagcctatgatcgtttggtcgcagccattaaaatagaaatgaaggcatgctcacaagctgcatgatttcacaagttccctacattattgcttgttaattttgggtccaataagattgaaagttttcaatcatttaaacatgtaatgtaacatagctattgctcatcactactgtttttttcccctagtttgtttgctcctgttctttttgtcccct

SEQ ID NO: 9745 - DNA, 384 bp, Gossypium hirsutum
  Clone ID: LIB3135-006-Q1-K1-D10
atattaaaaagccactaaatcacactttggttcttaccaaacaagaaaacaaacaggggccgtgcccctttcacatgaacccggaccctacctaaccaatcatgatacaacatgaagggaggtaaatccaagtcagatactaagagctccatgctcgccgtgatcaaaaaatctatcgccaaagctggaaataaaattttgaatgcggtttatgatccaaacaagccaaaaaggcctgctaaagccttcttcattttcatggaggagtttcctgtgcaatacattaacgaacacccaaaaaacaaaatcttcgcttattgtgttcaaaactcgatgaataaaaattaaaaaccttgtctgatgcttaaaaaaaccccttatttt

SEQ ID NO: 9746 - DNA, 332 bp, Gossypium hirsutum
  Clone ID: LIB3135-006-Q1-K1-D11
aaaaaaccgccccgacccacgcgaccgataaaatttaacaactttttacaactatttatttctaaacaaactagatatctcgctcgtaatcttaatattcttgaacaccaaatttcagcgtatatatataccagtttaacctaagaaccatttcaaataacacccttgaatcattagtttatacaattcacaaattaactatttacttaaaagcactataacaacttaatactcgtaaaatcagctcaatgacatcgattaatattaaaaaaaaaactccacgatcaccattgcaaagtataaatgaaatgtagaatattctaaccccctca

SEQ ID NO: 9747 - DNA, 247 bp, Gossypium hirsutum
  Clone ID: LIB3135-006-Q1-K1-D2
aaattctaacgtttaacattatacgattatttcagcaggaactaaatctcattatggagtggagtctcttggcgaggtgaaggcatggcttaaactcctaaagaaaggcggcagtctgagaaaatgatatcagatgtgtttcgcttattcaatgagatataatgatattttaatcacccatcgaaacgcacaaaacaattacaacatcattacttgccttttccatagaaacttcttcttattaatc

SEQ ID NO: 9748 - DNA, 396 bp, Gossypium hirsutum
  Clone ID: LIB3135-006-Q1-K1-D5
taggactcgtttttttcaatctacccgtactcttattattttgcttcacgcatctacaaggcagattaatctatcctaaatatcattcctctatcatcaattgatgattatgttgatttataataaacctatacatattcttagacaaaagacagtgcatttaaagattacttttatatatcctgaaacctttttgacattccttctaatttaaattttactcttaattactatttctaatgaacttttacattcttttttataaattaatacttgattaaatttatctttattatctataatattttttttatactttattcctctttttattttcattctaatttcaattttttcatctatttatttataactccttttgtcttttatatattt

SEQ ID NO: 9749 - DNA, 391 bp, Gossypium hirsutum
  Clone ID: LIB3135-006-Q1-K1-D6
tctagatcgcgagcggcttccctttttttttttttttatcatttgcaatttcccattttttgggaaattgcatatatggtctaaaaacatgtattaaagtcaaaagatagaatacaagtgattaattggagaatatattttctcgagatttcttgggtagcaatatcaatttaaatctccttccggtaggtgtacattaaagccttcatccatgcatcataacacatatggaattacagctttgacttctttgggaaaatcttcaaactcaacaaattgcagcagctgcatttggatggtatccgcaatctgtgcttagattatattataaagagccgacgacgagatgataatatcagttgaaatattttggttatatgttccaaaagta

SEQ ID NO: 9750 - DNA, 340 bp, Gossypium hirsutum
  Clone ID: LIB3135-006-Q1-K1-D9
gactttcaaaattcaatctcttttattaagtccaattaaaacaaaatccaatagctgtagcgttaactatggaatcaggcctttatctacaactaaaatcttgcttgcctctatttatcattattaccgttatctgttttaagaacactttattctcgggacaaaacgcaacccttatcatccttgtcaccaaactacttgtcttattataagacattaaacctcgaatcccatagcttaatctcaaacgttagtcaagaatgtattttcattaagataacaattctttcacaatatgtcatagaaagtattctttgatattttatattttacaacaaaa

SEQ ID NO: 9751 - DNA, 295 bp, Gossypium hirsutum
  Clone ID: LIB3135-006-Q1-K1-E1
tggaagctgagcctccggagtggcttccagatagttctaccactgtttgcatgcagtgcagggctctctttacagcaattacgcgtggcagacatcattggcggttttggggagggattttctgtagaacatgttctaaaggaaagggcttgctacctgttaaatttagggatagaaatccccagagggtgtgtgattcttgctatgatagacttgatccattgcagggggttcttattaactccattagcaatgctgcacaagtagcaaaacatgatgtcatggattggacgtg

SEQ ID NO: 9752 - DNA, 349 bp, Gossypium hirsutum
  Clone ID: LIB3135-006-Q1-K1-E10
aaagacaccacactaaactctagcgtgtacttttacacataaaaaaaaacctcctcgcttggatataaaactctcttgatgctgcagtaacaagcttgtaggatgttttttaagtatggggaaagccttccacacctgaatattcttctgtcacatattaaccttttattcaacaactgctgactctgccaccccaaaccctctttgacgggtcctgcacttgtagatgggacactttatgttgtctatgagatttttggaaatttaatgatgtgccagaaggatattatggcatacgtggctatttggaggctttcccatacatagaacaccaccaccctacaagctt

SEQ ID NO: 9753 - DNA, 236 bp, Gossypium hirsutum
  Clone ID: LIB3135-006-Q1-K1-E11
cggggcgaccgacgcgtccggtttccttctcattatcattgatgtttgagtgtcccacacattatatataattcttgctattttttaactcaatgaacgctcacacacaacaagaaatctggtgcaaaaagggaccctcatccatggccgaaacctttttcattttgtggtttgtaatatttgtttacatttggatttaagttaatgatggtataaaaatgatcaccttgttggct

SEQ ID NO: 9754 - DNA, 132 bp, Gossypium hirsutum
  Clone ID: LIB3135-006-Q1-K1-E12
tatctaaaaaataaacttttccctgtcttctttgagatgcaacataatccttcgctgcgcgggtacttcttttacatgaaccctcaaaataaatcttgaatcatttttaatcccacagaaaaaatgatatgt

SEQ ID NO: 9755 - DNA, 256 bp, Gossypium hirsutum
  Clone ID: LIB3135-006-Q1-K1-E3
tccggtccctgttttggtcttattgtttaaaaaacctttgccttagccaggggaccaaatggaagggtggttgtttttctgccaggcctcataaaatgttttcctgccttaaatacacatttggcgctcttaaaaaattaaaacacaatttttttgattgggaaatgttttcccggtggggtgttttccttcacataaaatgccccaattttttttcccataatatccctgattgggcaatattttaattgattgg

SEQ ID NO: 9756 - DNA, 376 bp, Gossypium hirsutum
  Clone ID: LIB3135-006-Q1-K1-E8
tgtctactcatcaccacctcctcctcaccactactaatcaacggctttgaccgcaccaagtgtaacaaaagagtgtgatccaataaagcgacagagtaagagagcagtgtgaggtcgcctagtctccgcgtttcaagagaagaaaaagaaaacaagaatgatgtagacaagtagtagggtcaataaaaaacaaggggttcatcgttttcacatttgtattattcagtggttctcgtatttcttgctgctttagtatacaatgtttcctagattttatgtgtttttcttttccgacctttttgcaaatgcaggggtgatgggtttgatctttaataaaataaaggtttttactaaaaaataaatttttttattaaaa

SEQ ID NO: 9757 - DNA, 368 bp, Gossypium hirsutum
  unsure (1)..(368): unsure at all n locations; Clone ID: LIB3135-006-Q1-K1-E9
ntcaatcatacaacttatctaaaaatttaattacaaaactcatgagatacctcggtgcgaggtcaatattctttaactccaacttctaacatatatatatacccatttagcattacaaccatgtaaataaacatttttacatcattaacttatataatttgctgtataacctcttattcaaaaacaatatgacaacgtgagactcgttaaatcaactcattgtctgtgtttaatatcacataaatgctttccactatcaccattgcatattataactgaaatgtaaaatttctttacctactcattgtattcaactttaagtggcattaccatatttcttctacatacaaatttggaatataatattt

SEQ ID NO: 9758 - DNA, 370 bp, Gossypium hirsutum
  unsure (1)..(370): unsure at all n locations; Clone ID: LIB3135-006-Q1-K1-F1
tcgcccacgcgtncgtgcgtgaactagagtcccaagagacaagcaggacagatggccctcgaggggcatgcagaattgtcaattgtggggagctgcctatagaaggctaatatctgatccgtttaaccactaccacaaatctcccattttatcatttactttctctgcttcaagatgattttacctggtaatacggacaacagtcggcgtttattatagaagagagaattttggatgatactttgtaagctcttggcaggggtgtgctattatccttatcattttttacggtgtaagtttgcagattccatcaaaactcttctcttaatggaacatctgatttttctttataaaaaatattatattttaa

SEQ ID NO: 9759 - DNA, 220 bp, Gossypium hirsutum
  Clone ID: LIB3135-006-Q1-K1-F2
gtctttcatgctcatccacactataatatatctcttttatggcacctattcatcccatatctttttttgaaaattttttcaataaaaattaaaacaaatattattatcaataaaaaacaattatatcatctttttcacaattttattattaaaatatttctcgtattacttatcttctttatatgtcctcctttcttaaaaaacaaaatttatttctccc

SEQ ID NO: 9760 - DNA, 134 bp, Gossypium hirsutum
  unsure (1)..(134): unsure at all n locations; Clone ID: LIB3135-006-Q1-K1-F3
cgacgccacgtcgtctcgtcccacgtcgtcncnngggaatttcaaatcaaannatctcgaccaggctacccaatagnnctatgatgtcgcccatcacgcgactatatccttatatctaactnnntctttatccc

SEQ ID NO: 9761 - DNA, 63 bp, Gossypium hirsutum
  Clone ID: LIB3135-006-Q1-K1-F6
tcgtccactcgttcgaaaaaatcataataaaaaatttaaaataaaaaaaattaaaaataaata

SEQ ID NO: 9762 - DNA, 242 bp, Gossypium hirsutum
  unsure (1)..(242): unsure at all n locations; Clone ID: LIB3135-006-Q1-K1-F8
ttcccggtcgccacgcgttcgccacgcgttcgccacgcgtncggtgattttccaaaatcaggcaacttggtatgatgattggggggctcaagattctagtgagggcagcaagaaatcactttcagcattcgccaagggttaaaagggctgttacaaaagaaagagatttgctcaaacaaacacacaggtgtctgataaaatataaaatgggccttcattggggaaatattggcaaaaaaata

SEQ ID NO: 9763 - DNA, 274 bp, Gossypium hirsutum
  Clone ID: LIB3135-006-Q1-K1-G1
ggaaatttatggttgctttacttagaattaaccaattgatagtcttttaaagtaaccgagggccttcttcttcaacccaagattgaaacttgaaaggtctgctttatctaattcagttgtcattgttggtaccatgggtgtctcaggaaaatggatcaaagcattggttggcttgaaaagaacagacaagtcacaatcctcggagaagaaagaaaatagggcagctactagcaaatttcgtcaccgaaggaagcattccattgagttttacaca

SEQ ID NO: 9764 - DNA, 366 bp, Gossypium hirsutum
  Clone ID: LIB3135-006-Q1-K1-G10
aaaaaaaaccggctccacccacacgttcgtacacacgtacaaataccttcttctttctgattacaccctattcaaacaatatattgtccttttttaaaacttttatgcctcgttatacaacattcaaaaatatttaccatcattttttttcttttaccataccctttctcacaatatatccttcaaacaccttagattatatttctagcactaccataatcactacctcttacaatatttctattattcatccaaaatctcacataaaccccaaccactagtcctaaactacattatataacacccaatccccatatctaacttcatcatattacctcttacaatacattcaccccatatattcaa

SEQ ID NO: 9765 - DNA, 382 bp, Gossypium hirsutum
  Clone ID: LIB3135-006-Q1-K1-G11
ggaaactgaggaataaattgtgtgttggctatgggggtggtgttagggtcttattcggcttggttggggttacatttattacttgtattgatttgttagcttcaatatatggaatgttggtgactgagagagggacacagaaggagaaaaagaaagaatttaaggcatttacttcaactactgctaagctgttatggagagactccaaggacccattaatccttatgaaaatacttacatctgctactgcactactgcttcttcttactctttcaacattctactctcattctactttcattatctctttatctgctgagagagactgaaccatgtggcctccacccaattaaatgatatttttctttttcaaatatcttta

SEQ ID NO: 9766 - DNA, 342 bp, Gossypium hirsutum
  Clone ID: LIB3135-006-Q1-K1-G3
ctgaagatgaagaagaagatatgaacccttgctacattttatctacttgtgttaatctgtattgttttatttttatttttcgcttttaaattgtatgataatccctgggggttttgccttcctccccagttttatttcttatgttttgctagaaatgtaagaaaaatacatttaatatgtaatccttgcctgcgaccaaaaacattagcaggagaaaagaattataaaaaatatttaagcaaaatataaaattaaaaaaaataaattaaaaattaaaaggttttgtgtctatctgtttatatttttctatctcacgttctccttctatctaatccttttttt

SEQ ID NO: 9767 - DNA, 147 bp, Gossypium hirsutum
  Clone ID: LIB3135-006-Q1-K1-G6
agcgacggcacctggaaccacactgctgccgctggccttcgggcacaccttctacgcttaccagtcacctacgctcttgcagcatgcccccttcgggcaatactactttcgtaatacgcgaagcagctgagcgatagctcttcgatc

SEQ ID NO: 9768 - DNA, 172 bp, Gossypium hirsutum
  Clone ID: LIB3135-006-Q1-K1-G9
gagaaatcaaaacttccctcaaaccttaactctaaaaccatcactgctaaaccctcgtctcgttttcaactggtcaaaaccccccccaaccagcataaaaaccactgaacatcaaacaaaagcttaaactttccctccatccctgttaagcccaaaaaacattaaccacacc

SEQ ID NO: 9769 - DNA, 444 bp, Gossypium hirsutum
  Clone ID: LIB3135-006-Q1-K1-H1
ttcattttaaaaaaaatttaatgggtaattgtttacggcatcaatcatcaacacaatgggccggcgacgactggggaacaacggtggctgactacggcgaagacgacgggttttccgacattaaaacgaaagaaaagggtattgtaggagatcatcatcaaaaagatggttttattacaacatcttcgactccaactgttcatgaagttaaagtgaagataacgaagaagcagttggaggaattattaggtagggttgatgtaaaggagttatcagtacaacaggttttagcacagttgattaatgttagtaatcaatttgatgaaacaaatcaacggtcatggaggcctgcactacaaagcattcctgaggtgaattgagctggtcatgaagaaaaaaaaatgaaacccagaatttttgttctttctattgggcgtggggggg

SEQ ID NO: 9770 - DNA, 105 bp, Gossypium hirsutum
  Clone ID: LIB3135-006-Q1-K1-H11
ctttaatttatttctaatatttgggttaaaaaaaaaaaaaacaaaaaaaaaaaacccgcccggttaaaaaaaaaacaaacccccccccccaaacaaaaaaatcca

SEQ ID NO: 9771 - DNA, 361 bp, Gossypium hirsutum
  Clone ID: LIB3135-006-Q1-K1-H12
aaaaaaaaacgggaccggccgcacgcgtacgcccaccctttctattaaattctacactatattccataaaattatcactcaaaactcgttctgtttttctcattaaagggagcggcccaccctacaaacctatttaaacttacctcttggctaatcccgaaacctgcaactattatataaattgcttaatttgaattcttatgcttgcttttaaagaggggcttgattttaatgatttgcttttgatattttctttttcatcttaaaacctatattgtcttctccttgctcactaagaatgatctgtatcttcatccaactttgatacatcttttatatataatgaaataaattaacatat

SEQ ID NO: 9772 - DNA, 451 bp, Gossypium hirsutum
  Clone ID: LIB3135-006-Q1-K1-H3
gcagattgtttcatctgatctgaaactccgtcgcccacttcccaaacaaagcaaatcgatggggccgcctcctggaccatactccggcaccagcactcttgctctcgtggctcgtgcatctgctttgtcttttggactcgtttatggtagcattaagctcaagtatctcaaggccaaggcaaggtctcaaaggaaagctgaagcaaaggctcaccactgaagcaggggtggtttttgttcatagttggtttgcatgagtgaattgagcttggtgtaggaataaagcataaaaatagtattgtaccagattttcatttcggcttaaagcttctatggacaatgacattcttgtccccaaatttttttagtattacgaactcggcacttcaagtattaatttttcggttggcaatggcactaccgacgtttagtgtctttagtaaatgggaag

SEQ ID NO: 9773 - DNA, 222 bp, Gossypium hirsutum
  Clone ID: LIB3135-006-Q1-K1-H4
cccatcgttcgatccaaaccttgtttagcgagagtatgccgtggctctacctcttaggggggatggtattgaccttgatgatcgcattaccgacctacatactagcccttttgacttcaattaggggggtgttcttggcaattaaatcccaacgaatgtcagtactgaacttgtatgattacatccacattgtttgcttattaaccccctctttgcccccag

SEQ ID NO: 9774 - DNA, 405 bp, Gossypium hirsutum
  Clone ID: LIB3135-006-Q1-K1-H5
tagacgcattatccaatgctttcgtctatctctactacacgacgttctatgctaaccgggcgggtctttccaatctgtaccaggacccctcaatgttgaccttcgagggtcaaaagatccaatgctctcagagcatcgtctctaagctcaccagccttccttttcatcagtgtcagcacagcatctccaccgtcgattgtcagccctccgtcgctggcggcatgctggttttcgtcaatggtaccctccaactcacggactagcagcatgctctcaagttcatccacatgtttcatttgatgccatcaccgcatggaagctaacacctgttgaatgacatattcatgttgaactatgcatatatatgcaatccaaagatacaaatcaaacaatgttttggctctc

SEQ ID NO: 9775 - DNA, 422 bp, Gossypium hirsutum
  Clone ID: LIB3135-006-Q1-K1-H7
cccacgcgtccgcgcaaattgaagaactttcgatcttttgaattatatgatcaagacacgcgggccaactcagtggatttcgaccatagtgggagttaccttgcaattgctggctcagatataagagttttccaagttggcagcgtaaaagctgaatggaattgcatcaaaactttacctgatctgtccggcacaggtaaatcaacttgtgtcaaatttggtccagatgcaaagtacttggcagtgggatcaatggatcgcaaccttcgcatatttggccttcccgaaggtgatgatgcttcaacagaatcataaaaaggaaccccttctgttcttcatatatgataagttgcgactgctcggtttcgtggttaaagaactggcagatttttaggtggggttaaatcttttagtcttgtgct

SEQ ID NO: 9776 - DNA, 269 bp, Gossypium hirsutum
  Clone ID: LIB3135-006-Q1-K1-H9
aaaaaaccgacccgacccacccgtccggaaaaagaccaagctacttctaaatatttttctccaccataactataatcaaccctgtccgtttaaaaaagtgctcgctcccaacacaccccatgttacctcacacaataactcactctcttttacagaaaccaaattcctcttaacaaaatataaaattcccattcttccaacaccaagactactactatcaatcctaactatacccagaaaaccttatctacaaaacaatctcacctttt

SEQ ID NO: 9777 - DNA, 374 bp, Gossypium hirsutum
  unsure (1)..(374): unsure at all n locations; Clone ID: LIB3135-007-Q1-K1-A1
gtgaggaaactccaaatattttttcgaccttattttaaaaaactacaaatncgcctttttgcaaacatttaaagaactcttactattcccacaactttatatgaggtcagtccaacaatgaccacaaaattgtatgaggaaactccaaccagtcccacaaacttatctgaggaaactatgactactcccacatcctccggtgtggaagcttcaacacttctcacaactaacattgaagaaacatcttctgtttctacaactacttaaatttaaactttacccccttctactacttaaaagtgagaacctgcaacttaatatctttactgtcaaaacaactcagaaatttcataatttctgtattatagaacaca

SEQ ID NO: 9778 - DNA, 232 bp, Gossypium hirsutum
  unsure (1)..(232): unsure at all n locations; Clone ID: LIB3135-007-Q1-K1-A10
gcgtacgctcctncatcttatgctgacatgtcaaatcttttattatcatgccccatacttgangcactgcatggtttccatacacctggggcccctcttcataaaaaaaacagcattctattttcaaaaccacccctcattgtattaccaacactagccaaatttacaaaaccatgtgcatcccaaagaccctcaatacacgtgcacatatatatgcaagaaactcctcaac

SEQ ID NO: 9779 - DNA, 308 bp, Gossypium hirsutum
  Clone ID: LIB3135-007-Q1-K1-A11
cgcgtccggctatcttacttttattcaatatcttgttattcagatactaacaaaaattttacacgaaatgacacggcctaattcgctaaataaccaaaacccaattgcatcattacctatcacacctaaatgtggtgaccgcacaccatcatgatgatgacaacacttttgacaatgatgaggtatccatctactatgactaccctatccactatataacctacaaattattcatactatcggatcacaaactatatccagcaccccttgattcactgaccctttatactatattatcatacacaatg

SEQ ID NO: 9780 - DNA, 434 bp, Gossypium hirsutum
  unsure (1)..(434): unsure at all n locations; Clone ID: LIB3135-007-Q1-K1-A12
gcaggcacatttgatataagaaacaactgcccttacaccgtttgggctgccgcatctccgagtcgtggcaagagacttgaccaaggtcaancatggcaaatcactgcagcctctggaaccacacaagcccgaatttgggctcgaaccaaatgcaatttcgatgcctccgggaaaggctcatgcgagacaggcgactgcggtggagtcctcgaatgcaagggatacggtaaagctcccaacacactagccgaatacgcaatcgaccaatttgagcaccaagacttcattgacatctccaacatcgatggctgtaatgttcctatggagtttagctccaactccccagggtgcactagggttatcaagtgtacggccgacattgtcggacaatgcccgaaccagttgaaggttcccggaggttgtaacgggccttg

SEQ ID NO: 9781 - DNA, 349 bp, Gossypium hirsutum
  Clone ID: LIB3135-007-Q1-K1-A2
cccacgcgttcggctaaaatcaggtggccacaatgttaccgccttagacctgagtggatcgggggttgatccacagcaagtcaacactctgagatcgatctctgattacataaagcccttgagagaattcatggcatcgttacccgatgaataaaaagtggtgcttgttgttcacagtttatgcggtttggccatctctcaagcaatggaaatgtttgcggaaaaaatctctgtagcagtttttgtgacagccctcatgcctgttccaacactcaacgcttccattctcactcagaaggtattacgtgatctacatccacacatggagaaccattatacatatgatgat

SEQ ID NO: 9782 - DNA, 324 bp, Gossypium hirsutum
  unsure (1)..(324): unsure at all n locations; Clone ID: LIB3135-007-Q1-K1-A3
ttatcnataatgtatgggcttaacattgatacatttttttcaaacaccagtacctgtttaatttggctaaattgcgaactctctcaccaccacccttttgtaactaagattcaaaacacctataacctttaactcgcccaccaaaaacctttattgctactcgcattcaaattctatattaatctgatacttcctacaacaattgctgttttgtagatgcgtacacacaagatctatcccatataaaaaattaagtctatcacaagcctaccaaccactaatttagatttcatctctttgacataaggttacttaatcacttat

SEQ ID NO: 9783 - DNA, 430 bp, Gossypium hirsutum
  Clone ID: LIB3135-007-Q1-K1-A5
gcgtccgaccgtcagagtgaggaaactgcaaagattcctgcgacctcaggtgaggaaactacaagtggtcctgtggccctgcatgaggaaactctggctattccgacaactttggatgagggcagtccaacaatgaccacaaaattggatgaggaaactccaaccagtcccacaaacttagctgaggaaactttgactactcccacatcctccggtgtggaagcttcaacagttctcacaactaacagtgaggaaacatctgctgtttctacaactacggaaatggaaactttaccccctgcgggtgctgaaagtgtagaacctgcaacttaatagctttactgtcaaaactactcagaaatttcagaattgttgtaggggagaacacaccagtggttctgatattggtgtggggtttggtagggctgat

SEQ ID NO: 9784 - DNA, 392 bp, Gossypium hirsutum
  Clone ID: LIB3135-007-Q1-K1-A6
ctcgcaccccttctcttttcatctccactttttcacctaccaggagtcctcaggcgtcggggtacgacaagaacctgctttatcatgtccatgcggctgcggttcctgatgatgtgattcaacctcaatcggacaagtactgggctcctgacccgcggacaggggtatttggccctgctacggaccaacttaacgcatctgcgggtggggagcagggcatccattcgagtggtgcaaactcggtcctggaggaaaaggcgtggttccgccccactattatagatgacttgtagaagccacaccatcactaagtcgctgataatgagcctgctactatatagtctataggtaaaacaaagacaatatgtgtggtttgcttggatcaaataaac

SEQ ID NO: 9785 - DNA, 130 bp, Gossypium hirsutum
  Clone ID: LIB3135-007-Q1-K1-A7
gccgacccacgcgtactcccacacgtccgcccaattaattttaaagtttttagcaaacacaagtacttagtccattgtgagagattggaaactgtttaagcaactcccttttgaaattaagaatccaaac

SEQ ID NO: 9786 - DNA, 410 bp, Gossypium hirsutum
  unsure (1)..(410): unsure at all n locations; Clone ID: LIB3135-007-Q1-K1-B1
cacgcgtgcggttttgttatcnataatgtatgggcttaacattgatttattattttcatttctctgtatttgtttaatggggctgagggcgtctccttccaccaccaccctttggtaactcacatccaagcccattcttaccgcttgtacgcacgccaaatcctttgctgcaaacgtcgtatggattcgattattgacttccaatctaaaacaaagtatctttccttctgagtccctacaaacaatgcctattccatatttaaatatttgcttgtcaaaggccccatcaaagtacattatgatctcatctggttcaagtgggctccaccgttctactatcctttgacctggtaatatgaggtttacctcttaccattccctcatatatttgtaaataagaaaaactgtgt

SEQ ID NO: 9787 - DNA, 258 bp, Gossypium hirsutum
  Clone ID: LIB3135-007-Q1-K1-B10
ttttattatctttgtactagcttttatttcttatatcccgaataatccaaatgctgagttatattgattattatacatcccacttcttattacttaagttattttggaacaactctaataccacactgctaaattcatcttaatatgctctatgatgtgttctatctcagacaaccattttagtatataaattatctatgattaaactatcataaatgaaaagaaactttctttatactcatcataaaaatattattt

SEQ ID NO: 9788 - DNA, 288 bp, Gossypium hirsutum
  unsure (1)..(288): unsure at all n locations; Clone ID: LIB3135-007-Q1-K1-B11
aagcttctatataaaggaacaagaaaatcatatacgttngggtatacatctnacattacttcccacncttaaaacttggagaggtagactacatgatgccaaagaagaattatccactttggcatttaattttcaggaacccaatgttcatcaaagctgacatctattaatggaccgatggtgaagagctagaaaaagttttgctgcaactaatcaacatgatttctcttgaagaagacgatgccaattcttcccaattcatcttcgttgactgcaaattgcagacca

SEQ ID NO: 9789 - DNA, 210 bp, Gossypium hirsutum
  unsure (1)..(210): unsure at all n locations; Clone ID: LIB3135-007-Q1-K1-B12
taaaatttttcaaactatatcaaaataaatacttattagagatagtttaatatttgataaactccacccacatnntaaaatttttatttaagttaccctccttcaatcacacatccacaactatcatattttcattcacctcgttctaaatacacagatatatcttaatcatataccttataaattcacaatatccctacctcacacctt

SEQ ID NO: 9790 - DNA, 361 bp, Gossypium hirsutum
  Clone ID: LIB3135-007-Q1-K1-B2
gccacgcctcctgagcaattataaatcgaattagatgccgatgatggccctcctgaacttcgcttttctcatggaggccataaagctaacatttcacatttctcgtggaacaaaaatgagccatgggtgatttctagtgtagctgaagacaacacacttcaagtgtggcaattggcagagagtatatatcgagacgaggatgacactcaaactgcctgagaccatccatagtccatagaagttggatttagagttttaaggatatgacctttttaagtaacatcattgtgagtttataataatgctttgtatgtggacacgcttatgagtcttttaacatgtaatttaatatttcaaacct

SEQ ID NO: 9791 - DNA, 430 bp, Gossypium hirsutum
  Clone ID: LIB3135-007-Q1-K1-B3
gaccgacgcgtgcgaagaagttcaatggcaaggatgtgattcttattgccaccattaggatattaaggcctccagggaaaggtggtgcagttcataggccactcagccgcacattgactgctgtacatgaggcaatgctagaagatgttgtcttacctgctgagattgttgggaagcgcactagatatagaattgatggatcaaagataatgaaggtgtatttggaccccaaggaacgtaataacacagagtacaagcttgagacgttttctgcagtttaccggaagcttgctggaaaggatgtcgcgtttgagttcccagtgacggaggcatagatagtactttttgaagcgttgtgaaactttatttctggttaaaattttgacatttttaagagttggtaagcaaagtcatatggatttaattccct

SEQ ID NO: 9792 - DNA, 394 bp, Gossypium hirsutum
  Clone ID: LIB3135-007-Q1-K1-B5
cccacgcgtccgcccacgcgtccgtgggaaacaggattatcaggaagaggagtgatgtacgggttgagcatgtacagccttcgaggtgcgctgaggaattcaagctcaggaaggtgaagaatgatcaactcaaggcagaggctaaagcaaagggtgaggtcattagcacaaaaaggcagccagaagggcctagacctggtttcatggtggatggtgctacacttgaaactgttacgcccatcccatacgatgtcgttaatgatctcaagggcggttactaaatctactctgttttttgtttgcggtattgctttggattccttttttttttttttggcaaaacatcagtggtgaactgaattaaacatttggaagagctgctttctttagtata

SEQ ID NO: 9793 - DNA, 346 bp, Gossypium hirsutum
  Clone ID: LIB3135-007-Q1-K1-B6
cccacgcttcctcccacgcgttcgtgggaattaggattatcacgaagaggagtcatgttccgatggagcatgtacagccttcgacgtgcgctgaggaattcaagctcaggaaggtgaagaatgatcaactcaacgcagaggctaaagcaaagggtgaggtcattagcacaaaaaggcagccagaagggcctagacctgttttcatggtggatggtgctacacttgaaactgttacgcccatcccatacgatgtcggtaatgatctcaagggcggttactaaatctactctgttttttgtttgcggtatcgttttggtttccttctttttttttttggcaaaacatc

SEQ ID NO: 9794 - DNA, 421 bp, Gossypium hirsutum
  Clone ID: LIB3135-007-Q1-K1-B8
cccacgcgtccgggacttttgtatgagagctagaacaagctcgattatgtgggggctttgggtgttgttaacttccttgaacgtcctttgcaaacactcgtgttcaagactggtatggccaagtcaattcaccatgcacgtgtgttgatcaggcaactacacataagggtctggagacaggttgtgaacatcccatccttcatggtgagggtcgactcccaaaagcatattgatttctctcttactagtccgtttggaggtggccgcccctgaagagtgatagagaaagaaccatatagcagctgccaagatggctgcttgtcgagatggtcatgaagatgatgactagtataccttacgctactatcatccaccagtaagatccctataaatgcctcagcctgtaacatacaatatcctc

SEQ ID NO: 9795 - DNA, 412 bp, Gossypium hirsutum
  Clone ID: LIB3135-007-Q1-K1-B9
tttcagaacaagaagtagaataagaatggataagagcgagggcaacaattcccccagcttgatctctcgtgagaagttgggagaggtggcaacctgggtcagcgccactgtggtctccgcctttttctcctctctcgagcgcttctcctgcgttaacctctccaccaacgaccctgacgatgacgacaatcccaacgaggccaaggaccgccctctcacctactcctaaatatctctctcggtacttgccacgtcatatactctcttgctttctcttgatttatggtctttgtatacagaaccaagaaaaaagtattaaggaaactttaaatgctctatatttcgtggtcgtcctgattgaaaagggaactcttctgtataaaggcctttttttttttgatatcaatcatct

SEQ ID NO: 9796 - DNA, 390 bp, Gossypium hirsutum
  Clone ID: LIB3135-007-Q1-K1-C1
cggacgcgtggggaagatcgaaagctcgtgcttagaaaaaatatgccagagctgatgaactgtgccacaagagtatcgaatcaggataccagttacctacattcaacttctcaaatttgtagtactactgtgattcgagattgttaaccattgtgtatctgcagggtcatagaccttcaaaacgaagagattcttgctcaaaagtatcagattcgactaacgtgatgaagaggcgtaagcaaaggtgaatcaagttttgcctcgggaacgtacatggttgacaccatgtcaatcctactccaagtcaggcgatgtttactttcatgccttggagcaagcgtactcacaccggcggtaggctcaacctcaaaactagaagtaggtgcaaga

SEQ ID NO: 9797 - DNA, 223 bp, Gossypium hirsutum
  unsure (1)..(223): unsure at all n locations; Clone ID: LIB3135-007-Q1-K1-C10
aaatctcaacatctacctaatttccaatttaaacttaccaatcnanaaataagcgtggtatacattcatgatccacaactccccccacacatttcttcttatttgattctccactaaaatcccaaaattccaacaacaattacctaatttcatcaattccttcgatctattcaaaaacattaacccttactaagcctgctcatacaattacaaataacaatct

SEQ ID NO: 9798 - DNA, 397 bp, Gossypium hirsutum
  unsure (1)..(397): unsure at all n locations; Clone ID: LIB3135-007-Q1-K1-C11
gacgcgtgcgccgagaagaatgctccatgggacacttccaattgatattggccggctgctggtcancctatgttttggatatgccgggtcaaggaccacagttccattggtctttgatgagctttctcaaccaaagggctatcaagatgcttttccagtacagttgagttcaagtccaggcagtggatccctttggtctcgacaaccttttgaacagtttggtgtagctgagaagaaacgaactgctggtagtgaagtacctggaagtgggttgaactcaatgtcatgggatacagcttctggcatggatttagagtccaagcttcttcaatctttccgacattgtatagtaaagctcttgaaattagacgggtccgactggttatttatacaaaat

SEQ ID NO: 9799 - DNA, 376 bp, Gossypium hirsutum
  Clone ID: LIB3135-007-Q1-K1-C12
gcgtacgaaacctgaaaatgttcttgttatacaaaatattcatattatgctttctcacacccatccttgccttggttgtactgttagcccgactcttctcaaaacgacttctctcgaatctcaccctctaaaaaagaaccctgttcattctctacaccctgctcgcatacaaccttcgtgcattcaaccatcttgccttgtcccaacaacatgcttttctcccccactcttttctaacctgtccagcaaagacctcatgctgcaaaacgaacttgtaaccaactgagtcctttacctgaactaataccacagccaaccaatgcacgttcaatgacattcatccggacacatcattactccgctccagacatcatca

SEQ ID NO: 9800 - DNA, 370 bp, Gossypium hirsutum
  Clone ID: LIB3135-007-Q1-K1-C2
aggctgcttccgaaattgagcttcggctgcaattgggatcaaaactcagtgatattgtcaggagcaagggggatgtactggcactattcaatctgtataaagatgaaggctacgtactgactgaacaagaaggaaaattctgcgtagtgcttaaagaaagttgttcaccgcaagatatgctgaagtcacttttccaggtaaattatttgtactggttggagagaaatgcaggaattgaatcaaggggtgcctccaatgactgcaggcaagggggtaggctacaaatctctctcgagtatgtgcaaagagaattcaaccatgttaaaatcgacagcgaatcagtacgttgcgtaactgatggacttattgc

SEQ ID NO: 9801 - DNA, 338 bp, Gossypium hirsutum
  unsure (1)..(338): unsure at all n locations; Clone ID: LIB3135-007-Q1-K1-C3
cggtggatgaaaacattattcctgatccctatcagttgtgcgatgattttgaagaagctctgaaactcatgaagaaaactatcgttgctgaaggtctgataaagaagtgatttagaagggtcgtttcgagtttcagtacgtagtgggctgtgtggccataataaagttgcttaaatatctctaggattggcgtgtatgctttggttagttttcataccatgccatcatgttttgtgaactatacttactataataagcaaataaagtttggacttggacaacaccatgnaaatcctacttcacatcaagcgatgattactttcatgccttaaagcaag

SEQ ID NO: 9802 - DNA, 388 bp, Gossypium hirsutum
  unsure (1)..(388): unsure at all n locations; Clone ID: LIB3135-007-Q1-K1-C5
cgcgtgcgcggacgcttnnagaagatctaaagctcgtgctaagaaaaaatatgccagagctgatgaactgtgccacaggattatcgaatcaggataccacttagctacattcaacttctcaaatttgtagtactactgtgattcgagattgttaaccattgtgtatctgcagggtcatagaccttcaaaacgaagagattcttgctcaaaagtatcagattcgactaaggtgatgaagaggcgtaagcaaaggtgaatcaagttttgcctcgggaacgtacatggttgacaccatgtcaatcctactccaagtcaggcgatgtttactttcatgccttggagcaagcgtactcacaccggcggtaggctcaacctcaaaactaaaaat

SEQ ID NO: 9803 - DNA, 399 bp, Gossypium hirsutum
  unsure (1)..(399): unsure at all n locations; Clone ID: LIB3135-007-Q1-K1-C6
aactaaccttaaccttaatttangaccttaactcatcgacattatcaggggtcaattgggtatgttttcacactattcaaactcaataaatatgaattctacgtactgactgaacacaaagcaaaaacctacataaatcttaaaaaaagcaccacaccgaaatatatcctgcaaccacttttccatctaaattattaaacactaccattgaccaaaacatacatagaatattaatcaaactgatacctccaatcactacactcaaggtggtaggctacaaatctctctatattatttacaaatagaattcaaccattttaaaatctacagcgaactaatacttttaactacttatacacatattacaacgcctttacccaacacaatacgacctattta

SEQ ID NO: 9804 - DNA, 166 bp, Gossypium hirsutum
  Clone ID: LIB3135-007-Q1-K1-C8
gttaatttttatgaaattcttaagctactattaataatacgacttaatatgtggaaaaaagaaaaaataaaaaaaaaaaaaaaaaaaaaaaaaaaaaaaaaaaaaaaaaaaaaaaaaaaaaaaaataaaaaaccaaaaaaaaaattacccaaaaatccaaaacaaa

SEQ ID NO: 9805 - DNA, 311 bp, Gossypium hirsutum
  Clone ID: LIB3135-007-Q1-K1-D10
cgtacgggcagtgaatgtatacagcgtatccaatctgtagcttatcattttatagatgtctcttgcagttcagtttatatgatcgctgaaatgattaacaaggatggaatacacatccttatcaacctgaatgggtatactaagggtgcaaggaatgaaatttttgccatgcaaccagcacctatacaggtttcatatatgggattccctgggactactggagcagattacattgattacttggtcactgatgagtttgtttccgtaaacctttagttactcataaatctctttaacacttggcctttaaa

SEQ ID NO: 9806 - DNA, 412 bp, Gossypium hirsutum
  unsure (1)..(412): unsure at all n locations; Clone ID: LIB3135-007-Q1-K1-D11
tccaccactttcacaaatcttcctttactctccgaatccaccactccctagctatgtacactttccactctagaaacctcccccaactttctcctttttctcaatcttcttcctattacctctttttcaaccaatcttataataacacctcttataatttactaaacaactcctcttctatataatattttcttctccacataattnttctcaccataatatatttttttttacaaccattacaattacaaccaccaccaccaccaccaccaccacaacaatattttttcatctttcttatatgacccattacaacattaaaattattcctaatttttcatcaaaactatataatcattcttccacaccatccttttttaccactcaaaaattttattattccctttaatct

SEQ ID NO: 9807 - DNA, 430 bp, Gossypium hirsutum
  unsure (1)..(430): unsure at all n locations; Clone ID: LIB3135-007-Q1-K1-D2
aaagactgtgtggcccttctactcgagaatggtgctgctgtcactctccaaaacatggacggcaagactgggatcgaagttgccaagctcaacaaccagcacgaggtactaaaattactggagaaggatgcgttcctttgaagcgtgaagtggtggggatgcgaatggtatgtgtatgtttgggtcttagcatgtttgttataggcatctgattttattacccagctattggacaaatttggttgtaatcatggctgaacggcatgatatgctgtctttgctttggcctggttgcctacgttttgcaaattttatttagtgggtttttttaagaaaaagaatcatttcctgaaatagtttctgcatgggaaataatgggagtatttggaccagagaaactttatttaagaattcttttgagtcctgangc

SEQ ID NO: 9808 - DNA, 354 bp, Gossypium hirsutum
  Clone ID: LIB3135-007-Q1-K1-D3
cggatattatggatatgctcaaggatatgaagcatacggatatgcacctcctccccaagaggctaacatgtactatggtggctatcctgctgcatatgggaattaccaacaaccaggggcttatcaacaaccccagcagtgagttgcactcatttcagcatctttcaaaactggttcagttcggtccaagccacagtttggtgttggtttgatcttgacatgtatcaaggcttgaggattttcttagatgatgtagaatttgtggtggctggcattgggagagttctgttccttatttaccctttttttctatatataatatctacatatattatggttggttaacttaacctt

SEQ ID NO: 9809 - DNA, 186 bp, Gossypium hirsutum
  Clone ID: LIB3135-007-Q1-K1-D4
agaccagtctgtgctactagctaccaccaagactaacaagcataacaaaccgtctaccttgcgtcacaagtgtgccatgaaaaaagactttcccaatatggccaacgctgtcaaaaaccacttgacacacaactactacaggccatacttaaccaaagcaacccttgcaaagctgagtgctttgca

SEQ ID NO: 9810 - DNA, 294 bp, Gossypium hirsutum
  unsure (1)..(294): unsure at all n locations; Clone ID: LIB3135-007-Q1-K1-D5
cccacgcgtacggnaccctctcattctcctaccatattcgacttaaccatcaacaaccaaatccgcaatattgtgatatattaaaataataactccataccttaaaaacacataactccccactctccaacacccattaaaattattccaaaatcaaatgatggccttacaaacttgtctaaccctgaccaaaccacaattaaatccttttctaccttctttatactacaaagcttgttgcaaaacataaatctctgaaaaattgattcagcattctcatcaataattccccta

SEQ ID NO: 9811 - DNA, 401 bp, Gossypium hirsutum
  Clone ID: LIB3135-007-Q1-K1-D6
ccgggccgaccgacgcgtccgctcaatcatccacttcttctcttctttgaactcaaagtcccagctaatattggaatcattggtgttgtcacttatgactatgacaatacctccccagtcgcccctgccaggcttttcaaggcctttactgttgaagctccgaaagtttggcccactgctgcaccaaatgcagtcaatagcattgaggttgaagctaatcctagctctggaagtatagtaaaaatcaactttgttgaacgccttccattccaatatatgaagcaccacatcggatgacatgatgaaagtaatttttcatacagatacgatttaatcgaacgttggcctttgggggataagcttgaaaaaattaactattaaaacaagttttaagcagcttc

SEQ ID NO: 9812 - DNA, 158 bp, Gossypium hirsutum
  Clone ID: LIB3135-007-Q1-K1-D7
tatactcagccttctaactgagtttaacctccaacagacacacaagaactctgaaccatttttgaataaaaccattcatcattattattaaaactaaacatattaaaacaatttaaaattttattaacctcttttaaaatttttcgcaacctgcatat

SEQ ID NO: 9813 - DNA, 270 bp, Gossypium hirsutum
  Clone ID: LIB3135-007-Q1-K1-D9
ataggaactctctgttcgcacactactattgctttgcctgcgacaaccgtacactgaagctctggtttaattccatcatgcaatcaagactattctttccctgcacctacttgtcaccaaacaattatacttggcgaattgctcatgcaagagctaacagaacctaatcaaaccatagctcctcgctcaacatactcttacactatcaaaattcaatccccagaaacctactgcttcatcaacaattcaacctattagatgcaagtatat

SEQ ID NO: 9814 - DNA, 260 bp, Gossypium hirsutum
  Clone ID: LIB3135-007-Q1-K1-E1
gcgcccacgcgtccgaaaaaaatggcggaaagagcaccgatcgaatccgtacaatgcttcggccgcaagaagagggcggtggcggttacccactgcaagcgaggccgtgggcttatcaagattaacggttgtcctatcgagcttggtgagcccgaaattcttccgttcaagggcgtcgagccaattcttcttcttgggcggcaaccttttggccgccttcaccttaagaatccgtgttaaagtcgaaggccacactttta

SEQ ID NO: 9815 - DNA, 236 bp, Gossypium hirsutum
  unsure (1)..(236): unsure at all n locations; Clone ID: LIB3135-007-Q1-K1-E10
cccccaaacccatcntttcaaaaaattaatatttctctattttccccnaaaagactaaccttcctccatggatgtcccaaacctgttattcacaacgattttaaaacatccaatgttcttctttatttttactacaactcaaaactatcttatttctgtttaacaaaaactgttcctcaacgtgataaaactcatgtatctactctccccatattcacctattgttatgcttcacc

SEQ ID NO: 9816 - DNA, 337 bp, Gossypium hirsutum
  Clone ID: LIB3135-007-Q1-K1-E11
catattgatcgccggcttcatcaaatgctgcttgctgatagggattacgaaggtggtggagggacaagtgaggttgactatcctccatccttcaaaccaaagatcacagttgagcgctgtgaggagaaaggatactcggttgttactgtccggtgcaaagatcgagctaagctcatgtttgacattgtctgcacgctcacggacatgcaatatgtagtttttcatgctaacatctcatccaatggtccttatgcttcacaggaatattttattcgccacatggatggttgcacacttgatactgaaggagagaaagaaagggttgttaaatgtctcg

SEQ ID NO: 9817 - DNA, 201 bp, Gossypium hirsutum
  Clone ID: LIB3135-007-Q1-K1-E12
tattcatccccccactcatccaatactctttctttttagacattacgaaaaccaacccatgaccagtcttaatattaccataccccaccccccaaaccaaatatcacatttacaaccctcagtaaaacaaaaaatactcacccacatatttaccatccaaataccaatccaatcttactatacacattctcttcactctca

SEQ ID NO: 9818 - DNA, 323 bp, Gossypium hirsutum
  unsure (1)..(323): unsure at all n locations; Clone ID: LIB3135-007-Q1-K1-E2
gcggtttattttaaatattttttgttattttttttactattctatatattattcactttaaatggtttatataatatttattttaaactgtctttttaatacatttattttgaattgttttatatatattaattactccacattacttttttttattttaaaatctttttatattatttttaattatttattattataaatttatatataatgtttattcttaaacttcctttttatatggattatttattttcaaatttctatttattgtttatcttaaactctttatacattatttattntatttctgtatatattattta

SEQ ID NO: 9819 - DNA, 313 bp, Gossypium hirsutum
  Clone ID: LIB3135-007-Q1-K1-E3
ctctcacatatagagtttaacgcctgtagaattcatttcccaccttatatcacatgatatcgtgtatatcgcctgtataaaaaactcaattttaaatacatacaattacaaatcaatatatatatattaattactccacattactatttcttattcttccatctaaatatcttattttaaattattcattattataaacattatatataacgtttattcttaaacatcctttttatatgccttatttataattaaaattctatctattgcctatcaaaaactctttatacattatttattttataccataaat

SEQ ID NO: 9820 - DNA, 351 bp, Gossypium hirsutum
  Clone ID: LIB3135-007-Q1-K1-E4
cttatgctaagactgctaggaggatgtctcttttggctgatgcacaacgcgttaaggctaggaagggaggcttgcaagaagaggaagcccatttctaaggaggaggcaaccgcaatcaagtcggcaggcaaagcatggtatcaaactatgatctcagacagtgattacaccgagttcgagaacttctcaaaatggttgggcgtatctcagtaatttagttcttccttaagaaattatggcagacaatcatttttatcagttttgttttaatgtttttgacatgttatatgttgatggccttttggaatagtttcatttatcttgaagacaaggattaaatagttttcttcc

SEQ ID NO: 9821 - DNA, 106 bp, Gossypium hirsutum
  unsure (1)..(106): unsure at all n locations; Clone ID: LIB3135-007-Q1-K1-E5
cccacgcgtccggngaaaggaacgcanganacctngaacaacatacaaaatgggttatatggccattactgcacattaacgaaacttcaatgataaaaccctaaaa

SEQ ID NO: 9822 - DNA, 408 bp, Gossypium hirsutum
  Clone ID: LIB3135-007-Q1-K1-E6
cccacgcgtccgcgccatctttacctctcctgtcgatttcattcaagagagtgacaatggggatggcttcgactccgataccagtcactatgacgcgcctgaatactaccagccgatctcagccgtggatggtgatgatgacgacgacgaccatgaggatcgagaaagtttcgatcatcaagtcaattcagatgaagaacaccaccatcgtaacctaacgagtggttacgtcaatcgagtggagaacggcatctcgtttcttcacgtaggcagcgtcgctacggagcaagaagaataggaagagaggaggagagaggcgtctgatacggcgataaggagggcgtttagggaagatgagaggcggagaaacgcgccgttaacggcggagaatgctatgagagtgaggga

SEQ ID NO: 9823 - DNA, 387 bp, Gossypium hirsutum
  unsure (1)..(387): unsure at all n locations; Clone ID: LIB3135-007-Q1-K1-E7
gacccacgcgttcgnnaactcttctggctcaaaagtatgatgcgctttgaatataattcctgaaatggccaacatgttaatgtatacaatcacaactttcctcccttataacaagcaccacaagttactgagtttctccgtcaaaatattgaattattgctttcccgtacaatcaaagagatgcaagaatgacctacacctaacgatttcagatcgcatcaattgaaaacaatcaatgcctcgctcaacttgagtaaaacaattcatcttgaatttaaacctgctccttataacttgcagaatatttctcttgactgttttgcttactcaatcatttttgcagagggctgaccaaaataaaagaaatttgaaaaatccaagtttctc

SEQ ID NO: 9824 - DNA, 376 bp, Gossypium hirsutum
  Clone ID: LIB3135-007-Q1-K1-E8
catatgaacaacttccaaggtttgctcaacacacaacattctaaatctcatcgcacccagtgcgtttcatccaacacttcccccaccaattctccaattatggacttggatttttcgctcgaccaagtggagttggacccgaattttccatttgacacaccgggatttttctcctaactcttttccgcaatcgaataagagtaatggtagatgtcaaattcgggttccaataaccaaagtaagttcatggtgagccgtgtgttctgcgaagaactattgtacaatacatgtccctttcaattctatgttggttttgagaaatttcctcagattaaacaaacttaaaaaaaaaaaaaaaaaaaaaagtctcgccgct

SEQ ID NO: 9825 - DNA, 280 bp, Gossypium hirsutum
  Clone ID: LIB3135-007-Q1-K1-E9
aattcactatcctccatccttcaaaccaaaaatcacattttatctctgtgaggagaaaggatactcacttcttactttcccgtacaaacatcgatctaagctcatgttttacattttctgcacgctcacggacatgcaatatgtagtttttcatgctaacatctcatccaatggtccttatgcttcacatgaatattttattcgccacatggatggtttcacactttatactgaatgagagaaagaaagggttgttaaaattctcgaaacttccattcat

SEQ ID NO: 9826 - DNA, 65 bp, Gossypium hirsutum
  Clone ID: LIB3135-007-Q1-K1-F1
ggttgattgaaatatatataaattcatgggattgtggttttaaaaaaaaaaaaaaaaaaaagagg

SEQ ID NO: 9827 - DNA, 355 bp, Gossypium hirsutum
  unsure (1)..(355): unsure at all n locations; Clone ID: LIB3135-007-Q1-K1-F10
cctctacatcgctggtcttcagcatatagtattctcagagtggtggantccgccccgtcggggtttccaccctcattgtcggcttcgacccctacaccgacaagccagcgctgtaccagaccgatccatccggtaccttctctgcttggaaggccaatgccacgggaaggaactccaactctatgcgtgagttcctggagaagaactacaaggagacctccggcaaggagaccatcaaacttgctatccgtgcacttctataggttgttgaaagcggtgggaagaacatctaagttgcagtgatgacaaaaaaagactgtctccgttaactcgaagagtctgagattgatgagta

SEQ ID NO: 9828 - DNA, 219 bp, Gossypium hirsutum
  Clone ID: LIB3135-007-Q1-K1-F12
tcctcaatttccccttccacccctacacctacaatccacccctttaccatacccatccatcccctacccttttttcttgaaaagccaattccactataaaaaactccaactctatacgtcaactccttcaaaataactacaattatacctccctcaaatataccataaaactttctatccttccacttctaaaatttcttaaaaaacttgctaaaaaca

SEQ ID NO: 9829 - DNA, 328 bp, Gossypium hirsutum
  Clone ID: LIB3135-007-Q1-K1-F3
cccacgcttccgcccactcttccgcccacgctttcggaattataccctctgccaactgctaggccaatatgtagcttgattctgtattatgaatatacttctgtatggcagtcgaatcaatatttctcctgcatttcttatatgcttctatggaagaataattgttcataattttggctttttcttctcttgggttactgtaaaatccatttggagattcaattattgtcttactgttatgcttctttaatttgtctgtcgtcggctgctttagattttctgaaagatatgttcgactcatttctgttatcatttgagcatttaaagt

SEQ ID NO: 9830 - DNA, 377 bp, Gossypium hirsutum
  unsure (1)..(377): unsure at all n locations; Clone ID: LIB3135-007-Q1-K1-F4
cttttggctacgattgccgggttgcggatattcccctaacagctgattcactagcgagtgggccaacaggtcttactggaacagaaaagactattctccagagggggcccctcttccttttaggagtcacaatgtaaattcccttgatcaacggccatatttttagcacactggacttaccggccttatgcctccgaaaaggtactattctctagtatactctttctttatagttcgccagcaaggcattttccgaagcaggcagggctagagcgggggaattggccaatgctaagtgatctcctcgcccaaagaaaaaaaaataataaaaaatagcanaaataacanggagggctgttgacagggacttttggcta

SEQ ID NO: 9831 - DNA, 410 bp, Gossypium hirsutum
  Clone ID: LIB3135-007-Q1-K1-F5
gtttcctttctcgattttctatttagccaaacaagatgcacatcttcgttaggactctaagcggcaagacgatcactctcgaggtctacagctccgatacgatcgacaacgtgaaggccaaaatccaagataaggaaggcatccctccagaccagcagcgtctgatcttcgccggaaaacagctcgaagacggccggaccttggccgattacaacatccaaaaggagtcaactctccacctcgtcctccgtctgcgcggtgggatgcaaatcttcgtgaaaaccttgactggcaagacaatcactctcgaggtcgagagctccgacacgatcgacaacgttaaagcgaacatccaagacaaggaaggcatccccccagaccagcaacgtctcatctttgccgaaaacaac

SEQ ID NO: 9832 - DNA, 299 bp, Gossypium hirsutum
  unsure (1)..(299): unsure at all n locations; Clone ID: LIB3135-007-Q1-K1-F6
aactttgcctactttaacaccaaacacgcctccccacacnnatcccctcttccttttaatagtcacaatctaaaatccctacatcaacccccataaccataacacactctacttacccaccatacacctcccaaaaagcactatcttctacaatacactatccttatacttcaccaacaacacatcttcctaaacacacacatctataaccaaataattggccacaactaaatcatctcctctcccctcgacaacatcaaaacataatacacaatccacaacctttaggcctttttaca

SEQ ID NO: 9833 - DNA, 368 bp, Gossypium hirsutum
  unsure (1)..(368): unsure at all n locations; Clone ID: LIB3135-007-Q1-K1-F7
tcgctcaatcctttaatatgaagattatttatattaaaagaacaaaatgaaaacagaaaccctggatacgattttatataaaattttcatcacttctttttcttaaaaagaattctggaccactccaagtatcccattttcctcatctctcatttctttaatttaaccctttcttgggtcccttcccctgtcgtgatttgagtacataaattgagtgtatggttgaaacggaaagtgtcattatatgttactaatccttataaactttcgagcgtaaaaatcgttaattataattgatgcaaggattgatggattgtatttaaaaaaaacaaacnttccccgcacccatttatttttgcaccctttaa

SEQ ID NO: 9834 - DNA, 286 bp, Gossypium hirsutum
  unsure (1)..(286): unsure at all n locations; Clone ID: LIB3135-007-Q1-K1-F8
caactcttttcngactcatttcggacttattgatcacatctgatcaggggctctttgtctcattcattcaactttccgagtttcaacttccaattctcatccatccgttctactgccactaaaagaaatgttcgtactaaacaactaccttcgctctatcatctatcacctattataaaatcagaagaacattcacatttaaacctctccacttctactgcagcgaaagccttccatgtatatgtgtaaccttatcttgcatcgaactaaaacccaacccttaacc

SEQ ID NO: 9835 - DNA, 232 bp, Gossypium hirsutum
  unsure (1)..(232): unsure at all n locations; Clone ID: LIB3135-007-Q1-K1-F9
ggggcgacccacacctgcgaccgttttcctacaactacatctttctattttcccccatttactttcttnactgcaatgtgttcaatcttctttctcaacacctncnccaacatcccctccttttacctccacacctttcattcttacccactattcattttcaaccctttctacacatccatcaatacttcttacccacatatctattattccacattttacttcaactaaa

SEQ ID NO: 9836 - DNA, 307 bp, Gossypium hirsutum
  Clone ID: LIB3135-007-Q1-K1-G10
cgcgtccggatttctacaatattggttgtattgaaactttcccattctcgtcgctttaaactcccatccgtattgcttgtatggcagataccccctatccttcagaattaaccactgcactctaactacgataaattcaccatcaggctctttcccacgctcttcctggtcacaatttctaattcaactttaacaatgtccccttctacgatctcaaactacgattcctttcttctaactcatattattacccatcgaatgaagcagccaactttacctaccaagtcatcatcattaactatccttt

SEQ ID NO: 9837 - DNA, 378 bp, Gossypium hirsutum
  Clone ID: LIB3135-007-Q1-K1-G2
gaccgacgcgtacgcggacgcatgggctacattcctgccattgcttctcacagatcaagacccataacacgttcaggtgcccttagattttacattagatcctcttctttttttctcttcttttattttttccagagtgggagagtttggaaactaaaataaaaggaataataaaatgacgttactgtttctgtggtggtttcaattaccatttgtagccaatttattgactcactcggtgttggaacttgtatttttttttttctaattatattttgaatattcaatattaattacgtacaagtattgaattcacaatacaacaatcttagtactgaaatttatattataaagaggcttaatgctgatttctcactt

SEQ ID NO: 9838 - DNA, 396 bp, Gossypium hirsutum
  Clone ID: LIB3135-007-Q1-K1-G3
ggtagatcttcgttcaaccacgcctaataaccgctcggatttttctcagacgtgaaaaaagggggctgtgtttcaccaagctattcagccggctatttgccaaaaaggagatgcgcatactgatggttgggcttgatgctgctggtaaaaccaccattctttacaagctgaagttgggagagattgtcactactattcccaccatcggtttcaatgttgagaccgttgaatacaagaacatcagcttcactgtttgggatgttggcggccaggacaagatccgaccattgtggagacactatttccaaaacacgcaaggacttattttcgtggttgatagcaatgatcgtgaccgtgtggttgaagctagagatgagttgcacaagatgttgaatg

SEQ ID NO: 9839 - DNA, 374 bp, Gossypium hirsutum
  unsure (1)..(374): unsure at all n locations; Clone ID: LIB3135-007-Q1-K1-G4
ggctaatangattgcgtatgcaattatttgtttgtttctgcattccatgttcagtctctgggggttagtgatccagacagtgatttactttgtctgcaaatcttaccaccatgaaaacatcgataaatcagccttgtcggatcacctggaagtatatctgggagagtatgttcctttgacggtaaaggatgttcagctagagcaatatcatgtttgattgatttgagttgaaagtacatcaattaaaataatgggtcaatgcttgtaaattgcaatagtatatcttcgaagtcatagttgtgattttgatcaacggtgttatttgtacctaatccacatatattgttgtagtatgaaagtattatttaatctct

SEQ ID NO: 9840 - DNA, 426 bp, Gossypium hirsutum
  Clone ID: LIB3135-007-Q1-K1-G7
cccacgcgtccggtcaactcatgcagatgacaatgatggccacacccaataggacaaggagctgcagtacttgaacaaggaagacagactgttgcgttggcttttagttaagcatcgtgacacgaaatatgggctggaattccttaatgaagatgatggggaattggagcttaacaaactctctcgaggcagtatatatgaagaggacattgatgacgatgatgatgatggtgatgatgatgatgaatacgatgagaacccaggcaatggcggaaaactctgatcagtaaaaggttttgataatccgaggatagagcagaacctgatagataattgaagtccataactatgttctttgtctttgtagtatgcctttttaaagttctgaatgatccaacttatgttgtttgtaggtcttaagagact

SEQ ID NO: 9841 - DNA, 152 bp, Gossypium hirsutum
  unsure (1)..(152): unsure at all n locations; Clone ID: LIB3135-007-Q1-K1-G8
gttaatttttatgaaattcttaagctactattaataatacgacttaatatntgtgaaattgaaaaatttaaaaaaacaataaaacaaaaaaaaattaaccaccataaaaacataaaatatatcaagctcctcccgtcttacaagaaccatat

SEQ ID NO: 9842 - DNA, 366 bp, Gossypium hirsutum
  unsure (1)..(366): unsure at all n locations; Clone ID: LIB3135-007-Q1-K1-H1
caccatatgtacaaaatgtgatggaaagggaaagataccttgtgcaacttgtggatctcggggcttacttaaatgcaagacatgcaatggaagcggttctcttttgactcgcaaaattgccgttgttaaatggaagacactttcaactcgaaaagtgagtgcgacgagtggagcagcatcggttccggatgagattttccatagggccaaaggggttcagttatgcaacactcaggcataccagtgcacccctgcctattttgccgactctttcttcctcaacacattntcttcggatgttattgcagacagggcatctgtacctccaactgcccaggtcatatgtgagagacatacaatctcagt

SEQ ID NO: 9843 - DNA, 390 bp, Gossypium hirsutum
  Clone ID: LIB3135-007-Q1-K1-H11
gcgtcacgcccgatgtcgctgcaccacttttaccgaataacagaaccttcaaaaagttcacattcagaggagtcgatctctatgctctcttccatatctccactgatgaactcttcaatctctttaccgcccgtccacgcccaatgttttagacaagtttaaagatgaaaccaatggctctgataaaaaaattacacaaggctaaacttgatgctccacctgattagaaacccgagccaattaggacacaccttcgcaacatgattataattcctgaaatgattgatagtattatctgtgcttacaacacaaagaccttcaatcaagtggcaatcaacccacaaatgattaaccacttttttgctgaattctcaatttcctacattcctt

SEQ ID NO: 9844 - DNA, 373 bp, Gossypium hirsutum
  Clone ID: LIB3135-007-Q1-K1-H12
cggtgaatacttgaagatataaaaatatgacctcttcacatacgttaaaaaacacataaaatgggcttgatcatactcatgtcacacgtgcaattccatttaacagtctttgccccaccattacctgattgctccaagcaagttggctccatcgagctttgcaccttctaagtgcgtatcacgaacattaacatgtcgtaaataatccctttggaggtttgcacccttcaaatacgcattgcttaatttcgcacccttcaaattgactccttcaagattagctccctctaagttggcatcagttacatcagcactctgtaagtgtgcataacgaacatcatccacacagaagctacaatctatcaaaaaaaca

SEQ ID NO: 9845 - DNA, 393 bp, Gossypium hirsutum
  Clone ID: LIB3135-007-Q1-K1-H2
ttgcaatcaagataatcgagtcactagagtggatttaggttattcaaacctatctggacatgtgggtaccagagctcgggaagcttgagcatttgcagtatctggagctttacaaaaataacattcaaggaaccatccctaccgagcttggcaacttgaagagccttatcagtttggacttatataacaacaacatctccggcaccattcctccttcacttgggaaacttaagtctcttgtattcttgcggcttaatgacaacaggttaactggacctatccctagggagcttgttggtatttcaagcctcaaagttgttgacgtctcaaacaatgatttgtgtggaacaattcctaccagtggtccatttgagcacattcctttgagcaact

SEQ ID NO: 9846 - DNA, 235 bp, Gossypium hirsutum
  Clone ID: LIB3135-007-Q1-K1-H3
aaccatcaaccataataacaacactagaaggattacacgttttacaacactatttgcacatgtgattccagagaaccttaaacatcaacttacccctcttctttagccttaccaaaataccacttaagtaaccaaccctatccatcttaacaccattaaggaccctatcagtgttaactcttgtcacaacaatatcatctacactaacgttacagctctctttaaacttaactat

SEQ ID NO: 9847 - DNA, 403 bp, Gossypium hirsutum
  Clone ID: LIB3135-007-Q1-K1-H4
ccgggcgacccacgcgtgcggtttcagactattgaaagagcaaagcacaataaaaaaaataaaactgatcagatggtgcaggtgatgagggcggggaaaagggtatccgtgaaattggaagttgaagaatctctagaagaagagttggcctctcttcacaaaaaaagatcaaaactcgacccttgtttacaggaaggtaacgttgaaagtgggaaatttccaatctcaccatcattgtataatccactggatgagccaagtccacttggcttgcgtctgaaaaagagtccatcttttctggacctgattcaaatgaaactttcacagcaaaatggcgataagttaacagctcataacatgaaagatagtaaaggagtttcagtttctggggtacgggataagc

SEQ ID NO: 9848 - DNA, 302 bp, Gossypium hirsutum
  Clone ID: LIB3135-007-Q1-K1-H5
gtagtaggctaaggcttcatatcacctcattttgtattgctaaggagtgttgggttttgtggaacggttaaatgtatatatttctttcgcttctgttcaatattgtataagctggttcttgtaagctaaaacactgttagctatgaggggatattaactaatggtctctgtaagttacacttcgcctaaactgaattttgagatttgtggaatgatcatggtgataagaatgtggtgctttagctaattgaaaccccaaactatcttacccaaaacaaatttctttgaagttattttcaaac

SEQ ID NO: 9849 - DNA, 59 bp, Gossypium hirsutum
  Clone ID: LIB3135-007-Q1-K1-H6
aaaaaaaaaaaaaaaaaaaaaaaaaaaaaattataaaaaaaaaaaaaaaaaagaggaag

SEQ ID NO: 9850 - DNA, 282 bp, Gossypium hirsutum
  Clone ID: LIB3135-007-Q1-K1-H7
attctcggaagctcgtgaggaccttgctgctcttgagaaggattatgaagaggtcggtgctgagtcatgcgagggtgatgaggaaggtgaagatgagtactaaataagtaatgtttgagtggagggcttgcattttgctacccaatgatttgtttccttttatcgcgtgtttttgcttattctattgtgtgaacttcgactcttctaagctttgttcaagactatatggactgcaatagatttgacgaacaaaaaaaaaaactttaaaataaaatgatcaat

SEQ ID NO: 9851 - DNA, 304 bp, Gossypium hirsutum
  Clone ID: LIB3135-007-Q1-K1-H9
gaccgacgcgtccgcccacgcgttctaaaaaaaacagtattaggttataagactataagactaaaatctaactctgcggttgtcatttttctgcttgtcgtaagtcaaaaggacaagaatggtggctgacaaatgaaagaacgcgcaactagaatataagcgagtccaagagaactctgaacaaatttacaaagcactcgtctttttcatcaagaaactgctatagatccaagactggcttgagaagatcaatgaacaatctagtcaaaaagttctggcagtgaagcataaatacaaccactta

SEQ ID NO: 9852 - DNA, 331 bp, Gossypium hirsutum
  Clone ID: LIB3135-008-Q1-K1-A1
gggaagaaccacgcgtgacggacaactgtgaagctagaaaatctctcattttatttgactatactcgaacgcggacacactctttacctcgtttttggggatcgcttacacaactacttatatatgagatgtatatgcttacaatactagcgggcataaacttaacgatgataaaagataggggatccacctaaccgaaactgtttgcatacctgtaccatattccaccgccaaaatctgtcgcgtccagttacaaccataaaaagcgacgcttatatagtgcactgcttatattacatattacgggaacaaacaccgtatctgttaccat

SEQ ID NO: 9853 - DNA, 407 bp, Gossypium hirsutum
  Clone ID: LIB3135-008-Q1-K1-A10
cccacgcatccgctcctcttctttagcgtccttttcatttccgctcatgcagcgggctttggaatccgcaatgagtgctcctacaccgtctgggcagcagcctctcctggtggtggccgtcgcctagaccctcggcaaagttggaccatcgatgtgcctgctggcactgctatggctcgtatttggggtcgaaccaattgcaatttcgatgccagtggtaggggtcattgccaaaccggtgattgtggtggactccttcaatgcaaaggttggggtgtacctccaaacaccctggctgaatatgcacttaaccaatttggaaacatggatttctacgacatttccttagttgatgggtttaacatccccatggtgtttggtccaactaatggcggttgtcacaacat

SEQ ID NO: 9854 - DNA, 419 bp, Gossypium hirsutum
  Clone ID: LIB3135-008-Q1-K1-A11
ggtaattttaagtcttacctaggtgtgccgctcgcccgcaggcgcgtattaatacaagaagagaggctttcttatcttttttttttcattttttaaggaaagtactttgaacctagctaggagtccttctatctggaggtggcttccggcgccctatgcacgtatcaataaagcagactaggccgacttttcgcgcaggtgaaaaagaaaatccaccactcgggtctttagacactcgccctaatcaataagcgggagaggggagggaagacgaggaataaaataggacttcgattcaggatagaagatcagtggagcatgttgggtcaactagaagcatctctttgaaaaccatgggtttcatgcaatcgaatgctatgttggcctctttttgtccttagtagtggccgttgatagtt

SEQ ID NO: 9855 - DNA, 407 bp, Gossypium hirsutum
  Clone ID: LIB3135-008-Q1-K1-A12
cccacgcgtccggattctttgatgcccatgctatatggcatgccacaactattgcggttacgtgcctgtggtggagcttcattacgaaccacgcaaactttcagacttctatcctccttaagaaggctaagtagtcgcatgtaaaactaacatcatcttgtagcaccttcaccattcaaaagccttttgtcgtatcctttggcacaatgcttttacatataatatattttccgcttatttatgatgcagaaatggacatctcatctgctcactgctctgttggttgaaacttaaaaaagaccattctttgtggaagctcaacttcaacattaattctctagtacatttaaaacattatattttttttgaattgttacttgaccctcgtacgtttatcttttatttcg

SEQ ID NO: 9856 - DNA, 446 bp, Gossypium hirsutum
  Clone ID: LIB3135-008-Q1-K1-A2
aattaactgagaaatcctttgaacttgtggttaaagctgcagacactcgaataatccacgagcagctgggcctgaagatttgtgaatgtgaaggattgcaagaaactgttgcctccttaaagcagcagctctctgatgcactaaaatcacaaaatgtcagtcctattgctcctaattctgaacaatttggagaaatgaaaggtctgcagatggacaacgaagctgcggcatcaaaagatagtgatgaagatttgcttacaaaagcacaggtggctgagattgaagaactgaagcagaaggttgttgaactaaccgagtccaaagaacatttagaactacggaaccagaaactagcagaggagagttcatatgccaaagggctagcctcagctgctgctgtggagcttaaggcattgtcggagggaagtactaaactaatgaatcat

SEQ ID NO: 9857 - DNA, 430 bp, Gossypium hirsutum
  Clone ID: LIB3135-008-Q1-K1-A3
gcgcccacgcgtccgcgccatgaacggggacgatattgcggagtggagtactgattttaaggcgggaaactcgggcatctaccccctcaccatcatacccgaaacccatcttgaatattttgtggcaaaggctgcgtcaacataaatagttgctgtcagacttcttgtgttctggctctgacggatgttatcacctaagttggttcctggaacttcatatcatccatgcagcataaccaaaaaactgaccactgactgttgcctatggtaaaaacccaagggccctgcctaaacacatggatgctatcttcttttacacttcgacacccgggacatgagctatctaaagccactcttcttagtcttaaattctttacggtagggataaagttccatgaaagactccaaatagtgatggcaattttgaagg

SEQ ID NO: 9858 - DNA, 393 bp, Gossypium hirsutum
  Clone ID: LIB3135-008-Q1-K1-A4
aaaaccggggcgacccacgcgtgcgccagcgtccgaaacacttatccagacaccaaaaaagcttcaagactctctatcgaaaaccccatgggggctcttaaactagatcgtgctctacggaagcgcacgttgatattcgatgtcaaaggctgcgtcaacatatatagatgctgacgtacatgatgtggactgtatctgacgtatgctatcaccaaaaatgtgttctggagctccatatcatttatacagcacaacaaaaaagctgacaagtgactgtttcctatggtaaaaacccaaggcactgtctaaacacatggatgctatcttcttttacactttgacaccggggacatgaactatctaaagccactcttcctaagcttaaattctttt

SEQ ID NO: 9859 - DNA, 419 bp, Gossypium hirsutum
  unsure (1)..(419): unsure at all n locations; Clone ID: LIB3135-008-Q1-K1-A5
gtgcaacactgccaatactatatcaaccgtcagcaccggaccggcaaggattactcttaggaggaccggcgatttttacttcatttgtgctttccccggtcactgttccggcgggcaaaagctcaacgtcgaagtaagaaatgggaacaaccgtaccgctgctgttcccgcacctggaccgagtcccaccaccacgcctgtagctaccagccccaccaccagtacgcctccgaccgctgccacgcccacctcgcctggaactccgaccgccaccgcgcctggaacttcaagtcctcctcctgggaccaactcagcttcttcccttgtttctactctgnctcctgtcttcttcatggacattgccttaattttgatgtgctgattatgctattaattccattttgcactttttggtattt

SEQ ID NO: 9860 - DNA, 306 bp, Gossypium hirsutum
  Clone ID: LIB3135-008-Q1-K1-A6
cggacgcgtgggttaaaaagaactttttgtgatgtcgaaagcagcacctggactcgctttgcatttggttaaataatggcggcatgtcgaaaacataacgtttggtccaatgctttggcttttgttataaactttcgcatctgagtttgaaggatttggagtttacttttttttcccttttggaagcaacttgatggaaccagttgtttacattacagtgctttgaataaatttgatgcagttctatccttgacaaaaactacgaccgacaccgagcctggaacttcaagtcctactactggaacc

SEQ ID NO: 9861 - DNA, 443 bp, Gossypium hirsutum
  Clone ID: LIB3135-008-Q1-K1-A8
cggacgcgtgggcttttgcaattcagatagctaagagcaaaggagcaacagggtttgctagggcagggaatgaagaaaagttagctttctgcaagagtcttggagctgatttgtgcatcaattataagacagaggattgtgttgcgtgcattaaggaagaaactggagggaagggtgtcgatgtgattctggattgcatcggggcagcgtacctacagcgaaacctggacagtttaaattttgatggaaggctttgtatcattggcttgcaaggtggagctgtgaccgaaattaaacttaatactttatttccaaagcgcctcacagtgcatggggctgcgttgcgacctagaaatccagaaaacaaagcaatggttgttaatgaagtggagaagaatgtttggccagaaatcgtggcgggcaaggtgaagcctatcatctac

SEQ ID NO: 9862 - DNA, 417 bp, Gossypium hirsutum
  Clone ID: LIB3135-008-Q1-K1-B1
acgggaaaagtgctgctgcagttggctcatctgtttgagacctgggaggaaaaggagtattcagtgatggcgggtgtagaactgaaaaagctgtttccaaacaagaagataaagaaagtaacagagatgagtttgtctgcaaatcaagaaagaggtgaaatggaaaagagaacgttagcttggaaagtagaatgcgggggcggaggatcaaagatggtaaggggaggagcagttgatcctgctaagctgctcgttgaacttgcttcaatggagatacgaactttcctgattgatgtagattacatccaactggtgggtggttgaaagacacaccaacatgtggtttttgtctgtgctaaataaatcttcatctactcaaacttaatgtaatggggttcaagctgtgtttgtatgtgc

SEQ ID NO: 9863 - DNA, 261 bp, Gossypium hirsutum
  Clone ID: LIB3135-008-Q1-K1-B11
gcgcccacgcatccgcccactcgtccgtccacgcgtccgcccacgcgttcggtttttgtgtttagttttctgaaatttctgcatatttattttgatatatggattgtattggcgagatggatctactcgatcctgatatgactattgtagaaattaatgctattaacgacaacttaatttcttggaaaaaaaaaccaaaataaaaatcttcaacatcacagaaaaaaaaaagagggaaaaaaatcaattgggaggattaaa

SEQ ID NO: 9864 - DNA, 391 bp, Gossypium hirsutum
  Clone ID: LIB3135-008-Q1-K1-B12
ttttattttaacaaacgttaactaagaacattgatttttaagggggtgagaaatgagaatgatatgggtaggtgtaatagtttccttttgttctagatgattgtagttgtaagacaggtagacattgtatgaatgtagagcagtgttcaggtcttattaaattttacactataataactaattattttttatcttttttcataaaaactttgatagttgttttatttacctttatgagattattttttttttttattatttttttagattatttttgtttttttctctttttttatctaaatattattttttttttcttttttttttatctattttacttttttttttttgtgttatttttttatatcacccattttttgttttttttttt

SEQ ID NO: 9865 - DNA, 356 bp, Gossypium hirsutum
  unsure (1)..(356): unsure at all n locations; Clone ID: LIB3135-008-Q1-K1-B2
agaaatctatattttgagtggtttgttatcccctttataaaacatactgctatagttctagctctgtgaatgttatatctatatgaggatatgaaattagcctgcccaggatctactctatgatatggctccctttttctttttggggttttttgggggttaattactgatttttgttttgggttcttaagaaatgttaatgcatcacgaagaatgatgagaactgttttttttcatttctattntcagtatcactaatgtttaatgaaaatgacataaatggaacttactgnnnaaaaaaaaaaaataaagaagaggaaagaaaaactaaaaattagtattcttattgggttaat

SEQ ID NO: 9866 - DNA, 382 bp, Gossypium hirsutum
  Clone ID: LIB3135-008-Q1-K1-B3
accacgctatctaacaaattgtctcttttgtaaaatatataccatcttacattaagacaaggtttacgtgtgctgaatataaacacccataattttcttaatatctaaaaggaaatctcattgaacaacatatctttctgattaacatgaacctcagcctacaacaaacacgtatggagaatactctaactatacaccatcatgctctcataacaagattttgtaccattagaaattatttttttggataaggaccatctcatcattttaataaactcttaacaactataacttgaatacataaaacaatggggttgattaaaaaaacatcaaaaaatttttttttttaaaaactaaaaaaaatttgatttaattaaacttt

SEQ ID NO: 9867 - DNA, 367 bp, Gossypium hirsutum
  unsure (1)..(367): unsure at all n locations; Clone ID: LIB3135-008-Q1-K1-B4
cggacgcgtggggccgaaagaacagaaaggccttcagttggccaagagattggagaaagggggtctggcggtattganccgcttacaagacgcattggttccgggcagggtttgcatggtgatcaatctagatacacatctgatgacgtgccgtcatccaaggatgtgcaacctgattctgaaaaggttcgctcctcctcaagaaacgatagttcttcaaagaggcctgtcgcaacaagaagccgactggactcctctggtgagcctaacgaaaaccggtctagcagattagtctcaagcagtagtcgcctgtcaacaactcagagaatcctccctgggtttcaatccagatcagcatcttatactc

SEQ ID NO: 9868 - DNA, 340 bp, Gossypium hirsutum
  Clone ID: LIB3135-008-Q1-K1-B5
catattaactcgtgtagataggaaattccatgatatcttccagattgtaatttttatttttgaaggaaggttcagaagccataattttttgtagaactccttatagtcagcttgtaaagagtaagctctaggatcattttccgacgcctcagcactccagacccaaaaatcttcatgaggttcttctgccaacggaatgcaaataatcttctcggcaacatcctccggaaaggtagaagctatcaactctttcttccatgttctattactttgatcaattaatttggcaactttaaaatcattgaaattcgtaattaaagctgatcacctgttctttttc

SEQ ID NO: 9869 - DNA, 402 bp, Gossypium hirsutum
  Clone ID: LIB3135-008-Q1-K1-B6
catattaactcgtgtagataggaaattccatgatatcttccagattgtaatttgtattttggaaggaaggttcagaagccataattttttgtagaactccttatagtcagcttgtaaagagtaagctctaggatcattttccgacgcctcagcactccagacccaaaaatcttcatgaggttcttctgccaacggaatgcaaataatcttctcggcaacatcctccggaaaggtagaagctatcaactctttcttccatgttctattactttgatcaattaatttggcaactttaaaatcattgaaattcgtaattaaagctgatcacctgttctttttcaaatgacaaaaccaacataaaaactaagacgggggagcctctttaaaaaagcaaccttaaaa

SEQ ID NO: 9870 - DNA, 416 bp, Gossypium hirsutum
  Clone ID: LIB3135-008-Q1-K1-B8
cccacgcgtccgcaagtttcagggcggagctcaacatcgaggaaatctcacgacacaacaggcatccagtaacttgttttggttactggagacaatggacttctggttcaagggaatcagtgaggacacatctgcgtactcatttaatgagacagacattcagaaatgtccatttcttaagaacattaacaaacccaccaacttttcattctcttcaatgagttttcccatgcctgtacagggagctagaggtcctttatttgaggatggtccaaattttgatatggcatttaagctttttcatgggaaggatggcattgtacctctctcagggaggtctgatgttccctgtgacagagacaaacaggagcctaccatccaatttaacccattagcaggaaaagctgcaacaatta

SEQ ID NO: 9871 - DNA, 260 bp, Gossypium hirsutum
  Clone ID: LIB3135-008-Q1-K1-B9
ataccccccctcaatccccttaaaaaaaaaccttcccactcacatttttcttaccacaaaccccccatcccctatccttttcctttatttttaaacctatttttttctttaacctttctccaaatataattaccctttccccctttaaaacaaaacaccttttatatttttttattttttttttcctctccccaaaacccaaaatcccttttttttttttttaaaaaataatgtattaataccttttatttttttttttt

SEQ ID NO: 9872 - DNA, 397 bp, Gossypium hirsutum
  Clone ID: LIB3135-008-Q1-K1-C1
cccacgcgtccgtgaagagtgaaatatgcacacactttgttaattgtgagcttcgatccggggttattggggatagaagtatgatgggatcagatcctgcaacaacaaactatcctggaaaaatccctagtgggcttgatcttcccagtgatgttgctgatgagaagctctcgaatgatggagaaggcaagtagttattaatccgccggaatctgagtttgatatccatagcaactataacaaaataatttggtcttatgacccttaaaacatttcaaaaagagttagatcttttatattttttttatagttgctatggtcaacatatcgatacatctattgtaacaatttagctactaatttggttgcattgatacctttaaaaactactaaacta

SEQ ID NO: 9873 - DNA, 309 bp, Gossypium hirsutum
  unsure (1)..(309): unsure at all n locations; Clone ID: LIB3135-008-Q1-K1-C10
tctacttacccctacttcagcactcattatttcttttttcatccactttccttgttcttgataacttcaactttccattaaccaaaatcntttactttattctcttattcacccatatatacatcatcctcttaatcaatcaacaattattttttttttcttctttatcaatccattctatatattattttttataccccaatttttctttttcccaacatcttattttctatcattaacatatatttaaatttatttttttttattaatatccttattttcttcatttactatatttttaattttttt

SEQ ID NO: 9874 - DNA, 395 bp, Gossypium hirsutum
  unsure (1)..(395): unsure at all n locations; Clone ID: LIB3135-008-Q1-K1-C11
tcccactcgtcctcccacacgntccttaaaattaaaaaaaaaaaaaaaaaaaaatatgaaaatgtttacttttttaattttccttcctttctctccctctccaatctatccctttttttttctacaaatacacctaattttatcttcctttcccacccccctcaacaaattttactaccatttctttttccaatacccaactcattaaccctcccttaatcatccttccttttattatccctcctcacaaatcatttaacattacccccctttcattttccttttcccaacttcctcctccacatcttttttttttaaataattataccccacctcttctacatcccctttttttcccccctcctttatcccacttattttatatcttttaccct

SEQ ID NO: 9875 - DNA, 382 bp, Gossypium hirsutum
  Clone ID: LIB3135-008-Q1-K1-C12
cttactccttgtccgcacgaaaggtttaactttctgcgcactgtctcagaaagaggctctggcaaatagacatgtgtgttaagattcttactacccgcacctggacagaaagaccctatgaagcttcactgttccctgggattggctttgggcttttcctgcccagcttacatggaatgcaaacaaagcctgcttccaccggtgcccgaaccatcaatgagataccactctggaagagctagaattctaaccttgtgtcatgacctactgtccaatgtacaatctcaggtagacagtttctatggtgcgtacgcctaccaaaaggtaacggagacgttcaaaggtttcctcgtgccggacagagattggccctcgagtgcaa

SEQ ID NO: 9876 - DNA, 327 bp, Gossypium hirsutum
  Clone ID: LIB3135-008-Q1-K1-C2
ctgacatttgttacaaagggtgcattgtaatcagctgacattacaaatgaactgcagaagactgtcatagggtcggccttaacatctaatcctgccctccccctccaggattctctggttcccccaccccaggccgatacccctgtcatcttacttttactttccttaatgttgtcaccttttcatgtatataattttatgcttttttattagttaatcaatgaaatcttcataagcttgcgctgctataaaaacttatgacccttaaaacatttgaaaaagaattacatcttttatattttgtttataattgctatggtcaacata

SEQ ID NO: 9877 - DNA, 425 bp, Gossypium hirsutum
  unsure (1)..(425): unsure at all n locations; Clone ID: LIB3135-008-Q1-K1-C3
cccacgcgtccgcagcgattccacgatttccaccccttattctataaggatgatttaactgctaaacacaccacactcatttctcacttctgttttccttgttctcttctacattcagcgaaggggtgctctgagatcacataccaaaatggtgaaggccgttgccgtccttggcagcaatgaatgtgttagcggaactgttttcttctcccaagaaggagatggtccaactaccgtgactgggaacctttctggtcttaaacccggactccatggcttccatgttcatgcccttggggacacaactaacgggtgcatgtcaactggaccccattttaatcctgctggcaaagagcatggtgctccagaagatgagaaccgccatgctggtgatctanggaatgtcacttgtggtgatgatggct

SEQ ID NO: 9878 - DNA, 253 bp, Gossypium hirsutum
  unsure (1)..(253): unsure at all n locations; Clone ID: LIB3135-008-Q1-K1-C4
ctcatgaccacctcctgctcaccactactaaacaatggctttgaccgcaccaaggggaacagaagagtgtgatccaataaagcgacagagaaagagagcagtgagaggtggcctagtctccgcgtttcaagagatggaaaaagaaaacaataatgatgtagacaagtagtagggtcaataaaaaacaaggggttcatcgttttcacanaaaaaaaaaaaaaaaaaaaaacaactaaaaaaaatgaaaaaaata

SEQ ID NO: 9879 - DNA, 338 bp, Gossypium hirsutum
  Clone ID: LIB3135-008-Q1-K1-C5
aaaaaaaaaaaaaaaaaaaaaaaaacaaaaatttataaaaaaaaaaaaaactgggaaacacgcggaaaaaaaactgccactcaaaaatcttcccccctcactaacacattcatgcaaaatgatactcttgcgaccacatacccccaacttgaataccctggccgacctttaacacccttaacgctgcaaaaccactgcttattcctaaccaaaatgacatgccccaactaccccttctccaaacctttctatcttaaaccggacctcactaaaatacatgctcatccccttataaccccaactaacgaatgcaactcaacctgacaccgcgcatatac

SEQ ID NO: 9880 - DNA, 305 bp, Gossypium hirsutum
  Clone ID: LIB3135-008-Q1-K1-C6
aaatcttgagcccaataccatgaatagtgttagaaccgaaccttatggacaggggctatgggcccgataactatcaacttagccaatctgcagcttgtaataatttagctaacgggcattatactgaaagagccgagcttattgattctgaccttgatgttggcagaaaggaagctcagaattgaacattgactccaaggtattaaagaatgccactctcttggagggggaactgcttcgagtataaaaaactatggtgctttctaaaatcagaaaagtaaatactgatacaatcatgctcacat

SEQ ID NO: 9881 - DNA, 243 bp, Gossypium hirsutum
  Clone ID: LIB3135-008-Q1-K1-C7
tacattatacactttctatattctcacctaaatttacattaatggccggcgttctacaacgatcacatcccataaatcttaatgtcactcaccttattggcattacagaacatgctagcttcactggcttcttttatcacgaagaagatcgtacaactaccgctactgaacaccttcgtagtcttaatcccgaactccatgcgttccatgttcatgcacttagcgccacaactaaggtgtgca

SEQ ID NO: 9882 - DNA, 251 bp, Gossypium hirsutum
  Clone ID: LIB3135-008-Q1-K1-C8
cccactcgtcagcactactaaacaatgacttttaccgcacaaatgggaacaggaaagtgtgctccaataaaacgacagagaaagaaagcaaacaaaggtgacctactctccgcgtttcaagagatggaaaaagaaaacaataatgatgtagacaagtagtagggtcaataaaaaacaaggggttcatcgttttcacacataaaaaaaaaaaaaacaaaataataaagaaataataaaaaaaaaattaattt

SEQ ID NO: 9883 - DNA, 419 bp, Gossypium hirsutum
  Clone ID: LIB3135-008-Q1-K1-C9
tttcactcgtccgcctgtataaaatataaaatatttctctttcctagtcttctcttgcgctagtgttgaataatttttttataacattttaatccaatcatattttatattttgattcatcttttaatgaatactttttttctctctttattcataaacttttaataaaaatttttgtttttcttatcttttatcttattaattttctcttgtattacttttattttttattatctttctttttaataaaatattttctattttttaattttttttccaatattactcttttttctttatatttaaaaattatgtttgaaacctatttattttatttctttttatggatataccaattttctttatatattattatatctcttttttttttatattctcatcttttttttgtcttttta

SEQ ID NO: 9884 - DNA, 421 bp, Gossypium hirsutum
  Clone ID: LIB3135-008-Q1-K1-D1
cccacgcgtccgcacagatcacacgctatcacgggccttgtcgctaagtggcatgtatgtgcgacaatcggctctttcgacgaagctgatggtgaaacacccatggctcaaatcgcttctccacagatgtatccggtggacgtcgattgggaatcagatgaagaagatgaaggggatgatttggataacacgaagcttgtccccatttttgcgcacacggtatctttccaaaagagacaggcgttaacgacatatctagagcacaacagagctggaattaccgtgtacggcttcatggtggacagaactggaatccacaccatattcggcatcgaactaactttactgctttggctactcaacaagacaatagtgaacttgacatgaacaccatatatgacggacagaacttaacccgaca

SEQ ID NO: 9885 - DNA, 392 bp, Gossypium hirsutum
  unsure (1)..(392): unsure at all n locations; Clone ID: LIB3135-008-Q1-K1-D11
aaaaccgggccgaccgacgcgtacnnnnagccaaagcncatatttggtcttgtgttttgattttatacgttcttctcggggggttgttaccgtttcaagatgataacttcctttctatatataagaagatttacagaggagatttcaagtgtccgccatttttctcacctgaagctcggaggctaatatccaagcttttagacccgaacccaaaaacccgaatcgtcatctccaacatcacagaatcatcttgcttcaaaaaatcaatccccaagactaaaacaactaatgaagaaatacaattcgaagcattcaatggagagaaatcttctaaacccgagaccttaaacgcattccacataatttcattgtctgaaggcttccatttatct

SEQ ID NO: 9886 - DNA, 433 bp, Gossypium hirsutum
  Clone ID: LIB3135-008-Q1-K1-D12
gtcttcgtacaaaggataaagaacgagtgtttgttcttgctgctactaaccggccgttttgccttgatgaggcagtcatccggaggcttcctcgaagattgatggtaaatttgccagatgctccaaacagagaaaagattttaagagttatattggccaaagaggatttgtcacccaatgttgatttggaaactattgcaaatatgactgatggatattctggaagtgacctgaagaacctttgcgtgactgctgcacattgtcccataagagaaattctggagaaggaaaagaaggagagagcttcagcagcagctgagaatagacctgcacccaccttgtatagcagtgctgacgttcgacctctgaagatggatgattttaaatatgcacatgagcaggtgtgtgcaagcgtgtcatcagagtctacaaa

SEQ ID NO: 9887 - DNA, 408 bp, Gossypium hirsutum
  Clone ID: LIB3135-008-Q1-K1-D2
gaaacgaccgtgggacacccatggttttggataacaactactacaggaacatactggacaacaagggtttgttgattgtggatcaccaactggcgtacgacaaaaggaccagaccttatgtgaagaaaatggccaagagccaagactatttcttcaaggagttctcaagggccattactctcctctctgagaacaatcctctcactggtagcaagggtgagatcaggaagcaatgcaatcttgcaaacaagcttcactaaaatgcctcgccaaagagaaagccgagtgtggccgaataaaatgtttgtttactcagtttcttttccaagagacgagtttgttaatgtgcaggtgagtaatggtgcaatggtactggtttgtaacgatcgatccattgcatttttcttt

SEQ ID NO: 9888 - DNA, 166 bp, Gossypium hirsutum
  Clone ID: LIB3135-008-Q1-K1-D3
gttactgagcaagagttagaagataacgacatcgcttcatcagaaaccggctctgagtctggtacttcgaccactttcaacagcatcaaactctctactaaaaaaggtaggagatccatacagaaaagagttgcgtcagcgcctatcatggatgtagaaagttctc

SEQ ID NO: 9889 - DNA, 299 bp, Gossypium hirsutum
  Clone ID: LIB3135-008-Q1-K1-D4
gcaagggcggcaagcagaaaataaaaatttctttctcttaaggaagactccgggtttgcagggcctctatcatattctttattctctttctctataccatatgctttttttccgggcaagcaagtagtgattttaggcacgtaagcccctaaaatatatataagtgctagtttacagcctttactttctcccttactagcttagatttggagtttctttcgatcgacatcactcgtgactcacgaagggacgaaacttcacttgctcaaccaacaaagagaaaaggaggactttctgca

SEQ ID NO: 9890 - DNA, 414 bp, Gossypium hirsutum
  Clone ID: LIB3135-008-Q1-K1-D5
cttcaaactaatgcagcagttggagaagacaaaacctcactttatttgctgcataaaaccgaatcgcaagcagctccctggcatgtatgaagaggatcttgtctcacagcagcttagatgtagtggagttttggaggctggtagaatgtctagatctggatatcctactcgaatgacacatcaggaatttgcagacaggtatggtttcctgctgttagaaaccaatgaatctccggatcctttaagtatttcagttgctgttctaaaacaatctaatatactccctgtaatgtatcaaattggctacaccaaactgtatcttcgaatcgggctgattggggtattggaagataggagaaaacaggtgttgcaaacagggtgtaccaaaaccattgcttgtgttctaacatttat

SEQ ID NO: 9891 - DNA, 384 bp, Gossypium hirsutum
  Clone ID: LIB3135-008-Q1-K1-D6
cctttggctgctcatgggtatcatcggcgttcacgcctctacctctgtcgtggctcatgaggcaagtcgcgtaaaaacaagattagacccatttacttcctttggtccgatatccaagccgaagaatagcctccgacgattgaaaccgcaggtaaaccaccgtacagagaagcggacgtggcaatggtgctggagacccttgctgaggatgttgtggcgctggccctagggtttcagtctctgaaaccgaaagttgggccatctggtcattttcaattgggttttgggttaagtttatttaattgggttaaagatttgtatttgggctaggattaggccttggtcttatttgggcttcaattaatgtttgggtctttgtgtttc

SEQ ID NO: 9892 - DNA, 359 bp, Gossypium hirsutum
  Clone ID: LIB3135-008-Q1-K1-D7
aaagaggaaaataaatcaaaatacaatatgtttttttttggttggatttgctgctgagtttggctggttcttttgcaagtacggttgtgcgctcgggtaccgggccgtgtgcttgcgttcggggcgtgggcctggcgccaggaagccgtaccgaagcctggaagcttggactggtgccgcgcaaacaaactgctaaggttctggcctaatttttgagtcttgggtcacttgggcttatcgtatttgggctcgggtttatttgtaaatgggttgatttgggcttgtatagggtcatgtattaattttgggttttggacttgtaaaaggatatttaatggactgtggttatttaattattt

SEQ ID NO: 9893 - DNA, 423 bp, Gossypium hirsutum
  unsure (1)..(423): unsure at all n locations; Clone ID: LIB3135-008-Q1-K1-D8
cgtttctattttctttcaactcaaaaactcccaagtaatattagaatcgggggtgttggcacttataactatgagtctacctctccagtcgcccctgccaggcttttcaaggctttttctcttgaagctgacaaggtttggcccaaggctgctcctcaggcagtcaagagtgttgaggttgaaactaatcctggccctggaagtatcgtaaagatcaactttgctgaaggccttccattccaatatatgaagcaccagattggaggacatgacgacaagaatttgtcatacagttatagtttgatcgaaggtggacctttgggggacacgcttgagaaaatcagctatgacaacaagtttgaggcagctgcangtggaggaagcctttgcaagagctcgatgaaattttacactgttggcgac

SEQ ID NO: 9894 - DNA, 254 bp, Gossypium hirsutum
  Clone ID: LIB3135-008-Q1-K1-E1
cggacgcgtgggcgggtgaatcaaatgattgaagactgcgagccatttgagggagagcctgtcttggatgccaagtgctttaagtgatggaatatgttcttaattttacctttttatatttctggtacctttttgcatgtcaggttttatttataggttgctgttttcagttttgattaaggtaacattacaattaacttttaatgttctgagatgttggatttgaaattctctatttatgttttattaagaag

SEQ ID NO: 9895 - DNA, 447 bp, Gossypium hirsutum
  Clone ID: LIB3135-008-Q1-K1-E10
ggtcaaatgttgggaaaatacttcctcaaaaatattccacagggagctgccactacatgctgtgttgcattaaatccacaagtcaaaggtgttagcggagaatatttcttagacagcaacataggtaacccgagcgctaaggcgaaggatgcagatttggcaaaaaagctatgggacttcagctgcaccttgaccaaccccaagtagttagttggttcacaaagccttatcgagacgagctgaagatgttcgatgcttagtgctggtactcttttagctgaaactgtgataaaccgtaatattttcatagacatcccagttttatcgagaagatttgaataaaatgcaaaatatgtatagacactgaaaaaaaaaaataattaaaaatttatttaattatataatttttaaaataaaatattttaattatattttttttaaaaataa

SEQ ID NO: 9896 - DNA, 288 bp, Gossypium hirsutum
  unsure (1)..(288): unsure at all n locations; Clone ID: LIB3135-008-Q1-K1-E11
tcaatcatncacttctttttttcttttaactcaaaancccaacttatatgataatgattaattttaacacttattactattanaataccttcccattctccccatccattcttttcaaatcccttactttttaatctcctaaaatttttcccacattttcaccaaattcattcaatagcattttaatttaaactaatcctatctctttaaatatattaaaaatcaactttttttatatccttccatttcaaaatattaatcacctcatcttattacatcattaaaata

SEQ ID NO: 9897 - DNA, 438 bp, Gossypium hirsutum
  Clone ID: LIB3135-008-Q1-K1-E2
cccacgcgtccgggaagacatatggggtgactatatgcaccatggatattacgacccgggttccgatgtgtcgggttcagatcatcgtgccgctcagattcgaatgatcgaagaatcgctccgtttcgctggaatatcggatgacccagcaaacagacccaagagaatagttgatgttgggtgtgggataggaggcagttctaggtatctagcaaggaaatatggagcaaaatgccaaggcattactttgagccctgttcaagctggaagagccaatgctcttgctaatgctcaagtactagcagaccacgtttgttttgaagttgcagatgccttgaaccaaccattccctgatgaccaatttgatcttgtttggtctatggaaagcggagaacacatgcctgacaaacccaagtttggtgaaaagctggtgcgagt

SEQ ID NO: 9898 - DNA, 448 bp, Gossypium hirsutum
  unsure (1)..(448): unsure at all n locations; Clone ID: LIB3135-008-Q1-K1-E3
atggagccgaccagaatccactcaaatggcttttctctgtttcaggacattaccttagctggggatattgcaggctacgcgacaacagctgcttacaacaaggacccctgccccaataagctgcatttgggtattggtgtttatcgaacagaggagggaaaatgccatacattaaatgttgttaaacaagtggagcagacactagctaatgatctgtctgctgacaaggagtatcttcctataacaggaatgccggaatttaataaattaagtgctgagctaatgtttggctctggcagccctgccatcaaggaaagtagagtggttactggccaatgtgtttctggttgtctatcactganggttggagctgaattcttagcaaaacattaccaccgacatgtgcgttaccttcctgagccaacatatggaaatcatgctaatctga

SEQ ID NO: 9899 - DNA, 297 bp, Gossypium hirsutum
  unsure (1)..(297): unsure at all n locations; Clone ID: LIB3135-008-Q1-K1-E4
acccacgcgntgcgaggaagccctaccagaaatacatatcaaatggtctcttatccgctttcaggacatacacaccagctcgtggatattcgcagggctacaccaacaacaacctccttacaacaagagatcaactgacccaataaatctgcatttcgtgtattggtgtttatcccaccaaacaagcccaatgccatacattaaattttgtttaacaattggagcaaactctagcttattatcatgctacttacaacgaaaatcctactattacatttatgcccgaatttaataaaa

SEQ ID NO: 9900 - DNA, 278 bp, Gossypium hirsutum
  Clone ID: LIB3135-008-Q1-K1-E5
aataagtaaaataaatcattttataatgagtttttttttgttagtaaaaagaggtctatgggtaggttaattacgcaacataaaaatgttatcaaacctatacattaataggtataaaatcgaaagataaaaacccattgataattatcataatcaaacttccataccattaaatgtataccgtaaacaaattgttagggtatagtcacacaatatgataatctggttactatgtctaattatagattgcaacgcaactatatataaaagagttgtta

SEQ ID NO: 9901 - DNA, 397 bp, Gossypium hirsutum
  Clone ID: LIB3135-008-Q1-K1-E6
ggaactcactaaagggaccagttttgtcagcttgcattgaggcaggcactcagtgcatactggacaagtggggactcttttttgaaacataatgccccgaacgacgtaaggagaaagtctagcttaaaaagcgatctgccactttaaatatcttacatatctgtaaactttaatgaaagaaaaagaatctatttattagattgaacactgggaatgaggatcctaactccaagcgcgttactgtgagccctgcacaagctggaaaagccaacgctcttgctaatgctgaagatctaacacaccacgtttggtttgaaggtacagataccttgaaccaaccattccctgatgaccaatttgatcttgtttgggctattgaaagcggataacacatgcc

SEQ ID NO: 9902 - DNA, 461 bp, Gossypium hirsutum
  Clone ID: LIB3135-008-Q1-K1-E8
gggaaaaacaggcgcgacgcgcacgcgtgcggaaactcatacgaacacgctttcaattcattcttcactgacattgaacacacgggattatccgtacccgctatcagaatactcagacccaaccattgctcaaggataatctcttgccaaaacggctaattctttcattcatgacacacttcttcaatgactatctggaggataatagccttgatgatttaatttctcttctgaagcgagggaaaattgaggatgatctcctgcaatttttcccctccacaaagcgatctgctgaaagtttctcttagcattttaccaaggcatgtttgttacccttggttgaatacaatgagaaaaaaatatttgatgtataattgaatgaaatgaactctgctttgtcaacacaaattgttgaggaatctgatatttcttaaatcatttaaactgtcaaacaacttttt

SEQ ID NO: 9903 - DNA, 339 bp, Gossypium hirsutum
  Clone ID: LIB3135-008-Q1-K1-E9
gttcaatcatacacttgttcttttcttttaactcaaaatcccatctcatatgataatgtattattttttcacttattactataacaatacctccccaatcaccccttccaaacttttcaaaacctttactctttaaactcctaaaatttttcccacttcttcaccaaattcattcaagatcattaatatttaacctaatcctatcttcttaaatatattaaaaatcaactttttttaaaaacctttcatttcaatatattaaacaccacatcctaatacattataaaatttattttttatacacttactatttaaattataatgtttccctttttttta

SEQ ID NO: 9904 - DNA, 381 bp, Gossypium hirsutum
  Clone ID: LIB3135-008-Q1-K1-F1
ctgagggtggcatttagctttcaacaactgctcaatcaaacactcaaagaagtgaagtgggggctgatggggaagggaatacaattctgaataccaaatcggaaagttctgtgaagactggcgctcatgtcatatattccaaatatacctgcattgaggtcaaattcaatggtgcaaatcatattctgctaaaacaagatgacattgtatgacttcttgaaaccgatgacataaaagatcttaaacctctgaacgacagatatttaattaaagtgttggaagctgacgagaaaaccactcgatgattcttgctggccgaggcaagctaacaaaaaccttccattggaaccgtgatagctgttggacctgtgtctttacatg

SEQ ID NO: 9905 - DNA, 332 bp, Gossypium hirsutum
  unsure (1)..(332): unsure at all n locations; Clone ID: LIB3135-008-Q1-K1-F10
ccgggccgaccgcacgcgtacgcnaacaatatcccttccagaaagaatgaatttgatcacatcgcaaaggtggaatcgctcttgtcatcatagaccttaagttatgctattaactggccatttgatttaatcatcaaatggcaagtctgaaaccatttcccgtaccccaattttttgtttcttttttaaagttatgttgtatcctggtgcaagattagtttgttcatctgtttatgattgcaactcttttggtagtagtggaatgataagttttgaacacaagaaaaactttttttaaacttataaacaaaaatataaataaaataatatat

SEQ ID NO: 9906 - DNA, 440 bp, Gossypium hirsutum
  unsure (1)..(440): unsure at all n locations; Clone ID: LIB3135-008-Q1-K1-F11
cccacgcgtccgggagaaacttgcttatgtggcactcgacttcgagcaggagctggaaacggcgaaaagcagctcatcaattgagaaaagttatgagctacctgatggccaggtaataaccattggagcagagcgtttccgttgtcctgaggtcttatttcaaccatcgcttattggaatggaagctcctggaattcacgagaccacttataactccatcatgaaatgtgatgttgatattagaaaggacttgtacggtaacatagtgcttagtggtggatccaccatgtttcctggtattgctgatagaatgagcaaggaaatcacagctcttgcaccaagtagcatgaagattaaggtggtagcacccncagagagaaaatacagtgtctggattggtgggtctattttagcttctcttagtacattccagcaaatgt

SEQ ID NO: 9907 - DNA, 339 bp, Gossypium hirsutum
  Clone ID: LIB3135-008-Q1-K1-F2
gcttttcgaggaaaatgagaggaagaagcttgcaattttcacagcacttgctttctcccaggaattatcagggttgccacctgagactgtgttccagccattgctcaaggataatcttgtggcaaaagggctagttctttcattcatgacagacttcttcaaggactatctggtggataatagccttgatgatttaatttctcttctgaagcgagggaaaattgaagatgatctcctgccggttttcccctccacaaagcgatctgctgaaaggttctctgagcattttaccaaagcagggttggtacccttggttgaatacaatgagaaaaaaatatt

SEQ ID NO: 9908 - DNA, 403 bp, Gossypium hirsutum
  Clone ID: LIB3135-008-Q1-K1-F3
gcgccaaagacacttgctgccctgtactacaagggctgttggatttagacgccgccatttgggtctgtgctacgatcaaggccaaacttttgaatatcaatattataatccccatagctcttcaggtcctcatcgactgtggcaaaactccacctccagggttgcaatgtccagcacaatgatgaaaaacataaaaaccccctgttttttttctttcgaaataacaaatattttcatgtcttattatatgtttcttttaataatttatggtgttttgctggttgatgaagatcataaagacgtgtctgacgttagatcgttttaatagatgttgatgaatgcacgaacggatcaatgtagtacgatggtgtgattttagttagttcataagatcatattaatt

SEQ ID NO: 9909 - DNA, 443 bp, Gossypium hirsutum
  Clone ID: LIB3135-008-Q1-K1-F4
cccacgcgtccggctcaatgatgtctgccatacacttgctaatattgctacttggagtgggggctctagccactccctcttttggcacctatgagtctcccaactatgggaagccccctactcctgtttataagcctcctaaggtgaaacccccaccttatgaacataagccacctgtctatgaacctccaaagaaagaaaaacctgaacataagccacctgtctatgaacctccaaagaaagaaaaacctgaacccaagccaccgatgtatgaaccaccaaagaaggaaaagtccgaaccaaagccaccagtttatacacctccaaagaaagagaagcctgaaccaaaaccatcagtatatgaaccaccaaagaaggaaaagcctgagcctaagccaccagtttatacaccaccaaagaaagagaagcctgaacccaaacca

SEQ ID NO: 9910 - DNA, 440 bp, Gossypium hirsutum
  Clone ID: LIB3135-008-Q1-K1-F7
gaaaaaaaaaccgaccggcgcgtacgcactatatggataatatcttttttgactcctttcttaattctcccgctgacgcgtatattgtcctaattaatccgatctgtcctataaatataaattaaaacattttattggccaataccgcaaagattgtggaaaaaaacaacatctgtaatagtaaagatcatctttgcacgaaaatggacactaaccgattactgaccctttgatatgatgcttctatctgcaaatcttgatgagaaaaatcttcctcttgcccctccgcatttgagtactaatacatatacttgatacttgagggagaacgattgttgatcgacaccgatttcacatcacagttcgaactcttccgatcaactaatacttacaaatcaatcctccaaatgcttcccttcatctttcatggcaaatctcat

SEQ ID NO: 9911 - DNA, 219 bp, Gossypium hirsutum
  Clone ID: LIB3135-008-Q1-K1-F8
cccacgcgtccgtcatcactttagaggctgtcaaaggtgctgctcttatgctggcgaggcgggcgaatttgaaactcacgcctaatgtaaccttttgcatttacagttggcatgtatcttaataaataaatgggcataagtcctaaatgaaaatgcttccttaatatggagatgtaagtggaagtataaagcaataaaattgtgctttactttttccct

SEQ ID NO: 9912 - DNA, 436 bp, Gossypium hirsutum
  Clone ID: LIB3135-008-Q1-K1-F9
aaagacaatccagtacgccagcaggagcttgctgcctacttcacccactgcaacctgcaatgaccacacctaagacttgccctgctgaatgcaatgactgtctgctacaaggcaaagaacctggctacggcaggtaactttgcccggcgactgctagaaacaaaccccacaaatgagaatcaagcgaagacagccaggcaagtacttcaagctgctgagaggaacatgacagatgcttctcagctgaactatgatttcagaaatccatttgtgacatgcggggcaacttatgtgcctatttaccgagggcagaaggatgtatcgtgcccatattgtactagtcgctttgtgcctagccaggaagggcaattgtgtacagtgtgtgatcttgcattggtcggggcggatgcatcaaggttgctgtgttctgctttac

SEQ ID NO: 9913 - DNA, 320 bp, Gossypium hirsutum
  Clone ID: LIB3135-008-Q1-K1-G1
gaccacgcgtccggggaaagacacccgaggagattcgcaagaccttcaacatcaagaacgatttcacccccgagggagaagagggggttaggagggagaatcaatgggcattcgagtgataggaaagcctttaaatttaatgttgatattattatagtttatatgcttttctggttaggttttcaagttggggaaaaaattaagaacattggctttcttttggcttattttgttatatgcattagtgtcttctattctagaggatatttaatatgaacctctgccctcctctattatcataatataaattagaatttctt

SEQ ID NO: 9914 - DNA, 439 bp, Gossypium hirsutum
  Clone ID: LIB3135-008-Q1-K1-G10
cgggccgaccgacgcgtgcgtccatatcttcactgtctcactctctccattcttcactccagtttctcctttccgggttcggtgaaatcattcttgaaatccttcatattcaacgtagccaatgcggcaaccaaatcagaaccacgttctgtgaacttgttttttctgaacatagcataaatgcaacttggcgttaccaaagagacttgaatcttcaacttgcgcgaatcaatgtctactacaatgaagccacgtttggcagattccttcctcgtgctaatctcatgcatcttgaacctcgaaccatggacagcatcacatctttccctgtcggtcagatttttagaccagataacttccttttttgtcaatctggtgcttgaaacaactgtactaatggccattacacataactgtctgactttatagatttcgtact

SEQ ID NO: 9915 - DNA, 442 bp, Gossypium hirsutum
  Clone ID: LIB3135-008-Q1-K1-G11
cccacgcgtccggtgatattcaagacaaattgggtcactccctttgccaagagcttggaagagagaacatcagctatgtccacttatgtaacatgcgaatctgatgtcgaaaatgctgtaaaattagcagtttctaagcatgggaagctggatatcatgttcaataatgcagcgattatgggtgagaatgaggtaaaagtcagcgagaccagtctcaaggacttcaaaacggtgcttgatgtgaatgtgttgggtgcattcctgggtgccaagcatgccgccagggtcatggttccagccaagaaagggtgcattctcttcacagcaagtcttgcttcaaaaatttgctatggaaaattcccattcatacaaatcatcgaaggttgctgtggtagggttggcaagagcttgagcgtggagttaggtgagcatggaattaggg

SEQ ID NO: 9916 - DNA, 420 bp, Gossypium hirsutum
  Clone ID: LIB3135-008-Q1-K1-G12
gacgaaattgccgtgaaggaagaatgggaaggtggagtcaattcgtggttgcggtgactagtctggcggtgggcctcctttcggcatcagccaccgctagaccctgcaagacattcttcgtcgcctcctattctttctcttttgaaaaccctaacgacccttcttcctccaccggattcgtcaccgtcttcaccgagatcggtcaattgaacgtcgtaccaccaagacccaagccctccgatgtcttgagctctctccgtgagcgcagtaaggacatccttagcgtggtcgtcgctcttctcttcggcgtcggtagcggcgctctcacggcggctaccctctacttggtctggaccctcttctcggcccggtctgattatcatcgtgcttgtttggaggatgatgagagcgaccgagaac

SEQ ID NO: 9917 - DNA, 372 bp, Gossypium hirsutum
  Clone ID: LIB3135-008-Q1-K1-G2
cccacgcgtccgcccacgcgttcgacctcttgaaaccctagatctctaccaagattcacctcgtgtaatggagcaatagcctccgtagcgaaactagtacgtatgttgttgtttattactgtattcgaagccaccactctactttcccaattttttgacaactatttcggtgcaagaatgcttaccactcccatcaaacactgtgctaaagttaagcttatggaaaggaaattcaggaggcctccatcgctcactccctacttattttgcaggtacatttctaaattttgatgctgggttcggcacgccggaggtctcgaaagtacccattttaaataattggtctaagcattgctttgaaaattgaaaatt

SEQ ID NO: 9918 - DNA, 337 bp, Gossypium hirsutum
  Clone ID: LIB3135-008-Q1-K1-G3
tggatggttatgaacatacgactttatgcattaaatatgatatttaaagctacacaaatgtgcagtaattgtggtaaagctctctgaaacctactaagtatgaaggaccacgcacagattatgcacttgctgaatttgttaacactgaaagagggactaatgtgaagatagccactttggcatacaatgttgaaaagctaaatgcggataattatgatgagattgagcttgattaaaccaaagatatgtgggttgagttatatacaccttggcgtggccattgcaaaaaccttgctcctacctattaaaaagtagcaacggcatttaaatttgaaaa

SEQ ID NO: 9919 - DNA, 445 bp, Gossypium hirsutum
  Clone ID: LIB3135-008-Q1-K1-G4
cagtgcaaggcattatcctcaacactgcggcctaggccattccttgcacgatgaagatgttgttcagggggtcaagaaaaaggaaaaggaggaaggagggagaggccgcttcaaatcacatacgacaggtcctgcacgaatatccgatagagagaaaaaggctccattgaagacctaaccatgacaaaagatgtcggcaggaagtaagagttgcccttttttgttgtataagtaatattatcaactagtattgtctggctgatttattctgtttcccgtttcttacaacttccctcatttttcacttcttaattatattgccattaagtagctgtattttagtacgtacttggatgcaaattttggtcatttacactataaaccactattctgaaagaaaaaacatgggcagtcttcaaagacaagaacgcctagattgtatacc

SEQ ID NO: 9920 - DNA, 304 bp, Gossypium hirsutum
  Clone ID: LIB3135-008-Q1-K1-G5
cccacgcgtccgcccacgcgtccggccaaacttctagttctaaacgttcttcggaaagctcgtctggttcacgataatcacctgccaacaatgaagaaaggtcttaactattcttgttctcgcaaatttcaataaattgagtgctaaactcatttttggatatgacagctctgctattatagacaacatagtgtctactgcttaaaacttatgtggtactggatcattctgggttgaacctttctttttatcctagtattaccaccaacggactatatacattccacaatcatcatctagaaac

SEQ ID NO: 9921 - DNA, 439 bp, Gossypium hirsutum
  Clone ID: LIB3135-008-Q1-K1-G6
ccaaatctttctacttcctttatgtttacccttatttcacttggatcatggggcccaaattgattaacctccattacacactctccaagtcccaaactatcaaatacaccgacccgctttccaatttaacctacactaatttgttcgaccaaatagttgactcgcatgttttctcacaaaaaagactcaactacccgcatattataatcttaatggcggaaacagcatgaccaaatccctgctaaatcaatacaaaactagccaacctttacaaaactcgttactcacaacctacactctctaaaatatttaacatttcacctttcaattatttctcctaaacaactcttataatatttacctactatcatataagctttatataaaataaactatatactattttctgacatctaatttttaactactatatcttttt

SEQ ID NO: 9922 - DNA, 318 bp, Gossypium hirsutum
  Clone ID: LIB3135-008-Q1-K1-G7
ggtaattttatatttaggttgaatttttaccatttagtcgtacttttttacattggggagagaaattccaaagaatggagaagcagtgtggacgtgggcggttaatgaatttaacccgccttaggattgatttacttgtactgtgaggtaagttcagtgtcattatgtagtaaatttgttgaaatttgaagggcaatgaaaagagtcaagttggatgttgtaaaaaaaaaaaaaaaaaaaaaaaattttaactaactaaaataaaaaaaatacaatgaaaatttatttataaaaattagaaaaaagaatatgaatgag

SEQ ID NO: 9923 - DNA, 361 bp, Gossypium hirsutum
  Clone ID: LIB3135-008-Q1-K1-G9
atgccaaacaaatttctagggctgttatattctacatttaaaagatactcaacaaatgatgctcatgctgctttttatcactctttaacttctcttgcaaaatataacattccatccctcctatgcaactcatttactctatcggacattgccttcataccattcttcttatatttccacaccttcttatcatatacgatcaatcattacacaactacttccaaacctaaattttcctttttgattgatgcttctgacaacatcaattcctataaactgtcttcgaaaagttatccaaaacaattacctgcaaatttcattaaattatattctcaatcttataattctaatttttattttt

SEQ ID NO: 9924 - DNA, 436 bp, Gossypium hirsutum
  unsure (1)..(436): unsure at all n locations; Clone ID: LIB3135-008-Q1-K1-H1
cccacgcgtncgcccacgcgtccgctacggcagaattctggtgcaataggttctggtgaaacggtagaagaagcagccatcacaacagcctataaagttgctgaagctgaaaataaatcgtttttagccgctgaggccgtgaaggaggcagaaagagtctccaaaatggctgaagataccgattcaatgcttcagctagtgaaagaaatctatgaacaatgttcacgaggggaaactgttattttggtttgagtctttagctgcctangatgtaagtgatagttgtctttttctttataaattttggaatctgtgtatgtatgtgaattgtgaatccattgatcttgttcaatgaatcaatgcatgggcactgaaatgcattatgaccattcaagatccatgatgaatcatgtaggtagtatattacaaggtatta

SEQ ID NO: 9925 - DNA, 65 bp, Gossypium hirsutum
  Clone ID: LIB3135-008-Q1-K1-H12
attataaattagattttattaaaaaaaaaaaaaaaaaaagaaaaagagaaaaggtcagacggtct

SEQ ID NO: 9926 - DNA, 333 bp, Gossypium hirsutum
  Clone ID: LIB3135-008-Q1-K1-H2
ctcatatcttaagaaagttggttacaaccctgacaagatcccatttgtcccaatctctggggttgagggtgataacatgattgagaggtctaccaaccttgactggtacaagggtcccactctccttgaagctcttgaccaaatcaatgagcccaagaagccttcaaacaagccactccggctcccacttcaagatgtctacaagattggtggcattggaactgtccctgttggtcgggttgaaactggtgtccttaaacctggtatggtagtgacctttggcccctcttgtctgaccacttaaagtaaatctggtgagatgcaccatgaaac

SEQ ID NO: 9927 - DNA, 273 bp, Gossypium hirsutum
  unsure (1)..(273): unsure at all n locations; Clone ID: LIB3135-008-Q1-K1-H3
cggacgcgtncagccacgcggncacctgaaacacctaataatgttattaccattcctctgagcctattttgatctatgttttgactagtccttaaaacttaactggaacatgggacgccctaatcttatccattatggcctgaatagtgacatatctgggacataaaacataccattaatggtcacacacctctaaaaggaaccaaatgttgcctgttactactgagcgaggtactaagccattgatggcttgcttgagactggcaaaacccc

SEQ ID NO: 9928 - DNA, 398 bp, Gossypium hirsutum
  unsure (1)..(398): unsure at all n locations; Clone ID: LIB3135-008-Q1-K1-H6
gacagccctcccaactcacccaacactagtttaacaaatactacacctcctcgtggtccttgtgaagcacttcttgatccattaaacaacctaactgctataacacagaccttaggctgatcttaaacactttacagtaccaaatccaatgccgcgtggtgacaattgatcggtcaacataaactggcatctttattcacacttctatccaggattgagaactaagatcacaatattaaactgggatgaaaccgtcttccatgattgacttgatgctgtacagntcaataacgctacccccaggtttcaaaacatatacttcttacactgaacatgcttggacttgaatggcgttcacaatactatattcatgccaggtctttcccaatcaactatat

SEQ ID NO: 9929 - DNA, 294 bp, Gossypium hirsutum
  Clone ID: LIB3135-008-Q1-K1-H7
gctacctctttttccttgatcatttaaacttttatctacacaagctcgccgtcgatctcttgccagtctctaaccgacacttcttcataccaaacttctctccacttacttaaccaggatctcagtaatacactactattacaatttctgagctctctcaataaatattgtataccattaacataatatatgcttctgaacatcgacatcgacgatacttcactgaatcaaccatattacgattcaataacaacaccacagaagtctattaactaataactaatgtacaaaatt

SEQ ID NO: 9930 - DNA, 426 bp, Gossypium hirsutum
  unsure (1)..(426): unsure at all n locations; Clone ID: LIB3135-008-Q1-K1-H8
gaactatcaagtttaggaactataaatgtttaagctgttgattctaaaaccggggacaagggggaagaggctgtggaaacttcgaagaacaagaagaggaacaagaagaagaataagagtggaaggactgcacaagaggaggaagatttggataaaattcttgctgaacttggtgaggggcctgccgtaacaaaacccataacagcagcccctccccaggaggagaaagcccaggttcagccagagccagagccagagccggagccagttatcgctgctgatgctacaggtgagaaagaaggtgaggatgaacctgcagagtctgctgcagcaaagaagaagaaaaaaaagaaggaaaaggaaaaggagaagaangcggctgcagctgcagcaacggttaaggaagaagaaacgaaaacagagacc

SEQ ID NO: 9931 - DNA, 345 bp, Gossypium hirsutum
  Clone ID: LIB3135-008-Q1-K1-H9
cccaatacatttcaaacatcttctttaagagaccatactaatacaataataaggaggggatgctattctgttttatccgcccctaaataacgataaaaaaaaaaaaaactaattacgcacattacaaatatatcagcaatctaatagtattctgaaaacttgcttacgctgcattttcagctcgcatagtttacagtgtgtatcgcactttttaacggcctactcgtctttgattaatgaaaatgttcctacaaaaaataatatatgccgttttactaaaacatacaatacacactcttttttcccaaagcataataaacacatttttttacggtggtccttttt

SEQ ID NO: 9932 - DNA, 401 bp, Gossypium hirsutum
  Clone ID: LIB3135-009-Q1-K1-A1
acgcacacacttgctaatattgctacttggagtggtggctctcgccactccctcttttggtaccgatgagtctcccaactatgggaagccccctactcctgtttataaacctcctaaggtgaaacccccaccttatgaacatcctgtttataaacctcctaaggtgaaacccccaccttatgaacataagccccctgtctatgaaccaccaaagaaggaaaagcctgagcctaagccaccactttatacacctccaaagaaagagaagcctgaacccaaaccaccagtatatgaacctccaaagaaagaaaagcctgaccctaacccaccatttatacaccaccaaaaaaagagaagcctgagcccaaaccaccattttatgaacccccaaagaaggaaaa

SEQ ID NO: 9933 - DNA, 317 bp, Gossypium hirsutum
  Clone ID: LIB3135-009-Q1-K1-A11
ccaccaatttatacaccacctaataattataatcctgaccccaaaccaccagtgtaataacccccaaataaagaaaatcctcaacctaaaccaccatttttttctccaccaaagaaagaaaaaccccaaccccaaccaccattctattgtccacctaataaatttaaaccaccctcttattatccatctaaaaaaccacccagtttttaaccctatccacccaaaccaacctcttacaacccaacaaaaaaaaaaaaaacccaacctaaaccaccatttcattaatctcccaaaaaaacacctcattttcactattc

SEQ ID NO: 9934 - DNA, 346 bp, Gossypium hirsutum
  Clone ID: LIB3135-009-Q1-K1-A2
ctcgaggatgggaggacgcttgcggattatagcatccaaaaggagtcaaccctgcacttgggtctgcgccttcgaggagggatgcagatattcgttaagaccttgactggtaaaaccataacactggaggtcgagagctcggacaccattgacaatgttaaagcgaagattcaggacaaggagggaattcctccagaccagcagaggttgatttttgctggaaagcagcttgaggatgggaggacactcgcggactataacatccaaaaggagtccaccctgcacttggttttgcgacttcgaggagggatgcagatatttgttaagaccttgactggtaaaacca

SEQ ID NO: 9935 - DNA, 356 bp, Gossypium hirsutum
  Clone ID: LIB3135-009-Q1-K1-A3
cccacgcgtccgatcactttcaaaagcaggtatgggaagaaaagcctggagatgaaaagaggtatgtagcaacaacaaatggtgatttgatcaaagaagccaatccaattcctcactcgaacggccttctttcagaagatggttcacgataccctaaacagtgaagaactttttatcaaacggttgctaacattttctatggatccccttagggatgtgtttgtggtcttgtaaaatataatgaatgcttggtggctatttactggctttagaattctattatacattttacagtaccattggaaccatcttaaggggattaaaaatgaataatccaaggcggggttggtttgggg

SEQ ID NO: 9936 - DNA, 432 bp, Gossypium hirsutum
  Clone ID: LIB3135-009-Q1-K1-A4
cggggcgacgacgcgtccgcccacgcgttcggtcggtaccattgtccattgtagttatgtgcatgatggaaaagctaaaagggcgaatgaagtagtggaagcagtaaaccctgataagaatttggtcactttcagagtgatcgaatgagatctaatggaagagtataagagctttgttatcacgattcatgtttcgcccaagagcgagggtagtggcagcttaatgcactggactttggaatacgagaagctgcacgatgggattgctcatcccgagactctgctgcaattcgttcaagatgtctttaaagacattgacgcccaccttacccaagcaagctaaacagttttacatgttgctattgtaaccgttactttaagcactattcatctatttaatgaataaagtgacaacttcctttttcatgattt

SEQ ID NO: 9937 - DNA, 358 bp, Gossypium hirsutum
  Clone ID: LIB3135-009-Q1-K1-A5
acgcctggtatatactgaaccataaactccagatactacaacatatcagtcgaaaataagcatgctttcctatacctaacacccccacttaatcaaaagatctacccactattttcttcataccattcttataaaaaccacttataattcctaacaaccctttatattttgactttaataatagcttcaatatcgtttcaagacatcctccatactgacatttgaattctatacctaatatgaaacttccataatttagtatagaaattgtctcctcggtctgtaacattaatccattaggaacaatgttaaactgctatcatacattataatcactccttacagagaactcccctgt

SEQ ID NO: 9938 - DNA, 162 bp, Gossypium hirsutum
  Clone ID: LIB3135-009-Q1-K1-A6
cgcgtccggcttgttactactcaaccatatgatctcagatgctacaacagaataccctcacttaggcatgggtttctctagcagagacccatacattctttaaaaatttgcctgctatactcttcatcacatccgcatctaggacactcacaatttctaaca

SEQ ID NO: 9939 - DNA, 104 bp, Gossypium hirsutum
  Clone ID: LIB3135-009-Q1-K1-A9
cccacgcgtccgaatctttgttctcacctatctatgaacgaggagaatctacgaggatacgggggcaacccacgtaaaaaaaaaaaaaaaaaatatatattatt

SEQ ID NO: 9940 - DNA, 432 bp, Gossypium hirsutum
  Clone ID: LIB3135-009-Q1-K1-B1
ctctattctctttggcttatctatcgctttgatttcgcatccttgctgtgcactcgatggcgaatggatggttgaggcctgaggtgtatccgctgtttgcggccgtaagtgttgctgtcggaatctgcgggtttcagttggtgcgcaatatctgcatcaaccctgaagtcagggtaaccaaggagaacagggctgctggggttttggacaactttgctgagggagaaaaatattctgaacatttcttgagaaaatatgtccgcaacaagacgccagaaatcatgcccagtatcaacagcttcttcactgacccaaagtgaggcttcactcttgctttatgctgaaactaaaaaataaaaaaaatagaaaaactaagtcttattcaatcaataccaagttatgccctttctttctgctgactgtgatgcaaat

SEQ ID NO: 9941 - DNA, 384 bp, Gossypium hirsutum
  Clone ID: LIB3135-009-Q1-K1-B10
cgcatacgtacgcgtaaagcttcacatgacctatgacattttattgtatctccatgtatatggacctcgtattaagcctcccattatatgttcaatctgtcttgaatcttggggccttgcaagatcacgagcgtacagtatttttacttctttgcaaccaaaacatgccttttatcctaatacttttaaatttatcgattgcaatactctttattctttttatttttcctcttgactatatccatttaacaaatctcccataatcaatccaaagttcccttatattgttcaccttataattcacatctatgattaaaaaaatcttcgaaaatttaaaaacctttagcctacaccactgtaactagatgaagatcttgaaccttt

SEQ ID NO: 9942 - DNA, 351 bp, Gossypium hirsutum
  Clone ID: LIB3135-009-Q1-K1-B11
gtaaaataggaatataaaaactgctcttcaatcataaatagaaaacatctaaccttcgtaacagggtcacttattaccttctattcttatcattctttaacatcacattaacatcttatttgtacatacacaaagatcattctaccccaatcctacaaccctcttctatctattatataccacgttaacccaccattatctggtgctttatcatcctgacttttttcaccacacttattaacctttaactcttttaccaacatcctaccttttttctttatccttccttatttaaataaatcatacccccttttttacctaaccacccttccttttttgcctctttccttg

SEQ ID NO: 9943 - DNA, 124 bp, Gossypium hirsutum
  Clone ID: LIB3135-009-Q1-K1-B12
attcacttaaaaaacccgaacttttctttttcctaaagcttaaacgaaaaaaacttgaatgaaattcttaaacatttcaatattacacatatccttttgtggggtgcccccctttttattttaa

SEQ ID NO: 9944 - DNA, 330 bp, Gossypium hirsutum
  Clone ID: LIB3135-009-Q1-K1-B2
ggaagcaacacttgccggtaacacccaagtatttagtgggttggtccaaggaagatagtgagagaggagaggccgcatttcatcttcatacttatgtgtgcatagtttaatgatattccagaactaaaaaaggaggaaaaaaaaaggagaaaatatgatatgctagtatgtagacagcattcctttgttttatctcttatttcatcatgtgtcagtattgacgttagattacattttatgcgggtgaaaatttttgatgtaaaatgccacgtacaagcatttagggtaaacgcttgtttcgtagatggttatttatataattgctgttta

SEQ ID NO: 9945 - DNA, 394 bp, Gossypium hirsutum
  unsure (1)..(394): unsure at all n locations; Clone ID: LIB3135-009-Q1-K1-B3
gcgtccgattcaaaacccttgggcttcacgacctggatcagggcactgctatattgtgctgtancacgaacagtcttatctggcgcaaatggatcctattctttttgaagctctatatgcatcccagcatgcaatatttttctttgccagggtgccacaaatttggaagaacttttctaacaaaagcactggggagctcactttcttaacatgcttaatgaatgttgctggctcgcttgtgagagtatttaccagcctccaggaaaaagcaccaacaatgggtatcctttttctattgtactcgcatattcttgaaagatttttatacacttaattaaaacattttcatgatttattgtttcttctaanaaaanaacaattaattttttttttt

SEQ ID NO: 9946 - DNA, 337 bp, Gossypium hirsutum
  Clone ID: LIB3135-009-Q1-K1-B4
aggcgtccgctgttggcgataatgttatcactgaagacgaaatcaaggctctcattaaagggagtgaaggggtggcaagcctgttgaagcttacctcttggctaatcccgaagcctgcaactaggatataagttgctttaaattcttatgcttgcttttaaagaggggtttgattttaatgttgtgcttttgatattttctttttcatcttaaaacctatattgtcttctggttgttcagtaagaatgatggtggtggtgatcgaactttgatcatctttgatatataatgaaataaataaatatataaactggcaaaaaaaaaatctttacccaat

SEQ ID NO: 9947 - DNA, 384 bp, Gossypium hirsutum
  Clone ID: LIB3135-009-Q1-K1-B5
acaaaacactccaaaatcctaacccttttatctaaggttgcaatcaacaaacctgcgaccggcgtaactccaccagatccggcgtctgacagtgcagaccatagcctatgcctaccaacgatggagaacttacagcctagacaactctgcaagataaagctctactctctctatctcattaaacaaatgtgaattgtttccttttactcgttttattttgtgcatgatataaatgacatagaacagaagcttaatcgaaagaaaaacgggattaaaatcaccttgaggagactttatcttttcaatgcttattttgaattgattctttttatttgtgtgaggatgttttcgtgttccacgattaccaataacatagggctttta

SEQ ID NO: 9948 - DNA, 326 bp, Gossypium hirsutum
  unsure (1)..(326): unsure at all n locations; Clone ID: LIB3135-009-Q1-K1-B6
cccacgcgtccgtccacgcgtacgcccacgcgtccgttgaagactactgatcagagtanggctcttggcttgatagtttgtaggggcacagcantcatgctggtgtcacctaccgatggcacagatgagattgccaatcctttcatccagccagatggagcctgatctgatccgtctttcaaaataggcatatggcatttcctttgctctactacttatattctcttaacatttcaagtctgtatttctatgagcatgttcgtatctctttgaaagctaccaaaaaccaaaccatcaaggcttaaatcttaatatcacttgaggtg

SEQ ID NO: 9949 - DNA, 308 bp, Gossypium hirsutum
  unsure (1)..(308): unsure at all n locations; Clone ID: LIB3135-009-Q1-K1-B7
cgcgtccaaaaaagtanctttctcactgatgttctttcttgttatgggcatacatcaaacgcaaggattgtatagctttgacagacttatccttcttttaccattacaacaaccacttttaataacttaatttgcaaaaccttctaaatgaccctttattctcctcatattatccattgcatgctttgacatatccttttccaaaaactattattaaatcacaaccattctttgtcataataccctcttctaaccgatagacccaacattgcctatctcatatttatgtataataaaccaactcgaat

SEQ ID NO: 9950 - DNA, 133 bp, Gossypium hirsutum
  Clone ID: LIB3135-009-Q1-K1-B8
ctaatatcttttagtcatcattatcatatattatatagcttcatatttctacctctagaaagaaaaaaacccaaaaaatcctactcttaacacattacaaacaactaccataaaaacataacacaaaataaaa

SEQ ID NO: 9951 - DNA, 198 bp, Gossypium hirsutum
  Clone ID: LIB3135-009-Q1-K1-C1
ctcactcgacctgttcctaactttaaagccttcaaagtgagcctctaacgcttttacaaaagatcgaattctcttttaaaagatcaacttccatttttctccttttttcactcaacattctctttcttttcttcaataattctcttgaatcttgctcttcacccatccataaaccaatatcaaacccaaaccccaaca

SEQ ID NO: 9952 - DNA, 97 bp, Gossypium hirsutum
  Clone ID: LIB3135-009-Q1-K1-C10
cccttaaaaatatttttaaaaaagcttataaacttaaattccatcctaattttttaatttaaaattcaaaataaatttaactaataaaatctatatt

SEQ ID NO: 9953 - DNA, 425 bp, Gossypium hirsutum
  Clone ID: LIB3135-009-Q1-K1-C11
gcggcttcgcgctcctgataaaatcctctgacgttccattcgtcgcataaatcccaacaaaaccgtgcgtggttcaatttatcttgctctattcactccttatgaaaacacttcatctccatatgataatacaaacatgaaggttattgcattaacgatcaagattttgatgcttctttaaagacacaattccttctctgtggggaattctttcctaccacttctttttaaaaaatctctaaacattaaagtggcccaaaagtataaggatgaaaccagctaaaagcctttatggaaaaaaaaaaaacccaattaacctttgccccaacccctaaaagatgcttaagaaaaaattgccgcccaaattccacttttaaatcctattgaaaatttattgaaagatttttaaaaccttctcgttaccc

SEQ ID NO: 9954 - DNA, 435 bp, Gossypium hirsutum
  Clone ID: LIB3135-009-Q1-K1-C12
tgaataacccacccgtcgcgcgcatactttcatacaataataaacatcatactatcttctttttaactactattgttatgcgtggagatgattacttacttgaccagtgacctactgctttttattacacaatcccatgttcaagttcgctaaaatcgtttactgacataccctcattcagcaaattaaatcttactaattccccctaataatatataataaacaaaactttaacctttaattccatacttaattttaatctcaaaatccattactaaacaaatttataaaaactttcttaaaatttttagcatcaaaaaaaaaaaaaaagaccgtcccttttaatgatccaaacttaaataccccttcattccacatcataactcttttataatttcacctaaattcaattctccgtcctataatttacaacct

SEQ ID NO: 9955 - DNA, 201 bp, Gossypium hirsutum
  unsure (1)..(201): unsure at all n locations; Clone ID: LIB3135-009-Q1-K1-C2
naaaaaaaaaaaaaaaaaaaaaacaaaaaattaaaaaaaaaaaaaaaacaattaaaacaaaagaaaggaaaaaagggcaccctatctaaaaaacccaancttactttatctgacataacaatttttacctctcttataacgtcatctactttcattacactgacctatcttttacaacatctccaccgataaaacccttcc

SEQ ID NO: 9956 - DNA, 375 bp, Gossypium hirsutum
  unsure (1)..(375): unsure at all n locations; Clone ID: LIB3135-009-Q1-K1-C3
cgtccggaatatttttgtatattcaataacagggccaaaaatatgtatgtaaaattttacatcaagganaggacgtttacccactcaaatgaatttttttcgaaaatttttctgggtaaaactgctgtttgtaatttaaaaaatagagatcagtttataaatcaaccaagaacacccaaaacgcccaaaatctgataccaaatgatacggggttgcgcgcggaccaagatcgagttgccaagtcacgagaaacttctacgaaaaccctaaacaattagatctgaaacgaaacagaaaattaaaagattagatttttgaattttcagatctgaaataaaatccccacatcagcaaagaatcaaattgagaatataa

SEQ ID NO: 9957 - DNA, 232 bp, Gossypium hirsutum
  Clone ID: LIB3135-009-Q1-K1-C4
cccacgcatacctgttcagtgatctctactctatattgattgtgtctactcacactctttgcgctgataacacattaccttgacttcactgattgtttacctactttaaacacgaatattttcaccacaaaatctttctacatacctccctttgcacaaatatcttactttctatcacacatcatatacggccttataccaaagtgccctattacgactgcaatataatcta

SEQ ID NO: 9958 - DNA, 159 bp, Gossypium hirsutum
  Clone ID: LIB3135-009-Q1-K1-C5
catttatctattaaacactactgcttgctcatactgctatgacagtcttttcacaggtgggggtggatctcacttctggcccggcaattgacatcaacgacattcctttcttcaccatgacttttctttctgcctcttcttatgtttacgaaatcctac

SEQ ID NO: 9959 - DNA, 409 bp, Gossypium hirsutum
  unsure (1)..(409): unsure at all n locations; Clone ID: LIB3135-009-Q1-K1-C6
gattgctcttggaacatttaccagccaaccaaaaatggttctccaaaacgatatccgttgggggaatcctccagcagagcttgagaagaanaatcacaaactcaaacgtcttgtccagtctccaaattctttcttcatggatgtcaaatgccaaggctgattcaacataacaatagagtttagccactctcaaacagaggtggtatgtggtaattgtcagactgttctttgtcaaccaacaggaggaagagctagactcaccgagggatgctctttcaggaagaagggcgattgatctcatattttgctattttatgattcacaaaaacagaagaaagtaatctttggatcaaatatgggaatcatatgagtaatctttttcatgtgtttaactatgacatatttttga

SEQ ID NO: 9960 - DNA, 323 bp, Gossypium hirsutum
  Clone ID: LIB3135-009-Q1-K1-C8
attaatattattgcactgatcttacccagcagcacaaatctaatgggagagcaccacatttgccacaggctagcgaaaatgaatcccatcctctcattagcgtggataatgcaagtggtatgtttattgattgtgtatgtcctaaagaccctctctggaatactaacaaagacctgcatgcataaaatcttcaagatgttatattcatttgtcggacatgaaaaattacaaatgaaaagtgttccacccatggaaaatggtggttgtaaaggtgactcatatgttgcacatgcagcacagcaacaatagtcttgttatgtagg

SEQ ID NO: 9961 - DNA, 216 bp, Gossypium hirsutum
  Clone ID: LIB3135-009-Q1-K1-C9
aattttgaatcgacccacgcgtgcgtcgtccttcttcatctaacatcctttcacctaccattcttagcactaatccacacaataccgagcgtgctgcacactctcttgctcaattcaaagcttataagttgattccaactccatatcatattacaaagaacatggtaattccttatgctctcacagctctgaggctacagaaatgacacaaatact

SEQ ID NO: 9962 - DNA, 406 bp, Gossypium hirsutum
  Clone ID: LIB3135-009-Q1-K1-D1
cgaattctcaagcattggttgaaggcaggcaatccacatcctttctacaaccctataaatggttacgtaatattaccaacggcatttgaaatggaaagcctccatgagaaaggcatgcaagttacatcgctcaaagaggaatgggaaatcattacagaagatcaaggcaatcaagacgctaataaaaactcacttgttagctccatatctgtttctcaagggccaagtaagcaatcctcaaggtctgaagctcatgcaactgtcattgttcatccacaaaacgagggtaaacaacatgtcgagctaaatgccataagtgtatccattgatacttagagttgaattgtttataaactcaatgaaacctagcaaagcactcgtgtgtataaagctatctgtatattaa

SEQ ID NO: 9963 - DNA, 405 bp, Gossypium hirsutum
  Clone ID: LIB3135-009-Q1-K1-D10
tggatctacccacgcgtccgaacataccgcctattaattgaccttttttcttttcattttattaataagtctcattattttgtctcaagaacttattaaaaaaaagaatggccttcttctctttctattacattttttcaatccatttcccttctaattttctctctttcttctacatattaattcccatttccttaaactttctttaccttttttctttttcttagacctcaattgtggattacattttacctttccaactcccctccctttcacttcatcaagctacaattattcttatgcttcttctttctgcatccattttatattcgaaagtttccccacaacccaaagcgaaataccttctttaaccttatcataaaccggcacttttgttaattaacc

SEQ ID NO: 9964 - DNA, 166 bp, Gossypium hirsutum
  Clone ID: LIB3135-009-Q1-K1-D11
tacctaaccaaccaatttatactccatcatacaaataaaatccacagcccataccaccggtgtagggcccacccaagatcgtcaatccaccgacttataaccctcatatcaatccacccacctatcatcctattccaccatacacagctttttacactccaccata

SEQ ID NO: 9965 - DNA, 341 bp, Gossypium hirsutum
  Clone ID: LIB3135-009-Q1-K1-D12
gcgaaaaaatcccctatgaatgcatctttcttatattcattctattaatacgtttcattattttgtatcgtgaaataaataaaaaaaagaattgcattcttttgttgctaatccattttttttattgatttagcctttatcttaccctctttcctatccaaaataatttcacttttgttagaacttccttggtttttttcttttctttcgacttcaattggggttgacatttttctttttccaattccggccctttcgcttcaacaaactccaattattcttatgcttattctttccgcattaattttatattggaaaattggccaacaacccaaagccaa

SEQ ID NO: 9966 - DNA, 351 bp, Gossypium hirsutum
  Clone ID: LIB3135-009-Q1-K1-D2
cggacgcgtgggtttattcatattattgcactgttgagagccagcagcagaaggctagtggagtagcaccacacttgccacaggttaaggaaagtgaatcccatcctctgattagcgtggataatggaagtgggatgttgagtgatggtgtaggtcctaaagcccctgtatggaatacgaacaaggacctgcatgcataaaatcttcaagatgttatattcatttgtcggagatgaaaaattagaaatgaaaagtgttccagcgatggaaaatggtggtgggtaaggtgactcatatgttgcacaggcagcacagcaacaatagtcgtgttatgtggatgttcataactgt

SEQ ID NO: 9967 - DNA, 377 bp, Gossypium hirsutum
  Clone ID: LIB3135-009-Q1-K1-D3
gaacgacaaatgttaaagaaagaaagaaatcttgtctcttgtgacagaagagataaaagcgggtgcgtcaaacatttaccatggcgatgacatatgccactagaaatccaagtttttgttggaagaagtaccgcatgccaagggggcttttgccacttatagacatcgaagaatgtgggtacgtgaaggacacaggtttcgtgtggctcaaacaaaagaagagcatcacccacaagttcgaaaagatagggaagctggtttcctatgcaactgaagtcacggctgtcgttgagaaaggcaagatcaagaagctgactgtggtgaagaccaaagagcttttggtttggatcacactgagtgatatccaagtggatgat

SEQ ID NO: 9968 - DNA, 419 bp, Gossypium hirsutum
  Clone ID: LIB3135-009-Q1-K1-D4
gacggaggcgtccggaccttatgcatgctaatggtcatatgttcttggatacgtagagaaaccttcgcaccagggaggagatattccaataacatatgaccttatgcatgctaatggtgtctttagcttgtatcaagataagatatgcagggctatacaatatggctcgaaattcttaagtgatgggcagcctggcacagcacaaaatgttgacaaatcaaccagcttggcacggaaagttttccgcctttttaaggtatctcacaatgtcaaatactaaaagtaactagttagtttttttgaaaaaggatgaactttgttcacttaatagataattctcttttgttctaccattgaatgtacagcactctgagttagtatttaatacttggaataaagatgtatgctttccttttggt

SEQ ID NO: 9969 - DNA, 299 bp, Gossypium hirsutum
  Clone ID: LIB3135-009-Q1-K1-D6
aaagaagtgaaagggagttgccttcccaaagctaaacaaggtcctcaatgcagcagggcaggcaaattttcaccggatatagctataaacatcgactcgaacccctttttcatgaccagagtgaagaaggtggagctggctgacaatagaatcaccaatgatacgaacttgctgcagccaagaggtcattatagtggaataggtgttggtgcaagtgctgcggcaacaggccctgctcaacggaaggcgggaacggttcaatatggcatgacaaggatgtattaatgaaagattaaggg

SEQ ID NO: 9970 - DNA, 236 bp, Gossypium hirsutum
  Clone ID: LIB3135-009-Q1-K1-D7
acgtccacacattcgatcgtgcattgtttccatacgctgactattctatataaccaacggtccgtttctttataaaccacaacaaggactatctcttaacaatagcttatcctataccacatctcaacaattctttcaaatacctcaagttaatagatacattgatattaatctcacacctatatcaatttgggaggatcatttacagatcactattcaaatgatgtttatgacag

SEQ ID NO: 9971 - DNA, 340 bp, Gossypium hirsutum
  Clone ID: LIB3135-009-Q1-K1-D8
aagaattttatgttgaattcaatggaccaaaagatagtccttatcatggtcgtggggggagtataatgttggaacttccagatgcttatccttataaatctccatcaattggctttataaacaagatctaccacccaaatgttgatgaaatgtctggttcagtttgtttggatgtcattaatcaaacttggagccccatgtttgatttggtgaatgtgtttgaagcgttccttcctcaacttcttttatatcccaatccatcagatccattgaatggagaagctgctgcacttatgatgcgtgatcgtacatcttatgaacaaagagtttaagagtattg

SEQ ID NO: 9972 - DNA, 327 bp, Gossypium hirsutum
  Clone ID: LIB3135-009-Q1-K1-D9
ctaaaaactattaatgcctgcaatattgcaaccaaagaatcggtaaattaaagacgagcaagcctgacttctatgacttcctgaccaaatacagggcttacttaatcctatccccttcttcctcttcatccgtcttcagcgtaatcacccaagttataaataatgacacggataaccacaatgaaagcatttgatgcaatagttctccttatttcagaagaaaaccctaactagtcacatttcacacccttccttttttttttctctcttcctgcccggaccattagctaggattctgactagccaatcagtgcaacatctccctag

SEQ ID NO: 9973 - DNA, 386 bp, Gossypium hirsutum
  Clone ID: LIB3135-009-Q1-K1-E1
atgaacttctaaaaatggaacgtcctggtccagaaaacaaagatgctagtgatacagagggggatgatgatgatgaagatgaagacgaggacaatgcagatgatcaagatgatgatggaggtgatgaggatttttcaggtgaagaaggtgaagaaggagatcctgaggatgaccctgaagccaatggagatggtgggagtgacgaagaagatgacgatgacgatgatgatgatggggacgaagatgatgatgacgacgatgatggtgaggatgaagaagaggaggacgaagaagatgaggatgatgaggttcctcagccaccttctaagaagaggaaataaatctagtcataggtcttaagatattctactaatttctgctttttt

SEQ ID NO: 9974 - DNA, 126 bp, Gossypium hirsutum
  Clone ID: LIB3135-009-Q1-K1-E10
acccatacgcttattttaactgatagcttcactctacttaccttgtcatcattcttcttcaatggcccattgtccatttatcttatagactcaatgagtctaagcaatcataataaaaaccatcta

SEQ ID NO: 9975 - DNA, 436 bp, Gossypium hirsutum
  Clone ID: LIB3135-009-Q1-K1-E11
gcgccaaaccccattttatgacatatacaaagctatgaaatcttgcatcaccataacgatactgctggatgagcgtttatgattgccgatatatgctccttgacactatatattaccttttgactttttcacgagtcgacaaatactgactcctatatactgcactctattcttactataaccaccctaataactactctgtccaaccaatctaagttgatattatccttataaatcctttaaacattatggtccaattgattcaattccttttccttccaaacccttttttaacccaggtaatcatttcaaggtttttttgatccttataaaataaaaaaccttacaaacacagtctttactcccaaaaaatgtttaaaaaacttaagatccttgaacctgaacaaataacacccccttttataataattcaccc

SEQ ID NO: 9976 - DNA, 275 bp, Gossypium hirsutum
  Clone ID: LIB3135-009-Q1-K1-E2
ggaagatcaactttcacaccttcaactacattatttacagacaaatattttctgaaattcagtgggttgcaaatgcatgtatatttcgtgttattctacaagtataaattttttttaatcactcaaactataaaaatatattaattagtgttcacacttcacaagctttgaataagataatatttataacaatgtttaatcgcttcttttataaaaaaaaaaaataataactatcccacgatattcatgcttaaacaaaaaaatttctagaataa

SEQ ID NO: 9977 - DNA, 323 bp, Gossypium hirsutum
  Clone ID: LIB3135-009-Q1-K1-E3
gtgaatacttgaagatataaaaatatgactttttcacatacgttaaaaaacacataaaagggcctgaatcatactcatgtcacacgtgcaattccatttaacagtctttgccccaccattacctgattgctccaagcaagttggctccatctagctttgcaccttctaagtgcgtattacgaagattaacatgtcgtaaataagccctttggaggtttgcacccttcaaattcgcattgcttaatttcgcacccttcaaattggctccttcaagattagctccctctaagttggcatcagtaagatcagcactctgtaagtgt

SEQ ID NO: 9978 - DNA, 411 bp, Gossypium hirsutum
  unsure (1)..(411): unsure at all n locations; Clone ID: LIB3135-009-Q1-K1-E4
gacatatttcaactgccgatctatccccatattcggcaaatgaacatcgcatgaaagccggattgggccttgttagaccacgagttcactcanaacctttaagatcctcgcttaagctctgattacaacgaagcaagcaaggacatgaaggagccagcattaaggtactaacggagccagctagaggtggtgacgcacgtctgatgatgcatgaagacacatgtggggcttgtactgaggcagcagcggtttgttggaagctgctggaaccagatacgacgcaatggaaggcaccttagggttcaaaagtttcaatttgcttgggccatttgggctaatttcgaaattgagccattgggtctataaattaaatttagctggggtaataattggacctaaaaacttgaattt

SEQ ID NO: 9979 - DNA, 374 bp, Gossypium hirsutum
  Clone ID: LIB3135-009-Q1-K1-E5
aaatgtaacgtcctggtcttgaatacaaagatgctagttatacataggagcaagatgattatgaagatgaagaccacgaccatgcatatcatcattattctcatggacgctatgatgattcttcaggtgaacaacgtgaagaacgagatccttaggatgaccctgaagccaatggagatggtgggagtgaccaacaagatgacgatgacgatgatgatgatggggacgaagatgatgatgaccaccatgattgtcgatgatgaagaagaggacgacgaataagattaggatgatgaggttcctcatccaccttctaacaagaggaaaataatctagtcatacgtcttaagatattctactattttcctgctttt

SEQ ID NO: 9980 - DNA, 261 bp, Gossypium hirsutum
  unsure (1)..(261): unsure at all n locations; Clone ID: LIB3135-009-Q1-K1-E6
cgcgtacgttactttcgaaaggttaatcacgctttttttattagagnatcctttgaaatattgggggggttcataatagatggagtcgaaagttaaaactaaagaacattttaatttttcatcacttttaaaaaaattgatgtatattcgattgtctatatgtatatatttctattctcaatcgccctcttttacaagtaaaaatcaaagtctttatagccaaaataatagcagtttcctgctgtttctcttgcttatact

SEQ ID NO: 9981 - DNA, 336 bp, Gossypium hirsutum
  Clone ID: LIB3135-009-Q1-K1-E8
gttgctggacagacctctgcacaaatatttcgagcagaatgactgcttgaattatgtcttgtgtttccgctggattctgatacagtttaaaagggaacttgaatacgagcaaacaatgcgattgtgggaagtattgtggacgcattatttgtcggagcacctccaactgtatgtgtgcgtagctatcttgaagcgctatcgagggaagataatgggagagcaaatggactttgataccctcttgaagttcatcaatgagctgagtgggcagattgagcttgatgcgatcctcatggatgcggaagctttatgtttatgtgcgggaggatatggagc

SEQ ID NO: 9982 - DNA, 437 bp, Gossypium hirsutum
  Clone ID: LIB3135-009-Q1-K1-E9
tcatgtggaggttaatttctatattcgtggaccccatgcagccgccaaagcatgtgcagaggggctcaaagacaaagcatacaacacatgtaattatacgtacttgatacttcacatcaattacccttcacgggcagaactaatgctttagtcttatttaccggcagctgagatgaggtcttacacaaactaacatgtgattgaacaatttcctggatgttgtactttgtttgagtcccctcatttatcataagcaccattaattgcccctctactttaagatgccaaaaaacaagcctttggtgactttatagatttaggaagtaaattgcctgcccattcaactaattaataatggatttaagttttcgttattcattttaacttaacccctcatttactagcgatacatcttattgattgattctatacaattt

SEQ ID NO: 9983 - DNA, 404 bp, Gossypium hirsutum
  unsure (1)..(404): unsure at all n locations; Clone ID: LIB3135-009-Q1-K1-F1
ccggaancccggccgaccgacgcgtccgcccacgcgtccgggtatttctgggggtcatattaacccagcagtgacatttgggctgttgggggcgcgtaaggtctcattgatccgagccattgcatacatgctggctcagtcattgggagccatatgtggggttgggctggttaaggcattccaatcagcatactacaacaggtatggaggtggatccaacactctagcatatggttacagcacatgcactggtttgggtgcagaaattattggaacctttgtgttggtttacactgttttctctgctactgatcctaagaggaaggctagagactcccatgtccctgtattggctcccctccccattggatttgctgtattcatggttcacttggctaccatcc

SEQ ID NO: 9984 - DNA, 363 bp, Gossypium hirsutum
  Clone ID: LIB3135-009-Q1-K1-F11
ttcatcatcaccagtctacaaacctttctcatttcagttctcgcctttcgaatcttcattaggggcctgtactcttttaattagagtaggcctcccaatacatcataccgtaccgccctgccttattcccgattctttttattatcccaactgttgtcatattcaccaaggttaaaccttccagaaaaaaccttcaatttggaaggccatccctcccgttaacctaaccttccccaaaaccaccccagttaaccaattaaatattcctaggccccttaaaaaaccacttttaaagaacctcgccaaattacccccttaccttcggaaaaagggttcctttctatttttttattaagaaaaccg

SEQ ID NO: 9985 - DNA, 408 bp, Gossypium hirsutum
  unsure (1)..(408): unsure at all n locations; Clone ID: LIB3135-009-Q1-K1-F12
gcgcgcacgcgtncgagaagatgacctgacattctcaagccatggctgtcatacaccgaccccggtgtcccgaataacatgctcaccgccactgatgttgtatacccacgtagcctgtggtttgaccctttttggtggagaaattgttcagccgaaaaaaacaaaggacctaattcccaaaaaatccacaattgcccgtttgctatttttgcaattaatggtgcattgttccaacataattacaaccttacctggcccattgacaacctattttcccaccttacccattcttgtcattccaacattttttcttctttcaaccccaattgagcattttgagggggaaccctaacacccaataaaaagtttgagaaacacttattgtcatcatacatacacctttttacc

SEQ ID NO: 9986 - DNA, 439 bp, Gossypium hirsutum
  unsure (1)..(439): unsure at all n locations; Clone ID: LIB3135-009-Q1-K1-F2
cttgagttccatnnaggatggccagcgcatgcctgtaaattctcaaaanctttgtttgaaatccatggggagcgtcgaattcataccaaccaaggctacactcagtgcttttcctttctgtggggacctatgtagaagattantgacattcaatgtgcccattccgtgcgctccaagcattatgggtgcaagggttgatgcagttaccccaagcagaagaagggagaaacctgtgtcactgccatccacgatgatgaaggagcccaagccttcagcgagaaacgtggccataacttggttattacagccaattggagtgatgtaagtgtttatgattacgattgccttgttgtgccgggtgggaggtccccagagttgctggtaatgaacgacaaagcagtcactctagtgaaggatttcgctgagagaaacagggtca

SEQ ID NO: 9987 - DNA, 261 bp, Gossypium hirsutum
  Clone ID: LIB3135-009-Q1-K1-F3
atatctcgagcgaacatcctttttttttactttattttacacaaaacactttatctttttaggcagatttatttattcattctcacctcacttctttacatttttttttattaacttattaaaaatatctttaataacattttctataacaatcccaaccaaacatcttcttttttttttttacaacaaccacaactctatcaatttcaactctttactcaacccatttaaatactaaacatttttcccaacacaacaacc

SEQ ID NO: 9988 - DNA, 441 bp, Gossypium hirsutum
  Clone ID: LIB3135-009-Q1-K1-F4
cgtccggcagtccctatgcttcttgggttaggtgttctgctactctgccttgcaaaggtttcatctgatctgaaggcagaagaagttataaccaatgtgggttctttggttaccagaggcggaaacagaagactgatgctagagattgattgtggaggattatgcaagaaaagatgcagtcaacactcgaggccaaacagatgcaacagggcgtgtgggacttgctgcttgaggtgcaagtgcgtgccaccggggacttcagggaacagggaggtctgcgggacctgctatactggcatgaccacccatggaaacgttgccaagtgcccttaacctttacgtcgcccaatatgtgttgcagccatcaaggggaaaaatgaaatgtttgtttgtgtaatatgtatgttgtagctcaaatgtctcacctactcctaaaattat

SEQ ID NO: 9989 - DNA, 344 bp, Gossypium hirsutum
  unsure (1)..(344): unsure at all n locations; Clone ID: LIB3135-009-Q1-K1-F5
acgcctcaaaatataatcttccaaggcctttgatctgcaccaaacagtaaatcctgttggggagattgtgatagaacattacttggcctgtacgcacagctcattttattggtctactcaaaatatgttcaacatctaagnggactgaaattcgcttatctgtttctctcggacttttttacatcatgctctgtactacttttattactatagcactcattctgtttaaagactttatcttaacctccaaataaaatgcaatacaccctaaactgttcacaaatcctaaaaggaatgctagaaactcccattttcctctataaactcccctacccattaaaatt

SEQ ID NO: 9990 - DNA, 440 bp, Gossypium hirsutum
  Clone ID: LIB3135-009-Q1-K1-F6
cacccaggaacgccggctgtgttctacgatcatattttctctcatcatccatctgggattgccaatcttatctctgtcagaaacagaaacggaatccattgccggagtttagttaaaatcgtcaaggcagagagggatgtgtatgcagccattattgatgaaaaggttgcgatgaagatcggaccacgttattatgagcctcctagtggttcccaaagatggtccttggcccttgaagggagggattacaaggtatgggaaacatcttaaatgtaaaaccattgatattatttatgtttccaaatgtgtatatcctatacggaagccaaccatcaagttgaagaatgtcgaaccagtagtgtttgttggggatagcaggaagggtgtaggccctcacttataatactatttggcagtgccatggttgtaccattttttac

SEQ ID NO: 9991 - DNA, 375 bp, Gossypium hirsutum
  unsure (1)..(375): unsure at all n locations; Clone ID: LIB3135-009-Q1-K1-F7
actgccagatgntanattacttgcagtcttgcatctatcttctaagtcaaaccanntaaggcaggaatttttgactgagatagggatgatttctggattgcaacaccctaatcttgtgaagctttatggctgttgtattgaaggaaatcaatcggtgctaatttatgagtacttggaaaacaacagtcttgctcgtgccctttttggtcgtgatgaacaacgtcttaacttgcattggtctacgagaaagaaaatatgcttgggaatagcaagaggccttgcttatcttcacgaggagtcaagactcaaaattgttcacagagatataaaggcgacaaatgttctgctcgataaggatctaaatgctaagatttc

SEQ ID NO: 9992 - DNA, 368 bp, Gossypium hirsutum
  unsure (1)..(368): unsure at all n locations; Clone ID: LIB3135-009-Q1-K1-F8
ntttttacaatttatccanctctcatcaattaacatcccaatttaaaccaatctgggtgagacttgtctatatatatccacatacccttcccctaattacatacctatcacataccaaacacttgacaatccacctcaatgcaaaccttatcacaatccaaactacaattctacacacaaacatcatatataactatgaacaatacctctatcctactatcaacttatcacacatctaactatcttatgtccataaaatcctgtcctttatgctttaacaacacaacactaattcatattgattaatcattattaattacacacgtacttacaacatccccactttttacaccatctcttaaacaatt

SEQ ID NO: 9993 - DNA, 414 bp, Gossypium hirsutum
  Clone ID: LIB3135-009-Q1-K1-F9
acccacgcgtgcgttcagcatcacgagtctacaaacctttctcatttcagttctcacctcatgaatcttcattaggggccggtagtcttttaattagagtaggcttctcgagacatcatatcgcaccgccctgccgtattcgcgagtctttttatactcccaactgctgtcatattcaccaaggttaaacctccaaaaaaaaaccttctatttggaaggccaaccctcccgttaacctacccgtccccaaacccaccccattttaaccaattaaatttacctacgccccttaaaaaaccatttccaaagaacctctccaaattacccccttaccctagtaaaaggggttctctcccatcttttgatttagaaagccgcacattccaagacctatccactttttattaaaaacac

SEQ ID NO: 9994 - DNA, 402 bp, Gossypium hirsutum
  Clone ID: LIB3135-009-Q1-K1-G1
gtactgccagatggtatagtacttgcagtcaagcaactatcttgtaagtcaaagcacgggagtcgggaatttgtgactgagatagagatgatttctggattgcaacaccctaatcttgtgaagctatatggctgttgtattgcaggaaatcaattgttgctaatctatgagtacttggaaaacaacagtcttgctcgtgccctttttgttcgtgatgaacaacgcgttaacttggattggtctacgagaaagaaaatatgcttgggaatagcaagaggccttgcttatcttcacgaggagtcaagactcaaaattgttcacagagatataaaggcgacaaatgtgctgctcgataaggatctaaatgctaagatttccgacttcggattacccaaccttgat

SEQ ID NO: 9995 - DNA, 216 bp, Gossypium hirsutum
  Clone ID: LIB3135-009-Q1-K1-G2
gcgacgcacgcgtccgtcttacttaagcatatcaataagcggtttaaaatatacttaccaagataaccctattggcggcaaactaacctagtaaaacccagcttaataatcgatcgccacacccttaccatttgaatctttatgaatcgtgcacagcgacaaaccaatcccaactactctataaattctcgccaaacaacatgttatctccttccc

SEQ ID NO: 9996 - DNA, 295 bp, Gossypium hirsutum
  Clone ID: LIB3135-009-Q1-K1-G3
ctcacgctttcgaagaaaactaacaccatttattatatacactccttttctttttcaagtcgtgtggtattttttggggagaaaaaaactttattattatttaacattgcgatattgtctccacccgacaatctgttggcagccgcttaccgaactccatcacctaatataacggcggatcctatggtgaaacagttactcgatactaactcctacgacatgtccatacccttcgaagaccatgttcaattcgcttattctcaccataacgataaaaagcttactccctacatca

SEQ ID NO: 9997 - DNA, 364 bp, Gossypium hirsutum
  Clone ID: LIB3135-009-Q1-K1-G4
gcgtccgcccacgccttcatgtctaccacacacttgctaatattgctacttggagtggtggctctcggcacgccctcttttggtacctataaatctcccaactattggaagccccctactcctgtttataaacctcctaaggtgaagcccccaccttatgaacataagccccctgtttatgaaccaccaaagaaggagaagcctgagcctatggctgccgccttccttggtgctagggttctgccctgttttcaaaccttgggccacttgggttaattgtgtattgggccactacatttgggctatagggactgttttgggcttttaataggacattaaataaatggacttttcttggactgtt

SEQ ID NO: 9998 - DNA, 195 bp, Gossypium hirsutum
  Clone ID: LIB3135-009-Q1-K1-G5
gtgaaagggaaaggatggcagcacaggttttccaacctgcttatctgatgccaactgtaaggatctatgaagctggactgaggtacattgtaattatcaacacctctacatgagaggaacgcaaaaatgtttgaagaagctagctcaccattgtacatagtctatccatacttgggacccagcggagatgatcaa

SEQ ID NO: 9999 - DNA, 277 bp, Gossypium hirsutum
  Clone ID: LIB3135-009-Q1-K1-G6
gacgcacgcgtccggtggacctcattcaacctccgagcccactgtccaccaaggccctcctacctctgcggcctgcaccaacggtgtttgcattagtgcaatctctcttgcccacactttcttcgctggcgtttcggcttaagaaagtgaagcgaagtccagcttcttcgggttctggatcatgattcttccgaatctatactttcatgctctcttttcttctttcgagtagcgacgacttctcttactctatattgatcactgcaccctacttttt

SEQ ID NO: 10000 - DNA, 265 bp, Gossypium hirsutum
  Clone ID: LIB3135-009-Q1-K1-G7
gcgtacgcccacccaatactaccactcatacgcttcgaattcttccaatccaaaaccagtaatcgtggagattacatactaacaacattctcaattctactatctaaccctgctatcttgtctccatcgctccacttccacgaaaacacattaaagaaatatgacaccttatatcacttcattactctatgctataccagccattgatacaaacaactcaaatcattccaaacactttgcagaccactctcacttttcttatact

SEQ ID NO: 10001 - DNA, 206 bp, Gossypium hirsutum
  unsure (1)..(206): unsure at all n locations; Clone ID: LIB3135-009-Q1-K1-G8
gcgtacgattactatntctaccacacacttcttaatattactactttcaatactcactctcggcacgccttctttttttacctcttactcacccctctcttctaacccccctactctcttttataaacctcctaataccaaacccccaccttattaacatacaccccctgtctataaaccaccaaataaacacaaacctcttccta

SEQ ID NO: 10002 - DNA, 309 bp, Gossypium hirsutum
  Clone ID: LIB3135-009-Q1-K1-G9
actccaaccgctatcctcattccacctaaaaagtacttactgtacaaaaactttctgatttcgaccgaataacgcatcgatggactgaatggtttacaataacacccggatgcgccgttttatctgccaacaattctatctaatttcttgctacgaaaaaattacctttccgaccattttcagtgactattgccctttcttttccttgacaaccctttctaccttccttgtccattccaaggttccaaccctttcttaatcttcatttttttttttccaacccttactaaaacattgtccacgcccttc

SEQ ID NO: 10003 - DNA, 425 bp, Gossypium hirsutum
  unsure (1)..(425): unsure at all n locations; Clone ID: LIB3135-009-Q1-K1-H1
cccacgcgtccgttcttgtgggggttcccaacaaagacgatgcattcaaaactcatccagggaagggactgaatgaaaggactctcaaaggtactttctttggcaactacaaacctcgaactgatattcctgctgtcgttgagagatacatgaacaaggaacttgaacttgacaagttcatcactcactcagttcccttctctgagattaacaaggcatttgagtacatgcttgctgacgaggacctgaggtgcatgattcgcatggatgcataaggattggctggccatggatgaagggctttttgtcaagtatatgtgcattttaagggaataaataatgtaatgtaatgctacatcgttttgctgcatttaatggcaaatttttatcttatcatacatttctttgnagaaaaaaataaatca

SEQ ID NO: 10004 - DNA, 391 bp, Gossypium hirsutum
  Clone ID: LIB3135-009-Q1-K1-H11
ggatcgcccatcctttgcttctacaaatctagttattgcatttcttattgataaggctatttaggcctatgctgtctctattgatttgcttaaactatatcacaaagacccttaatttctcattctccatacctatgtaaacatttacctacactcaaattaaaaataatgttttatataattcccgtccattattattatcctttccgttttattccacataaaacgtacttgttttcttttaataaccattaaagaaaaggatccacctgaaaattagcttaaaatttaaacccacaattttaacccatcaatttaaccctttaaccttcatttaataatttcttccaatattaggtttcctacatattaaaatttgatcaaagaaaac

SEQ ID NO: 10005 - DNA, 431 bp, Gossypium hirsutum
  Clone ID: LIB3135-009-Q1-K1-H2
tgaagatgtgaatcgccatgctggtgatctaggaaatgtcactgttggtgctgatggctgggcgagtttctctattgtcgacaaacagattcctctctccgggccacactccattattggaagagcggtcgttgtccatgctgatccggatgaccttggcaagggggggcacgagcttagcaaaagcaccggaaatgctggtggtagagtagcttgcggtattattggtctgcaagggtgaaattttggtcctggtgagcggaataatacattgagtggagatgcaatggcctaggagcaaactctgtatgtgaactaggaagtttgtgaataaaagtaaaagaacccttgttttgttttggttttcagacttaaaggagtgtggtctcttaacggatgctttagccatttatagtaagctgtcttttgct

SEQ ID NO: 10006 - DNA, 263 bp, Gossypium hirsutum
  Clone ID: LIB3135-009-Q1-K1-H3
cgcgtccggtgagaagcgggccactgaattggtgaaacaagatgagaaagttaccgtgaaacttgaaaagtcgggcattgaacaatccaaagctgtagactctgctgttttgggcaaatacaatctattttgtactttatataattgctttttgatttattgtcttgcatgaagtgatctactacaccttcaatggagagaatatttgctttttgattaaattgtaaagttgggatattgactaatcttaatttatcaaatta

SEQ ID NO: 10007 - DNA, 452 bp, Gossypium hirsutum
  Clone ID: LIB3135-009-Q1-K1-H4
aaaggagttaaaaatggcttgtcatatagtggtaaaaggtgagcttaagaatggttctgaggactgcgcttgcgagcttgacttattcgaattaccaaggtgctccggtaacgattaaaaaagattcattacccactccatttgcgcagaatatggtagtcgacggtctgtacggaggcctggtgtatgatgttgttagggtgaagtggattattctttggaccactgattgtaaggtggctactaagctcattccgaccgaaaaccatattgtttgggaggatatagtgagcatccttcagccctaccagagctctgacaacttgcccgtatcatgtgggggtgcattttccgcagaagctcatatccatgcaaatggagatggatctctaaacctgacagcacaaatcatgtggagcgggtgcgagtaaatcatatattgctccatgctt

SEQ ID NO: 10008 - DNA, 319 bp, Gossypium hirsutum
  Clone ID: LIB3135-009-Q1-K1-H5
cccaaaccatctacaaaggagggcgcattgtcatctttggtatcgtgcaccctgaggggtggaataattcctacatttcggacccattctccttcttggaactcgatatatagagcttcttataggacatgtcccattgacagctgaaagtatgtacgttacatcaatatacctatgtactctacatgcctattactattaaatatgtctagattaagatttgctgtctgactgaacacttgctgatattatattattcacgcctcattatattgcaaagagcactgctggtcggccttctcttaagattctagcttac

SEQ ID NO: 10009 - DNA, 360 bp, Gossypium hirsutum
  unsure (1)..(360): unsure at all n locations; Clone ID: LIB3135-009-Q1-K1-H6
cccacgcgtccgaaaaattagtgtggatgcttcccttgcaggagccatcatagggggagggggtgtgcactcgaaacagatatgtcntcaaacaggagcaaagctatctattcgggagcatgagtcacatccatcacttaggaacatcgagcttgaaggatcatttgagcaaattaaagaagcgagtgcaatggttagagaactaatcagcagcctaggtccggttccaggtcctgccaaaacacctggtgcgcatggtggtcaagggcatccaggaagcaactacaaaacgaagttgtgcgacaattntgcaaagggaagttgcacgtttggagaaagatgtcactttgcacatggtgc

SEQ ID NO: 10010 - DNA, 148 bp, Gossypium hirsutum
  Clone ID: LIB3135-009-Q1-K1-H7
atcaacttctaactttcaactgctcagacattccttttcgcttcgactattacctagtccatttcctttcacctacaatccttttcctatcaatttatcaaatctaaaccatctccatcttcatctacaaccacttctaaaaaacaaa

SEQ ID NO: 10011 - DNA, 391 bp, Gossypium hirsutum
  Clone ID: LIB3135-009-Q1-K1-H9
cccacccgtccgcgaataatatctaatgccctaacttatccattctagcctatggtcataatgcctacactttctgcttaagaactcttacaactcaccatctttctattaaatccaaaaaaaaaacaattactcatatatacatacttaaccttaacccacaaatttcttccaatacctttaaaactatttccgcttcctttcatttatacacagcatttggtttcctccaagaccacctttttatcctttctttaactttaacaatcccaaaacccccaaaaatccaattcataatttatatgacaaaaatgaattaaaaattaacctttctcataatccttaagtaaaaacttaactttaatacttcaaaaattccatttatattttt

SEQ ID NO: 10012 - DNA, 315 bp, Gossypium hirsutum
  Clone ID: LIB3135-010-Q1-K1-A1
gtcgacgacgcgtgcgcccacgcgttcgcggacgcgtgggacgaaacatttgctcgattgattaaggagaaagaacagagtggttctttacttaggagtgcactgtccaggaagatggtatctgaaaataagtccaaaactaacgagttgtttcaaactgctgagaatggtttgagagaggctggaattgacttcaaatttagtaatcttattggcgatggaaataaagctgaagatccgggctcataccaggatgaaatatacactcttgctggtgctttggagaatattgacaaaacatctcaacttgaaata

SEQ ID NO: 10013 - DNA, 361 bp, Gossypium hirsutum
  unsure (1)..(361): unsure at all n locations; Clone ID: LIB3135-010-Q1-K1-A11
attccaagacattttccattttttttttttgatcttaaaagggagannaacnagcgatagagttgtatataaatggctagaatcattctctaaaccataaccactaacatcattttcaaaatctcttaataaattataggcacttcttactgttaattctccttaatactctccccttcataccatgatgtcatccttaggctcttttgcaattaatatacataaaattttctcatatatcttctcagtaaaagtagctttcattaattcttttttccattctatgtttctttcttcaattacatctgcaactttatattcctgcaaatgcgataacctgatatacttcttaaaataaaat

SEQ ID NO: 10014 - DNA, 385 bp, Gossypium hirsutum
  Clone ID: LIB3135-010-Q1-K1-A2
cccacgcgtccgcccacgcgtccgggatctctccatgaagcacgagtatctcccagaagatgttcagaaaatgcagacaccatttacgagctatcttcaagatatgcttgctcttgtgaagaaggagagagcagagcgagaagcattgggagctttgcctctgtatcagcgaaccattccttaagggttttcatgccgtatctcatagtcattgctgttgaaatttgcgttcgattatctgtatgtgcgtatggtatttcgatagcggcagtggactgaatttttacaattcctggtttggttggtttacacagtcatctgtgtcagtttttgaactgaatcacttatttaggtttaagtctgttggcagtgtcccaataataaa

SEQ ID NO: 10015 - DNA, 366 bp, Gossypium hirsutum
  Clone ID: LIB3135-010-Q1-K1-A3
gacccacgcgtacggcacagaaattgcttgaactacacttggcttttggttttataaaatacttcatttgcatcagaggtaagctgcaaggcagccatgtttctttgattcaagaagggaaggacctggttaactatgcattgattaatgccgtggcgattcgtaaaatactgaaaaaatacgataaggttcatttctccaaacaagggcaagctttcaagtcacaagcacaaagtatgcacattgaaatccttcaatcgccgtggctatgcgagcttatggctttccatattaatttgagggaaaccaaggtgaaatcagggatgacccttgcatcgtttgaagaatgaacctaacatttaatga

SEQ ID NO: 10016 - DNA, 125 bp, Gossypium hirsutum
  Clone ID: LIB3135-010-Q1-K1-A5
cccacgcgttcgctgacgcgtgggacgaaacagttgctcgattgattaatgagaaagaacagagtggttgtgtacttaagagtgcactgtccaggaggatggtatctggaaataggtccaaaact

SEQ ID NO: 10017 - DNA, 405 bp, Gossypium hirsutum
  unsure (1)..(405): unsure at all n locations; Clone ID: LIB3135-010-Q1-K1-A6
cccacgcgtccggcggattatgagaggactatattcgaaagaataagaagtctggaaagtgcgtcaatattacaatcttccaccacaaacgcggccgggggagtatgaaaccattgtaagagcgcattttgatcaagcgctaagtgtcgatcatctccggtccgctatggacatggagtatcgagagatacttattttagagaaaaaggcgctcttacaagaaaggcttttttctaatttaatctcggaggataatctagagcgtattatggaactctctccatataataacatacgcaaggaggcgtatgaatttgtggagggggaagtagacactttagatcttcgatccgaagaacaaagaagagcgatggatgaacgactntcctcttttttgaggacaat

SEQ ID NO: 10018 - DNA, 447 bp, Gossypium hirsutum
  Clone ID: LIB3135-010-Q1-K1-A7
gcggcacagaaattgcttgaactacacttggcttttggttttagaaaatacttcatttggttcggaggtaagcggcaaggcagccatgttgctttgattcaagaagggaaggacctggttaactatgcattgattaatgccgtggcgattcgtaaaatactgaaaaaatacgataaggttcatttctccaaacaagggcaagctttcaagtcacaagcacaaagtatgcacattgaaatccttcaatcgccgtggctatgcgagcttatggctttccatattaatttgagggaaaccaaggtgaaatcagggatgacccttgcatcgtttgaaggatgttacctcacatttaatgatgggaaaccattcctttcttgtgaactctttgattctgtcaagcttgatattgacttgacttgttctatatgcttggacacagtatttgat

SEQ ID NO: 10019 - DNA, 317 bp, Gossypium hirsutum
  unsure (1)..(317): unsure at all n locations; Clone ID: LIB3135-010-Q1-K1-A8
ccacaaatatttnaactaccaacatttgcagattcctttaccatcaatcttcccggaactcattatccatttaaaccatcttctcctntccctccccttatccatgactatacaccaccaaaaacatattccccttaacttgatactatcactaaccaaccacaactaattcacaatacttgctatctcaccccctctaaaaaagcaatgaccttaccatctctaattcatccactactaacaactaatgtatataccttgcatgaacccatctatacactgtcccttttcatcaggcatcatcatctttaacctac

SEQ ID NO: 10020 - DNA, 380 bp, Gossypium hirsutum
  Clone ID: LIB3135-010-Q1-K1-A9
gcgttgagattgacgatgtgaaagcatggacttcagttttaatatctgtcacttcctatgcattggggatcttcatgattgcaaaagccccatggtatctacttcctttagcttgggcatggacaggaacagcaataactgggttctttgttataggccacgattgtgctcacaaatcattttcaaaaaacaaattattggaagacattgtgggaactctggcctttctaccactaatatacccatatgagccatggcggtttaagcatgacaggcaccatgcaaagacaaacatgttatcagaagatacagcttggcaccctgtttgggaaaaagagtttgagacttctccttttctacgcatagcaatcatgttcggt

SEQ ID NO: 10021 - DNA, 387 bp, Gossypium hirsutum
  Clone ID: LIB3135-010-Q1-K1-B1
gcggcacagaaattccttgcactacactcgacttttcgtttcttataatacatcatctgcttcagaggtaagcgacgaattcaaccatgtttctttgattcaacaatggaaagacctggttaactatgcattgattaatgccatggctattcgccaaatactgaaaaaataccataaggttcatttcttcaaacaagggcatgctttcaagtcacaagcacaaagtctgcacattgaaatccttcaatctccgtggctatccgagcttatggctttccatattaatttgacggaaaccaaagagaaatcaacgttgacccttgcatcctttgaaggatgttacctcacatttaatgatgggaaaccattccttttttgagaactctt

SEQ ID NO: 10022 - DNA, 388 bp, Gossypium hirsutum
  unsure (1)..(388): unsure at all n locations; Clone ID: LIB3135-010-Q1-K1-B12
accaacannaaattaaacatcattctgagtttatccttaggaaaaataacaggggcatgagcttttactttgaaaactctaccttcacacctaccatttcatcaactacgtcttttatttcttcctttagcatagatggtaatgtagctaacttacatagtggtgttgcttccttccatttcactttaaggtctccttcttttcatcaaagtccccgacacaagaataagttctctcataagcgttaaaattggaatgtcaaatatggaaatactcgtaaattccatttctccaaaaagaggaaacatatagtgaatacatcaatcaacgttcctccaattaataacaagctatctcatattcctccttattattattcattgatgaa

SEQ ID NO: 10023 - DNA, 419 bp, Gossypium hirsutum
  Clone ID: LIB3135-010-Q1-K1-B2
actaactccaccaccatcgccaccacctccacctccaccaacctttccgtttcctcttccggcattccagttcccacctgtaccgcctttccctggtatcccccctgcctctgcctctacttcaccaaagaaatcctctccttaattgtatactataagtaatgattctccactaaaacctatcacaatctagccactcttctggtgattatcaattacatatgtatatcttttttgttcattacgattataaattatatatacagttaaataatctacctaaacagtgtgggctttctcttggttgtttgttgtgtgattgactgtgccattgtcaataagaagctcccgtgaatgtgacacaattattgtactatataataaatccaatcctggggcatctctgattccacaggttt

SEQ ID NO: 10024 - DNA, 346 bp, Gossypium hirsutum
  Clone ID: LIB3135-010-Q1-K1-B3
cccacgcgtccgattacatttatctctttatgaattacttgacttaggggagagtgttcgagcacatattcagggtctcacccaagaacttatttcattgctacctatttcaaaatacaagtgcagcttattctcaaggaagaaatcaaggaaagagatgataaactaactacactagattacggaccaagaacaatttgcagaaggcacataatggctgtctcctacctctacaaataccatgtgggaggcattgcagtagcgaataagaatgatattgatcaacatgcaattgacaccgtatatgctctgaatctgaattcacgtgtgagtttcagatatttta

SEQ ID NO: 10025 - DNA, 315 bp, Gossypium hirsutum
  unsure (1)..(315): unsure at all n locations; Clone ID: LIB3135-010-Q1-K1-B4
gcgtccgaccacgcctacnaccacacatnctaattcattttgagactctctaactaagtcatatacgcgtatcattgatttcaaaaaacaccaaaatttataatttccatattcttaaaacccctaattgttccaattatggacatctcttcttagctcacaatcataagccactgaagaaacttcatatacatggatggagaactaacacgaatgatgattatgcatatgattgctgtacccaagcattaatctaatttacaagaacttgttttgattgatgcaaatgctacccatatgaccttatcacccatt

SEQ ID NO: 10026 - DNA, 189 bp, Gossypium hirsutum
  Clone ID: LIB3135-010-Q1-K1-B5
ccaagccggcggaatgggaaacccattcaccactttcttagcacctcttcttttaatcaatacacttgttggcgatgtcggcgcacttgccaagatcaatcctgaggctccatttgataaagtttgtgttctaatctgcggaatgcccacaggttttggcgcctctgtgaatgtatctaaacccaaaag

SEQ ID NO: 10027 - DNA, 270 bp, Gossypium hirsutum
  Clone ID: LIB3135-010-Q1-K1-B6
gtccatagatatggccattgtatgattaatgaattattatcagtataaatcttgtctttatgttcaaaaaaaaaaaaaaaaaaaaaaaaaaaaaaaaaaaaaaaaaaaaaaaaaaaaaaaaaaaaaaaaaaaaaaaaaaaaaaaaaaaaaaaaaaaaaaaaaaggaataaaaaaaaaaaaaaatataaaaaaaaaaacaggtaaaaataaactacaaaaaaaataaaaacaaccgccaaaaaaaaaaaaaaaaaaaaatcttctggcaaa

SEQ ID NO: 10028 - DNA, 384 bp, Gossypium hirsutum
  Clone ID: LIB3135-010-Q1-K1-B7
gcggagaattacatactaaaaaaagaggcatacatgtacaccatatttgatactactaatgcagggggtgcacgctctcattagggagggtaagaatgggctctaagcacggctgatgctgtacactaagaaaggaaaacgaaagcttaatcgttactgtttttacaggcctgtttatacatacctatcacagtggaagatcatgttgttgagccgatagatgacaaaccttacctcacggtgtctaagagcaccataaattgtatatacagttaaataatctacctaaacagtgagggctctctctcgcttgttagtggtgtgaatgactgtgacattgtcaataaaaatctcccgtgtatgtgacacaattattgtgctata

SEQ ID NO: 10029 - DNA, 435 bp, Gossypium hirsutum
  Clone ID: LIB3135-010-Q1-K1-B8
tggatgagacagttcccacttgaagcatgctttaagtctagctttgagacatggattactgcgaccggaaccttcattccttattgttgcaattccatgctagcgagtttcatgtcgacttgcggaacaatcacatcaatattcacgaaaatcgaagaactggaacttgataacgaaccatgaaagagaacctggccaaaggatttttttttacaatgtatatgtcttagttgacaaagctgtttacgtaataggctgctggctagaaacataggaatttggaatgttgagatgactggtacgtttatcgaaacactcgagtagatgctttcaacacgccccactcacagatagctaatgagctagctcttttaaaaaggaaccagcaatactggatgcgatgtttggaacataaagaccaacaaaggttccctg

SEQ ID NO: 10030 - DNA, 371 bp, Gossypium hirsutum
  Clone ID: LIB3135-010-Q1-K1-C10
cttccggcaatattgcttgatattgatatctttccttctaacctcttgagtcttgtttcattctttcactgcaacttaatactttacttatatcttctgtcattgtcctgtattacatatatatatggctagaattcatcaacttaataaccaagtattaattttatcatgccttctacgttcaaattaaacttcatttcttccaaaaaaaataatcataaaataactattttaaaatgaaatctataaaacaaaacctatatattatttttaaaaaatttaaaattaaaaattttctcttataaaaaaagggcctccccttttataaaatccaaatttactaacccttccatgctaatttataatttttt

SEQ ID NO: 10031 - DNA, 407 bp, Gossypium hirsutum
  Clone ID: LIB3135-010-Q1-K1-C12
accatggcggtcgtgaaattgctcggaacttggtttagtccgtacggtcacagagtgatttgggctctaaaactcaaaggcatactgtacgaatatattgaagaagatgtccgcaacaagagtccttcgcttcttcaatataatccaattcataagcaagtcccggtgctcgttcatggtggaaaaccgatctgtgaatccaccgttatccttcaatatatcgatgaaatttggccgcagaatcctttgctgccggctgatccctatgacagagctgttgctctgttttggatcaaatttgcagatgacaagggtcttttaatgtcaaagctttatcgaggcaatggcgaagaacaacaggcggcagtgaaggagtggttggaaatgttggaagtcatggaagaaca

SEQ ID NO: 10032 - DNA, 372 bp, Gossypium hirsutum
  Clone ID: LIB3135-010-Q1-K1-C2
tggacattcagtaccactggagctcttgaggcagcttaccatcaggcatttgggaaagggggctccctatctgagcagcagcttgtggattgtgctggagcttttaacaacttcggttgcaacggtgggttgccatcccaagcctttgagtacatcaaatataacggcggccttgatacagaggagtcgtacccttacactgcaacaaatggtctatgcaaattctcttctgaaagtgttggtgttaaagtccttgactctgtcaacattaccttgggtgctgaagatgaattaaagcatgcagttgccatggtccggcctgatagtgtggcatttgaaagtgtcactagttaccgttttacaaaagtgggt

SEQ ID NO: 10033 - DNA, 293 bp, Gossypium hirsutum
  Clone ID: LIB3135-010-Q1-K1-C4
atcacttatagcatacaatgtgtactttcagcaatatgccttcactcaaaacaaccactgggagtcttgatgctgcctgtagcgtgaacccatccttttggcactcatttcatgtaatgcaaacacctcatgacacctgtaatggttaaacctcaacaaaaaggagttactataataccttgcttgtcgtatgatataaacttattactctataccagaattaatatcatctaacgtacttgccacaatcaaagtatgattacacaagtcaatgtatataactcaatactatt

SEQ ID NO: 10034 - DNA, 402 bp, Gossypium hirsutum
  Clone ID: LIB3135-010-Q1-K1-C5
gcgacgagatagcttcattcccatcaaggtttcagccaaggaatggggtgaatacaagggctacggtgatactttgaatgaagacggaacagtgcatgtgcttaacgagactttcactgatggcaaaagagggtttatagaaggtactgcttacgaggcggatccccagagtgatgaggcaaagctgaaggtgaaattctatgttcctcctttcttgcccatctttcctatcgttggagattactgggttttgtaacttgatgatgattatcagtatgctctcattggtcagcctagcaggaattatctttgggtattgtgcaggcaaacgcatatggatgatgaaatctacaatcagctggtgcagaaggctaaagatgagggctatgatgtcagtaaatt

SEQ ID NO: 10035 - DNA, 329 bp, Gossypium hirsutum
  Clone ID: LIB3135-010-Q1-K1-C6
gaagacccaggccgaccgagacgttcagtaccaatgtatctcttgaggcaacttacgatcaggcattagggaaaggcagggtcctagctgaacagcaacttgtggattgtgctctaacttttaacaacttcggttgcaacggtgggttgccatcccaagcctttgagtacatcaaatataacggcggtcttgatacataggagtcctacccttacactgcaacaaatggtctatgcaaattctattctgaaagtgtaggtgttaaagaccttgactatgtcaacattaccttgagtgctgaagatgaattaaagcatgcatttgccatg

SEQ ID NO: 10036 - DNA, 376 bp, Gossypium hirsutum
  Clone ID: LIB3135-010-Q1-K1-C8
gcggacggtcaacgtactttttgagtgtccctgatcactggtgttcatagggatcctctgacccttgcgaactattgtgcactccaaatgatgcctcgtctcaacccgagtccctaaatggtatttctgcctagttcttgtattccttgtttcccatttattctttgaatcagccctcattttttatagccagttgaaaaatgctgtgtgtatatatatacccaaccccattataatgcaatttttagcaaatctgtggggatagtttcaactagcattcgtcttatgttcataattttgtatggtcgagtgagaatgtaaagacccgattttattgtaagattggtaatgtataatcaatttaaagtttcagctt

SEQ ID NO: 10037 - DNA, 249 bp, Gossypium hirsutum
  Clone ID: LIB3135-010-Q1-K1-C9
cacattctctttataataaatatttcacctatttcaatgattattaaaataattctttttcccacatataataccacttataaaaccctttaatccaaacaaaaaatatccaatatcttttctcctacccccttttttttttttttttataaaaatttataaatttgcaacaaaatattctttttactctttatatatttattccaaaatacacccttattctattgtatttatactacacatctctac

SEQ ID NO: 10038 - DNA, 429 bp, Gossypium hirsutum
  Clone ID: LIB3135-010-Q1-K1-D11
acaaattccaaagagagtgagaaaaatgtctgcagtagttggtggatggatgggcgaggtaggagcaaagcttaaagagaaagttgaagcaagaaaaccattcttgtcaataagggccaagaaagaccaaccgtttccgaccaaagaagggcatgttgaagacaaagatgcttctaaagatgatactaacgaaaccacaatgtctgaagctactgtctgtctgcttatggatcggtttgtaccttggtaatgataaattagagaaagttcccttgtcctaactttgttgggccttatatgtaaaggcaactctatgctttgtgtaaattagagttgttttattgtggatatggcagccagctctgcttttagtgttcatttcttttgtatctgagcgctgtatatgattagctgttctctttaaacata

SEQ ID NO: 10039 - DNA, 350 bp, Gossypium hirsutum
  Clone ID: LIB3135-010-Q1-K1-D12
gtccggctttaccatatatattataaaactttatttattaatgcctcatctagggacaggtttttatcaacaaaaccaacaatcctcctttatctctttctccacaatccaattcattaatgacaaccaccataaaacctctattttcatcctttctatcacccaccacataaacatttctctaattaaaacactaaatgtttcttcattaaccttcactaaaacaaccacctcaaaccattgataaaactaacgtttaatccttaactttataccaaacttctcttcaatcaacctcttaacacaacacatttcttctacaaatttcaaaaaattctctttacacattt

SEQ ID NO: 10040 - DNA, 368 bp, Gossypium hirsutum
  Clone ID: LIB3135-010-Q1-K1-D2
gtcaacgtactttttgagtgtccctgatcactggtgttcacagggatcctctgacccttgcgaactatgtggcactccaaatgatgcctcgtctcaacccgagtccctaaatggtatttctgcctagttcttgtattccttgtttcccatttattctttgaatcagccctcattttttatagccagttgaaaaatgctgtgtgtatatatatacccaaccccattataatgcaatttttagcaaatttgtggggatagtttcaactagcattcgtcttatgttcataattttgtatggtcgagtgagaatgtaaagacccgatgttattggaagattggtaatgtaaaatcaatttaaaggttcagct

SEQ ID NO: 10041 - DNA, 457 bp, Gossypium hirsutum
  unsure (1)..(457): unsure at all n locations; Clone ID: LIB3135-010-Q1-K1-D3
cttggcaccttccgaagaattatactacatattcagtgttcatcccagaggatgatattcggaaacggggggttagtatagaggagaggcttagtcaaatttctcctgagcaagtgaagatcatgagagaggcagtcataaatctcattccaaggttaatatatgctgatcctcgctctaaattggagactcttcgagatgctttcgatgttgctgtagatgcggtgatcaataaagtcactaagttgaggaggaacatcatccaaggtcgtaccgaatatgataactttgtggaggagaacagttggaagtacgacttattagacgaaggacagcgcgaggtcggagctcacgaatgggatcctttcttctcanaaccaaaggacgagcagagagatcaatctgccgaagctgcgaaaaattcttggaagacgagcagagagatcaatcataaatg

SEQ ID NO: 10042 - DNA, 321 bp, Gossypium hirsutum
  unsure (1)..(321): unsure at all n locations; Clone ID: LIB3135-010-Q1-K1-D4
attgtctccaatagtgtattctcttactacacgttgttaaagaattttgcaanactattgtcaaacttgaatactgtgtggaggatatagattgatagctgataatctaagacccacatgaggaaaaagtattgataaaagttaccccacattgtaaacactgcagccacgaactgcctatatgcttcatgcactcttcatgaaaatacacagatatatcctatgcatgtcggccataaattcacaatggcattagctcacacatttaatttggatgggacacctgatactggctatattaatacgacgaggaagtctata

SEQ ID NO: 10043 - DNA, 301 bp, Gossypium hirsutum
  unsure (1)..(301): unsure at all n locations; Clone ID: LIB3135-010-Q1-K1-D5
gattcgacaaaccgcacgcctgcttgaaaggcctacactttttgcagcattggttcaagaggcgccagggctctttggactataaccaaatcttgtggagaatttttcactcatagattacaggtgcttaaactcccatagctgactataatttttacgtaccaaaggtaccatgtaagtgctgtagtttctccgatcttactgctaattaacctaagcatactttcagctatggagaatgttctatttacaattatttagcangacattatgggtatcattatataaatttattgcttta

SEQ ID NO: 10044 - DNA, 346 bp, Gossypium hirsutum
  Clone ID: LIB3135-010-Q1-K1-D6
aagaacacgcggcggtcaacgtactttttgagtgtccctgatcacttttgaacttatgcatcctctgacccttgccgactattgtgcacttcaaatgatgcctcgtctcaaccccactccctaaatggtatttctgcctagttcttgtattccttgattcccatttattctttgaatcagccctcattttttatagccagctgaaaaatactctgtgtatatatatacccaaccccattataatgcaatttttaccaaatttgtggatatagcttcaactagcattcatcttatgttcataattttgtattgtccaaatagaatgtaaagacccaatcttatttaa

SEQ ID NO: 10045 - DNA, 299 bp, Gossypium hirsutum
  Clone ID: LIB3135-010-Q1-K1-D7
agaacaggccgacggacgcgtccttccggataattatactacatattcactgtttatcccccacgacgatatttcgggaacctttgcctactttaaaggacaggcttactcaaattcctcccgaccaagccaagatcattagaaaagcacccatacacctcattccaaggttaatatatgctcatcctcgctctaaattcgagactcttagacatactttcaatattcctgtatatgcccagatcaataaattctcataaatcaggacgaacattatacaaactcctacccaatataat

SEQ ID NO: 10046 - DNA, 310 bp, Gossypium hirsutum
  Clone ID: LIB3135-010-Q1-K1-D9
gaatctttgagtccaaacaggggggggagcacttttaggggggtgatgcacatcaaagcaaacatgggatcttttgcggctgctctaaaaaagaggaatgtcttggtgatgaatgtcatccctgaggatggaccaaacacacttaactttatatattacagaggcctcattggcactactcataactggtgtgaaaccttttccacataccctccaacgtatgatttactccatgcttggactgtcttttctgatattgataaaaaaagcttcactgctgaaaatttgctactcgagatggatcgcattc

SEQ ID NO: 10047 - DNA, 354 bp, Gossypium hirsutum
  Clone ID: LIB3135-010-Q1-K1-E10
cattactaataaaaaataacatttttaatctttattcaaccaagccacccacagaaaaagttcatttatactatgaccccccatctctcacctaatctttttcaaaaccactttttccatccttcaatacccacaaaacaccaccttcaatatacatccatacatagttccaaaacacaaaaattcactttttaatattatccaccactcaaaacacgtacttcaataataaccaacatgttaagaaatcctttaacactcacctaatcctaacttactacataaacaacaattattctctacaacacgcgcacatcaacaatttacctctagatttattaggttaatttaccc

SEQ ID NO: 10048 - DNA, 405 bp, Gossypium hirsutum
  Clone ID: LIB3135-010-Q1-K1-E12
aacagactacttttccacttatgatttgtcggacagattggcgaaagtgcaaagcatcttctctgaaggcgaatcgtcatctaaacccataacacaaaccaaaaggagtgtccgacagagctcgaacccagactcgtccgattcggattaactgtgggttgtctcggtttgtaagctttctttacctgtttcagtggaaatcaataggatttatcatcattccgtgtttaaatactttaaaagcaaatgaagagaatattgcttgttgtatgaatgacatcatttaatcatctcgatatttatataaaaaaaaaaaaaaaaaaaaaaaaaaaaaaaaaaaaaaccaaaaaaaaaaataaacccattactattaaacccataccttaaaaaacttttaaatttttt

SEQ ID NO: 10049 - DNA, 316 bp, Gossypium hirsutum
  Clone ID: LIB3135-010-Q1-K1-E2
aaaggtgcagctggaatccttgtgacatttgttagctgtttaggctcttggactatttcctgggcattgagcttgctcatgagatggagctcaacatgaacattcttcatatttgctaccatatgtggcttaactgtatctatctgtagctaagctgctaccggagaccataggactgacgctagaataaatacaagcatccatgaatccagcttccttggaaccatgattaccatgtgctccttaacaatcaatatatctgacattgatcaattcatgtacaatatttctagtcctaacttcagtgccatgttag

SEQ ID NO: 10050 - DNA, 287 bp, Gossypium hirsutum
  Clone ID: LIB3135-010-Q1-K1-E3
cttggtccctttcgaagaattataccacattttcactgcttatgcccgaggatgatattcgggaacggtagcttactcttaaggacaggcttaaccaaatttctcctgagcaagtgaagatcatgagacaggcactcataaatctcatttcaaggttaatatatgctcattctcgctctcaataggagactcttcctcatgctttccatattgctggcgatgccgacatcaatcatgtcactaacctcacgacgaacatcattcatcgtcgaaccgaatataataac

SEQ ID NO: 10051 - DNA, 231 bp, Gossypium hirsutum
  unsure (1)..(231): unsure at all n locations; Clone ID: LIB3135-010-Q1-K1-E5
ccgacccacgcatccttncacctatctattccgaaattttcctcatatatgaacaatatctgttcagaggatccattgacagtacttatgtacctcatcgcactatttcacctcctctctttccctctgccttgaacagtacctatacactctgttcccgttcacttataaccaaaatatactctcagataatttacaactatcaatacttaggattaacccgtcgagact

SEQ ID NO: 10052 - DNA, 373 bp, Gossypium hirsutum
  unsure (1)..(373): unsure at all n locations; Clone ID: LIB3135-010-Q1-K1-E6
cattaattttcttgacatcttatatatagnttttacactctcattaccattagatcctttctcttttttttaaagttctcttaaacattaatcctttttcacattacctaccatactttctcttaacatcattatatgaaatcattattgtcctatactccaatttctagcctctaataaaaaatctatccttattattatcatctttcttataacaattaatcctaattcattcaaatctactaattatttcgtccttttataacccacattcacaatttctaggccttcattaattcatactttttgactcattaatttcaaaactcttaattcttttctttaactcccttatttttactctttcttttcc

SEQ ID NO: 10053 - DNA, 406 bp, Gossypium hirsutum
  unsure (1)..(406): unsure at all n locations; Clone ID: LIB3135-010-Q1-K1-E7
cgaacacaagccaaanggggacaagtgctatgtttaaaagaccancatccaataatanantacgcaacaaaaaagctaccatatgcatatttaacccatatacaaccaactataagagacgctcaaaagcgtaaacatccaaaaactcctaaaaacacttacccaaagcttgctcaaccacttctcacatacatacaataaaatccgaccctaatacctgatttttcagaaataatatacaatcttcgacaaagaccaaaaaaggagggagaccatatcaaacaaccacaaaaatatctaccaccactaacaaaaaataaaaattttttcctcaaaaacaaaagttcacctaaaaagatccactccacccaaaggcatatattataaataatctataacctaccac

SEQ ID NO: 10054 - DNA, 231 bp, Gossypium hirsutum
  Clone ID: LIB3135-010-Q1-K1-F1
gtttaagagatgatgctaaatgtgtaataagttatgcgtcaatgttaatggtagtataggggggtattggtttcccaatattaatccatcttcagttattaggttatccatgaaaataacgggaaggtggtcatggaaactatatagagcttaaaattttcagtatccgtgtcattaagcatgtccaaaacagtctatgcagcttactgaaactgttccttctcttcctcc

SEQ ID NO: 10055 - DNA, 416 bp, Gossypium hirsutum
  unsure (1)..(416): unsure at all n locations; Clone ID: LIB3135-010-Q1-K1-F3
cccacgcgtccgaaacaaaccactcccatattaaacattgttggtgaaacaatgacgtcttgagctctgaggggtaagcttgaggcagatgtagagattaaggcttctcctgagcagttccatgaaatgtttgcccacaaaccgcaccatgtgcaccatacttgctatgacaagattcaaggatgcgatttacatgaaggtgaatgggggaaagtcggtaccattgtccattggagttatgtgcatgatggaaaggctaaaaaggcaaaggaagtagtggaagcagtagaccctgataagaatttggtcactttcagagtgatcgaangacatctaatggaagagtataagagctttgtaatcacgattcaagtttcgcccaagagcgagggtagtggcagcgtattgcactggac

SEQ ID NO: 10056 - DNA, 302 bp, Gossypium hirsutum
  Clone ID: LIB3135-010-Q1-K1-F5
caaagcaaatcacatccatattttccataattttctaaacaataacttttttgagcactgagtcgggatcttcaggcacatttatacaattacgcttctcctcaacgagtccatgaaatactttcccaacaacctcaacatattctccatacttgcgttgactgaatccaaagataccatttacattaatgtacgagatgctacttccgtcccatccctcaacataggttatagacttaaccaaacgcttagaatatcttccaaattgaagaaactacatgaccacttaaaacactttcact

SEQ ID NO: 10057 - DNA, 304 bp, Gossypium hirsutum
  unsure (1)..(304): unsure at all n locations; Clone ID: LIB3135-010-Q1-K1-F7
aacaaatcactcccatatttaacattctttataaaacaacnacctctgcagctcattcgtgtattcttaacacacatntacacatcaacgcttctcctcatcaagtccatgaaatgtttacccacaaaccacaccatgtgcaccatactttctattacaagattcaatgattccatttacattaaactaaattgtagaaagatctgtccattctctattgcatgtatatgcatcattgaaacgctaaaaattcatttcacgttattaaagcaataaaccctaattataattttttcactttcat

SEQ ID NO: 10058 - DNA, 375 bp, Gossypium hirsutum
  Clone ID: LIB3135-010-Q1-K1-F8
tatccaaccatcttggccgctcggagcatataatcaaatttttgcattttactctccttgtcatctattgtaaattctcaaattaacttctgtatattgcaacttgtgcatgtaattcaaagtgataaaactatgctttactgtaaaaataaaaatcaaggcaaattttgttaattttacttaaacttccactatcaaaccacctatgttaggcattaatcttagatatggtaggtaacaattgtgctttcttatgataattttactttaaaatgtcttcatttaaaaaattaccaacacacttttttttttaaagcatttttcttaatgtcaaactcatcctctttatgttaagagcatttttattatttaaaa

SEQ ID NO: 10059 - DNA, 273 bp, Gossypium hirsutum
  Clone ID: LIB3135-010-Q1-K1-F9
tctctttattactccaactatacgtacttccttctataaactcacaaaattctataccattattctctccatcttctttatctattatctcaactctctattacatttccttaatcatttcgcttcattcttaagaaatatataaccattctattaaaattttcacttaatacactcttttctctttaaattatttaataaacctctacctcatttaatttatacaatattcccttacattttaattacttttaaatatttattatattattt

SEQ ID NO: 10060 - DNA, 426 bp, Gossypium hirsutum
  unsure (1)..(426): unsure at all n locations; Clone ID: LIB3135-010-Q1-K1-G1
cccacgcgtccgcccacgcgtccggcactgaccatttatattgccttttggatttctttttgtccaacacgttaccatgattatcaatgaaactttacggctctatcctcctttaaatcgcgtgataagagaagtaggaagagaagtccaattaggaaaacttgtcctgcctactcatttagaggtcgacatgcgaatcatagcacttcaccatgatcctgacttatggggagatgatgttaatcttttcaaaccagagaggtttgctgaagggattgcaaaagctactaagtacaatgcagctgcatttatgccttttggattgggatctccatcttgcgttggcatgagctttgcaatcactgaagcgaanactgcacttttcatgattctgcaacgctacactgtcacccgtctccctaccta

SEQ ID NO: 10061 - DNA, 235 bp, Gossypium hirsutum
  unsure (1)..(235): unsure at all n locations; Clone ID: LIB3135-010-Q1-K1-G11
tttatattaccccgtttttttccctttagnaatttttcaagaccaaagaaatttttaaaaaaaaacaaccccacctcatctccaataaaaatattttttaattctaacccaccaatttacatataaaccacccaattttacccccttttaatatttaaattaccctaaaaaaaatttttaaacacccccctcttcattttttcaacctttccaattaaccccattatccctttat

SEQ ID NO: 10062 - DNA, 381 bp, Gossypium hirsutum
  Clone ID: LIB3135-010-Q1-K1-G12
cgatgtttttgtgttcgtctttttacttctttggcttatattttctcgacattttccggcttcgttgttttctaaaactatggcttcaaccttgctactgtctctgctttttatgattcatctgattgctttctcccttgctgttgctgctgatcaaaggagaagtactgcctcttttggcaataatgtgaaataaagttattgcgtttatgatgaagatattgcaactggtttggacgctaattcatatcctattccttctgcttaatcatatactaataatggtgacaagtcggtgcttatgcttttgaaaggccatgataccaatttcatctagagcattgtcacttgttctgttcatcacttgttagttgttctttt

SEQ ID NO: 10063 - DNA, 426 bp, Gossypium hirsutum
  Clone ID: LIB3135-010-Q1-K1-G2
caaatagggagatctttggctaacccaggggaacgtcttcccagcagtatcgaacgatcttggccgcgcggagcaaagaatcaaatttgtgcattttactctccttgtcatctattgtaaattctcaaattaggttgggtatattgcagcttgtgcatgtaattcaaagtgagaaaactagggtttactgtaaaaataaaaatcagggcaaattttgttaatggtagttaaagttccactagcaaaccagctatgttaggcatgaatcttagatatggtaggtaacaatggtgctttcttaggataattttactgtaaaatgtcttgattaaaaaaattacgaacacagttctttggttagagcattttgcttagtgtcaaactcatccttttcatgtaaagagcatcttgatgatgtaaaaatgc

SEQ ID NO: 10064 - DNA, 401 bp, Gossypium hirsutum
  unsure (1)..(401): unsure at all n locations; Clone ID: LIB3135-010-Q1-K1-G4
cccacgcgtccgcaaaggttaaagaaagaaagaaaacatgtctcttgtgacagaagagatagaggcgagggcatcagagatttaccatggagatgagatatgccaagagaaatccaagtttttgttggaggaagtaggcatgccaagggggcttttgccacttagagacatcgaagaatgtgggtacgtgaaggacacaggtttcgtgtggctcaaacaaaagaagagcatcacccacaagttcgaaaagatagggaagctggtttcctatgcaactgaagtcacggctgtcgttgagaaaggcaagatcaagaagctgactggggtgaagaccanaggagctttggtttggatcacactgagtgatatccaagtggatgatccctccactgggaagatca

SEQ ID NO: 10065 - DNA, 313 bp, Gossypium hirsutum
  Clone ID: LIB3135-010-Q1-K1-G5
ttttgaacaaggacaagggctgtgatgaccattggattttctgggtgggtccgttcattttggcagcactagcagcactttaccaccttcttgtcatcagagccattcctttcaaatcaaaatgatctacatcaatggtcatgatcatatgatttcaagaaagtgaaagttccactcatgcaccctttcagtttgtttttccatttttttttgtttgcatgccttttgtatttggatgtaagaatctgtaatatattgctccaaatttaagtaaagtccaatataaatgtgctctctttcgaagggggagggg

SEQ ID NO: 10066 - DNA, 199 bp, Gossypium hirsutum
  Clone ID: LIB3135-010-Q1-K1-G6
ggccgacccacacgtgcaaacctacccctaacccaattctatccatcttctcctacacatcaacaaacttgtcctcgtggaaaccctaattaaccttaccaattccatattccttgaaatctactatacaatctacaacgacaatgccatctattcaaaacttgttcgtcactttaaacatccaacaactccttatctt

SEQ ID NO: 10067 - DNA, 246 bp, Gossypium hirsutum
  unsure (1)..(246): unsure at all n locations; Clone ID: LIB3135-010-Q1-K1-G8
gacccacacgcntncncagaggttaaacaaagaattaaaacatttttcttgtcacataacaaataagagcgattgcatcatatatttaccatccacaatatatattccaatagaaatccaagttttttttggacgaagtaggcatgccaacggggcttttgccacttatagacatctaataatgtgtttacgttaacgacacatgttttctgtggctcaaacaaaaaaagagcatcacccacaact

SEQ ID NO: 10068 - DNA, 148 bp, Gossypium hirsutum
  Clone ID: LIB3135-010-Q1-K1-G9
aaaaaaaaaaaaaaaaaaaaaaaaaaaaaaaaaaaaaaaaaaaaaaaaaaaaaaaaaagaaaaagaaaaaaaaaaaaaaaaaaacaaaaaaacaaaaaaaaaaaaaaaaaaaaaaaaaaaacaaaataaaaaaaaaaaaaccaacatt

SEQ ID NO: 10069 - DNA, 313 bp, Gossypium hirsutum
  Clone ID: LIB3135-010-Q1-K1-H1
gcgggacgcaatcgatataatccatattagtttggttctcgattccatttcttctgtaacctgagcttagaaggcagtagaaaagaatctgctttgagttggcttttgttcgaggctaaggatcagccagtagttttgttaaaacagaaattatgggaagtgttgtaaactgtcaaaaaacttactgacagatatgggctctaattccaacgactaacatatattggccattgcatttagattaaaaaaaaaaaaaaaaaaaaaaaaaaataaaaaaattaaaaaaattaaataagattacaataaaaataac

SEQ ID NO: 10070 - DNA, 320 bp, Gossypium hirsutum
  unsure (1)..(320): unsure at all n locations; Clone ID: LIB3135-010-Q1-K1-H12
atttttaattaagggtcaccctcctattatttattttnatcttttccaaactttcaaaccttattacttttacttcatcatatatgataataaaacaatttttatcctttttaccaaacacaaccaaatttattcatttaaattatttataaaaaaatatcctcaaatttacactcaaaaattcttaccatataacaacaaactatatatcttacatccttaaacacttcaaactttttataatattattttttaccacatacataaatccattggcctttcaaccatttattatctttttattcaaaaaattctaaaaa

SEQ ID NO: 10071 - DNA, 348 bp, Gossypium hirsutum
  Clone ID: LIB3135-010-Q1-K1-H2
cgagcagactgcaattgacaatttcatggttcaacaactggatggaacccaaaatgagtggggttggtggagaacaaaagctcggtgcaaatgccattcttgccgtgtcccttgctgtttgcaaagctggagctgaagtcaagaaacttcccctttacaagcacattgctaaccttgccggtaacagcaagttggttcttcctgtccctgctttcaatgtcatcaatggtggttcacatgcaggaaacaaacttgctatgcaggagttcatgattcttcctgtaggagcatcatcctttaaggaggccatgaaaatgggtgttgaagtctatcaccatttgaagtctg

SEQ ID NO: 10072 - DNA, 222 bp, Gossypium hirsutum
  Clone ID: LIB3135-010-Q1-K1-H3
gcgtccgcttgaacttcttacatgagattctgtgttactttatggtaattggtacaggaggtggtacggccttatagatagacaagttcgcaatatgataatttggactgctattgcatccaaaaaaaaaaaaaaaaaaaaaaaaaaaaaaaaaaaaaatataaaaaaaaataaataaacctaaaaaaaaaaaacaaataaattctataatgtccctgcttt

SEQ ID NO: 10073 - DNA, 160 bp, Gossypium hirsutum
  Clone ID: LIB3135-010-Q1-K1-H4
ttacaaaaaattccttttctttagtcaacacctattcttcaatacatatttatctatttaatcaactttacaatgaaatttacacattatttaccctatcaatttcatctatagatttttagaaactacttctacattcctgataaatataaaatatata

SEQ ID NO: 10074 - DNA, 385 bp, Gossypium hirsutum
  Clone ID: LIB3135-010-Q1-K1-H5
cgggccgaccgcacgcgtccggccaagcgtacgtccacacgttcctgactttttttcatgtaaaaccaacaacgggcctgtcgagacttttaccagatacatgcttataacaaacactccttacacaagtcataacactcattatctcaacacccatgcttcatttcacacatatctatctaatcaactgcacatctaaatctacagacttttcaacgtaactataactttaactgatccttagatacaacttgcatttttctgccaaatttaaaatatatatcctcacaacagaacggaatacgactaatctgactctacaacgtcatctccaacaattaatgacacattatcctattctaatataatatatgcccaagtaata

SEQ ID NO: 10075 - DNA, 371 bp, Gossypium hirsutum
  unsure (1)..(371): unsure at all n locations; Clone ID: LIB3135-010-Q1-K1-H6
gaagacccgggccgacgcacgcgtacggttaatgatcatggctcccaaatctgtccagtatacaacacgcanagacttcgggcatcgtggtggtgttgtttctagtacttggtctggcatcaggatcagtcatagcttggttctgggtcatctgatcatcaaccaagatctctccaacaggtggccgctatgaatttgtgctaatgatgtttttacctttgtaaagtttatctaaaagtcgttgtttgtagcagcgtttttcttcaaatcgtatgatgaatactgtgcctgaagtgtgcatatctgctctcaatgtatgcctgtatcttaaaaacatgatgaaaaaaaatggaaacatttggcttattaat

SEQ ID NO: 10076 - DNA, 390 bp, Gossypium hirsutum
  Clone ID: LIB3135-010-Q1-K1-H7
gatctttttatgaattacgaatatctcccaaaaaacggtcaatggtgcagacaccatttactacctatcttcaagatatgctttctcttgtgaaaaaagagacagcacagcgagaaacattgagagctttgcctctgtatcagcgaaccattccttaagggttttcatgccgtatctcatagtcattgctgctgaaatttgcattccattatctgtatgtacgtatggaatttcgatagcagcagcggactgaaattttacaatttctgactttgttcctttacacagacattttttttcaatttttgaacttgaatcacttattttagatttaaagtccttttggccaaggtccccaatttattaaacaaaaactttttaacccccctt

SEQ ID NO: 10077 - DNA, 271 bp, Gossypium hirsutum
  Clone ID: LIB3135-010-Q1-K1-H8
cccacgcattcgcccacacattctcgacggttttggagggaaaaacatgaacggcagtatagagactgcgatgagatccaagattgtcacaatcgctcatttgacaagtaatgccttggctttggtcaacagctatgcttcattacatggttagctatttaatcaactgtacagggaaatttactcattatttacggttgcaattgtatttatagatttttagaaactacttctgctttcctggtaaatgttaaatatatatgtggtccaa

SEQ ID NO: 10078 - DNA, 394 bp, Gossypium hirsutum
  Clone ID: LIB3135-010-Q1-K1-H9
gggggtatcgaagggaaccccttaacttttcttttcacggaaagcacatcctatgaagatcggtgtaaaaatacaataggcctcaacttcatggaaagcccatgaaaatcgagattgtgggaacaaacattgctacccctgctgcaccaacagttgccaatgttgcttttggaagttctaatggagcccctataggtggccgtggcaggggtggaggattccgtaagcaacgtggtgtttctggaggccgtggctttggaagaggccgtggacattgaatgggccgttgagaaaaggtttcggcagaacatcttgacgctcatctataaaagtatcacactgaagcaatgcaaacaaattgaagcatttctcatgttctgttggttgcgtttta

SEQ ID NO: 10079 - DNA, 341 bp, Gossypium hirsutum
  Clone ID: LIB3135-011-Q1-K1-A1
gtgaaattctgacgttctgcttactctttttgagaggtatatttgctgcattatgcaacggaaagattggttcttttggaatgggttatccattgttcatgcctggcggccctgctgattatctatcttacccaattttaaatcaatgttaagagaatagatatattttgatattatatttttaattttttaaaacaatttaaatatatatactcattttttgaatataagtgtaaaaaacatgaatacttgaaacataaaaaatagaacaaatgtttgtttcaaaaaaattgggcatactggttctattgggacatcaagatcaaattattcaaaaaaga

SEQ ID NO: 10080 - DNA, 402 bp, Gossypium hirsutum
  Clone ID: LIB3135-011-Q1-K1-A10
cccacgcgtccggccatttcttgcttcattcgactctgacattcctccccttcatccaaagtcaggtggcttgggacgagagagaatcaaacaaccaatcggcttgggaaggggctgagtgggcccttactggttcagcgtgtgagaaggaggtatgccgaaatagtgcagtacaataacatcaaatttcaagtgtgggatttaggtggacagacaagtatcaggaagaggagctgagaggagcagcagttcttatttttcttatttttgcaagtaagcagattggttgaaggtagcaacaagaaggggaaaaatatcactcaagggtgtgctaaggtaacaacaccctcccaatgtctttgttgtaaagtggttatgcgttcaactttggaaagatgaaat

SEQ ID NO: 10081 - DNA, 382 bp, Gossypium hirsutum
  Clone ID: LIB3135-011-Q1-K1-A11
gagaagaattgtttgagttcaagttagatgaagaacaagccattgaaggtcttgatagagctgtggtgaatatgaaaaaaggtgaagtagcactgctgactattgcacctgagtatgcatttgggtcatccgagtcaaagcaggagttggctgtggtaccgctaaactctactgtttactatgaagttgagtgggtatcatttgtcaaggaaaaagaatcatgggatctgaacacccaagaaaaaaattgaagctgctggtaaaaagaaggaagaaggaaatgtattattcaaggctggcaaatatgtgagaagctttaagaaatatgagaaggctgttacatctatcgattatgatacttcctttaatgaagaggagaaaa

SEQ ID NO: 10082 - DNA, 235 bp, Gossypium hirsutum
  Clone ID: LIB3135-011-Q1-K1-A12
cccacgcgtccgattttggattgacctcaccacccaattaaactctctcactcagtttatcttagctttgctttgtttttgaagtttcctgtattattcaacaaaacacaacgccactagagtttagtttgatcaacaactctctggtcttcttcttccctaaacaagcaaaaaaaaaaaattatgggtggagaagggaagggctattctttggctgagggttctcaacacaaca

SEQ ID NO: 10083 - DNA, 375 bp, Gossypium hirsutum
  unsure (1)..(375): unsure at all n locations; Clone ID: LIB3135-011-Q1-K1-A2
cccacgcgttcggttcaaagtgcatctgggtgatactcctcacaacttgactgaaaatgattttgaaagcttagctcataggacggatgggttttcagggtcagacatatctgtttgtgttaaggatgttctttttgaacctgttcgtaaaacccaagatgccatgtttttcttcaagacacctgatgatatgtggatgccatgtggaccaaagcaaccaggtgctgtccaaattactatgcaggaattggctgccaaaggacttgcgtcacagatcctttcacctcctatttcaagatcagattttgacaaagtgcttgcaagacagangccaacagtgagcaaagctgatcttgatgttcatgaaagattaca

SEQ ID NO: 10084 - DNA, 419 bp, Gossypium hirsutum
  Clone ID: LIB3135-011-Q1-K1-A3
accacgcgtccggatatgtttaaaatattggaatctttgctaaatttgttattatctgcaggtttttaggctttgcaccagcttgtaagataacatacggtttgatctggaaatgtcattttcaatggaagaagtggaaattaagcattctggagctaaagagcttagctatcagcaacaaaatgaaagctacgaagtatttgaagaagaggtgaggggatcattctcaccacagtcaggtggaaaccgtgtggataaacaagaatcaaatgatgcagaagcaactgaattgctggacaaggggtttatggagtatggttgcccacattatcgaagaaggtgccggattagagctccctcgtgtggtgagatatttgattgtcgtcactgtcataatgaggcaaagaacaatatcaatg

SEQ ID NO: 10085 - DNA, 399 bp, Gossypium hirsutum
  Clone ID: LIB3135-011-Q1-K1-A4
cattctcataataacggttacagtgttttactacttaaaagctggatggattgggaatgatgccatctcccctatcattggtgatcatgatccatacatgcatgtttttggacgggaactaaaccatctacgtgctgctgcgattcttatgacattcgttatggttctttccatcctaacatcaatagcaattgttcgccgtatcctaatgggaacatcagtgctaaaggttgctgcaaaggtcataggtgaagtccaagcactgataatttttccagtcataccatattcaattctagcaattttttacatggtctggatatcagctgccctccatctgttcagttcgggtcaggtcgtccagaataattgtaataccaactgctgtgcttacgatct

SEQ ID NO: 10086 - DNA, 364 bp, Gossypium hirsutum
  Clone ID: LIB3135-011-Q1-K1-A5
cccacgcgtccgttttttactttatttcagtcaatttcgaggcagaacgtgctcctgccgtgtcagaaggactttccccgctacaagaatggttgaagatagggtcccggttcaaagctttctttgtggaagggctccctagattagcgagaacacgaaaaattagagtctttcagagtcttctccatccgcgtttctacttataatagaagtggcaatctttctagcgcctgaggcaaaagtcaagagaaaaaaaaagaagcaagactggtctttgccagaaagtcgggcatcctggatctatggggacatcaagatcaagtcgtccagtaagcgcttagtttagtggccaaaaaacctcttc

SEQ ID NO: 10087 - DNA, 403 bp, Gossypium hirsutum
  Clone ID: LIB3135-011-Q1-K1-A6
cccacgcgtccgcagttgtctactgaacacaatgctaatatcgaggctattatacatgaactcaaggaattacacccgactgatccgcatattgttgttctcaagcatggagtatggagagtaaagggcattattcaggtttctaggtcgataggtgatgtttatatgaaacacgcacagtataacagtgaaccgattaatgcaagattcaggcttcctgaaccgatgaatatgccgatattaagtgccaatacaactattatttcccatgctctccacccaaatgattctatccttatattagcttgtgacggtctatgggaacacttgagcaacgaaaaagctgtggctattgaccatagtcatgcacatgcgggcagtgccaaaaggctagtcaaggctg

SEQ ID NO: 10088 - DNA, 273 bp, Gossypium hirsutum
  Clone ID: LIB3135-011-Q1-K1-A7
cccacgcgtgcgtacatgtttactgaacacacagctaatatatacgctctgaggcatgaacgcatggaattacactcgactgatcagaaaattgtcaagctcaagcatcgactatggagagaaacgggccttatttatgtttctagatcaaaacgtgatgactatatgacacacacacagagtcccatctaacttactactgctagttcaagactctatgtaactacgattttgcgcatactatgtgctaacacatctattacatgctctgct

SEQ ID NO: 10089 - DNA, 266 bp, Gossypium hirsutum
  Clone ID: LIB3135-011-Q1-K1-A8
gattgggaatgatgcacatatgcactatcattggcgctcatgatccatacatgcatgtttttaggcggggactaaagcatgtaacgggctcgtgcgatgcttataacattaaagatggtgcttttcatactcacatacatagcaacagttcgccgaatactactagaaacatgcgtgctcaacgttgctgcaaaggccataggtgaagtccaagcactgataattcttatagtcttaccacattctattctagcaatattttacat

SEQ ID NO: 10090 - DNA, 430 bp, Gossypium hirsutum
  Clone ID: LIB3135-011-Q1-K1-A9
gggagtgggtgatacagatccgaccttgaacaccacatacttggaagaactacgccaaatatgcccacagggtggaaatagtagtgtgttgacaaatcttgatcccacaacacctgatggtttcgacaataactacttcacgaatctacaagttaatcgaggcttgcttcgaagtgatcagaatttattttcgactgagggtgctgatacaattgaaattgtgaataggtttagtagtaatcaaacagctttctttgaaagctttgtggaatctatgatcagaatgggaaatataagccctttaacaggtacggaaggagaaattagatcaaattgccgcgccgtgaattcagcaactatcacatccaactcagatgctgctctcgtcagctcaatataatatttgctgaactgaaggctaagaaaaatg

SEQ ID NO: 10091 - DNA, 89 bp, Gossypium hirsutum
  Clone ID: LIB3135-011-Q1-K1-B1
aaaacacgtacggatatgttaagatcttgtattcttttctacatttgaatgatgggcgggaatttaggctttgcaccaacttgaaaggg

SEQ ID NO: 10092 - DNA, 394 bp, Gossypium hirsutum
  Clone ID: LIB3135-011-Q1-K1-B10
attatgcattcgtcaatacttcctccatttcctcacctatcataatgaagaaaattatgggtcacatgattcacaaagctcaaccatatttcgcagtctctgatgagaagatggcgaatacggataacccagaaagtgaacatggtcaacaacctaacaacattattaccagccaactccacataagatcctgacctcggtcatgccctgaagcgctggataaagaggctgttcttagacgaatccgccatcacatgtgcaaatacagagtcaaacgtgcttttcatgctttggttggccgcgacggacaaactcaagaaaagtggattgaactgagcgatgctttcacttgtccttaaaaattctggaaaaacccataaaattcatcgggatc

SEQ ID NO: 10093 - DNA, 338 bp, Gossypium hirsutum
  Clone ID: LIB3135-011-Q1-K1-B11
atttaacttaacagaagtactgctcaaaggaaaaattgttcatacagggaagaagtgcaggtggattgcttattggtgcacttcctaacatgaggcctgatttgtggaaggttgctgtctctggaatgcctctttgtgatcttctgacttcaatgctcgaccctactatccctcttacaacttcagagtgggaggaatggcgtgaccctctaaaggaagagatgtacttctatattaactcatcttcccctgctggtgatgtgaaggctcaaaattatccgtatattctcgttacagctggcttacatgatccgcgtgttatgtactcagaacctgca

SEQ ID NO: 10094 - DNA, 199 bp, Gossypium hirsutum
  Clone ID: LIB3135-011-Q1-K1-B12
gccccataacgagaatgacacgttatcggagcgggaattacttgaagactaccctcttttgaggccctcctttaaaattttaccacctccttaggtcctaattagtggtttgtaaataatattagggtttgggaattttaccttagaagggtcctttataaattgactttggttccctttaataaaaaataaagtgggc

SEQ ID NO: 10095 - DNA, 331 bp, Gossypium hirsutum
  Clone ID: LIB3135-011-Q1-K1-B2
tgaataactatggcagagcaagtgctctaatccagcatgaatggcgcccaaaatcgctcatcacaatatctggagaggtggacaccggagcaattgaaaaaagtgctaaagttgggctggccttggcactcaagccctatgcaaaggcaaaactgtttttgttgtgtcatatggaaggtgggccttaattttgattggttgaggacttggagaaaaatagtgtactttcatggattataaaaataatgttattggcaaaccgaaattagcaatttgctttgttgaacaagtgttgcttacatctaattagttcaacttgtttacttctttc

SEQ ID NO: 10096 - DNA, 296 bp, Gossypium hirsutum
  Clone ID: LIB3135-011-Q1-K1-B3
ggcaattggacttgcaccaagagcagtagataagtgcaagaacagaagctaaggtaggtttagaaacaacaatcccaattaaaatcaagccagatcaaaatcagattgtatgtgaaaccagttgaatcgagaaccgaggtctgaagaagaagaaatattaataaaagttagtagggatatattttgatatttattaagggacaagaaatcaaataatagaaaattcataaagtttactttcaatggtttgtttaaataatatctttaaatatattaatggttttggtttttgagtg

SEQ ID NO: 10097 - DNA, 392 bp, Gossypium hirsutum
  Clone ID: LIB3135-011-Q1-K1-B4
gccttctgtctgacaataaaactgcgaaaaatgatgataaagaaaatacagaagtttctgagagtacgataaagaaagctatcaccaatagagcttcatatgtgaaagctaattcggaaaaagtcacaatggctggactccggcggcttttggaggaagatcttaaacttgataaatatacacttgatccatacaagaagtttatcgctgaacaattagatcagctattgaagtctgctgaagtttctgcacctgcaagtgaggttaagaaaaaaaacctcaagaaaaattctcagagcaaaacttctgaaaagcttatcaagaaagtgatttctgcttcatcacgaagcgagaatgatgaagtgggagatgaagaacgagatggtgatgat

SEQ ID NO: 10098 - DNA, 266 bp, Gossypium hirsutum
  Clone ID: LIB3135-011-Q1-K1-B5
gccacacatcctgggacgcgttgtgggggctttgaggcaagccaaagagaggtggaaaagggggcgactgattggtaaaaaggacgctaacgaattcggataagggtgggtaggcctctgataggtagccctgtaatgtcgagtgaaagatcgtgaggataataggtggcggatgggggaagatgggatttaggaaatgtaatccccttggaaccaatcccacaatgggtgattgggatgatagcggtgaggccgatttcgataga

SEQ ID NO: 10099 - DNA, 277 bp, Gossypium hirsutum
  Clone ID: LIB3135-011-Q1-K1-B6
acgaatgtatagcaatgtatacaaaatctttaatagaacagcccatgttccccttttcttgtaaatagaattataattatccgtattctctgtaattatcgcatcttggaagcatgaccgggtacccgggaccgtgcaacgggcgtcttggaaccagatggccgacctagaaggttgctgatgaattcacccgccaacatgagctgtgccagatccacattcgtcttgacaccaaggccgtacagcatttacaccacatctttcgtgacaacatttc

SEQ ID NO: 10100 - DNA, 325 bp, Gossypium hirsutum
  Clone ID: LIB3135-011-Q1-K1-B7
ggacaaagcctgagatagtgagtatgcattttgaggtactggctaaggttgatggcgagactgttataccggagagaatcatgcaggttaaccctgttgctgtggaggatgcaattgcaccacgtgtgctagcaaggaacatgaccatgtcttccacacctgttgtttacactccttcaaatcctttcaccttgtaaattgttagagggaaaaggatcaagagtctaaatagttatacagaacggtaaaggtgagatgaatcgattattctattccgtgtgccctcattaacatatttaatataaaggtaaagatgaatttatat

SEQ ID NO: 10101 - DNA, 445 bp, Gossypium hirsutum
  Clone ID: LIB3135-011-Q1-K1-B8
cgaaacaatgtcagtcaggaggcatcggataaaggaggaggtaccaatgagacaccaaaatctctaaatcgtgatagcaagagcaatacagcagactcatctattgctggtgcttctcgtaattcatctctcgccagccaaagagatgtggaccagaatgtaatgggaacattgaagaatctggggcagtctatgcttgaacacattcaggttcttgagtctgttttccagcaagatcgagttcaagtgggatcagtggacaacttgggtaaaagcaatttacttggcaaaggacaagttacagcaatgacagctctgaaagagcttcggaagatcagtaaccttttgtcagagatgtgagatttcgtgttctacttataaaatctgtatatacattttgtagttacattggttttttaaatgcaaatgataaaatgatttttgt

SEQ ID NO: 10102 - DNA, 304 bp, Gossypium hirsutum
  Clone ID: LIB3135-011-Q1-K1-B9
accacgcgttcgtccacacgtccgctatcttttccattttctctttgcaagccatgaatggtcatatgttccacatatgatcaccttttttcgttgactctgtttataacttgcttggtactgataaaacagagtgtgaacatggtgaattacctacctgcattataaccggactacttcacataaaatgctgtgtttgggcttgcacttacgcacaagataaagaagaggttcttagacaaatcccacatctcatgttcatatatctgtgcctaacgtgctttttaggctttggttggcggcg

SEQ ID NO: 10103 - DNA, 433 bp, Gossypium hirsutum
  Clone ID: LIB3135-011-Q1-K1-C1
tgccacgcgttctgccacgcgtgcgcccacgcgtgcgaccacgcgtacgggtgggtggcatcacattcttccttttgtgcatccttggattaactttagctctttatcgagtgaagaagaaccagcttaaggaggaaatgagagagaaatatgttgaaagcctaccaacttcaggcagcagtttctggaaactctctagtgtccctgagcctttgagcatcaacattgccacttttgagaagcctctacgaaagctgaccttcggccatctgcttgaagcaactaatggtttcagtgcggaaagtttgatagggtctggagggtttggcgaggtctacaaagcacagctgagagatggctgcgtagttgcaatcaagaagctgatacatatcacagggcagggagacagaaagtttatggcagaaatggaaac

SEQ ID NO: 10104 - DNA, 396 bp, Gossypium hirsutum
  Clone ID: LIB3135-011-Q1-K1-C10
gttcgctggcatgtggccaagatgacgaagaagaagcatgagccggggaatcagatggacgccaccaatgaccaccgcttcaacattaagaacattatgaaagatatccagtttcttggatcctcccacatgacatggaaggagaggaaagagatggagaataggaaggtggtttctttgggtggaaagccccctaagaggcagagattacctctgagtgttgctaaggcggtcatgaagaatcaaaagaaaagagaagagaaaatgcttcaagagaatatgattcttggtcgatttagaagaaagcttggtggtggtagtggcacttaaggatccacaaacaagcggatgcctgaggacagggttttgaagtcaagtgaacgtcattttaaaaat

SEQ ID NO: 10105 - DNA, 350 bp, Gossypium hirsutum
  Clone ID: LIB3135-011-Q1-K1-C11
aggcgtacgcagacagcggccaagatgacgaacaagaagcatgagccgagcaacaacaaggacgccagcaacgaggaccgcttcaacatcaacaacaatatgaaagatagacaagttcttggatcctgacacaagacatggaaagagaggaaagagatggagaatacgaaggtgggagaaaagaacggaaagccccctaagaggcagagattacctctaaatggggcgaaggcggagatgaagaacaaaaagaaaagagaagagaaaatgctagaagagaaaaagatgctggggcgagacaaaggaaagcaaaagggtggtagaggcactcaaggaaagacagacaagcg

SEQ ID NO: 10106 - DNA, 405 bp, Gossypium hirsutum
  Clone ID: LIB3135-011-Q1-K1-C12
cggacgcgtgggcggactcgtgggcggacgcgtgggtccagaaaggttcattgatagcaatatagaccttcatggacatgattttgaactcatcccatttggtgcaggccgtagattatgcccagggaagaaattaggattaatcacagttaaacttattctagctcaattagtgcattgtttcaattgggagctacctagtggaatatcgccgaatgaactggacatgactgagaactttggtgtctcgttgccaaggaagattaatctatgtgtcaagcccacttatcgcatgtaaaaatgcaaattttatgattttttttgtgttttaaaataacaggatgtatacttataataaagggcattttaaaatggcatgtatttctttttgaaaaaatattaatt

SEQ ID NO: 10107 - DNA, 218 bp, Gossypium hirsutum
  Clone ID: LIB3135-011-Q1-K1-C3
tgactacgtactggaaagcttattgaagatgtgatcaccgatcatgccctgtgtacatgttcatgactgtctttgctagcattgctgtgactagcatgctcgaaatgcacaggggaggcgttggaatacatgtttggtggagaaacaagcaactctgggtgattggtggtgtctcgtcacacctcgtggctctacttgcatggtctgctgaatgtttt

SEQ ID NO: 10108 - DNA, 434 bp, Gossypium hirsutum
  Clone ID: LIB3135-011-Q1-K1-C4
gaactactcaaacacccaagtaagccactgtacgaagtctatgttttgaatcattataatattctgaagtgatagtgttgtccatacttccactataataggacattctcggaataaatgatccattgttttagctctttctccacatcgggggcagcttgtgttggctgccaacttcctgtactgcatatttacctttgtaagcaaataattccatgatagtctccagattgtaatcttatttttattggtagatttaggctccaaagttttttttttaaatttcctgtagatggtttgtaaagcgtaagctctaaaattttcattagaactctgtaatagtttataggcacttcggaccgagaattcacccgacaattcacccctcagatgaagaagtcctcgtgacatgttcatgccaaagggattggatt

SEQ ID NO: 10109 - DNA, 441 bp, Gossypium hirsutum
  Clone ID: LIB3135-011-Q1-K1-C5
ctttcaattcgttgtgcctttggggggtcaaagaaacaatacagaggaagatggtgtcagcgacgattgatctgttgaagaaagagcttcctgttgaagaaggctctttggttctttcgaaagatgttaagactggtcttgttcttgttgatgttgttaatggcttctgcagcgttggagctggaaatctggtaatttttccccataaaatgcactcaatttattatattttggatgaacagtaatctgggttttgtcttttgtttgttttgatgtttcgtgttcatacaggctccagtgaaacctgataaacaaatatcttatatggttaaagaatctgcgagactagccaagctattttgtggggaaaaatggcctgcttttgctttccttgattaccatcatgctgatattcctgaaccttcctacccacctcattgc

SEQ ID NO: 10110 - DNA, 351 bp, Gossypium hirsutum
  Clone ID: LIB3135-011-Q1-K1-C6
ctttcaattacgtgtgcctttggggggtcaatgaaacaatacacaggatgatggtgtcagcgactattgatctgttgaagaaagagcttcctgtggaataatgctctttggttctttcgaaagatgttaagactggtctagttcttgctgatgttgttaatgtcttccgcagcggtggagcatggaaatctggtaattctaacccataaaatgcactcaatttattatattttggatgaacagtgaatctgggatgcgcctaacgtttgttttgaaacttcgtgttcatacaggctccagcgaaacctgttaaacatatatctgatatcggtaaagaattttcgagacttg

SEQ ID NO: 10111 - DNA, 343 bp, Gossypium hirsutum
  Clone ID: LIB3135-011-Q1-K1-C7
ctttcaattcggtgggcctttgtttggtcaaagaaacaatacagaggaagatggggtcagggacgattgatctggtgaagaaagagcttactgttgaagaaagctctttggatctttcgtaagatgttaagacaggtcttggtcttgttgatgttgtgaatggcttgtgcagcgttggagctagaaatttggtgatttatacgcctagaaggcactcgagttatcatatgttggaggaacaggaatctgggctttgcctgttgtttgttatgaatcttggtgtgtatacagggtgcatgggaaccgcgttaaaaaggttcttataactataaagaatctttgt

SEQ ID NO: 10112 - DNA, 55 bp, Gossypium hirsutum
  Clone ID: LIB3135-011-Q1-K1-C8
aaaaaaaaaaaaaaaacaaaaaataaaggcaaaaaaaaaaaaaaaaaaaaaaaat

SEQ ID NO: 10113 - DNA, 391 bp, Gossypium hirsutum
  Clone ID: LIB3135-011-Q1-K1-D1
gagccctgacaatagcacttgcctgggttcttcatcaacgggatgatgtatcatcgattcccggacaacaaagataaaaaatctggatagtaacattgattcactaaaagtcaagctcacagcagaagatttgaaagaaatttctgatgcgggtccgataaatgaggtaacatgtgatgttttgcctgatagatttagtcaattacactggaagtttggtaatacaccaccaaaggggagcaaagttttaacctgtaaaaaaccatggatgccaagtctgcagcaaaatatgaacgtttggatgaacggactctccaacaactgaaactattgaaaaattgtatcaatgatttggtaagcaatttgggtaaagtactaatgaacggttgag

SEQ ID NO: 10114 - DNA, 209 bp, Gossypium hirsutum
  Clone ID: LIB3135-011-Q1-K1-D10
gtccaaccaagtcccacaactccactacggatcgggttggagatggccccacctgatcctcggctcaggaagtacgtcaggtattatagagactttgctatggaactcaacatggctcttggtgtcgaccctagtgtggtcatctgcatgctccctgttggtgacggaactaccctgtgtcggctgactcaataaaacacaccgcacgc

SEQ ID NO: 10115 - DNA, 63 bp, Gossypium hirsutum
  Clone ID: LIB3135-011-Q1-K1-D11
aaaaaaaaaaaaaaaataagtgagaaaaaattaatataatataaatactttatagataaaagg

SEQ ID NO: 10116 - DNA, 384 bp, Gossypium hirsutum
  Clone ID: LIB3135-011-Q1-K1-D12
ctaatccctaattttattgcgtgtaatcctgcatatgcctctgctgtgaatggatctgcgatgttggagtgaatgactgcctgtgatgcaagaatctctttgttctcgttccgtactattataccggaagccgatctaaaccccaggcgttcgtaagctgcatcgaaatgaatggaggtccatccccttttatatatctgttggagattgccagatgaatggagaatgatttctgctaaaccaaatgaaccaaaggctacagcaaaaaagttgaagctgctcttcattacctcgatcaaaaacccagggcacttaataaaaatatgccagctattttctttagcagaaccgcacctggggcaaagagtgtttatcactaccctc

SEQ ID NO: 10117 - DNA, 437 bp, Gossypium hirsutum
  Clone ID: LIB3135-011-Q1-K1-D2
gctagaatgggtagtgcttggctacgccgcgggtgcagaagccatcatggttctcctcctcacgctacctggcctcgacggtctccgtaagggcttgatcgccgtcactcgtggcctcctcaaacccttcttgtcggtggtcccgttttgcctcttccttctgatggatatttactggaaatacgagacacggcctagctgtgagggcgattcttgtactccttccgagcatctccgtcaccagaaatccattatgaagagccaacgcaacgcgcttctcatagccgccgctctacttttctattggcttctttactctgttactggccttgttgttaaggtcgagcagttgaatcagcgccttgagaggcttaaaaatcgggattgagtgagataagtgcttttttttttttacaacgcttgtgtttgggctacac

SEQ ID NO: 10118 - DNA, 321 bp, Gossypium hirsutum
  Clone ID: LIB3135-011-Q1-K1-D3
ctcaaacctatgatcagaagaggatgcagttgatgatgtaatccctgctgaaacatgtatgctgacacatatacttgctgaacatgctgatgaacctacacatggtacatcacaccacatataaattactatggccattatagagaacaacggtgactctttcggagcctatgtgctaccgcaaatgttacgggtggatggatgccgcgatggactacgctagatacatcgcatgagatactgaataggaagctaaggctctgctgatagctgccttgggaaagagcgggggatagagatggccgtacgcatggatactgc

SEQ ID NO: 10119 - DNA, 348 bp, Gossypium hirsutum
  Clone ID: LIB3135-011-Q1-K1-D4
cattgctgtaattctgggaactgtcaacctaccgacttatcgaggtttttcaaggagaggtgccccgatgcttatagttacccaaaggatgacccaacacgcttgtttacatgccccacagggactaattacaagggtattttctgcccatgaagagtatttgggatggttttaagtcctttctatacacaaattagtaggggtatatcaataaatggaataaactcgaatgctctttgagcacatttcttgatgtgcatatgatctgattctggataatagagttctgcatgaatgaaaatttggagtctctatgggttttaaaaaaacttgttgtaaaattggagc

SEQ ID NO: 10120 - DNA, 427 bp, Gossypium hirsutum
  Clone ID: LIB3135-011-Q1-K1-D5
tgtgaatggatggggtgaagttaccagaggcttgccattaaagacccctccattttaagacagaaccatactgaaaccccgaaacccacctatgatagagttcgagcaccatgaatttgatgagattgaagatatatcaaacacaaacaagttgtatgaagaagaagaaatggtttacaagaccttcctgtttgatccagataagcttggacaactcaaggaacaagcccttgaagatggggttttatccaaatgcaccacattcgaagtccttgcatggtttgtgtggagagctccatgcaaagcattaaacttggttcctcagcaaaaaactaaactcctctttgctgctgatgggagaaaaagattcataccaccattacctgaaagttttgcaggtaatgggattgttttaacatattcaatc

SEQ ID NO: 10121 - DNA, 199 bp, Gossypium hirsutum
  Clone ID: LIB3135-011-Q1-K1-D6
cccacacgtacggcaatacaatggttggatgtcaaccagctagccccggccgatgaattacaggatcatattaaagagctcgagagcatctacgatcgtattattgccccaatgtaccaatgtgcaggggctgatatcaatcacagcctggatgaatatacaccaccaaccggttgacaagacccccgacctaaaatca

SEQ ID NO: 10122 - DNA, 439 bp, Gossypium hirsutum
  Clone ID: LIB3135-011-Q1-K1-D7
cgttatcaagagcgtgtagaataaagatccatctggagccaaggtgacgaagtttgatgccaagaagggtgggaagtgaaccgtgtgggtttcagttgatccaaccaaactattttatggttactacaataaaacattgcttctcattagtaggtcagccatcattggacgattagttgtgtgttttgatggtaatagttttaagtcatcaccatcttgtcgaggatgttgttcacagaactgggttcttgatagacggtggtgaggcttttgtgtttttcagagtctgccgtctgtgagagtaattataaactttgaatggtgtcttgtgttcccattatttatggcaatcagctcaagagttttaggtctggtcctgagcttttctgcttgaatgtgttctatcaaacatttatatacagtcaaaacttgtttgttt

SEQ ID NO: 10123 - DNA, 383 bp, Gossypium hirsutum
  Clone ID: LIB3135-011-Q1-K1-D8
accacgcgtgcgcccacgcgtccggttgcgttacaagaagcagaaggcactgttcgccgctgctgacggtatgtacaccggacagttcgtgtactgtggtaagaaggccacccttatggtcggaaacgtgttgcctcttacatctatccccgaaagagctgtcatttgcaacgtggaacaccacgttggtgatcgtggggttatcgctagggcttctggtgattatgccattggtattagtcacaaccttgataacgacactaccagaatcaagctaccatccggttcaaagaagattgttccaagtcgttgccgcgccatgattgggcacgttgctggtggttgtaggactgacaagcctcttataaaatctggtaatgctt

SEQ ID NO: 10124 - DNA, 377 bp, Gossypium hirsutum
  Clone ID: LIB3135-011-Q1-K1-D9
agccaccaaagccaccggtttacacgccacctaagatagagaagcccgtacctaaaccaccagtacatgagtctcccaagaaaccaccgtatggtcactatccaggacaccctccattggggaagcctcaatagagagatcccatcggcttgcaatcccaagaaccgagctattatgactagctaaatagataaattagtatccatgcaataagagctgcttaatactcatgttctgtcttctagtatgtaatggattaatgttttcttttactagcgagagtgcttatggcagtactcattggaatgcctattttatggcttcttatttctcaatgagcaatatcctgatttctacacagattttaaaaattaata

SEQ ID NO: 10125 - DNA, 58 bp, Gossypium hirsutum
  Clone ID: LIB3135-011-Q1-K1-E10
cttgtctttgattaatgcacatggtatgtaaatctgtaaaacaaacaataaaaacaaa

SEQ ID NO: 10126 - DNA, 175 bp, Gossypium hirsutum
  Clone ID: LIB3135-011-Q1-K1-E11
cccacgcgtccgcaaaaccccatgattacagactatttaaacatgaagctcgtaccccgtggaaggtgatcgtatgatcgatggcggctctgagcgtgactagagcaccccgagacgggagaaagaaatgtctggactgcgtctgctacactttgggtttgttgttttaggaggt

SEQ ID NO: 10127 - DNA, 200 bp, Gossypium hirsutum
  Clone ID: LIB3135-011-Q1-K1-E12
cccacgcgtccgcaaaacctgataattacaatatatagattgatgaagctcgaatcccatgggacatgaccgagagaaacaggcactctcggatacatggctccggggggccgttgtgggagtccatatcttcggacacgcgactgctacagcttaagtatatgcttatgggaaatatactgatgtgacaggccgtatgc

SEQ ID NO: 10128 - DNA, 331 bp, Gossypium hirsutum
  Clone ID: LIB3135-011-Q1-K1-E2
ctcttgcagttgtgtccgtcttttgcttgtcttcttttgcaggtacggaggcaacgtggcgggggtagctggcgcgtacggaggctgctggtggcgcaactgctgctagggctagggtttgctgaaatttggcttagatattgggcctatcgggccatcagggtcatgggttagagatggggttgattagttttgtttgggtttataaatgggctattgggtatgatatgtaatagattgataattggaccattcaattaatttatatttggtttgaaaaaaaaatatgggtaaaagaagattgttccaagtgtttgctgtaccatcattg

SEQ ID NO: 10129 - DNA, 264 bp, Gossypium hirsutum
  Clone ID: LIB3135-011-Q1-K1-E3
gaatggacatgaccattgcagctggtgccattacctgcgctgtgttcctacatgaaaatggcactgtgggaactaatcatacctttattacatatcgatcactgattcttttctggtttgctttacattttttacatttgataatttcttggtggtgtgtcctgcctatgtgtatacatatacatacatacatacgtacatggctagggtgtagactttgtgtgatttgatttactggtgctatatgtttggacatattataca

SEQ ID NO: 10130 - DNA, 342 bp, Gossypium hirsutum
  Clone ID: LIB3135-011-Q1-K1-E7
gaaaccggggtacggagaccaactgcgcgctaacctaaaacccacaaaggggggggggcgcggaaaacaccaagacggggggcatgggaaaagaaaaccgcgcacgagcgggggacaacagagcggccgaagcaaccagcgaagaaaatggagggcgctcaagcgcgcgacccagacccggacgtcggggcaagggccaggccacgaagacaaggagggcgcgacggaacccaaaaaccaggggagcgagccaaggcggagcggaccctggggcaaatgaaggggggagagggaaagacacggaggggaacgtcgaaagccaaaaaggggaaagggcaaaag

SEQ ID NO: 10131 - DNA, 64 bp, Gossypium hirsutum
  Clone ID: LIB3135-011-Q1-K1-E8
atcagctccctattgtaaagacttttatttttatcatataactcattaacttggggatcgggca

SEQ ID NO: 10132 - DNA, 326 bp, Gossypium hirsutum
  Clone ID: LIB3135-011-Q1-K1-E9
cccacgcgtccgcttgccagcaagacaatatggtctgatgatttggtggtagtctcaccagatgttggtggtgttgctagagcacgtgcttttgcaaaaaaattatctgatgcacctcttgctattgttgataaaaggcgtcatgggcataatgttgcagaggtcatgaatttgataggtgatgtgaaaggaaaggttgcagttatggtggatgacatgattgacactgctggaacaatcgcaaaaggtgcagctcttttgcatcaagagggggctcgggaagtgtatgcgtgtagtacacatgctgtttttagtcctcctgcaat

SEQ ID NO: 10133 - DNA, 370 bp, Gossypium hirsutum
  Clone ID: LIB3135-011-Q1-K1-F10
gcggtgccaacgacagatctgaacaagaatacggagtggttcacgtacccaggggtttggaccacttatatcttgatggttttcatttcatggctcctcgttttatctctctttggcacctctgctggaaccgcttggacaattgttcatctcgcgcatttctttgtcacatatcacttctttcactggaagaagggaacaccgtttgctgatgaccaatgtatctacaacggtttgacttggtgggagcaaatagacaatggcaagcaactgacacggaacaggaagtttttgactgttgtacctgttgtgctgtaccttatcgcctcacatacaacagattatcaaaacccaatgctcttcttcaata

SEQ ID NO: 10134 - DNA, 220 bp, Gossypium hirsutum
  Clone ID: LIB3135-011-Q1-K1-F11
cggacgaagcccacaccgcccccgcatcggctgcgtgacgtatgacaaaaaacagccaacgcccgctacggggggcgaccccccccggatggcgggcgatccacccgacatcagaagcagggaccaccaacgaggggggtaccgcagaaacccgattcgtccaagcaccctatgaggcagacagctatagaagagggaaacacgcgaaaggcccattttc

SEQ ID NO: 10135 - DNA, 88 bp, Gossypium hirsutum
  Clone ID: LIB3135-011-Q1-K1-F2
cccacacgtccgggtctggaaaggctatggaggatcggtaaccaccacaagctgccggcggatggaccttaataggccatcgtcatgt

SEQ ID NO: 10136 - DNA, 310 bp, Gossypium hirsutum
  Clone ID: LIB3135-011-Q1-K1-F3
cggagacgtccgggggggccaagggaagagttgtccgttatcgataacgggctgcccacggtgggaacggattaggccaaggtcatggttcaaccgggcagacagagcacccgatacttgggactgggacagtgcgcccccaagggtcgccggaaattcggaagaccgatcggcgtacacgcacctgcggacgcataaccgtatgaggtggccaaggagaacagcctctggtcaatggaacaatggaggcaacggaagacagttaaagggattcagcacctggggaaaaggattgcctatgatggctggg

SEQ ID NO: 10137 - DNA, 169 bp, Gossypium hirsutum
  Clone ID: LIB3135-011-Q1-K1-F4
acgacacctctgcggctgcaaagggaagttttgttctgttaccacaacaagctgcccacggttggatggtaatatctcatggtcatgtccaagcatgatccaagcttccatacttgggactgggagagttcgcccatatgtatcctccgaaattctgcataccgatcgg

SEQ ID NO: 10138 - DNA, 414 bp, Gossypium hirsutum
  Clone ID: LIB3135-011-Q1-K1-F6
gcgaatacactgaagttacaagtgagtatgcaaggcaactgcgaggcctagcgagcaaaatactttcagcactatcaatttgcttgggattagaagaaggaaggctagagaaggacgtcggtggcgtggaagagcttcttcttcaattgaaaatcaattactaccccaagtgtgcacaaccagaactcgctctcggtgtcgaagctcacaccgatataagtgcactcactttcattctccacaacatggttcctggcctcgaactcttttaccaaggcaagtgggtgaccgctaaatgtgttcccaactccatcatcatgcacattggagacaccatcgcgatcctcagcagtggatagttcaagagcattctccacaggggtctggttaataaagcagaagttaggatctcat

SEQ ID NO: 10139 - DNA, 419 bp, Gossypium hirsutum
  Clone ID: LIB3135-011-Q1-K1-F7
gccggaatttgggggaagcgctccggagaatccgagaaggagccgcgatgatccgaaccaaaggagaagcggggaccgggaatgttatcgaagctgttaggcatgtcacatccgtgatgggggatattagggtccttatgaacatggatgatgatgaggttttcagcttcgctaagaaaatccagtctccctacgatttggttatgcaaacgaagcagctggggacgttgccagtggttcaattcgccgccggaggcgtggccacaccggcggatgcggcgttgatgatgcagatgggttgtgacggagtgtttgtcggatctggggttttcaagagtggtgacccggctaagcgtgcccgagctattgttcacgccgtcactcactacagtgaccccaacatgcttgcggaagttaac

SEQ ID NO: 10140 - DNA, 371 bp, Gossypium hirsutum
  Clone ID: LIB3135-011-Q1-K1-G10
gagggattggggaggcaacagtgatgctttttgcaaggcatggtgctaaggtagtgatcgcagatgtggaagacacgcttggaactgcgttggctaattctttgtctccttgtgtcacttttgttcattgtgatgttagcctggaagaagacattgagaatttagtaagttcaacagtttcccgatatgggcggcttgatatcctttttaacaatgctggggtgcttgggaatcagagaaagcataaaagcattgttgatttcgacgtggatgagttcgataatataatgagagtgaacgtgaggggaatggcgctgggaatcaagcatgctgcacgtgcaatgattccccgaggtggtgggtgcatcatt

SEQ ID NO: 10141 - DNA, 294 bp, Gossypium hirsutum
  Clone ID: LIB3135-011-Q1-K1-G11
ctcgtatcttccatctgaaataaattaatgggacgtcgtaatatgcaaaatgtgaaagatgcgtgggtctatatttattaaaataatgatagttcaccagcggtctggtggatatcaagtctttgcattcaatcagctatgtatataaagtctcctctgcagaaaacaacaaagaagaagtacctagatatgctggcaagcagatggcttatatatacaaggccgccgtgaactaggatggatcacactatcgctgcctttggggaaaagtaactagacctcatggcaacagtg

SEQ ID NO: 10142 - DNA, 325 bp, Gossypium hirsutum
  Clone ID: LIB3135-011-Q1-K1-G2
cggacgcgtgggcggacgcgtttgcaagattatcaaagcgaccgacaaattaaccctatgaaggttgggtatgtaaccattcgcaccgctaacgttaacgaaggcaattgatcaaattatgaccggcaagtctttaattataaataagaatcatgtatacaattgatgtgcattctgggcgaactcatgtatatgttaatgtgttgtatttaaaggaccttgtgtaaaactggatctaatagatatactagctttgcttcattagatgcgatatactcgctatatattaaagggtgttgttcggcactatttcaataaaaaaata

SEQ ID NO: 10143 - DNA, 299 bp, Gossypium hirsutum
  Clone ID: LIB3135-011-Q1-K1-G3
gttgattatcatcgtgcttgtttggaggatgatgagagcgacggagaacttagccctaagaaggttgggtatgtaaccattcccaccgttaacgttaaggaagtcaattgatcaaattatgtgttttaagtctttaatatgaaataagaatcatgtataaattgttgtgcatttgggcgaactcatgtctatgtttatgtattttatttaaagatctttgataaaaatgtaatctaaagatattactggatttgctacttcaaatgctatatacttgctttggtctaatggtgcttttc

SEQ ID NO: 10144 - DNA, 260 bp, Gossypium hirsutum
  Clone ID: LIB3135-011-Q1-K1-G4
gttgactcatttcgtgctctgaattatgactatcttaactaccgagcacttaccgcctaaaaaggttgggagagataccattctcaccgcttacgtcgatgtggggaagatcacaatcggaatcaacggatttggaatgatcgggcgtaaggatgcctgaattgctctgcatagggacgaacttaagctcgttgctatgaacgatacttacatcaccaccgattacatgacctacatgtgataagtatgacatgtgctca

SEQ ID NO: 10145 - DNA, 344 bp, Gossypium hirsutum
  Clone ID: LIB3135-011-Q1-K1-G5
tctaggcatcactgggctctatgtttgacacgagaccttgttgacatccactcatttcactgctaatgcatctgaaacgtgtatgtgaacattggaactgtggaattgcctaatatgccactcgaattgcctgttttatctttagtcatgggacggaagcttattggaggaagagatgttggagggatgaaagaaactcatgagatgctagacatctgtgacaagcacaatatcactgcagatatcgagctgattcagattgacgaaatcaatacagccatgggagggcttgctgaaattgatgtcaaataccgatgcgggactgacgtgtcaaataacatgac

SEQ ID NO: 10146 - DNA, 400 bp, Gossypium hirsutum
  Clone ID: LIB3135-011-Q1-K1-G6
tattggtaccatggactatatcattgacacagtgtctgcggtccatcccctacttccactgcttagtctgctgaaggtgaatggaaaattggtcactgtgggattgcctaataagccactcgaattgcctgtttttcctttagtcatgggacggaagcttattggaggaagtgatgttggagggatgaaagaaactcatgagatgctagacttctgtgccaagcacaatatcactgcagatatcgagctgattcggatagaggaaatcaatacggccatggaaaggcttgctaaatctgatgtcagataccgatttgtgattgatgtggcaaattccttgtcacagtacggttcattgtgaaagaactagtcccagtaggttaaagattatgatcttaat

SEQ ID NO: 10147 - DNA, 293 bp, Gossypium hirsutum
  Clone ID: LIB3135-011-Q1-K1-G7
tctgtgaacaactagaaaatggccggaccctggctgattacaacatccaaaaggagtacaccctccatttggtgctgcgacttcgaggaggaatgcaaatctttgttaagaccttgaccggaaagacaattactttggaggttgagagttcacataccattgacaatggcaaggctgatatccaggacaaggagggtattgcgacagaccaccagagggtgatccttgctggtaaggaattaaaagatggccgtaccctggctgactacaacatccaaaaggaatggaccctt

SEQ ID NO: 10148 - DNA, 70 bp, Gossypium hirsutum
  Clone ID: LIB3135-011-Q1-K1-G8
ccgggatgccacaggctaatatacggacactgtcgtgtgacaacatccaaaaggtgcactgcctccattt

SEQ ID NO: 10149 - DNA, 372 bp, Gossypium hirsutum
  Clone ID: LIB3135-011-Q1-K1-G9
gagggattgtggaggcaacagtgaggctttttgcatggcatggtgctaacgtagtgatcgcagatgtggaagacacgcttggaactgcgttggctaattctttgtttacttgtgtcacttttgttcattgtgatgttagcctggaagaagacattgcgaatttattaagctcaacagtttcccgatatgggcggcttgatatcctttttaacaatgctggggtgcttgggaatcagacatagcataaaagcatctgtgatttccacgtggatgagttcgatcatataatgagagtgaacgtgaggtgaatggcgctgggaatcaagcatgctgtacgtgcaatgattacccgaggtggtgggttcattattt

SEQ ID NO: 10150 - DNA, 391 bp, Gossypium hirsutum
  unsure (1)..(391): unsure at all n locations; Clone ID: LIB3135-011-Q1-K1-H1
ttccggtcgaccacgcgtncgccacgcgtacgaccacgcgtncgcgttcctgtttcattgtctttgctcctcaattcctgcgaaaagcacatgcctgctggttacaaatgtgcttaagctcatttccactgtttcctcagcaatgtttgggtttttcttttacgtgttcttttttttctgggcttgtttaatttggtattttgatatgtcaagggttagataaaatggtgaaggtttcttttaccttaaccaatagtcaattctcatctatttatacaatatttgtcatgttagtaagaaagaaggcttctcgccttccaatccataaattatgtaccttacaaatcagtgaaataattggatgaaaaaataagttaatttatatttgttt

SEQ ID NO: 10151 - DNA, 233 bp, Gossypium hirsutum
  Clone ID: LIB3135-011-Q1-K1-H10
cccacgcgtacggtgcccacaaagcgttcgatgcggtaccaccttgggtggtaaaccaaatgtgtgcgggatatcatgcactagcgtgctgccacatttgtcccgaacacatgtgtgcaatggcagtcctaggatgatggccaatatagtatcatagctgctcgctgatcaatatcgatagagaggatcagatgccgcatactgatcatgaagccttcgataagaaaattgac

SEQ ID NO: 10152 - DNA, 372 bp, Gossypium hirsutum
  Clone ID: LIB3135-011-Q1-K1-H11
cccacgcgtccgggctttctcttcatgcaagaaatttttgatgttggagttgaccatcaaaattatttttggacttcgatgcttcatatggttgtgtttgtttctcaacgatggagcatgagttgatgaattgatcctacagttgctgccaatgtgaaccgaaaatttccaaaggtggtcctttaaatccaagggtggagttgaagattggctctacttttatgtactgtctatggtgttgtatactattctttcttcttctacctttgctctaaggtcttctttttcttgttctattgttcttggttctgtacgtttggagacaatagtatgggtaatgatataaaactgaaatgagattcattttatttt

SEQ ID NO: 10153 - DNA, 99 bp, Gossypium hirsutum
  Clone ID: LIB3135-011-Q1-K1-H12
cgcccacgctaacggcatatataccctggttatgtaagggctgctttggccactaccatcaaagaggggggatgtggtacattgatctttattaacagc

SEQ ID NO: 10154 - DNA, 363 bp, Gossypium hirsutum
  Clone ID: LIB3135-011-Q1-K1-H2
accagagacaacaacttgctcggtaaatttgagctctctggcatccctcctgctcctagaggtgtcccacagatcactgtctgctttgatatcgatgctaatggtatcttaaacgtctctgccgaagacaaaaccactggacaaaagaacaaaatcaccatcacaaacgacaagggccgactcttcaaagaagaaattgaaaagatggttcaagaagcagagaaatacaaatccgaagatgaagaacataaaaagaaggtcgaggcaaagaatgcattggaaaactatgcatacaatatgaggaacacagttaaggacgaaaagattggtgccaaactcccagcaactgataaaaagaagatc

SEQ ID NO: 10155 - DNA, 345 bp, Gossypium hirsutum
  Clone ID: LIB3135-011-Q1-K1-H3
cgtgaattggtaaaatctgttcccttggccagtgatgattaaaagcttaatccctggttgcgctcgtagggtactggtggtatacatttaagggtctggttgattgcgaggatgaacaatataatatataaataaagcagactaggtctccttgctatggagcattttaattcggctttgtgttggaagtaaaaatcaaatatgtgatgggttttgtaaataaatgcagtgttctggctttggactgcctcttgaaatctggttgaagatttgtatgtatgtaaagctaacagtgtgcctgtatgagaggtggtaagaattgcaatcgtaaattcggtctcgctt

SEQ ID NO: 10156 - DNA, 249 bp, Gossypium hirsutum
  Clone ID: LIB3135-011-Q1-K1-H5
ccggaatgacggagcgacccacgcgtacggaaagaatccccccggaccaacaacgcctcataatagccgggaagcaacacagggatggccggaccctagccgaatacaacaaccaaaaggaatggactcgccacctggacagacgcctcaagggcggcaccaagaagaggaagaagaagaccgacaccaagccaaagaagatcaagcacaagaaaaagaaagacaagctggccgggctgcaaaaataca

SEQ ID NO: 10157 - DNA, 352 bp, Gossypium hirsutum
  Clone ID: LIB3135-011-Q1-K1-H6
tgcatatctagttatatgtatatgaattttttctacttttcgcttatcttgtctgttctttattttatagtcttagggtgttctcatttttttcttcgctgtttattactggcagttttaactatatgatgcttgcgagttgatgttcatggataggcttagaatagatgcctttaatgttatcaatagtgcagccgcctcacaccatagggaggcagaatgtcttcttttttggtttattgtggagccttagcttatatgttttgaacaattgtaaacagaaattgtttaccttttataacttgctctatagcttgctacttgcaaaaaaagccacgtgttgaatgattac

SEQ ID NO: 10158 - DNA, 403 bp, Gossypium hirsutum
  Clone ID: LIB3135-011-Q1-K1-H7
ggcgtattcctttatcgacaattgacagcctctatccttttggcccacacttgcattactgcattcgtatagacacgctttgcggatcattgtcttgcctgtttactgccggcaccccccccatttgccttatttggcctttatcatctatgatacgtccctctttcaaggcatcacttgcaattggatcaacaaacgcttcttattttcctcatgaatccatcatgggaggaggaaatagccaataatccaagatggcccgtgagaagaacttggaaaagcaaaaagctgctgccaatggaagccagcttgagtctaacaagaacgccatgtccatccagtgcacggtgtgtatgcaaacattcatgtgcaccacaacggacgtgaaatgtcgagagcacgc

SEQ ID NO: 10159 - DNA, 411 bp, Gossypium hirsutum
  Clone ID: LIB3135-011-Q1-K1-H8
agcaaatctactgatctcccaaccatggcgttcgtgaaactgttcggagcttggcttagttcgtacgtattcagagtaagttgggctctgaaactcaaaggcatacttgacgaatacatcgaagaagatctctgcaacaagagtcctttgctgcttcaatataatccaattcataagaaagtaccggtcctagatcatgacggaaaacccatgtgcgaatccagcgtcattcttcgatatatcgatgaaatttggccgaaaagtccattgctgtcggctgatccctatgacagagccgttgctctgctttggatcacatttgctgatgacaagagtcctataatagcaaagctttatcgaacacgaatgtgaagaacaacatgtggtagtgaacgagtgcgtgtgaatgct

SEQ ID NO: 10160 - DNA, 289 bp, Gossypium hirsutum
  Clone ID: LIB3135-011-Q1-K1-H9
cccacgcgtccggtggtcacaagcgttggatggggtgccaccttgggtggtgaccaactatgtgcagtttatcatgcctggcgtgctgccactgtgggaacaatgactgtgagccatgcgttccaagagcatggccagattccggtcatagatgtcagcatatgaatacccatagagaggatcagagcccgcagaatgatcatgacacatctcattagaaaattgaccagagatgtggagatggtagcaaatctatcagtagctggaaatgtagtgactctactgagac

SEQ ID NO: 10161 - DNA, 384 bp, Gossypium hirsutum
  Clone ID: LIB3135-012-Q1-K1-A1
acgcgttcgaagttcagtatgattgcagctgggacaggataatgaaactgggaattctagagattcctttagaccacttgatcagattcagtggaatttcagtctcacagatctgactgcagacttgtcaaacttgggagatctaggtgcccttgggaattaccctggttctccttttcttccctctgattcagaaattttgcttgattcttcggagcaagagaatatagtggaggaattttttgttgattctgtccccgaacagccgtgcttctcgtctgatgaagataaatcctagataaaggttagtaacgttccttcttgaaattgttaggaataagaacaagatttgacatctatttagtatgcatttttaaattttga

SEQ ID NO: 10162 - DNA, 328 bp, Gossypium hirsutum
  Clone ID: LIB3135-012-Q1-K1-A11
acctgtaaatatactccaattttacgataatcagtttcttgagactccgaagaagcctttctcccaggattgtttctataatttacaaaagaaaaaataataataactggttaatttcgtcaggggctaagcttgtttgctttcataaatagttctatttacattttttaatttattggttctgggtatactaggttctcggtcgatcgtccattttcaatatgtttgaggatgggttgcatggttttttccactggaagggacttgcagcgatacgataacctatgcctgcgccaaagttgtcgggtgcatttcctatagatacaaa

SEQ ID NO: 10163 - DNA, 215 bp, Gossypium hirsutum
  Clone ID: LIB3135-012-Q1-K1-A2
gatatgttatattcaatgctaacgaggggaactagcttggtggccctggacgtgtactgactaattggtgagctggccacgccccgcatgttgaacatgaaccacagcatattgtgtcccgaggctcgtgctttgaaccatatgacacttacagtcagccacagtgcgccgcttagagctgggtctatcaggagttctatgataagcgctgcaaa

SEQ ID NO: 10164 - DNA, 235 bp, Gossypium hirsutum
  Clone ID: LIB3135-012-Q1-K1-A3
gaaaaacgggacgacccacgcgtacgggcagaaaatatggagcaaaaaggaaacaagcagaaagggggaacacagaggaagacgaaacgggaaaagaagaccacaagaacaaaaaagcgacaaagggggaaggaaactgatagacaggaatcgaacagggaagagacaaacagtgacagtgagagagacagcgacgagaacaaaggagttgaacggagagcccaacaccaacgaa

SEQ ID NO: 10165 - DNA, 360 bp, Gossypium hirsutum
  Clone ID: LIB3135-012-Q1-K1-A6
tgctgccccaaggataagtcaattaagaggtttcttgtgaggaacattgtggaacaagctgctgttagagatgtccaagaagcctgcgtttatgacacttatactttgcctaagctgtatgttaagatgcaatactgtgtctcgtgtgcgatccactcccacgttgtgagagtccgatcccgcaccgataggaggaaacgtgatccacccgcccgcttcatcagacgcagggatgatatgccaaagcctggtcagcctggtcaagcaccacgtccaggtgttgcagttcctgctcgtgcttaaggcctgtgaaaagcttttagaatacattttctatattcctaatttggttttaaaatg

SEQ ID NO: 10166 - DNA, 430 bp, Gossypium hirsutum
  Clone ID: LIB3135-012-Q1-K1-A9
tcgccgaccccgtgcatctgataaatccctaaccccttccctcctttttttcccccaaatcgaagatccatcttcacctccgccgatccaccatttcacctccggtcctccacgactccacctgtgctctaacagtgcttctagccttgtacgtcttctacctttgaatttcaaagctcatcagatggtaatgttcagtgctacatggcctgcagcggttcatcggttagctcaggagtacatggaccctaatcctgttaaggttgtgattggctcagaagatttagctgccaaccatgatgttatgcagatagttgacgttttagatgatcgtgcacattatgagcgattgactgcatttaaaatttctcttcattggctaaatagaatgggcagcatttaaaatttgtactctggatgtgtgtgttct

SEQ ID NO: 10167 - DNA, 333 bp, Gossypium hirsutum
  Clone ID: LIB3135-012-Q1-K1-B1
aaaaaaagaaaaggaaaaaagaaaaaaaaggaaaaaaaaaaaagaaaaaaaaaaaaagaaaaaaaaaaaaaaggaggaaaaaaaaaagaaaaaaaaaaaaaaaacaaaaaaaaaaaaaaaaaaaaaaaaaaaaaaaaaaaaaaaagagaaaaaaaaaaaaaaaaaaaaaaaaaaaaaaaaaaaaaaaaaaaaaaaaaaaaaaaaaaaagaaaagagaaaaaaaaaaaaaagaaaaagaaaaaaaaaaaaaaaaaaaaagagaaaaaaaaaaaaaaaaaaaaaaaaaaaaaaaaagaaaaaaaaaaaaaaaaaaacagaaaaaaaaaaaaaaaa

SEQ ID NO: 10168 - DNA, 169 bp, Gossypium hirsutum
  Clone ID: LIB3135-012-Q1-K1-B10
aaggaaaaccagaacaacaacaactattacaatggtaacaatgagtacaacaatgttgagaagcaggggatgaatgatactacgtgctctgagaatgggaagtgctactatcgtgtgggttctgagaacaactactacccgaaccggatggagaacaccaactgggcac

SEQ ID NO: 10169 - DNA, 332 bp, Gossypium hirsutum
  Clone ID: LIB3135-012-Q1-K1-B11
gccagctccatttgtgttgcacactgactgtcctcactattggcgctatcatctagaaggggagacggaagaggagttctcaacacgattagccaacaatttagagaacctcattctgaaagagggtccagagacgattgctgcatttattgccgagcctgttatgggagcaggaggtgttatacctcctcctgctacttattttgagaagatacaagctgttgtgaaaaagtatgacatactttttatcgccgatgaggttaactgtgcatttggaaggctttggacgatgtttggatgtgacaagtacaatattaaaccagatcttattt

SEQ ID NO: 10170 - DNA, 413 bp, Gossypium hirsutum
  Clone ID: LIB3135-012-Q1-K1-B12
cgcgtccgagcagatgctgctgaattctgcaagtctctctcggcattaactgctcatgaaggagctactgttgtttcaacaattaatcgctctatgagatcatatgcaactgccattgttgcagcagagtacctgctacaatggctacctaaaggtactcatcaatggtcgagtttcctgaccccagaagaactcaccaagattttaaaatgtgcaggggttgatgtaagcaaaccaagcaatcccgttgatatctgaaactgaactaaccactgtgcgttatgactaacctctgcgctgctgaattgttgggtgaataggtgaaagagatggcgggatttgtgtacaaccctttaacagggagttggtcactattggatgatattagtgtaaattttattgcttatggtact

SEQ ID NO: 10171 - DNA, 129 bp, Gossypium hirsutum
  Clone ID: LIB3135-012-Q1-K1-B2
cccacgcgtacggtaaaacccttttaaaaaacactcattttcttgaaagatacgaaagaggtggatttatttgcttgaagcgtggaaggaaagacgatgtaaaagcggcaagtgatagctcagatacct

SEQ ID NO: 10172 - DNA, 341 bp, Gossypium hirsutum
  Clone ID: LIB3135-012-Q1-K1-B3
cccacgcgtccgcttatggtggattcatttgcaatgagtgtatacaagaaacgttgcggtaaagctttaatggcggatgctaacaatggtggtggattggaaaatacgaacgttgtaccaatcgataattttgaacacggccatagccattcacttgagatgaatgacgacgtatcatcacaattgttaaggcatcgagttatagctcaggaatatatacatgtttgaatcctcaaattcgatgattttgcttttcaagtctttacattatatatttcctaaatgtaggtattagagttgggaattgtagttcattcagtggtgattggtcttgcaatggg

SEQ ID NO: 10173 - DNA, 268 bp, Gossypium hirsutum
  Clone ID: LIB3135-012-Q1-K1-B4
ttcgggaaagaattttggaggtggggttgcctcttgagccatatgagtggtatcttgacctgcggcgatacggaactgttaaacattgtggattcgggctaggctttgaacgaatgattctctttgccactggcatcgagaacattagagatgttattcccttcccaagatatccgggaagagctgatctctgattggatttttctaagatgacgtgagaaaatggtcttggttttcaagttaatactcatgggttttagtaaatttt

SEQ ID NO: 10174 - DNA, 404 bp, Gossypium hirsutum
  Clone ID: LIB3135-012-Q1-K1-B5
aaaaaagggagaaaccaaaaaagggaaaggaagggaaaaaaaaggggggagcaaaaagaaaaagacacaaaagggaaagagaaacaacaaaagcacagaaaacgggggcaaaagaaaacaaagagaaaagaagagcaaaccgaaaacagaaaacaaagggcgaaacaaggaagaagtgataaagaaagaaggaagaacaagaagaaaaaagagaaggacaaaaaggggaaaacgaagaaatgaaaaaaaggggaacacgaaagcgaagaacgcagaagagcccaaagaagaaagaaaaaaaaagaaaccaaaaagggagcgaaaacaaaaaaccaacaagagggaaagaaaaccgggacagaaaaaacgaaagaaagaacaaaaagaaggggaaaaaacagagg

SEQ ID NO: 10175 - DNA, 233 bp, Gossypium hirsutum
  Clone ID: LIB3135-012-Q1-K1-B6
acggggcaggcggacgcgtacgggtacataatatcggtgcagaataaacatgatttcatgagagagaacgtataaccgggggtggctattcagtactcaagaggagatcaagctgataaagcttgagagaaaactatcagatcgccaactgcggatagtgtatcggactatcttcatagtgttcaagaagagggggatggaggcatcattgccaagaggactctgctacaagc

SEQ ID NO: 10176 - DNA, 270 bp, Gossypium hirsutum
  Clone ID: LIB3135-012-Q1-K1-B9
acccacgcgtccgaaaagttattgtaatttgcatgcaagttgtctttcgttctatgatttgagtcttgccttgcatcaagttgaattgtaagttttggtcaaaatttgtaattctttagcattgtactgcttacatacataaattcttatatatgaatactgtaaatttgtccggaagctttgcattattggatgaaaattccaaaatttcttgaaaaaaataaattaattaattatttttttaatattttgttatattaattatatact

SEQ ID NO: 10177 - DNA, 134 bp, Gossypium hirsutum
  Clone ID: LIB3135-012-Q1-K1-C1
gccgaatatactaaatcatcggttgtttgcctattagctctggtacctaagctcagtttacacctccgttagacaacgtagttttactctagcgttgtctccgggcgcctacagattgttgcttgtgcgacagg

SEQ ID NO: 10178 - DNA, 385 bp, Gossypium hirsutum
  Clone ID: LIB3135-012-Q1-K1-C10
aagcaccttccgttcgtgaaagggacggagcatacggagtgactgcaagcgtgggggttcatcaacagcatagccctatcggcttaatcacgagaactactctttgctttaaggcttgtaccacctcaagaaccagggcattagctttcccggagcaaagactgattacgctttcttgcttgaccgagctgatgcatgtgcatcggataataaagggccagtgagtgtcttaccttcatgctgatgaagaatatgaccctgatgcgaatcgtgagtaaaagaaaaaagcaaggctatatggatggaggatctggtgcataggtgtgaaatcttttttttctcatgcctaaagctatttttgatagcgggcattttacaaggggtg

SEQ ID NO: 10179 - DNA, 279 bp, Gossypium hirsutum
  Clone ID: LIB3135-012-Q1-K1-C12
gtgctaccttccttctgtaatggccactgctacaatgttgcacgttgtggattgcgtagaacctaatcttagagttgaatacgaaaaccagctattaggcatcctgggaattgataaggagaaggtagatgaatgctgtaagctgataacagatctggtaacaacaatagttcaagggaacctatcaaagaaacgtaggtttagtagctccattccacgcagcccgaatggcgtaatggatgtgtggtttagttccgacagctcgaacgattcgtgggc

SEQ ID NO: 10180 - DNA, 381 bp, Gossypium hirsutum
  unsure (1)..(381): unsure at all n locations; Clone ID: LIB3135-012-Q1-K1-C3
acgcgtccgcactggttcagatgaaatggtgagagccaatggagagaaagtgcttagcagcatgaagagctttgatgaatgggaaaaacttgcgaagcaaatggggtttatcccagcacttcgtaaacatttggacgggattaccgatgaccatcactgcactcgccttatcctaccgggaaacggtggcgggattccggagagggtgcagtgtgctgagtgtggacgtccgatggagatgtatttcatgtatcgctgctgtgttgagtgagctaaacaaagccacaaaaattactattggggggaccaagntaaatacaagaaataaaaatataacaatcatcataattgatgtttggttagaagtattaatgatgatca

SEQ ID NO: 10181 - DNA, 324 bp, Gossypium hirsutum
  Clone ID: LIB3135-012-Q1-K1-C4
aggctttagctcagtggaatcacatcttaccatccatccaaatggtgcattgagcaaatttactagttcgatatgttgaccaaaggaccttatttacccagcttctaaccatgcttcagcttgttattagatatactcttgcatcctacatatatatgctacatttatctagacaaaatgctctggcattattagcaaaccacctcctgaagcttcattgaaaacaccgtgtggacgtgcttttaggcccatcaggcatttgcttgagttgacacatgaaaacaaacaaggagcacatattttgtagtttggaaactttttaaa

SEQ ID NO: 10182 - DNA, 267 bp, Gossypium hirsutum
  Clone ID: LIB3135-012-Q1-K1-C6
cttgatcgataaaacaccccacccagattgttagtttgcaatcccatcaaatcatctatcatcaattgcctaacgtttcctttttggtttattgccgtctcccataaatctaatctaagttgttttaaagaaataaaatgagctggtggtgggctggtgctatcggagctgctaagaagaaatttgaggaagatgaagcaccgaaaagcctcaagagcgttgggctgatcattggagtcaccggcatagttggcaatagcttggctg

SEQ ID NO: 10183 - DNA, 196 bp, Gossypium hirsutum
  Clone ID: LIB3135-012-Q1-K1-C7
ttcactcgatcaatcacatgacggatatcgtacatttgctaataatgcaaattggcggggaggatctggccaatccgtccttagggacctatgagtctcccacatatgggaagcccatggcgtgccgtattaaacaacctaaggggaagcccgcaccttatcaacatcctggttataaaccatgctgaggtgaaac

SEQ ID NO: 10184 - DNA, 163 bp, Gossypium hirsutum
  Clone ID: LIB3135-012-Q1-K1-C8
cggctaatgctgttttagcagactacatgtcatgcgacaaatggcaggaagaaggggatggcgatgaccaccttgacgacattaagaaggactggctaaacccggaactcttcaaaaaagatcctatgattggtagcttgaagcagacaatgcatacgacaaa

SEQ ID NO: 10185 - DNA, 107 bp, Gossypium hirsutum
  Clone ID: LIB3135-012-Q1-K1-D1
tatgtattaatgttttcttttactagcgagagtgcttatggcagtactcattggaatgcctattttatgtcttcttatttctcaatgagcaatatcctgatttcaac

SEQ ID NO: 10186 - DNA, 229 bp, Gossypium hirsutum
  Clone ID: LIB3135-012-Q1-K1-D10
ggtgttccagttggtgctgtggttgttagatgttaaagtctgtggtttctttggggacaacagggtggttgttgctcgtcctgtttgtcgtagaaacttaatgtcgcttgagcaaagcatggtattgtatctctttctggatgtgttgatccattttcttgtattgagcaattctttggcttctttaaccatcgatttgttttgccatcgtcaataaaaaaaaaaatta

SEQ ID NO: 10187 - DNA, 377 bp, Gossypium hirsutum
  Clone ID: LIB3135-012-Q1-K1-D11
cgtccggaggccgcggctttcacttcccttctctcacctcttacagaagccagaagtcagtttagtagcaatggcgtatgctgcgatgaagcctaccaagccgggtttggaggagccccaagagcagattcacaagatccggatcactctctcctctaagaatgtgaaaaacctagaaaaagtttgtgctgatttggttcgcggtgcaaaggataagagactgagggttaagggaccagtaagaatgcccaccaaggttcttcacatcacgaccaggaagtctccctgtggtgaaggaacaaacacatgggatcggtttgagctccgtgttcacaagcgagttattgacctattcagttcccctgacggggtgaagc

SEQ ID NO: 10188 - DNA, 299 bp, Gossypium hirsutum
  unsure (1)..(299): unsure at all n locations; Clone ID: LIB3135-012-Q1-K1-D2
aagaataaccttgacccttcaggcagggctgccctgggagtccatctctctgcttacaatgccgagactccactcagcaacatgccatcccaggttatcgacaatataccacggatgattgaagttcccggagttgctatacagagctagtacctgcctacaggaaggaaagcagaacacatgaattgaataattcagagtagaatttgtggcagatatccatgaaacttcataattctctgatgtgtactataagcgatgtttatgagtaactaaaacaatntctgattgtttgatca

SEQ ID NO: 10189 - DNA, 379 bp, Gossypium hirsutum
  Clone ID: LIB3135-012-Q1-K1-D3
tctacatcgagaacaaacagcagtgtcgactactcgtttagatcgcaaattaactagagtaggcatatagttccatgatgctcttcaaactgtaatagtaatctttgaggtaactgtaaattccagagctttttgtagaaattttttaaatcggtatgtaataataagttgttaggattcgagctagtgctttgtaatagtttgtaggcacttctgaccgaaaatcaactccttggagttccgctagaaagatttgcaaaatcttttgggcagtgtctgctgggaaggtacttaacactagttcagactttcacatattatttgatgcatcaattaaatctgaaactaattggacttcattattgttttcgtgactctt

SEQ ID NO: 10190 - DNA, 298 bp, Gossypium hirsutum
  Clone ID: LIB3135-012-Q1-K1-D6
ggaacagatttcaagtatcaatatgcacacacatggttccggcaaatggacaagttcattcattatgttaatcaagatggacgtgtgaatgccctatattctaccccatcgatatatactgatgcaaaatatgctacaaatgaagcttggccactgaagactgatgactactttccatatgcagaccgtataaatgcctactggactggatattttacaagccggcctgcactcaaaggttatgttaggacaatgagtggctactatttggtaagatgtatattgtacaagcccaatc

SEQ ID NO: 10191 - DNA, 368 bp, Gossypium hirsutum
  Clone ID: LIB3135-012-Q1-K1-D7
cccacgcgtccgcccacgcgtccgtgtctctctgccaatttgattaaaaactaaaaaaagaaaaagcttcaaaaaaaatggagaagatgatggcgttgacatccgtttatagagcagcatgtttcacatcttcccgttttacccccatcgccgtcacggccgccgtcaaccacaatcggcacttggtttcccggagtttcttctctatctcatcgcctatcgcccctaatccgcctagaaacaccccttctggtgggaggtcgttctttgcgttgagatcgggaagcatgccctatttttagtgaagatgcagcttatttgcctgacataaacgaccctgagattctgaatgttttcaagggacttaa

SEQ ID NO: 10192 - DNA, 364 bp, Gossypium hirsutum
  Clone ID: LIB3135-012-Q1-K1-E1
ctcactcaacattcccatttccaatctccagctcccaaggtaaatatgccgatcagaaacatagcggttggccggcccgaagaggctactcaccccgatgctctcaaggctgctttggctgagttcatctcaaccttgatcttcgttttcgctggatcgggctcaggaatggcctttaacaagttgactgacaacggagcaaccaccccggctggtctcgtagccgccgctctagctcatggcttcggtcttttcgtcgctgtctccgttggcgccaacatctcaggtggccacgtcaaccctgccgtcaccttccgtgcttttgttggcgggaacatcactctcttgcgcggcattctttact

SEQ ID NO: 10193 - DNA, 251 bp, Gossypium hirsutum
  Clone ID: LIB3135-012-Q1-K1-E10
gttcgatgcacgcgtccgaaaaaaaaaaaaatattattttgtaaatattcataataaattaaaaaatataaaggaaaatggggaaaaaatatgatgtaatgttattacttaaaaaatattaaaaaataaatggggggacacttaaaaggacccatctttacttcggcgtgaagggaaagacttattacatttattagggaccaaaattcaatcaaattggtcttttttttacaaggccaaaatcgggaaaa

SEQ ID NO: 10194 - DNA, 424 bp, Gossypium hirsutum
  Clone ID: LIB3135-012-Q1-K1-E12
cccacgcgtccgtgttaatgtgttttgctattataccatcaaaattaaacttggatacaaggaaagagtatggatatatattttggttctgtaatattattattaatttggaaaaaggatggtatgaaatagtgacgtcacgtcatctgtacctttttctaataattttatgttatattaatatttttattttaaatttcaggattttatcctaaattttaatattttaatttagatttatttttttaagataaaattctaaaatttaaaataaaaatattaatttaatataaaattattgaaaaaatatacaaatgacgtagcgctattattttatacaatttttccctattaatttgacacaaaggaaaacaaagttgcatatcagttgtgtccgtgcacaattgaacttgtcttcgtgtgt

SEQ ID NO: 10195 - DNA, 274 bp, Gossypium hirsutum
  unsure (1)..(274): unsure at all n locations; Clone ID: LIB3135-012-Q1-K1-E3
taagcaaaacgggaaggaaaggagtggccttgggcacagaaaatatccagcangaggaggaggaggaggaggttagttgacctttgtaaagcgttttagtattgtcagaataaagcttaaatatcaaataaggtattcgattaatagttaaagcatgtcaatcagttttcatgtagatatcctttagttttccaaatatatttggcctgtctatgtacgttgtttgaaatgtttttgcatatagttgaggaatgaagatgcttgtcgttttggt

SEQ ID NO: 10196 - DNA, 279 bp, Gossypium hirsutum
  Clone ID: LIB3135-012-Q1-K1-E8
ctcggattgtaatttcggggtgggcgtacgcgtgcgcccacgcgtccggccgacctttagaaattttcaggaaccctaagagcttctcaagggaaaaaaacataatttgatcatctaggatagattttagtttgtgggatctgaataatcaagttttggtataagttgtatttgcagtgttgaatgaagactttgattagatgtgattctctgtaattctgctgaaccttgtaaagaggtattcaaaaataaatatatgtttggatgttggtgtttttt

SEQ ID NO: 10197 - DNA, 221 bp, Gossypium hirsutum
  Clone ID: LIB3135-012-Q1-K1-E9
gggcaaagaaagtcacaaacatacccgatatttagagcgccggagatagaagcggcggcaggcataaagtggagaatttccatccacttgctgtttccttcgataccgcttactcaggattagaatctaatagaaaggggtcaacattacgaaattagccaggttcagttctgactataactgcaacctatctcaattggggagaaatgtaccgccctcga

SEQ ID NO: 10198 - DNA, 172 bp, Gossypium hirsutum
  Clone ID: LIB3135-012-Q1-K1-F10
cgtccggtaatttgatcatggcattgttgttgaggaatcataggcatcacagggggttcaaaaagggttgctcattatcttttagcatggagggagaggccatggatttggcatattaaatagttgtttcttcatattaagaagtagagaggtagagaggtaaagggtaagc

SEQ ID NO: 10199 - DNA, 193 bp, Gossypium hirsutum
  Clone ID: LIB3135-012-Q1-K1-F11
ccggaggcaaactatagtgtaataatgtgtggggaagactatatcgatgcattttgagaagctttgacggatggatatgcctggaaagcatgaccgagatattatgcgggttctcgtggaatgttgcttgcaagagaaggtctataacaagttcttcacttgttcttgccgctaagttgtgtgagcatgaaaa

SEQ ID NO: 10200 - DNA, 425 bp, Gossypium hirsutum
  Clone ID: LIB3135-012-Q1-K1-F12
gacaatgtgaaggcaaagatccaagacaaggagggtatccccccagaccagcaaaggctcatctttgctggcaagcagctcgaagatggtaggacattggccgactacaatatccaaaaggagtctacccttcacttggtgttgcgtgcgtggtgggatgcacatctttgttaagactcttactggaaagactatcactctagaggttgaaagttcagacaccattgacaatgttaaggcaaagattcaagacaaggaagggatcccaccagaccagcaaaggctcatatttgctggcaagcaacttgaagatggcaggacattggctgattataatatccaaaaggagtctactctgcatcttgtccttcgccttcgcggaggtttctaaataaggattgcttgccgttgttgtggcctttttt

SEQ ID NO: 10201 - DNA, 352 bp, Gossypium hirsutum
  unsure (1)..(352): unsure at all n locations; Clone ID: LIB3135-012-Q1-K1-F2
ggaggccacaaggtagaggactaccgcaacacttttgcaaaccttgcactgcctctgttctccatggctgagccagttctacccaaagtcatcaaacacggtgacatgagctggaccggttgggaccgatggatcctgagagacaacccaactttgagagaactcatccaatggctgaaggataagggcttgaatgcctacagcatatcaatcaggcagggagattaagttcttctaccatggggtggccacgtccttgaaagtctttgtataatgtatagtatattagtctgtcacaatttgtattgaatattgcgtctatttaataacagaagtnaccttttctttattc

SEQ ID NO: 10202 - DNA, 320 bp, Gossypium hirsutum
  Clone ID: LIB3135-012-Q1-K1-F3
agaaaacagaaatggctcgctctttctcaaacgctaagcttttctctactttcgttgtcgatggaatctctaacgttatctccagacgaggatatgcggcggcgtcacaaggaattgtgtcgagtggaataagaggaggagcaggaaggagcgctgctgcggtagtcaagaaaacaggggaagagatgtctggcggagctaaagagaaggtttcatgggttcccgacccggttaccggatgctacagacccgaaaactgtgccaacgagatcgacgtggcggagctcaaaaccaccctctttgagaagtagttaattaac

SEQ ID NO: 10203 - DNA, 291 bp, Gossypium hirsutum
  Clone ID: LIB3135-012-Q1-K1-F4
cctatactaaagtcaattacattactctactttcacttgttctagctttatcgcttgtatgtgatactttttcccttctcgtcctcctgggcctccttgccgcttggctcttcttatacttgttccgaccgtcggatcaacctctcgcaatcttcggccgtacattctccgatcgtgagacgcttggcatcttggcggtgctgacggtattcatcgtgttcttaaccagcattggctcgctcttgatctccgccatcttgtttggagttgccattgtttgtatacaccgtg

SEQ ID NO: 10204 - DNA, 377 bp, Gossypium hirsutum
  Clone ID: LIB3135-012-Q1-K1-F5
ctcacactttctccttcccgcgtcgattcatctccatcagatacatgctcttagagcctggaggaatcttggccggagatccctcctcaacttcaatttcaacgaagagaggaggagaaatctgtagcgtgctcgcgcggtaaggtttctcagtcactggtcttactatgcttttttttaaaaatggtgaatgattcccatagaatacgaaacgatgtgaagaaaggtaaagagattcgaaggaagaaaacacatctgctattctttgccttctattacgtgtatattccgcgaatatgcggtagttttggttgggggttaccgattacaaggttcaaaactttttgtttataacccaaaaaaaaagggaaattcaa

SEQ ID NO: 10205 - DNA, 52 bp, Gossypium hirsutum
  Clone ID: LIB3135-012-Q1-K1-F6
gaggtcaaaaaaatatatattagaacttagattaacagagggttaaatcttt

SEQ ID NO: 10206 - DNA, 231 bp, Gossypium hirsutum
  Clone ID: LIB3135-012-Q1-K1-F8
agttgtctctgtggaaaacaaaatatctaagcgcggaggcgaaacgctgcgaagaatcaaaaggcatagggttctcagctggaggccagagctgtagccctcaaagttaggtgccctatttgcaaggtgcaattagctaatgaaaaacaacttggtgatcattatggctccaaacattcaaaggataaccttcctgttgtgtcaagttgattgctttcttcccatgttaaa

SEQ ID NO: 10207 - DNA, 378 bp, Gossypium hirsutum
  Clone ID: LIB3135-012-Q1-K1-F9
ggaacaattcctaccagtggtccatttgagcacattcctttgagcaacttcgaggaaaaccctcgtctcgaaggcccggagttgttggggcttgcaagttacgatacaaactgctcgtgaagaaaccgattgatgctacaaaagtttcgaatttaaatatgtagtcacaagattttaagtgtattatcagagtataatggggtaattgtggaaatgcaatctcgtataagtatctgtaaatcagaatttattagcatatgtaacaaaaactatcatgctcttcctatgatgttttcagacaaactagtatttgatgtaatggtagcgacaaggttacttcttgtgtgcaaaaaaaaaaaaaaaaaatttttatttttt

SEQ ID NO: 10208 - DNA, 65 bp, Gossypium hirsutum
  Clone ID: LIB3135-012-Q1-K1-G1
gtgcaataaaaaagggtactcatttatgcgtaaaaaaaaaaaaaaaaaaaaaaaaaaaaaaagag

SEQ ID NO: 10209 - DNA, 398 bp, Gossypium hirsutum
  Clone ID: LIB3135-012-Q1-K1-G10
cccacgcgtccgcccacgcgttcgcccacgcgtccgttttgcttttattttcttttctaggaagaagctgtaatttaaattttttccccctatacatgagtgttgtattaagacatcatctagagccgtaagagagaatctctacagctcttaggtaatacataaaaaaggtggtttttttggggggacatttcaaagaagaaaggcttcgtcaatagtatactggaatttgaaatcaaatgataaaatttcttttcaaaaaataaaatttttcatataaaatcatttttttttttttttttatcctttttttatttttttttttatttttttatatctaatctttttactctcttctttttttttttttaatcttttatacatttcttttttttttt

SEQ ID NO: 10210 - DNA, 298 bp, Gossypium hirsutum
  Clone ID: LIB3135-012-Q1-K1-G11
ctttgcacccatcatctattttccagccaatgaaaaatgatcttttaagtgctactcaaaaagttgtatttgacaaggctgatgatgtaactactacagcagaactggctcaagctagaggcattcaccacgaactgcaaatgctacatccctcaaaccattatgatcaacatcaccatcttactcatggtatgcaaaagcagcagcagcggcagccaccagaacatgatgatttatctttgaaaaaattggctgcagatgctcctctttgtggatcatcaaatgtgttgggtgggct

SEQ ID NO: 10211 - DNA, 307 bp, Gossypium hirsutum
  Clone ID: LIB3135-012-Q1-K1-G12
cttctacttaaggttccaccaacattgacatttgtgatggatggtgaaatgcctacttatctgcttgcaaaggatttgattttgcacatcattggtgaaatatctgtagccggtgcaacatataaagccatggagtttgtcggcacaacggttgaaagtctaaatatggaagaacggatgacgttatgcaacatggttgttgaagctgggggaaagaatggagtcgttcccgctgatagtactacatttaagtaccttgagggtaaaacatccctgccatatgaaccagtttacagtgatgcacaag

SEQ ID NO: 10212 - DNA, 374 bp, Gossypium hirsutum
  Clone ID: LIB3135-012-Q1-K1-G2
gcggcgatgagatgcagatcttggtccaaaccctcacggggaaaaccattaccctcgaggtcgagtattgcgacaccatggactatgtgaaagccacgatgcaagacaaggaaggcattcctacaaatcaacaacgccttatcttcgcccggaagcatgattgaagacggccgcaccttatccgactactatatccagaaggaatgcactcttcacctggtgcttcggctacacagcggtgccaagaagaggaagaagaagacctacacgaagcccaagaagatcaagcacattaagaagaaggtcaagctcgccgctctgcaattgtacaaggtggacgagtctggtaaggttcataggctgagaaaagagtg

SEQ ID NO: 10213 - DNA, 362 bp, Gossypium hirsutum
  Clone ID: LIB3135-012-Q1-K1-G3
attggttgcgaggagcattgtcgacgatggatcgagatttcggggtgttgaacaaagtgttccataacatcaccgatacgcatgttgctcatcacctcttctcaacgatgccacattatcatgcaatggaggccactaagcaatcaaaccaatactcggcaagtattatcctttcgacgggacaccgatttacaaggcaatgtggagggaggcaaaagagtgcctttacgttgagcctgacgttggtggtggtggtggtggtagcaaaggtgttttttggtatcgtaacaagttctaaagaccgaccaactgcctgatagctggccggcgaaatcaacgtaaaacgtacttattagactagt

SEQ ID NO: 10214 - DNA, 403 bp, Gossypium hirsutum
  Clone ID: LIB3135-012-Q1-K1-G4
cggacgcgtgggtttcgtgtttgtctattgaattctttccttcactttctcgagaaaaaaaaaatgtcttcagggtgcaattgcggatctagctgcagctgcggatctggctgcaattgcagtgagaactgctcaatgaaccttaaccttggatactcggagaagacaaccagcactcagaccatcatctccggagttgcgccagtgaaaatgacctttgagggaccacgagatgggcactactgaatcatgacatggatgcacctgtggatcaagctgcaaatgtaatccatgcacctgttgaaaagcttgatgaaagccatagattattaaaaaagaaagcagcataataacaagcctctgtaatgatttattttcaaagatggatgccttgcaaggctat

SEQ ID NO: 10215 - DNA, 312 bp, Gossypium hirsutum
  Clone ID: LIB3135-012-Q1-K1-G5
tcgcccacacgtgcggatcattgcaattgttggtcttcaacgaggaattcctagtaagcgcgagtcatcagctcgcgttgactacgttcctgccctttgttcacaccgcccgccgcttctaccgattgaatggtccggcgaagtgttcggatcgcggcgacgtggtcagatcgctgcccgcgacataactagaagttcactgaaccttatcatttagaggaaggagaagtctttacaaagcttccgtaggaaacctggggaggatcattgtcgaaaccttcaaaaataaaaaaaaaaaaggggggccggttt

SEQ ID NO: 10216 - DNA, 421 bp, Gossypium hirsutum
  Clone ID: LIB3135-012-Q1-K1-G6
gagaaacgagtttgtcatacgcctgcaaccttctgaagccatgtacatgaagctaaccgtgaagcagcctggtctcgagatgtcaacagtgcaaagtgaactagatttgtcatacaggcaacgctatcaaggtgttacgatcccagaggcttatgaacgtcttatactcgacacgataagaggtgatcagcagcattttgttcgccgggacgagttaaaggcggcatgggagatattcacgcctcttctacacagaatcgacaacggtgaaatgaagccaattccataccgaacaggcagccggggtcctgcagaagcagatgagctctcggctaaagccggttatgttcaaacacatggttatatttggattcctcccaccttatagaaacattatatatatctatatatatatatatag

SEQ ID NO: 10217 - DNA, 327 bp, Gossypium hirsutum
  Clone ID: LIB3135-012-Q1-K1-G8
tcgggctagtgcaacagcaacattcgtaatgatgttctcttcatccttattcgctgttgagttgtatttgcttaagaggttcccaatgccctatgctttgtacatgatgggagtatctattttggctggattctggggacagtatttcgtgagaaaactaataacaatccttaggagagcttcacttatagggttcatcctatcaggcgtcatctttgcaagcgctctcaccatgggagtcataggcattgagagaagcattcgaatgattcacaaccatgagttcatggggtttttagatatttgcagccgccaaagaacgttgac

SEQ ID NO: 10218 - DNA, 336 bp, Gossypium hirsutum
  Clone ID: LIB3135-012-Q1-K1-G9
aaaccgcttcagctgtgtagtggtatgaagaccaaagttgataacatgcatatcgagaatgataacatcatcgcgaacatcattaaggaacatagagagagaagggcccgagaaaagagcggtcacgccgaagctgaacaagaagatctcggtgcagtgctcttaaagattcatgaggagaatgagctctacttggctgacaagaacatgaaatcaatcatcgtggacgcttttggtgcaggaagcgaaacatcatacacaaccgaagagcgggcactcttcgaaatgataaataattcatgggtgatgaacgacgcccaagctgaacttaggcga

SEQ ID NO: 10219 - DNA, 342 bp, Gossypium hirsutum
  Clone ID: LIB3135-012-Q1-K1-H1
gctgatttgttgggctcagtgcgcgttgttgttggaccgtcgaggaccaaatgctgctctctcatttcgggtttggctgatctcgatgctgctgtttgcctttgcactgctattaaagctaatgtgttgggggttaacctaaacgttcctgtttcattgtctttgctcctcaattcctgcgaaaagcaaatgcctgctggttacaaatgtgcttaagctcatttccactgtttcctcagcaatgtttggggttttcttttacgtgttctttttttttttgggcttgtttaattggtattttatatgtcaagggtagataaatggtaaggttcttttacctta

SEQ ID NO: 10220 - DNA, 300 bp, Gossypium hirsutum
  Clone ID: LIB3135-012-Q1-K1-H10
ctctgattcgtgttcgcagattttataagctgaagaatataccgcaaagcaaagacaaaaagcgaaaataaataaatgagagcggtcatttttcatcaacaattttcgaggaaaagaagaagcgaatcaatcagaatggagacaggggggagaggcgaaagaaagattgtcgagcctgcaagcagcaagcaacaacggctgaaaagccgttgcgcgctagctaataaaaaaaaaactttttataattattttttcgtttgataggtagtttgtttttgtattatttaattggtttaattt

SEQ ID NO: 10221 - DNA, 176 bp, Gossypium hirsutum
  Clone ID: LIB3135-012-Q1-K1-H12
gggaaggattacctgcgcttcactaacgtctgaattacatatgtcatggttaagaacttttgcactccaactcttgtctttcaagttttaccatgtaagcaccgcttgcaatttcggttaaataataataaaaaagttgtacttggattaaaaaaaaaaaaacaaacaaagcattg

SEQ ID NO: 10222 - DNA, 381 bp, Gossypium hirsutum
  Clone ID: LIB3135-012-Q1-K1-H2
cccacgcgtccgactggacatactcttcggctttacagtttccttctacattagagaaggggctcgcaaaaatgatgtcattaaaaagcaaatttggtggcttattgagtcagatgacccgtctttttgggatggatgatgaattcggggaggatgcaattttggggaggcttgaaggcatgaaagatgtgatcgaacaagttaataagcagtttaaagacccggacatgacaaccttcatctgcgtttgcattccggagttcctctctctatacgaaacagagagactggtgcaggaactcgccaagtttgagatagatacacacaatatcatcatcaaccaagtaattttcgatgatgaagatgtcgagtccaagttat

SEQ ID NO: 10223 - DNA, 204 bp, Gossypium hirsutum
  Clone ID: LIB3135-012-Q1-K1-H3
acagggaaggaagtgcctggctaccacaagccgaagctatctatgggtgacaacgaagaaatcggttccgagggggatggacaattaccacgctaagtacaatgagactgatcctatcgaaccgctctaccaggtccgaatcggtgggaagatctctacgtaccatggtgctctagccaacgagcgacaccaccatgagcacaa

SEQ ID NO: 10224 - DNA, 273 bp, Gossypium hirsutum
  Clone ID: LIB3135-012-Q1-K1-H5
aggatatgaactgtccggaactcatgttcatctattgggactaacatcaaatgctcccatggatgtcatttgggacatcatgcgctgctgggttaaaaatcatccagtgtaagctcaaccgtatgaacagtctggaagagtgatacttgccaaagaaccagttcttcaagcaaattttgctcgagctgatgcattccttatcacggcacaagctaagaaggatgctcgctttctaccgaatcctgaaaggcactgggggccaaagcttatggc

SEQ ID NO: 10225 - DNA, 369 bp, Gossypium hirsutum
  Clone ID: LIB3135-012-Q1-K1-H6
gggatacgcaagagtctgaatcctggaaagtccttcataaccaacaaataattggtccacgggagagggttgtcggtgcgaagcttcgagggaagaagtgcgtgagttggagtctcgaccaaagaacaaacgggacttgaatatcgtccagaatcttcggtcctaaaactcgacgatgtgaatgaatgatttatgccgtaatcggacgcacgcaagaacagtggctttgactttgtgtgatgacttaagtctgcgactgctctatcaaatgaactttgtgtgtgttcttcactgtttgcatatggggtactggataaacatatttacttttcaggttaaagccgtttatgtttgtatcacatctgtgct

SEQ ID NO: 10226 - DNA, 217 bp, Gossypium hirsutum
  Clone ID: LIB3135-012-Q1-K1-H7
gggagatctaaaagtaagaaacgaggatggttttgtggcgccaaccgataatcctaggctggggcaggttgatacccaccagacttcataggaaaaacacccagagtagctgaatgctgagagccaaggggagatctgaattgtctcgctaagcacagagacacagaattaggtgctagaacggaaggatccattgctttaagggccataaacgcaa

SEQ ID NO: 10227 - DNA, 352 bp, Gossypium hirsutum
  Clone ID: LIB3135-012-Q1-K1-H8
tcggccacgcgtccgcggacgcgtgggttaaggtcttggcaccacttcctattggatttgctgtggtcatgggtcacttggcaactattccaatcaccggcaccggtatcaaccctgctcgtagctttggggccgctgttatctacaaccaggacaagccatgggatgatcattggatcttctgggttggaccatttattggtgcagccattgctgcaatctatcaccagtttatcctgagggcagctgctgttaaagctcttggatccttcaagagcagctctgccatgtaattaaagcaaaataatctccagccacaagtttaaacaaaaaaaaaaaaacgggggggggg

SEQ ID NO: 10228 - DNA, 429 bp, Gossypium hirsutum
  Clone ID: LIB3135-012-Q1-K1-H9
aatttttgacaaaagacaaaaagtaatcaccacatggcttgaccctcttatcggtgtccccagtggagtcgccaagctgttgacaccattttttttatggaaaacggggtcgacttgggttttgaaaatgaaaaagggagtcgccaccaattctttttgaggtgtgattgggtcaccttggaaaaggttgcttttaataaataatttaattttattaaaacaacggttttggtctacgaaatttagaaaatgggttcgggagtcggttacgtacgaggaaggattagcatcctcgttacgcccagaaattggtacctacttgattatttaatgtctcaatgtcaaaaattgagaacttgaaagaattaaaaatacgatccttgtattaaaatgaaaatttttggaaaaagaaaatatttcacgttaatc

SEQ ID NO: 10229 - DNA, 406 bp, Gossypium hirsutum
  Clone ID: LIB3135-013-Q1-K1-A1
gacggcagataatgacagtggggttgcaggactggacggtaggagattggtgatgatgatgctgagcctgtgcattggggtattgctgatgtgaatacactgatatagaaatatttatcagattgatacaaattgtatgggagacaatactttttaggccattggataacgagaaatgggtccttatttcatgtgagagatttgaaattttcttttcttttaatttctttggtggtttgtgagcaaaagagcaataagtgatgaatcccacttgcatggcgtcattttctttattcttttttatttatttctggttggcattattagacttgaatgtataaaataaattacattgcatcttggtttgagctggaaatgcaataattcttttttggtttcttttttc

SEQ ID NO: 10230 - DNA, 425 bp, Gossypium hirsutum
  unsure (1)..(425): unsure at all n locations; Clone ID: LIB3135-013-Q1-K1-A10
gtgaacatcatgtttggtggatgaccggatgcagagacaaccttatacacttgtgagggagcaatctcatttctcattttggaatgtcattaaccaaaaacaaagagaaaaaatggaggaagaaatacagacaacaaatttatgacgttgtatgcacttagtttaaacgttgaataagtatcgagttgattgcatttagaatcttttccattgttgtgtagaagcctcattgttgtgtagaagcctctcttatcctgccagaatgatgctgttgggatagtttttgttcagactgaatcttgaaatgttaacataactttaggtatatcttaatcaatgttatcttcagaatantcnnntnnnaaaaattaatattaaaatatttatttttttttttttttttttttttttttattttttttttt

SEQ ID NO: 10231 - DNA, 265 bp, Gossypium hirsutum
  Clone ID: LIB3135-013-Q1-K1-A12
tctgaattagactactttattgttggccacatgatcgagttcctttgcaagaaaggaaagcagattggcatgctggcttaaacaacagagttggattcaaggatctgatagccaatggcattgaagcggggactatccagtgtgggcgtccaaaggaatagaagttctggatatcgcttgcgtatcgagatacttcttttcttctcaaatctgatgctcattgctttgagttcattacaaatctggggcttgcaggttcacactc

SEQ ID NO: 10232 - DNA, 418 bp, Gossypium hirsutum
  Clone ID: LIB3135-013-Q1-K1-A5
agggctaaggcaagagggagtgaaaatggttgagaaaacaagaggaagaaaggaagaggtggtgaccagggagtacaccatcaaccttcacaagcgcctccatggctgcacattcaagaagaaggctcccaaggctataaaggagatcaggaagtttgcagaaaaagcaatggggacaaaggatgtgagagtcgatgtcaagctgaacaaacacatctggagccgagggatccgaagtgttcctagaaggattagggtccgcattgctcgcaagagaaatgatgatgaagatgcaaaggaagagctctactctctagtaactgttgctgaaatcccagctgaaggattgaagggtttgggcactaacgtcattgacgatgatgatgagtaaattattgatgtttagttctattaaaaa

SEQ ID NO: 10233 - DNA, 294 bp, Gossypium hirsutum
  Clone ID: LIB3135-013-Q1-K1-A6
cccacgcgttcgctttgatcagttccatatttaagaaagaaagaaatcaaatatgggttccatttccaagagtttccttctccttgcccttttagctgctactgttcttctcatttcatcggaagtggcagctcgagaccttgctgaaaccaccactgaaaagaacaatggtgaggtggctactgaaacaaccgaggctgaggctcaggtagaagaagccaaatatggatatggtggatacgggagccgtggaggttatggaggatactgagggcgcggtgggtacggaagata

SEQ ID NO: 10234 - DNA, 437 bp, Gossypium hirsutum
  Clone ID: LIB3135-013-Q1-K1-A7
cgcggtggtgctgttttcgggttataagtcgtacggcggaggcagtgacatgtaagcccgtggagcttgccccctgctcgccggcgcttacgtcgtcctcgcctacatcaagcgcttgttgcagcaagctgaaggcgcagcagccatgcctctgtggatacattaagaacccatctcttaaacagtatgtcaacagtcctaacgctaaaaaggttgcttcgacttgtggagtcccatatcctaagtgttaaatggtgcttaatggtgtatctactatttactggcagcaaataagtgattctttttgctgtcaaggactgttctgaataaaaaaataatgattaaatattagaataaaataaaggaatatgttacttatggtggaagaaaatgataattaagatgggttacagtttctccattgtgaaaatattgct

SEQ ID NO: 10235 - DNA, 250 bp, Gossypium hirsutum
  Clone ID: LIB3135-013-Q1-K1-A8
cttgtatgtgtttgaaaagtgtttctcgatcaatcaaggtttgtaatgtgatcatgtgataacaattttgcagtattttgtttaagttttatttgcaagtatagctgatggaatgcaatacagaatttgagtgcttgttatttcatggctgaaaatgcttattcggttattacagtagacacgagaagatttagcacaaaacgaataattttattaaaaaaataataaatactttacttatttgccttag

SEQ ID NO: 10236 - DNA, 142 bp, Gossypium hirsutum
  Clone ID: LIB3135-013-Q1-K1-A9
aaaaccagccggacagcgagaccgactgagagaacagaagacaaaagaccggggggaagagaggaaggagaacggggaagaagggcacacccacaacggaacaaaggaacgccggggagaacaggcagaagacacccaagag

SEQ ID NO: 10237 - DNA, 389 bp, Gossypium hirsutum
  Clone ID: LIB3135-013-Q1-K1-B1
ctcacacgtacttctactctttgaactacaagtctgaattaacattaaaatcatgggtgtatgcagatatgaccatgaaactaccttcccagtcgccccagcttggcttttcaaggcttatactgttgaagcctcaaaggtttggcaccgcggctgctcctaatgcacccaagagtattgagggtgaagctaattctactttcggatgtatcgtaaaaatcaactttgttgaaggcttttcattccaatatatgaagcaccaaattggaagacatgatgaagataatacttcatacagttacagtttaattgcacgtgggcctttgtgggataaactcgaaaagattagctgttacaacatgtttgacgcaactgcaagtggaggaagt

SEQ ID NO: 10238 - DNA, 453 bp, Gossypium hirsutum
  Clone ID: LIB3135-013-Q1-K1-B11
tcgtaaaatgagcaccaaggaagtgttgaacatatgctaaacgttcaaaacaagaactcatcctactttgttgaatggattcccaacaacgtgaaatcaaccgtgtgtgacatcccaccaaccggtctcaagatggcatcgacattcatcgggaactcaacgtcaatacaagagatgtgtaggcgcgtgagcgaacaatttacagctatgtttcgaaggaaggctttcttgcattggtatacaggggaaggcatggatgaaatggaatttaccgaagcagatagtaatatgaatgatttggtatcagagtatcaatagtatcaatgatgcatcagttgatgaataataagagtatgaataagaatgagctgtatttgaatgagaaaatttatatttgaactcatgaaatataatttccaggttctggtttttttatataattttgctaaagaa

SEQ ID NO: 10239 - DNA, 292 bp, Gossypium hirsutum
  Clone ID: LIB3135-013-Q1-K1-B12
cgcccacgcgcacgaagctacatttcgggacatcacctagtgttagcaaggtcactgtggaaggatcaccaatgactgttctggaaacatccccgatgggaaaaaagaagaagctcctagaactgtttcgagagagcgttagagaagacctaaaccttacttcaaaatcgtgaaaacggaccacctatcatatctctggagctacctctctatgcagtagtgaaaggtactgctaatggacatcatgaataccctaagtttcaaggacaagccattaatagttatgcaaagt

SEQ ID NO: 10240 - DNA, 408 bp, Gossypium hirsutum
  Clone ID: LIB3135-013-Q1-K1-B2
gggcggttcaatcttatgaccgagttcccgtattacagagaagtttattacaaaccggattttcgaaacaaaaaggggaaaccagttgttttcgatatggatatgagtgccggagatttcctggctctattttatctcctcaaagtacctgttgaagtgctcgacctcaaggcaatattggtaactccgaccggttgggctaatgctgcaactatcgatatcgtctatgatttactacacatgatgggtcgggatgatattccggttggtttaggagacgtatttgcaatgaatcaatccgatatagttttccctcctgttggagactgtaagtatgctaaggctatcccgcatggaagcggcggattcttggattcagatactctttacgggctagctcgggaatta

SEQ ID NO: 10241 - DNA, 292 bp, Gossypium hirsutum
  Clone ID: LIB3135-013-Q1-K1-B3
gtgcggatcaaccttacacccgagagagcgtctgaccctgatgcacacaacataccgcatttggttaccaaactcggaacacgagctgaggcagctcaggatgctgctgccgatgctctgctggtactcaggcaagctcggacagctcgcccagatgagctttatcgagctgaaacattggctgctgcaaacgcaatgcctaaggtggaatacatgaaccaatctgatccacctctacacaaggagaaggcggaatatctgttgcaatgcttgacagacacattggcggtga

SEQ ID NO: 10242 - DNA, 288 bp, Gossypium hirsutum
  unsure (1)..(288): unsure at all n locations; Clone ID: LIB3135-013-Q1-K1-B4
ccgccaaccacaaaaaaaaccgccgcggagcttngaaagagaacagccaacaaaccncacaggangggaaagagcaagaacggaaccaagggcaacggaaggatcgggcgcaaggacgcgagagacgcacgccaaagcgaagagaacgagcccgacgccgagaacgaaccaagcaacaccacagaagacaggaccaacacgaagacagacgacagggagcacggccaagggaagcaacaagagctgaaggtgaaggacacaaaagacacccgcacgagaggaaaagcc

SEQ ID NO: 10243 - DNA, 389 bp, Gossypium hirsutum
  Clone ID: LIB3135-013-Q1-K1-B5
ccgccatcttcaataatttcttccgtcgatttttgttagagattagctttttaatttttcattatgggaaagatcaagatcggaatcaatggatttggaaggatcgggcgtttggttgcgagagttgctctccaaagcgatgatattgagctcgttgctgttaacgatcctttcatcaccactgaatacatgacctacatgtttaagtacgacagtgttcacggtcaatggaagcatcatgagcttaaggtgaaggactcaaagacccttctctttggtgaaaagcctgtcacagttttcggtatcagaaaccctgaggaaatcccatgggctgaggctggagctgagtatgttgttgagtctactggtgttttactgacaaggacaag

SEQ ID NO: 10244 - DNA, 381 bp, Gossypium hirsutum
  Clone ID: LIB3135-013-Q1-K1-B6
cccacgcgttcgctgatggatctcactgaataaaggtagagaggaatggtcaaggtacttagtggtggctataagattaaatatcactcatgatggccgtgaaagtgatccaatagagatcgatagtagtccgtctagtccgtggcttgacatggtctgggaataacaaaagattggttacctcagcatacacaaggacttttgctgagatgaaactagccaatatttgatggatgcatgaccaaagtttgggatcaaatgcactcttcctgatacaacagcacgtttattagaaaaacttggtggatattttctagaagaggactctgtggactctactctcatcatgaacccattctgtaataaagagggctttttgct

SEQ ID NO: 10245 - DNA, 443 bp, Gossypium hirsutum
  Clone ID: LIB3135-013-Q1-K1-B7
ctttgcagcacggatctactgttttgattgttgtgcatgtgataactgtttgaacaagccagattatgaggatattgttcttgatattccacatcaaattgaattgcgcacaaaagcggatgcaaatgcaggtggtcaaaatgcctaaaattgtattgcgagtgctatcgcgtttaggatgccactatgaggattgtgacaattcttttggcaagaagtcatattgacggagaagaaagatgagtgccgaaaaagaattctctgtctctcaacgtcgcttggcctgcactagatgcttaaacgctctctggttgtgctattctccggtcattaattgcaacagtattacagagaaggaagtgtgcattattgctattgaaaatggagtgctttttgtgattgttggattttaaaaccaagcccttttttatactccaggaaat

SEQ ID NO: 10246 - DNA, 330 bp, Gossypium hirsutum
  Clone ID: LIB3135-013-Q1-K1-B8
agcagcctctcctggtggtggctttcgcctataccctcggcaaagttggaccatcgatgtgcctgctggcactgctatggctcgtatttggggtcgaaccaattgcaatttcgatgccagtggtaggggtcattgccaaaccggtgattgtggtggactccttcaatgcaaaggttggggtgtacctccaaacaccctggctgaatatgcacttaaccaatttggaaacatggatttctacgacatttccttaattgatgggtttaacatccccatggtgtttggtccaactaatggcgggtgtcacaacattctggtgcactgcagaca

SEQ ID NO: 10247 - DNA, 323 bp, Gossypium hirsutum
  unsure (1)..(323): unsure at all n locations; Clone ID: LIB3135-013-Q1-K1-B9
cccacgcgnccgtgaacactcttttatcatcttgaagaagattcttgatacataggatgggggtcaaggactaaaaacattggtcgatgttggcggtggtaccggtgccacgcttagcatgatcgtttttaagtaccccaccataaaaggcattaacttcgatttgtctcatgtcattgaggatgctcctagctgtcctggtgtggagcatgttggtggagacatgtctgttagtgtaccaaaaggagatgccattttcatgaagtggatttgtcatgatgggagcgacgaacactgcgccaagtttttgaagaactgttatg

SEQ ID NO: 10248 - DNA, 335 bp, Gossypium hirsutum
  Clone ID: LIB3135-013-Q1-K1-C10
cggacgcgtgggtggtaatgttatttttccatctactatgttaggtcatctttttgacaattatcaataactaaattgcttcatctaatgcatactctttatagttgtttctgttttattaaatgcatgcaatctttgagaaaaaaaaaaaaaaaaaaaaaaaaaaaaaaaaaaaaaaaaaaaaaaaaaaaaaaaaaaaaataataaaaaaaaaaatataataattaaaaatataaaataattatttaaattattgggggggcctttttaaagaatcaaattttacttacccgttctttcaaattaaaatttttttttttgtgtcctctaaaatt

SEQ ID NO: 10249 - DNA, 285 bp, Gossypium hirsutum
  Clone ID: LIB3135-013-Q1-K1-C11
ctacaacctaaagcgaaggacttttttgagcctcaccataaacggacacgttgctgaatatgccatactcaggacgtgtgccacctgctcatcaactacctccccgggggaacgaacctggcccatcacatcagcctgcacaaggggtcctatattcgtatcacgaaaatcaaattataaggggggattcgatcctatcgatcgaacggcaccttgtggcgcacaaacacacaccttaggaccacgagctatacacggctcgtactcaatccgactatctttttc

SEQ ID NO: 10250 - DNA, 227 bp, Gossypium hirsutum
  Clone ID: LIB3135-013-Q1-K1-C12
aaaagaaggaagacagcgagcaagatatccaggaagggggacataaggatgggaagccacggaagaaaaacaaggacagaggaacaaactagtggagggtttgactcaaggacgcagaacaaaatgaactacgggctgaaaacaggaactgaaacttcctggggagtgtatcaaaacaagaaaagcgaagaagggaggattcagagcaaaaccagacaaaaagagac

SEQ ID NO: 10251 - DNA, 434 bp, Gossypium hirsutum
  Clone ID: LIB3135-013-Q1-K1-C2
cccacgcgtacgcccacgcgtgcgtccacgcgttcggtcggatggtaaattgacatcacttgatcagtacatctcaaggatgaaatccggacagaaagatatattctacattacaggaaccagcatggaacaattagaaaaatctccattcttggagaggcttaagaagaaaaattatgaggtaattttcttcactgatcctgatgatgagtacctgatgcaataccttatggattatgacggaaagcagctccaaaatgtatccaaggagggcctgaacatctggaaagaaaagaacaaagaactcaaggagtcatttaaggaactaactaaatggtggaagaatgcacttgctagtgataatgttgatgaagtgaagataaacaaccgtttggacaacactccttgtgtgggtgatacactaaaatacggat

SEQ ID NO: 10252 - DNA, 320 bp, Gossypium hirsutum
  Clone ID: LIB3135-013-Q1-K1-C3
acaaagttgaatctgatgatttatttccggcataagagggaatctaaacctatccttcttatctccttcttgacgctggaaagagagagttgagcttctattataggccttctggccttcgtgccggcatcaatcatcttactcgccgttaaggccctgctttctctttatgatttggtggacacaatcttccgtgggagctcatgcaaataatgtggagatattgcttctgctatcatacattaagcttcggcacgattggaacggacgactgagaactcacttgtaatatagacaacaccactgatgttaggatccac

SEQ ID NO: 10253 - DNA, 426 bp, Gossypium hirsutum
  Clone ID: LIB3135-013-Q1-K1-C4
caagaaactgctctctctgtcttaacgctataatcattgaagaaaaatgggtttgaaggaggaattcgaggagtatgcggagaaagctaagacccttccccagaacactaccaacgacgacaagctcattctctatggactctacaagcaagctactgttggaccagtgaacaccagccgtcctggaatgttcaacatgaaggaaaagtacaagtgggatgcatggaaggctgttgaagggaaatcgaaggaggaagcaatgaacgattatattactaattgtaaaacagctgcaagaggctgctgctgcattttcttgacgtgggtgtgagaatagaaaatggtgctattttaagccctttgatacctatggtgttgaaaagggctaaaacttataaaaagcaatgtactattttttatttggta

SEQ ID NO: 10254 - DNA, 391 bp, Gossypium hirsutum
  Clone ID: LIB3135-013-Q1-K1-C5
caaggaggggttacattagttgcatgttgtttatctgccgcagaacaagccagcgttcccatcactggtcactttgaccatggtacttcaaagcaagaactattggaatctcttgagctgggctttgattcagtaatgggggatggttcacatcttccctttaaagataatatctcatacacgaagcacatatcaaacttggcccacttgagggatatgctcgtggaggcagaacttgtaagattgtcaggaacggaagatgatttgactgttaaagattatgaagcagagctgactgatattaattatgctgatgaattcatatttgagactggcgtagatgcctttgcagtatgcattgtgaatgtacattgaaaatacccagcaagtg

SEQ ID NO: 10255 - DNA, 445 bp, Gossypium hirsutum
  Clone ID: LIB3135-013-Q1-K1-C7
cgaggctgtgccgggttttgagctagcaattcagacgtacgccattcatgtcctgtccctgacttaccaaaagattccaagacctgtacttgctgaggctattaacatcgaaggtctatccttggacaaattccttgaacaccaggcggccaacagcggttggattcttgagaagggtcatggcaggggtcaactaatagtcctacctcgaaacgaatttaacgatcctgagctgaagaaaatcgctgctgatagagttccattggagcacatcacccgcattttccccattcttggttaagcctctagctgggatgaacacctttttggagttatttgtgccatgtttttgttgacattgcgaccattctctttggttttttgccttggatatatatatataactgaaaaaaagctatttaaggattaacttgtcaagctaccc

SEQ ID NO: 10256 - DNA, 437 bp, Gossypium hirsutum
  Clone ID: LIB3135-013-Q1-K1-C8
ctctccaattcaatgggtttatttcttcagaaaacaaatataatccgagattatctcgaggatatcaatgagataccaaagtcacgtatgttttggcctcgtcaaatttggggtaaatatgtcaacaaacttgaggacttgaaatacgaggaaaactcagtcaaggcagtgcagtgcttgaatgacatggtcactaatgctttaatacatgtggatgattgcctaaaatacatgtttgctttacgtgatcctgcaatctttcgattttgtgctatccctcaggtcatggctatcggaacactagccttatgctacaacaacatcgaagtcttcagaggcgtagtgaaaatgaggcgtggtctcactgcgaaagtcattgaccgaaccaacacgatggctgatgtctatggtgctttctatgatttttcttgtatgtt

SEQ ID NO: 10257 - DNA, 265 bp, Gossypium hirsutum
  Clone ID: LIB3135-013-Q1-K1-C9
ggcgcggacacgaggaaacagcaacattctgcggacaagaagcactcgcccgcgccggggatcggggcacagggagaagcaaaccgcctttcgaaggccacgtgaagccgcgacgtggagccagccaaccacccaacggccaacacaaaaccacaggaggcgaagatagcacaaggcggacccgggattagaggaacaaaaagaccaagaatattagaccagcccacgcaaaacacatatcacaagcgaaggccgagccgcaaag

SEQ ID NO: 10258 - DNA, 436 bp, Gossypium hirsutum
  Clone ID: LIB3135-013-Q1-K1-D11
gcttctataaacaaagagaaactttgtgtgaaacaatggcgtcctcggatcttaggggcaagctcgagactgatgtcgagatcgatatttctcccgaaaagttccaccatatgtggtgccacaggccgcaccatgtccaccacactagctctgaaaaagtacaaggatgcgatttacatgaaggtgaatttggaactcccggcgtcgttatctgctggagatatgtgcatgatggaaaggctaaaactgcaaagcaggtcgttgaagttatggaccatgagaaaaaggcaataactttcaaaatgcctgaaggagatctgatggaggaatacaaaaagcttcgggattacaaaccaaacttcccccaagagcgacgggtaaggcagcataatgcactggactctggaatatgaaaagctggacgaggggattggac

SEQ ID NO: 10259 - DNA, 339 bp, Gossypium hirsutum
  Clone ID: LIB3135-013-Q1-K1-D12
gacttcacccgaatcctactgcttttataggttctttaagcgcaacataaaaatgcaacaccgcgatactttgtgggtaacacaactaataacatgggtggtgaacctgacatgacggacgagttgtggttcaatttggaccacctcgaagaaggttcccagtgtgtcatatatcaccatctaaagctgttgttagatgcgtctatgtgccttgtatacggatgctgaacgggggtctgcagttcagggagtcacctaacatgtcttgttcttgaacaaaaaatattctatcttgtattgggctgcacttgcacatacttagattaaatttgttacttt

SEQ ID NO: 10260 - DNA, 331 bp, Gossypium hirsutum
  Clone ID: LIB3135-013-Q1-K1-D2
cccacgcgtccgcccacgcgtccgcccacgcgtccggaaaggtggtgatggctcctttcaagtggacaacagttctaggagcctatatttccattaaaatatacttagcgcttgatgtgctacaagggcccagaatttaacttatgtgttgacggtaaggcgcattcattatatcagtgtagctgctccttttactggctctaaagaaaagtacctgtgacattatctgctcggttatgagggaaagcagttccaaaatgtatccaaggagggcctgaaaatcgggaaagataagaacaaagaacggcgggcgttatttaaggaactaact

SEQ ID NO: 10261 - DNA, 448 bp, Gossypium hirsutum
  Clone ID: LIB3135-013-Q1-K1-D3
ggcagaaatccgaggacgtagcgcagaaaatcctctactccatcgagtgcgaaatgaggcggtgcccttacacgttaggcttgggagagccaaacctctccggcaaaccaaacctcgactacgacgccgtttgcaagccgaacgaactccacgcgctcaagtccagcccgtacgatcacatcgaaaaccacgagaactctacgctttacaccaccaatcacatcctcgaatcatggatccagacggcgaaacagctgttgaaacgcatcgcttcggggatcgacgccggtagtttcgaagccgccgccggcgactgttacatattggaaaagatctggaagcttctggaagaaatcgaagatctccatctcctaatggatcccaacgatttccttcacctcaaaagccagttgcagataaaatccggtaacgaaaacggagcgttttg

SEQ ID NO: 10262 - DNA, 417 bp, Gossypium hirsutum
  Clone ID: LIB3135-013-Q1-K1-D4
ttctcattcaatcaagtaacatcaactgtgaatataatcataagatcaagatggtgggtcaatggacggcgactaaaccaagccggagcgatgaagctttggactcggatcaacaacaacgaatcaccaatcatgtgagagctcagttctattcgagggtcccaaaacgacccaccaaacccaaccggagtgaaccatatttgacatcctccaatcccccttcagatgtggaccaaaacatacccgagcttgacaagtgacggtccctttaatttcaatctcaggtgaagatcttagaggggggagctacagtggaacaagaggagtttgtggagacacaaaattacagggagatgaattccatttacaaactgtattccacgacaggaagtggatttataatattgatgatatgaa

SEQ ID NO: 10263 - DNA, 302 bp, Gossypium hirsutum
  Clone ID: LIB3135-013-Q1-K1-D5
cacagacgtgcgacaatagtggcaggtggtttatctattccaaaaaaagccctcggtcgcagaacacgataaatatgccagggggcaaaacagcatgtacgaggggaatcacacgagcggaacattgattcagtaagggtggtcggttcaaatcaatcctacaaagatgatagcggatacacgaagcacatataaaactaggccccatacaaggatcagcctgcggaagctgaacatggaacattgttaggaacagaagacgacttgaatgataacgattttgaacaagagctgaaagtttt

SEQ ID NO: 10264 - DNA, 409 bp, Gossypium hirsutum
  Clone ID: LIB3135-013-Q1-K1-D6
cacggacgggaaacattagaagcatgctgtttatctgacgcagaacaagccagcgtacccaggactgggcacgaggaccatgggacctcaaagcatgaacaattggaatcgcttgagctgggctacgcagcagtaaaggaggaaggtacacatcgttccctgtaaagaatataacaacacacacgaaggacatataagactagggccactagaagcatacgcaagaggaggcagaacccggaagactgtcagggaacggaagaagcagggactgttaaagagaatgaagcaaaactgactgagatgaatgaagcccgaaaaatcatagtagagactggcatagatgcctcgacaaaacgccatgtgaaaggacatggaaaataccgaggaagggggccaaaatttaaac

SEQ ID NO: 10265 - DNA, 420 bp, Gossypium hirsutum
  Clone ID: LIB3135-013-Q1-K1-D7
cgaggctgtgccgggttatgagtttgcaattcagacgtacgccattcatgtccgggccctgacttaccaaaagattccaagacctgtacttgctgaggctattaacatcgaagggctatccttggacaaattccttgaacaccaggcggccaacagcggttggattcttgagaagggtcatggcaggggtcaactaatagtcctacctcgaaacgaatttaacgatcctgagctgaagaaaatcgctgctgatagtgtttcattggagcacatcacccgcattttccccattcttggttaagcctttagctgggatgatacacttttttggagttatttgtgccatgttttctgtgacattgcgaccaattttctttgtttttttcggcttggattgtattttttatactgagaaacaag

SEQ ID NO: 10266 - DNA, 406 bp, Gossypium hirsutum
  Clone ID: LIB3135-013-Q1-K1-D8
gaaatgattgaaatttctctgtttttgacatacatgagttcatttttctctgcggggtttcctttcagttagatgattgggttccttgccgaatctacaagaaatccaatgctttatcttcaacaacagcaataggagcagcaacaagtgatcaagatctagaggaagaagaagcagaacagttcattaaagatgcccttttaccagcagccattaaaagcccttcaaccaccaatgcccttctgcctcagaaatcttgttccttctccaacctgttagacgctatggattactcaatgctcagtagtttcctggcagacaaccagtgcaatgggatccggatatgatcccacttcatttacctttgagcagccactagtgaataattacaccattggaaacaaca

SEQ ID NO: 10267 - DNA, 154 bp, Gossypium hirsutum
  Clone ID: LIB3135-013-Q1-K1-D9
gaaaaaaaccgaacaaaagaaccaggcgaacgaggggcaaaccaaaccagaggtctaaggaagcgccagcaccggggcccgggaaggcagcaagggaagaacggcgggctgggcccgaacacaggcaggaaggagagagaaaggtgaagaaggg

SEQ ID NO: 10268 - DNA, 279 bp, Gossypium hirsutum
  Clone ID: LIB3135-013-Q1-K1-E11
aagatagccatctttaagattagctttctatgctttataagcaactctcgttattgtaagcatagctatgactcgtttctttttgcccatcccttcactccctttttttgatctttactcgtgtttttgtttttatggtttcctcccagagggtgacatgaagtgaaagcttcttacatgatattggaatgcaggcattttatttattaataaaaaaaaaaaaaaaaaaaaaaaaaaaaaaaaaaataaaaaaaaaaaaaaaaaaaaaaaataataaat

SEQ ID NO: 10269 - DNA, 302 bp, Gossypium hirsutum
  Clone ID: LIB3135-013-Q1-K1-E12
cccacgcgtgcgttgctcttttagctgctgttgttcttctcatttcttcggaaggggcagctcgagatcttgctgaaactaccactgaaaacaataatggtgagggggctaccgaaacaacccaagctgagctagaagatggacgcggaggttataatggaagaggacacggagggaaaggagggtatggaggtgggcacggagggtatgttggtacgtggtcactgagggtatggtggtggccaacgaagatacggttgtggtgtgcaccggcctcacggtagacatggaggaggttataa

SEQ ID NO: 10270 - DNA, 446 bp, Gossypium hirsutum
  Clone ID: LIB3135-013-Q1-K1-E2
gtcgccagggtatgatgttggtaaccgtagtggccggctttgggtagagcaacaaaggagctacagtggaccactcacgagtgattcattagatgagttcagcggaaagctctccctcgacggagcacggccaagaaacaaggaggacttcatgcgaagataatttgtagaaggctcatttaccaggtttacttacgcccatggtgcactatattctgttttgtattgttttccttcattgccaggttagattctgcttctgtatggtaagtaggagcattggaagcaaggtttcaattatggtttttgtaattctttttggaatggcagtttcaaaagctatggtgaatgtgcctctgctaattaaatcaaccaatcaatcagctttgagagatttggttctttccctctgctttagtactaatggagcaatttatttatttgat

SEQ ID NO: 10271 - DNA, 450 bp, Gossypium hirsutum
  Clone ID: LIB3135-013-Q1-K1-E3
tgaggatagaacatgttcggtgcctcgcccttgtctccttcgccggagactcaaaatgataggaatcctatcgataaagaagaggcataggcatcgcctctcgatccaatccgtcttccctggcctccccaacacactcttgatacgaaataaacctcccgccatagagaagagatctaaagtctgggtcccctcgatcacccttcccttgaacctgaactggtcgagagagatgaacccgcaccacattttttaaccttcgaaccgaaacccccaactagagatgtaattccataacctaaacaactcagttgagagctccgtgactggttcaagggaaggtccaccaataattgataggccagagggatgggctcattcgactaatcagagagccctggccctacctaacacagagatgtccctgaaataggggaatagttgatcgga

SEQ ID NO: 10272 - DNA, 458 bp, Gossypium hirsutum
  Clone ID: LIB3135-013-Q1-K1-E4
cccacgcgtccgggaaaacagagagcaagatataaatgaagaccatactctcatcagagaccatggatatccccgatggggtcaacatcaaagtgaaggctaaaatgatcgaggttgaaggtcccaggggtaagcttacacgtaacttcaagcacctcaacctcgatttccacctcaccaaggacgaggagacgggcaagcgtaagctcaggatcgaggcctggttcggtactaggaagaccagcgccgccatccgtaccgccctcagccacatcgagaatctcatcaccggtgtcaccaaaggttaccggtacaagatgaagttcgtctacgctcactttccgatcaacgcctcaatcactggcggcaacaagtccatcgagatccgtaactttcttggcgagaaagaggtgcgtaaggtggatatgttggaaggggttttcattactcgatccgag

SEQ ID NO: 10273 - DNA, 151 bp, Gossypium hirsutum
  Clone ID: LIB3135-013-Q1-K1-E5
gtaactcgaaaaatgttagaccacacgcaattgcatggttagcttctacagaagaaagaaaagggaaggagcagaaacacactacaaaggagaatgtgctctcaggacaaaactagaaatggtcaatcaaacatgcatgctgataaagcaa

SEQ ID NO: 10274 - DNA, 218 bp, Gossypium hirsutum
  Clone ID: LIB3135-013-Q1-K1-E8
aaggcgaaccgaacacccaaaacaagggcaccgaaaaggggaaaaggggacgccaccacaggcggcagcacgccaaaacgcaaaacaaccgaagaacaggcaaaagcaccacgaaaggacacggaggcaaagaaagagaaagccagagcgaaagagggaaagagaaaacggaaaccagacacagaagagggcaacgaacagaaaaagcgagacaagag

SEQ ID NO: 10275 - DNA, 434 bp, Gossypium hirsutum
  unsure (1)..(434): unsure at all n locations; Clone ID: LIB3135-013-Q1-K1-F1
caggaggccagcatcgaacatggatccatacgttgtcacatccatgattgcagaaaccaccatcctgtggaaaccatgaggggaagcccatgtttgggatgctgtttccatggtagaaagaaaggaaagagccaaagtgtttgttttgtcccctccagtgggatacactcatttcattgcacttagtaattaggtcatggttgcccttgcttggatttgaggtagaaagggttgtttctactgctttcttgcaattacggntaatcttgtgttaaataaatgagaatgcttttattattattaataataatgaagggctagattttgagtttcaaaaccnannanntaattttaaatttttattattaatatttaattttttttttttttttaatatttacttattttattttttttaactcttatttaatatt

SEQ ID NO: 10276 - DNA, 385 bp, Gossypium hirsutum
  Clone ID: LIB3135-013-Q1-K1-F10
aatccaactagtttccatcaaatcttttagctttttcaagaaaaaaattaaaacgcagtttttttttttcttttttctgaatcacccatcaccatgaatggtgaaaaaaacagttcaaacaatagggtacttaaattgaagtacgttaaacttggttaccattatctcataactcaccttttaaagctttgtttagtccctttaatggctgctatcatcgttcaagcatcgaggttaagccttaatgacatccaccaaacatggcttcaccttgaacataaacttgtctatgtcgtcgtgttgtcggctttcgttttggtcgggtcgaccgcttactttatgacccgaaaaagattcgcttatttgggggattatgcctgttatt

SEQ ID NO: 10277 - DNA, 419 bp, Gossypium hirsutum
  Clone ID: LIB3135-013-Q1-K1-F11
atttgaatgatctaataatggacatagagtatgtttctgctggaacacttaccaagacttcaattatgttaggatgtggagaaacgcctgatcaagttgtgaaaacaatggagatggttcgagcagctggtattgatgtaatgacattcggtcggtacatgagaccataaaagcgtaccatgcacgggtcagaatatatttcacctggagcttatgaaaaatatcgagcccttggcatggaaatgggatttcgatatgtggcatctggacccatggacagatcatgctacaaggcaggagaattctacattaaatctatgatagaatccgatcgttctgctgattctttatagatcctttttatttcattgcctatggtagtctttttccttaaaaaataaataaacttggttttgata

SEQ ID NO: 10278 - DNA, 263 bp, Gossypium hirsutum
  Clone ID: LIB3135-013-Q1-K1-F2
gactagctgcgcatatggagacgctgcgggttctttaccgccgagccctgaacgacacaatcaactgggtcggccattagcacctcttatatcaagatgcttctgaccttcttgagagacgcgtagccgacctgcatgggcaagatcgtggtacacacgacaaaatgcttgatgcacgtgctgcaacttatactaagtggccgcatccccatccttatatcgttccttgcgctcctgctggatccaaggttactccaaaccct

SEQ ID NO: 10279 - DNA, 206 bp, Gossypium hirsutum
  Clone ID: LIB3135-013-Q1-K1-F3
cgaggattgaacaggttctgtggcatcgatttgtatcattcgtcgcgtactctaaaggatgggcatacacccgatgcagacaacgcttatatcttgactctggacccatttcggagaatcaggtcggcgcgacgcatgctggatacaggatgctcctggctgcactgagaatacctcttgaggatggttccgctcgatcacccttc

SEQ ID NO: 10280 - DNA, 407 bp, Gossypium hirsutum
  Clone ID: LIB3135-013-Q1-K1-F4
cccacgcgtccgataaagccaactgccatatacattcctctcgaagaaattttaaagccagctaactatgagcttgtaaccaaagaaattttcgggccatttcagattataaccgattataagaaggatcaattaccaatggtattggatgctttggaacgaatgcatgctcatctaaccgctgctggtgtctcaaatgatcccatcttcttgcaagatgtgatcggaaaaacggtgaatgggacaacctatgctggattgagagcaaggactactggagctccacaaaaccattggtttggaccggctggagatcctaaaagagcagggatcggtacaccagaagccataaagcttggttggtcatgtcacagggaaatcatatatgatttcgggccggtgccaag

SEQ ID NO: 10281 - DNA, 298 bp, Gossypium hirsutum
  Clone ID: LIB3135-013-Q1-K1-F5
aacgagctaaatggcaatacttggaggagtctaataattttgtatgtatcagaatttattccagtactgaaaagatctcacgaccatataaaaaagaaccgttatggccatatatgaactgtaaaagaaatatatcgggaacaataaatacgttaaacgtggttaccattatcatataactcaccttttaaagcttagaagagccctcgtaatggccgctaccagcgataattgggagcgcaagttcttatataaaatctaaaaatgatggctttaccttgaacataaacttgtctat

SEQ ID NO: 10282 - DNA, 91 bp, Gossypium hirsutum
  Clone ID: LIB3135-013-Q1-K1-F6
gacgagaaagcgcctggataggggcaccaaaatacaaatgacgggccggggggtcacaacgacgggagggggaaaacccaggggggaccca

SEQ ID NO: 10283 - DNA, 275 bp, Gossypium hirsutum
  Clone ID: LIB3135-013-Q1-K1-F8
gaaaagtgctgagtccggtcccttaagtcgttggcctaaacgaaccgccggtcggtccgaatttcctcgacgatttgaagagcggtgggtggtttccggttcggatcgacgcgtatgagacgagatggttaggacccgattgtgcaatggcggtggtgaagaaaggggaggagaaaggaggtgaagtgtacgccgccattgtttttacgagtagtggggaagtggaagggtttttgaagggcttgaaggaatttgggtgggattgggggacggtc

SEQ ID NO: 10284 - DNA, 405 bp, Gossypium hirsutum
  Clone ID: LIB3135-013-Q1-K1-F9
tttccacgactcttctgtcacccgttcaagctgcgtcactgtcttgttcaacacagttaaatagaaggggaaaatatttatagaaaattccacctctgaacagatcttctccctctcgtcaaacaacggacagtcatttaaggctttaaattggagctaatattgaatggagggaattagaggcgatggtgcatcatcagcttcgcctttgtctcaatgggggcacgacggttggaggatttatcagtattatctcgataagactactcctcatacagcttataggtggattggaacccttgttataacggctatctattgtttgcgggtttatcatgttcaaggcttttacgtaattgcatatggccctgggatctacctgttgaatttgctaataggattttt

SEQ ID NO: 10285 - DNA, 436 bp, Gossypium hirsutum
  unsure (1)..(436): unsure at all n locations; Clone ID: LIB3135-013-Q1-K1-G1
gtaaacaatgtgtcttcttgggagacgggaagatagcttagtgccgcttgaatgaaagatgaagctgaaatgactggcatggagctcgatccaattgcctcaggaatgtcttcttttggtccatttggtcttccctctgttctaggagtcaaatccatgtatgccaagaaattctgagtttcagatgaaattaaccccatgaagattgtagattatgtctgaaatgatgcatgaatattggtgctgaaagacgagggttttcgaggctttcggtgttgttcagaagctgtccacattttcatgctccaagcaactgcaatcggaaaactggctctgcgcttgaaagctacgaaggtaactactaaacagaggtaacaaagtcaattttttgctaaagnttgttggtgaaaaaaaaaagtattttcactatgaaaaa

SEQ ID NO: 10286 - DNA, 422 bp, Gossypium hirsutum
  Clone ID: LIB3135-013-Q1-K1-G10
gaagaacgctagcccaaccatctttgaaactatgctctgtccaatatgaatatggagaaacaatatttggattggatactagtcccgatggggattcttttaatggtgtcctaccatctatggcttctttatcgaatcttaaaacatcccaccaagactgtcatcggcgtcaacgccatcaaccgccgtttttgggttcaagctatgatggaggacgggtcaaaaggagtattggcagtgcagtcgctgcgaaacaatataatggcgtcgaccttattagcatcgacggctatcatgttgagttccctcatcgccatcttgatgacgagtgggagcagcaatagatcgtcctggttcttattctgagatagaagcgacgttgcattttcgatcaagtactttgccatattgcgttgtttcat

SEQ ID NO: 10287 - DNA, 235 bp, Gossypium hirsutum
  Clone ID: LIB3135-013-Q1-K1-G11
gccacacgttcgcacagatagatttatgactaatattgaagcaactcctgaggggggtaacatgcttaggcgcatgtactaaaatgtacaagagccgtctttgaatgctacgactatgggtggaaataatggaaaaagttcagatacaaacccatgagctgcttcattgggcaatcaaggagcctccgaagctagaaggacaccaattaacactactacgactgaatgtgaaacc

SEQ ID NO: 10288 - DNA, 392 bp, Gossypium hirsutum
  unsure (1)..(392): unsure at all n locations; Clone ID: LIB3135-013-Q1-K1-G2
cggacgcgtggggtctttattgaggaggctttgcacctgaaataggactaatgaaaatccagaagaatgggtctgggctttcaaaaagatgaaaatgcaaagggtaaagagaaagtcttttgaacaaccaacctgacataaggattctagctcgcccacttagagcagatggagattatcggacggggaaaagcggcactcgacatctattaaacaacaccaagaacaaagccataccatgccctcgggagaaagacgtgatgattgccatgaatgctgccttcgaggacgtgttgtacaagaaggtctttgccgattcctatcaacatggtgcacccctcagtagaggggcgtgaaaaggctttttttanattttatcgtgttaatttttt

SEQ ID NO: 10289 - DNA, 440 bp, Gossypium hirsutum
  unsure (1)..(440): unsure at all n locations; Clone ID: LIB3135-013-Q1-K1-G3
cccacgcgtccgattcactaaaaattttataggagaagagacaaacatagaagtcttttctgattaggcagatattctctaactgattgtatatgtacttgcggatgcttatgtttaattcatgattttaattcattgatttcattgttgtgcttaactgccaaactatctccttgtattatctttctaaagtgcatccttttggaattgatgacatatttaagaagtgattgaggtatttcacgtaagctggtgatattgccctagggccttgggggtaaactatgttgtttccgggaaagatttagatttaatgatacttatgattcgagaatatagtgattatgttaaacaattagtttaatttactcagttgctacacctggacatttgccataaaaaagaggtccaggttggcgtgtttactangatcttgacac

SEQ ID NO: 10290 - DNA, 386 bp, Gossypium hirsutum
  Clone ID: LIB3135-013-Q1-K1-G4
atcaggaagcaatgcaatcttgcaaacaagcttcactaaaatgcctcgccaaagagaaagccgagagtggccgaataaaatggttgtttacttgtttcttttccaagagacaagtttgttaatgtgcagtgagtaatggtgcaatggtactagtttgatacgatcgacccattgcatttttttttagcataagccaggttgccttctcttgatgttggtcatgggcgtagtggatgtagggatggatgtaatgtatgtatgtaaggatggtgttgactgtgtatgatgcatgaatttcaaagatttaaaagttatgatgattcatgcataatcccttccttttccattacgatgcaatactatgagcaatattattgtatttggat

SEQ ID NO: 10291 - DNA, 266 bp, Gossypium hirsutum
  Clone ID: LIB3135-013-Q1-K1-G5
caggaatctcacctcctttaacctcgtcaagggttagatttgattataatgtaatttatgtgcatatatgttatccttgtccttttctattacttaacagagtggagaataaaatcttaataatacataattatgtgagtttgagatgtttcggcttcaaaaaaaaaaaataaaaaaattatataaataaccgcccatattaacttgaaccggtgaaggtaaaaagacgtaaaaaattttaatataaattgtaaataaataaattg

SEQ ID NO: 10292 - DNA, 237 bp, Gossypium hirsutum
  Clone ID: LIB3135-013-Q1-K1-G6
tcgcacaaactctattctcaaaattgaaataattgtgggccaatgttgtgtaacattagcatcatgtggagctgctttgagttgaaaagcgagttaattgcttcataaactattggtatccttgtaccttagacatgagatgatgcctgctgcgtctctaatctgagcactggtaaacatttttgttattgttattgtggaaacgtttactcattgacaataaatttggttcctagt

SEQ ID NO: 10293 - DNA, 448 bp, Gossypium hirsutum
  Clone ID: LIB3135-013-Q1-K1-G7
ctacgttctcgaacaagggatttgttcgccagaccctttagaaagaagggttacattcccttgtctacttacctcaggacctacaagatcggcgactacgtcgacgtcaaggtaaacggtgccgttcacaagggtatgccccacaagttctaccatggtcgtactggtcgagtttggaatgtcacaaaacgtgccatcggtgtcgaagtcaacaagcaggtgggaaacaggattatcaggaagaggattcatgtacgtgttgagcatgtacagccttcgaggtgcgctgaggaattcaagctcaggaaggtgaagaatgatcaactcaaggcagaggctaaagcatagggtgaggtcattagcacaaagaggcagccagaagggcctagacctggtttcatggtggatggtgctacacttgaaactgttacgcccatcccatacgatg

SEQ ID NO: 10294 - DNA, 415 bp, Gossypium hirsutum
  Clone ID: LIB3135-013-Q1-K1-G8
ataaagaagaaagaaaagattaatgagctttgcaaaaatggtgcttcaaagattggagatgtgcgttgaattgatgaaactagccgtagagttcgtcgtggttgtggccgaagcagtcggaatagtcattcatcaaaaccactcgccgccagtaatgacggctagccggtccttcgctactccggttcccttagtcgggtttcttccttgatgatcacgttcaattttctgaatttttcttcttctttccttttcattagagaaaatgatccggttgaatcctcttcaaatttttgctattgttgctatactagctacgtttgggaatttgaatgtgtaaatttaggctaatcatgtattttaagggactgaaaagtctattttttatttgaatttctttaactttcaacaattt

SEQ ID NO: 10295 - DNA, 285 bp, Gossypium hirsutum
  Clone ID: LIB3135-013-Q1-K1-G9
ctttcatgcagaaccaagtaccattactctattgtcaaacaaaaaaactgcatcggatgtcttgttcaacacagttaaaaaaaaggggaaaagctacatcgaaaaaaccaacagtgaacacaacatggtcctttcgtcaaacaacggacagtcagttaacgctataaagtgaagctaatattgaaaggagggaattagaggcgatggggcatcaataacagcgccaatcatcttaatggaggcacaacggttggaggaaataatagcattaacttcgaaaagaca

SEQ ID NO: 10296 - DNA, 434 bp, Gossypium hirsutum
  Clone ID: LIB3135-013-Q1-K1-H1
cccacgcgtccgctttgatcaaattggtccagccctgttattttctgacagtcaagcaacacttcagatcgcggcgaatccagtattccatgagcgaactaaacacattgagatagattgccattttgttagagaaaaaaatacgagaaaggctaattcgaacgcaacatgtgcaaacgacgagtagctcgcagatgtgatgacaaaggcacttggagtccaacaacatgcgtatttggtgaccaagttggaggataaagatctttaccaccctccaacttgagggggagtgttgaaaggctgattgggggttattggttagtttgtaattctaactaaatatcaatacttagttaagtatttagggactaaagtgttgatgtataaatagttgagggtgtaacttaaggattgatccttttttatctcttaat

SEQ ID NO: 10297 - DNA, 440 bp, Gossypium hirsutum
  unsure (1)..(440): unsure at all n locations; Clone ID: LIB3135-013-Q1-K1-H11
cagagctgacttctgggttttacaatcctgcacatcgtgatggctatgctccgattgcagcaattgcattaaacttcacatgtgttgaattgcgcaccttaaatcagcacgagggcttcccagaggcaatggcagacccagagggcttagtttggcaggtgctgaatgccgcgtgggatgtttccataccggttgctagtgagaatgctcttccatgctatgacagagaaggctacaataagatactagaaaatgccaagccccggaacgacccagatggccgccatttatcggcttttacctacctcaggctcaacccagcactgatagagagacgcaactttgtagagtttgaaagatttgtcaaggggatgcatggggaagcaatatcagatctcccattgaactgaaagacctgctaccacccaangggaaggatg

SEQ ID NO: 10298 - DNA, 454 bp, Gossypium hirsutum
  Clone ID: LIB3135-013-Q1-K1-H12
tgcatgtccctacttatttgagttgctgttcgacacgctattgcttctgcggcaaaggctgatgccacatgatgatgaatctctgtgcatgataaaagtgtgtttctgtcactatccctggccacgattcccgctgctgattgccgtgagttcccatcaaatgctgcatcgaagttaaccttcacaaactggaccgatctattagtcttttcatgcaatctcctattcctttctccccatattgcccaaagagcacaacaaaagatccgtcgccgattggtggaattttgttcaaaaacccaggacattcacggaatatatgatttgtagattctgctgcactgccacacccgatgcatgtcacattgtttaacagccttctgtagttcaaagtgactcgagtcgggatataattccaagatatttttcagattgaaatttttaccttaagagg

SEQ ID NO: 10299 - DNA, 320 bp, Gossypium hirsutum
  unsure (1)..(320): unsure at all n locations; Clone ID: LIB3135-013-Q1-K1-H2
ggcccggaaannccgggacgacggacgcgaccgcccacgcgnacgcagagaacaaaaggggccagccccggtacgnccagacagacaagcaacaggggacagcgcggcgaaaccaggacaccacgaacgaactaaacacagcgagagagagagccaccccgggagagaaaaaaagacgagaaaggcgaaagcgaacgcaacacgagcaaacgacgaggagcgcgcagaagggaagacaaaggcactgggaggccaacaacaagcgaacgtggtgaccaaggcggaggaaaaagagcatgaccacccgccaacgagagggg

SEQ ID NO: 10300 - DNA, 336 bp, Gossypium hirsutum
  Clone ID: LIB3135-013-Q1-K1-H3
tggaccggttaccaacgtctgcgacttgtattataccttttaaagcttccaccatacggaagcaaagagcaactggaaaccaaattgctatatgctataaatgcagatgctggttttgatttgagttgagttgtactctacatatgcaactcgacacgtagacaaagaccggctccggtgtcaggtttgaatgaagtatatgtgcacatcggtaatttatattcttatatatcggaattggaatgtcagaaattttctaactgataccatgagagctggaagggggggatgaatggttgtttgagaccaaaaggccaagaaccataacagggagta

SEQ ID NO: 10301 - DNA, 342 bp, Gossypium hirsutum
  Clone ID: LIB3135-013-Q1-K1-H5
ggtgaatctgctgctgttccaaaaggtgaatttcaagtgaagctggaggaaaaaggcaggggtgataacccaccctcttcatcatcttctgttaatacaagtgaaattgttttggggacaaacgaaagcctcagctcaaccccccctgagtcatctgcaagtccacttgttaccaaggatgatgatacaacttcaggaacagagtctgcccctgagattaccgaagatgttggagatccaaccaaggaaacaaagaactaatgtactttctgaagaaatggtgtgggtcagctattattactcattccgtggcatgacattgatctgatgggggggtgggca

SEQ ID NO: 10302 - DNA, 458 bp, Gossypium hirsutum
  Clone ID: LIB3135-013-Q1-K1-H6
ctttccttccacttgttttcattggttttctacgagcacaaaaaatcgcctatgaatggatctttcttatagtcattctattaataagtttcattattttatattgggaaataaataaaaaaaagaattggattcttttgttgctaatctattttttgttagtgattttggcttttatcttacgctctttcctatccgagatgatttcgactttgctaggagtttctttggttttttgcttttcttcggactcgagtgagggtggaaacagtcttcccgctttagaatcctcttcgagttccgaatctctaaatacgttccggcagatttatgccgcggattatgagaggactatattcgaaagaataagaagtctggaaagtgctcaatattacaatctttcaccacaaacgccggccggggagtatgaaaccatcgtaagagcgcattttgatcaa

SEQ ID NO: 10303 - DNA, 263 bp, Gossypium hirsutum
  Clone ID: LIB3135-013-Q1-K1-H7
ggagaaaaaataatacatgtgtttatttcgctaaaaacagcttcaaatggttactttcagaccccacatattaaaggggggacttctctcaaaccatgaattaaaaaaaatctttcaacattttatggaaccgtggggtggcaagcaaaacaaaaattgctgtttggcgaataatacacagttatatttctactttaagcaatctccaatttataaagctgccagtggtggacatttgcccatttttcaaatttgaaaaggaa

SEQ ID NO: 10304 - DNA, 218 bp, Gossypium hirsutum
  Clone ID: LIB3135-013-Q1-K1-H8
gatctagaacgcgacagccgccttttatatttatccacaaggatgaaaaaacggggatagggcaagggttaagggagaaaaaaaaaaacaacgaggtaaaagacggtaaaaaaaagaacaaatgggtacacgcaaaacccacacaataaaggggggacccaacacaaagacacagaaaaaaaaaaaatgatcaacatataaaggaacccgaagggggg

SEQ ID NO: 10305 - DNA, 229 bp, Gossypium hirsutum
  Clone ID: LIB3135-013-Q1-K1-H9
cccacgcgtccggtaatattttgtttttccttttgaagcaaaaactgcttctttgtgggtttccttaaccctttggccgccgttcagcccacgcctcgattccgacggaggggacaccagctcgaagacttcggcgaaaggtaagtctcccttttccccttttattctattattttcacaaaacaaatatattatgaataaaaaattaatttatttgtctttttatcat

SEQ ID NO: 10306 - DNA, 256 bp, Gossypium hirsutum
  Clone ID: LIB3135-014-Q1-K1-A1
gaaactcccacacctattccatcatttggaaaccccaacacattattttcttggtggataacatccccattagagtcttcaaaaatgctgaatccattggtgtaccgttccccaagagccaacccatgaggatttactctagtttatggaatgctgatgattgggccacaaggggtgggttagtgaaaactgattgggcaaaagcacctttcacagcttattacaggaacttcattgccaatgcttgtgtctggtc

SEQ ID NO: 10307 - DNA, 380 bp, Gossypium hirsutum
  Clone ID: LIB3135-014-Q1-K1-A10
accgcacacgggcgttctttcgatgtcccagcgtcaacgaaagctttgacgctaccatagtcgttgaggacttcggttactgtaagccatgtggtgaaggaaagccagagagcccaagggggacaatgctaaccgaggacctgatgcaagagagggcgagcatgtaaagggggtggctcacatcttcgctacatttaatgacattgattcatgtgactgatttgtgtggaagggaaacaatggatcgcattactggtggcatgaaggtgaaagctgatagggatgaggctttcccttatgcaagcatgcttgcagaccatgatgtttctcatcgctgcaaggagacggctattactgccctttatataaagcatagagct

SEQ ID NO: 10308 - DNA, 415 bp, Gossypium hirsutum
  Clone ID: LIB3135-014-Q1-K1-A11
cgttcgcccacgcgtccgcccacgcgtctggaaagatgtgatgaaaaggtgtgttgctgcagaaccgaagcatggtgagaaatggcaagctatttcaaaggctgtagagaactctcaccagcctactgaagccattttaaagaaagtagtggttgtgttgggcaaggaagagagtgctgcggaaaataacagtaaacactaattacttttaactaatagttactcgtgtacttgggggtagtgccagctgaatcaattctgaagcatgttttctttggtttttggacaattatggtgagactttatcttcaactatgatgtttttagcatatagcgtctacttgttttgttgcctcgttttgcttaccattgtttccagagaaataacaataagacaagctttggagtttggttt

SEQ ID NO: 10309 - DNA, 351 bp, Gossypium hirsutum
  Clone ID: LIB3135-014-Q1-K1-A12
gctttttgtggtcctgctggtcctcaaggtcaagctgcttgtggccgatgcttaagggtgaccaacaccgccactggaactcaggcaacggtgagaatcgtggatcaatgtagcaatggagggctggatttggatgttaatgtatttaaccaacttgacacaaatgggattgggaatgctcaaggtcacctcactgtcaactatgaatttgtaaactgtggtgactaaacccactttctagtaattaaaatgagtttcaaccaaataaatgctttgtatcactactaaataaatccattctcgaataaaacttagcagcacttgttgcttgcaagttgctaaatttacttt

SEQ ID NO: 10310 - DNA, 406 bp, Gossypium hirsutum
  Clone ID: LIB3135-014-Q1-K1-A2
cggacgcgtgggcggcggcattgagcactgcgttgttcaacaatgggttcagctgcggtgcttgctttgagatcaagtgtgctagtgatccacagcggtgccattcagggagcccatgcatattcatgactgcaaccaacttttgcccaccaaactacgctctttcaagcgacaatggcggctggtgtaacccttctcgtactgactttgacctcgccatgcccatgttccttaagattgctgattaccgtgccggaattggacccgtttcctcccgccggattgccactatgtttccttacaacttttttttttcctttttttttataataaaatgggaaagaaggctaccggttaaattaatttaatggtaagtaccttaaattgttacaaacttaatttaaaa

SEQ ID NO: 10311 - DNA, 159 bp, Gossypium hirsutum
  Clone ID: LIB3135-014-Q1-K1-A3
gcaacttttggaccttttgtgtgagaatctggggttggagcctggttacctgaaaaaagtgttttatgggtccaaagggccaacctttggtaccaaggtcagcatctatcctccatgccccaaacctgacttaattataggactcagggctacactgtt

SEQ ID NO: 10312 - DNA, 387 bp, Gossypium hirsutum
  Clone ID: LIB3135-014-Q1-K1-A4
atgggtattacgtcagagaacgttgctcatcgctttggtgtgacaaggcaggagcaggatcaggctgcggttgaatctcacaggaaagcagctgctgctacagcttctggtaaattcaaagatgaaatagtccctgtggccaccaagattgttgatccaaagactggtgatgagaaacctgtcacaatctctgttgatgatgggatccgagctaacacatcagtgtcagatctgggaaaattgaaacctgttttcaaaaaaaatgggaccactcctgttggaaattttagtaaagtaagtgatggtcctgaagctgttttcttattaaaaagaagggttgcaatccccaaagaacggccaatctttgtggttttaagaacttttgtt

SEQ ID NO: 10313 - DNA, 247 bp, Gossypium hirsutum
  Clone ID: LIB3135-014-Q1-K1-A5
ggttcttccttagtttccacttccacatatgtatccttaaattgaagaaaatggccgcatcatcacctgccatgcaaatgcaatccctccttttagcacgtcccatgactggccttgctagtaagagacaaatggttcagttttatatcgtgaaacgcatgcctcgctttcaaaggaaactcaatcttcaagttcgctgtttggcagaggaggttgatcaaaaagagccaatgccaacagcaagaac

SEQ ID NO: 10314 - DNA, 220 bp, Gossypium hirsutum
  Clone ID: LIB3135-014-Q1-K1-A6
tgggcaaaatcttgattaccaactctgtacgatggcggaggctgcatagtttgcggactaattcggaactggcggtcgatcattatatcagtgaacagaggcatagttgctacataggggctgcatggagagacctgcacaggggaagacaccatgcaatcaggcagcacaacaggcacgagatttacgagacgtatcaactgaatgacactgatggctc

SEQ ID NO: 10315 - DNA, 271 bp, Gossypium hirsutum
  Clone ID: LIB3135-014-Q1-K1-A7
acaacctaaatccagtctggaacgaaagcctaatgttgtcaattccagatagcattcctcctttgaaagtgattgtgtatgataaagatactttttcacatgacgattttatgggggaagcagagattgacattcaaccgcttgttgctgcggcaaaagcccatgagcgttcagagattcaggaatcaatgcagctagggaaatgggttgcgagcaaagacaacaccctagaaaaagaccgtataattaccgtgacagatgggaaagtaaa

SEQ ID NO: 10316 - DNA, 161 bp, Gossypium hirsutum
  Clone ID: LIB3135-014-Q1-K1-B1
cccacgcgtccgatcgtgttaacccctattacagaaatgaacttgctttttatagccaaaccattttacaagacggtataggtgctggcacacacactgattgcggctcatagcaagtggaagataatgggggaaccggcattgtgagggctgctgaacgt

SEQ ID NO: 10317 - DNA, 261 bp, Gossypium hirsutum
  Clone ID: LIB3135-014-Q1-K1-B11
gtgaatgtttaagtccggtaacacctcgaaccctgtcccggctttggatacgggtgaggggagttacaaaaatccatagtgatttatttctacttccattcaggaatcatcataagttgtaataatcctgaagggacttgatgttccaccttaaattgttgacacaccaaatacttggctttgtattcggttatctcctttctaatgcttgactatcaatataataattttaaattattattcatcttaaaaatacatatc

SEQ ID NO: 10318 - DNA, 206 bp, Gossypium hirsutum
  Clone ID: LIB3135-014-Q1-K1-B2
aagcgaaaccctagccactctctgctcaactcgccaatgggggcttataagtgcgtctcggagctatggacggaagaagcacgcggatgtgatgaggtttttacagagggtgaggtgctggtaataccgccagcatacatcaattgttggggaaaaccatgctactcgcactgacaaggcacgccgcttgatttataatgccaaac

SEQ ID NO: 10319 - DNA, 274 bp, Gossypium hirsutum
  Clone ID: LIB3135-014-Q1-K1-B3
gctggacataaaactacgaaactgatgtaagactgtgtatctcctagtgaacacaggacacagaggacagtgctatcgctggataaccaccaccggtctgagcctgtctcatgggcgatgttattctgaagccagcctacgttggtcctttataatatgaatattagctctttgtgcaaatgcggttgatatatgtacatgttaccatgtattgtcgttaaagattaagacttttaagtgtaaaagaccatataacgttgcttatggggggaaa

SEQ ID NO: 10320 - DNA, 335 bp, Gossypium hirsutum
  Clone ID: LIB3135-014-Q1-K1-B4
gaaaatgacattgtatatgatgggctatgaggatgtttcatcagctccgagtgacccagttgagaaaactatttggacatttggaagaccagctactatggaattaacacatttctggggtactgaaaacgaccctgagttcaaaggataccacgatgggaattcagaacctactggcttcgggcacattggcatcaccgtggatgacatgtattaaggcatgtgagagatttgagagtcttggagtagagtttgtcaaaaaaccaggcgatggttttcctttattaaaggatcccaatggttcctgaatggaaatctttgttttgaatggaatt

SEQ ID NO: 10321 - DNA, 281 bp, Gossypium hirsutum
  Clone ID: LIB3135-014-Q1-K1-B5
gcggtagggggtgatgaaattgaaaagcagaaaaagaagaagaagaagaagaagaagaggaacaaagagaatgaggaggctatagaggctattgctgaagccggtgtagatagtgcaatagatgcagggagcgatgaaattgagaagaagaagaagaagaagaagaagaacaaaaaaaatgaggaggctattgaagctattgctggtggtgacggtgcaaatgatgcaggggcagaggatgaaacccaaaagaagaaaaagatgaagagaaaaaggaaaag

SEQ ID NO: 10322 - DNA, 318 bp, Gossypium hirsutum
  Clone ID: LIB3135-014-Q1-K1-B6
cgccctcttggctgagactgaagacgagatctctgaagccaaagctaaatcgcagtcttcttcgagtagcactcctcaggtagtagaagaaaagccaaagcaaattgaagaggcggctccggatgttccggctgctgctgctgctccatcagttccggtcgcaaaggctgtaactttggggtccgccgtgcatccggcttcggaaggagggaagaggatagttgcctcgccgtatgccaagaaattggctaatgagttgaaggtggatttgggaacagtggtgggggagggaccattggggaggaatgtggcttaaga

SEQ ID NO: 10323 - DNA, 318 bp, Gossypium hirsutum
  Clone ID: LIB3135-014-Q1-K1-B7
cggacgcgtgggaaattgcaagattttatgacgcaggaatgggtacaatcatatttgcaccagtagcagtgttgtcatggttcccattcatctcaaccttccagtctcgccttctctttaaccaagcctttagccgtgggctggagatttctctcatccttgccggaaacaaagctaatgtcgagacatgatttctactttctggctgcggttaggtttgcttgaactagttattgcttttattttttggcctcgatttattaatttatgaatttaactacaatccttttatagtatatattatttttgatggagtac

SEQ ID NO: 10324 - DNA, 357 bp, Gossypium hirsutum
  Clone ID: LIB3135-014-Q1-K1-B8
aggaaatcgccctttggttccctgaatgccctgttaactggcagagcagccttcacccttggatctacgagtagagatcatttggtcgaagctattggccgtcatggctctgtcctggttgtttgttgttgttgttgttgccagtcttttgatatttatattactattatagtttaaagtggtgaaagctttgtagcattttgggtgtataggttaagttggagttgtttttgaaagcttccattacaatgccacagttgaggtgaacagcggtttgaataatcaaagctatttgagtgtttgtcatataacaagagataaatattaatattatattttttatttaatttttttttt

SEQ ID NO: 10325 - DNA, 281 bp, Gossypium hirsutum
  Clone ID: LIB3135-014-Q1-K1-B9
aggagatcgagaatgggatgctgtgggaagtcgagggaaagtgggtcgtgcatggtgctcttgacgtggacattggagccaatccttcagccggagatgctgatgaggatgaatgagtggatgaccaatctgagagggttgatgacattgttgacacttttaggctcgaagagctaccgtctttggacaagacgctataagtcgtgttgatgaagaagctcatcaagaacttgacaacgaaactggatgctgtatagcaagagttcttgactaaaaacatt

SEQ ID NO: 10326 - DNA, 247 bp, Gossypium hirsutum
  Clone ID: LIB3135-014-Q1-K1-C1
gtattgcccaaggtaaagttggccgtggctttgatgtcagttctgctgtctatgggagtcagcgctatgttcgtttttcaccagaagtgctttctgctgctcaggctgcagtgaaagggatgccattagaggaagtaattgggaacattctaaatggaaaatggaaccatgagaggactgaattctctttgccaccattaatgacacttttactgtgagaaccgggaaccgggtgggatcattaaac

SEQ ID NO: 10327 - DNA, 363 bp, Gossypium hirsutum
  Clone ID: LIB3135-014-Q1-K1-C11
gaactgctaaatacgcaaggatttccccttccccattccaaactattaaccccgatgccgatctgaacgtttgactatcaaacgctgcatcaaaatgaactgttgcccatccccttttgaaaacttgttgataacagtcagaagtatggaaggtaggcttatctttttttgctgcttcgagttctgttaaatagtttctaatttttcttgctatttccaatcctgacattcgtttttttccataaatgagttgatttttactgaaccagatttaccatagtccacagcagaataatcgcaactgctcctccgtttctttgaccaaagaatccagggagccatttccataaatcctcatttatt

SEQ ID NO: 10328 - DNA, 404 bp, Gossypium hirsutum
  Clone ID: LIB3135-014-Q1-K1-C12
acccacgcgtccgcccacgcgtccgcccacgcgtccggatgggttcatgcaatggaatggtctggtcagaaggagtttgtagcatctcctgaggttcctttcatagtagatggtgcagaagccggagtcttgaaaactcatggagctcttggtttccttaaggttcatgatgcgggtcatatggttcctatggaccagcccaaggcagcattggagatgctgaaaaggtggaccaagggtacactatctgacgccagtgattcagagaaactggttgccgagatgtgagttccattacttcagtgctagaaataaatcttgttggcctttataatgggaataagcatagtgtaaaatatctggactttttgcgtagtttctttgagtccctgaaaaaatttcat

SEQ ID NO: 10329 - DNA, 205 bp, Gossypium hirsutum
  Clone ID: LIB3135-014-Q1-K1-C3
ggcaaacttaatatagtttgttttacttgtgaaggtcttgttttatattttgttgaggtttttggaccataaattagcttatctatggattttgaagctctaagaacctcctactaaatattgcttcatgaacttgttcctggaattgagtttgaattgtttcagttttcctttagtttttattgatgaatgagccactattgtc

SEQ ID NO: 10330 - DNA, 196 bp, Gossypium hirsutum
  Clone ID: LIB3135-014-Q1-K1-C4
cccacgcgtccgcgaaggggagacgagttggattgaaagactaacagatggtccgtggacggacacaatgtgtaattggtcaccagatggtgatttgattgcattttcttcggatcgacataatccagggtcaggtagtttcgagttatatatgattcacccgaacggtaccgggttaagaaggttgcttaggagc

SEQ ID NO: 10331 - DNA, 297 bp, Gossypium hirsutum
  Clone ID: LIB3135-014-Q1-K1-C7
tttgggttgagggtgggtcccgcgtacgtccacgcgttcgtggtgtatttgttaaattgtgccaaccaaatgctgcaatccgggatgctgatgcatctttaaagatcaatcctgactcagcaaaaggatataaagttcgagggatggcaagggccatgcttggtcaatgggaagaagcagcaagtgatctgcatgtatcgtctaagttagattatgatgaggtgattggttccgtactcaaaaaggtggaacctaatgcacacaaaattgaagagcatcgcacgaaatattaacgcc

SEQ ID NO: 10332 - DNA, 307 bp, Gossypium hirsutum
  Clone ID: LIB3135-014-Q1-K1-C9
tgtcagaccgacgcgtccggcgcacgggaacatactgattggatggggatatgaagaatcatatatgggtcgaccctacaaaagactaccataactatgctgtaaaagggaaccctagtgaaatcatatttttcgtagatgatgtgccgatcagaacgtacccaaggaagagcgacgccacattcccaacgagaccaatgtgggtgtacggatcaatatgggatgcgtcatcttgggctaccgagaatgagaagtacaaggtttattataactaccaaccctttgtaggccgtttcacgaatttcaa

SEQ ID NO: 10333 - DNA, 198 bp, Gossypium hirsutum
  Clone ID: LIB3135-014-Q1-K1-D1
accggatgatcaatcctgtaggatcaatccttggaatgccggacgaaaacatttttgacaagcaggtgctctttggaagaagcggggaggtttcgggatttgattctaatgaccccgcttcgaggagtggaggaaaagctgttgctgttcaacaaataacaaacgttcaggggctcgcgggattcgtcatgattggtg

SEQ ID NO: 10334 - DNA, 341 bp, Gossypium hirsutum
  Clone ID: LIB3135-014-Q1-K1-D2
cggacgcgtgggctcgaaaatggtgcatacggtggataggaagcagttttaagggaggagagtggatgggatgaatcatctttgctgacaaataggccttctttacatcacattagcaggaaggggtgatgtcgtacaagttgtatacgcaaatacttgtttgtttttcttgcttttatgaggtaaaacttggtaccgctgtgttcctgctcaatatgtgaccggtttatttatggtttagaaaggttaatattattttcaaatttggttttgtttctaaaaaaaaaataaaaaataattattaatagggggggccgttttaaagattcaaagtttacttc

SEQ ID NO: 10335 - DNA, 318 bp, Gossypium hirsutum
  Clone ID: LIB3135-014-Q1-K1-D3
cgaatgggaataagagggtcagccaaacagcgggcagctccactttgtacattttctgaggcagaccaatcaggtttagaaaagggaggggaacttctcaccgaagcgaaggaggcagtacgaatgaaggaggcgggaagctaccgcttctagaatgcaagcttatccttgactttttttagagaaaaaaaaaaaggtttttggatgaacgaattggagtgacaaatggttacggttgcggaaaccggagaaagtcgggaaccgtcggttcacttttgaatcaaatagcgacgagccgaggactacgactacaggggg

SEQ ID NO: 10336 - DNA, 156 bp, Gossypium hirsutum
  Clone ID: LIB3135-014-Q1-K1-D4
ccttaacagataaggagatgaatcgccgcatagacatggttgcaaatttgagatctaaagcagaatcagatggcttctgcattcaacatgtcaaactttgccaacagagagagcttgctggggccagaaactaagcaagatgccatgagtagaaca

SEQ ID NO: 10337 - DNA, 110 bp, Gossypium hirsutum
  Clone ID: LIB3135-014-Q1-K1-D6
cggacgcgtgggctctaaaatggggcatactgtggataggatagcactataaaggaggagaggggatggtatgaatcatctttgctgacaaatacgccttctctacataa

SEQ ID NO: 10338 - DNA, 159 bp, Gossypium hirsutum
  Clone ID: LIB3135-014-Q1-K1-D7
cccacgcgtccgcccacgcgtccgggaacgcgtacgtgaaaaggctcaagctcaggctaaagggcaggtccctggggctaataaaccaatcgacgagaaacactgccctaagcatgtgtccttccttaatggacaggcgacgtcgcaactgggagccaa

SEQ ID NO: 10339 - DNA, 256 bp, Gossypium hirsutum
  Clone ID: LIB3135-014-Q1-K1-D8
agacatctcgctcaggattacagttgttggtcgagtggaatgcccgacttgttgctctggcggttccatggggattacaaaggtgaagccaaactcgtcgaggttaagggccctagagatcaactttccgaacaacaaagagcatggcttctgcttctaaaggattggggattcaacgcggaggtttgtaaagggagcactacaggaacatccccttgtggttagttaccctactaaaaacctggtttactttgga

SEQ ID NO: 10340 - DNA, 408 bp, Gossypium hirsutum
  unsure (1)..(408): unsure at all n locations; Clone ID: LIB3135-014-Q1-K1-D9
gccagattagacagatacgccgaaagatgagggaaataatgactgcccaggcaacatcttgtgatttgaaggaactggttcaaaagttcatccctgagatgattggaaaagaaatcgagaaggcaacatctagcatctatcctttgcagaatgtgtttattcgtaaggtcaaaatcttgaaggctcccaagtttgatcttgggaagttgatggaggttcatggtgactactcagaggatgttggtgtgaaactagagaggcctgctgatgagacaatggctgangctcctgcagaggttgttggagcttgaacgaagaacaatagtccatgaatgtcttgttttttatgcttctaggagtttttgctgatcattttaattttgttgaaaaaactttgtagagaatttc

SEQ ID NO: 10341 - DNA, 257 bp, Gossypium hirsutum
  Clone ID: LIB3135-014-Q1-K1-E1
cccacgcgtccgggaacgtctactgaaaaaggctcaggctgaggctaaaggcaaagcccctgagtctaagaaaccaattgttgtgaaatacggacttaaccatgttacctaccttattgaacagaacaaggcacaattggttgtcatcgcccacgatgtggatcccatagagcttgtagtctggcttcctgctttgtgcagaaagatggaggtcccctactgcattgtcaaggggaaagcacgattgggatcgattg

SEQ ID NO: 10342 - DNA, 315 bp, Gossypium hirsutum
  Clone ID: LIB3135-014-Q1-K1-E12
acccacgcgtccggccacacgttcgcccacgcgtccggtttaaggctaatgcattgccaacttgtggttatgccagtgcttgctattacatctttcgtcggcatgggagatattgtcacaccagaaacctttaaatgggcagccaatgaccctaagatcattcaagcttctacaattatttgtaggtctatggatgatgttgctgaacacaagttcatacataggatagaagacgattgctcagcaattgagtgtctcatggaagaatatggtgtaacagcacaagaggcatatgatgtattcaacaagcatgtt

SEQ ID NO: 10343 - DNA, 345 bp, Gossypium hirsutum
  Clone ID: LIB3135-014-Q1-K1-E4
agcatgcaagatttttactcgccaatgcacttcttcaactttggatgagtttttgacactggatgcttataattacattggcgattcatcatccaaaggatgtttcttctaagctttgatgaagcttccatgaaatcttagaactatggggtttgagtgaaaaaaaaaatagtgccattgctaaataagcaaataatcataatcgtcattttaattgggggttttaaagggaaatggttcataaaggatttggaaataaggtttaattcaagggtgggttttaatggattaattcaaaggttttaattcaggcaattaggttattaaattggtggccgttgggtt

SEQ ID NO: 10344 - DNA, 272 bp, Gossypium hirsutum
  Clone ID: LIB3135-014-Q1-K1-E5
gacccacgcgtccgcccacgcgtccggggacgtgtactgaaaaaggctcaggctgaggcttaaggccaagcccctggagtctagacaaaccagattggttcgtagaatactgacttaaccatgttacctaccttgttgaacagaacagggcgcacttggatgtcatcgaccaccacgtggaccccatagagcttgcatgctgactgactgcttcttgcaagagatgtgaggttccctactgaattgtcaaaggaaagcactattgggatcgt

SEQ ID NO: 10345 - DNA, 169 bp, Gossypium hirsutum
  unsure (1)..(169): unsure at all n locations; Clone ID: LIB3135-014-Q1-K1-E6
gttctattcgngaggaagccggggaggctttgactgctaacttgaaaggaaggccggcgtttgaagccgatgaccattcagctttgatttacttgttgctttctcaaaaggaaatgtggatggataaagagtttctcgagaatcaaaattatttgcatggatattgggc

SEQ ID NO: 10346 - DNA, 321 bp, Gossypium hirsutum
  Clone ID: LIB3135-014-Q1-K1-E7
gagtcaaacccgttgaccagagagggtaggaaatggcaaatcaaggtgccaagaagcgcatagaagagaacacccgccacatggccaatcttcgccgcctcatcattgcttgtaatgttgtatacgtcttggttaggatgctgatcttccattcctcattcacatggaaacattgggttggtctacttttgacctctgtggcttactttataccctatcaacaactttcacagatggcaaaacctgcttattctgatgatggagaacttcttgacggtggatttgatatgagtactggtggaatatgtggctatttacatg

SEQ ID NO: 10347 - DNA, 384 bp, Gossypium hirsutum
  Clone ID: LIB3135-014-Q1-K1-E9
aaatgtttgcccacaaaccgcaccacgtgcaccatacttgctatgacaagattcaaggatgcgatttacatgaaggtgaatgggggaaagtcggtaccattgtccattggagttatgtgcatgatggaaaagctaaaaaggcaaaggaagtagtggaagcagtagaccctgataagaatttggtcactttcagagtgatcgaaggagatctaatggaagagtataagagctttgtaatcacgattcaagtttcgcccaagagcgagggtagtggcagcttagtgcactggactttggaatacgagaagctgcacgatgggattgcgcattccgagactctgctgcaattcgttcaagatgtctttaaagacattgacgcccacc

SEQ ID NO: 10348 - DNA, 335 bp, Gossypium hirsutum
  unsure (1)..(335): unsure at all n locations; Clone ID: LIB3135-014-Q1-K1-F10
cccacgcgtccgcccacgcgtccgcaatgtcattagcacccaatgacgttcatcaaaaccaaatccaatttgccctggaaagaggaattcctgcatatcttggtgttctagggacaaaaaggctcccttacccgagcagatcatttgaacttgctcactgttctcgttgtaggattgattggcttcaaagggatgggattcttcttcttgagctagaccggttacttagacctggaggctattttgcctactcgtcttcagaggcttatgcacaagatgaagaggatctcncgatatggaaagagatgagtgccctagtggaacgtatgtgttgg

SEQ ID NO: 10349 - DNA, 310 bp, Gossypium hirsutum
  Clone ID: LIB3135-014-Q1-K1-F11
cgcttgttcaaacacgcaaaatctaataccgttatgctcactggccttagtggaagtggtaaaactgttcttttctatcagcttcgtgatggttctgtgcatcagggtaccattacatctatggagccaaatgagagcactatcgtgctaaattctgatagtaataagcgtaaaagcaagcctgtccatattgttgatgtacccgggcattctcgtctgcgtcccaaactggatgagttcttacctcgagcagctggcaattgtgttgttgttgattctttggagttcttgccaaactgccatttagctt

SEQ ID NO: 10350 - DNA, 170 bp, Gossypium hirsutum
  Clone ID: LIB3135-014-Q1-K1-F2
cggacgcgtgggttgggattttaaagatgggtgagaataggatgaccggcaaggtgaagtggttcgatgaccaaaagggttatggcttcatatcccctgacgacggcggcgacgatttgtttgttcaccagtcttccatccgttccgagggtttccgtaaccttgctgat

SEQ ID NO: 10351 - DNA, 406 bp, Gossypium hirsutum
  Clone ID: LIB3135-014-Q1-K1-F3
acccacgcgtccgcccacgcgtccgctataatgtggcagatggaaggcttgcacagcatattgaaaaaggaaatgaggatggcttatttatcagcagtgtagcttcctgtcaaaatctatgggcccttataatggatgctgggactgggttctctgcacaagtgtatgaactctcaccatatttccttcataaggaatggataatggagcagtgggagaagaactattatatcagtgcaatatcaggggctacaaatgggggctccttatttgtaatgtaaaaaggtacttcgtttttgcagcagtcatataaagggagggagtcctttcctttaaagtgaattaccaaaaaatgggagaaggttttcattttaacttaaagggcaacttttggaacaaaatgggg

SEQ ID NO: 10352 - DNA, 413 bp, Gossypium hirsutum
  Clone ID: LIB3135-014-Q1-K1-F4
gggcaaccagtgagctacttaaccatttcccagatctcttccattctcttcttcagcgttcttttcatttccgcccatgcagcgcgctttgaaatccgcaatgagtgcccctacactgtttgggcggcagcctctcctggtggtggtcgtcgcctagacccttggcaaagttggaccatcgatgtgcctgctggcactgctatggctcgtatttgggggtcgaaccaaatatggaattttcaatggccaggggaaggggcaattgccaaaccgggaatgggggggaacttccttaaatgcaaaggttggggggaccttccaaaaaccttggttgaaaatcacctaaaccaattggaaaccatggattttaccaacatttcttaagtgaaggggttaacaatcccaagggggtt

SEQ ID NO: 10353 - DNA, 162 bp, Gossypium hirsutum
  Clone ID: LIB3135-014-Q1-K1-F5
cccacgcgtacagacacacgtgcgaccatgcgtgcgttgtggacatcaacagtagagcacggggctaaaggttataatgggcagacctgacatcaacactcagctgaatactgcgtactaagacaggaacctgcacggggttcagaacacgaggttacaggt

SEQ ID NO: 10354 - DNA, 162 bp, Gossypium hirsutum
  Clone ID: LIB3135-014-Q1-K1-F7
ccttaagctcactcaaaaacgcgtaagggggcgatattggcactgaaaggcatagaatcatgtgaatgcatgagtctcaataaagaaacagaacgtggttgcatcacccgaagagaccacagctctgacgagaacctggattacgacaggccgacgaccccg

SEQ ID NO: 10355 - DNA, 233 bp, Gossypium hirsutum
  Clone ID: LIB3135-014-Q1-K1-F8
ccgaattcaccgatggatccacgcgtaccgcccgcaacatatgttacatcccaggtgatggcctcatcaacttaaatcgctgagacctttgccgcttgataacgcaagctcgcactctacccctgcttatcgtacaggctcaaattaaaacgtctggacaaacagacccatgcaaggttacaagaagaaagttaaagaacccatattggatagtgactcaacaagtagcacac

SEQ ID NO: 10356 - DNA, 354 bp, Gossypium hirsutum
  Clone ID: LIB3135-014-Q1-K1-F9
actagctaatattgctactagcagaggtggctctcgccactccctctttaggtacctacgagtctcccaactatgggaagccccctgctcctgttcataatcctgctaagctgaaaccgccaccatatgaacataaacctgcggtctatgaaccaccaacaaaagagaagcctgaacctaagccaccaatttatacaccttcaaagaaagagaaacctgaaccgaaaccaccaataaatgaacctccaaagaatgaaaagcctgagcctaaaccaccggtttatacaccaccaaagaaagaaaagcatgaacacatgccaacggtgtatgaaccaccaaagaaagaaaaacctg

SEQ ID NO: 10357 - DNA, 378 bp, Gossypium hirsutum
  Clone ID: LIB3135-014-Q1-K1-G1
gttttcttattttttaactatattctgattctattaattagacttttttctatactgaatagggacgtgatgttccgattgatcatcgggtgattgaggttcatgagcagcgagatagcaaagaagctgatatactcactaaaggagacgctaatcctcacgatgacagaatgttgtacacatctagtaatcgttggatgcaacgaaaatacatcatgggcagagctgttgggtaaataaaacacctatttatttctaaaagggttaacaggtttaagaagggaaaacatttgtaaaacactttaattagaaatttctggcttaaccattggggctggatgctttaagttttaaagttaataaacctcatttggggtt

SEQ ID NO: 10358 - DNA, 437 bp, Gossypium hirsutum
  unsure (1)..(437): unsure at all n locations; Clone ID: LIB3135-014-Q1-K1-G11
gacccacgcgttcgcccacgcgtccgcggacgcgtgggtgcggacattgccagaaattagcaccaatcttggaggaagttgctatccactatgaaaaagatgctagtgttttgattgcaaaacttgatgcaactgcaaatgatatcgtggatccaaactttgatgttagaggctacccaactgtttactttagatcagcggacggaaacataagtgcatacgaaggtgagaggacaaaggaagacatcattgacttcattgagaagaacagggaaaaaactgctcatcaagaggcattaaaagatgagctctgaagaggggacttgaaaagagaagaggcataaatagtgcattgtacgttaaatacgagaattgctatngactaagcggatgactgatctcccgtttttccttagctttacaattaaaaaagacct

SEQ ID NO: 10359 - DNA, 244 bp, Gossypium hirsutum
  Clone ID: LIB3135-014-Q1-K1-G12
accacgcgtccgcctaacgggccaaacttatggttggtcagaccctgggccatacctacggcgactacgggatctgcccttacggtccatacttccatgaaatacacaaaataacagcctctgaacatatgtcaaaccagacgcttgagcttttgaaacacatcagatcctttgacatggaaagctcggtgaatgagctgtacgagctatgggcgaagaataaagtttcgacaaccccagtttt

SEQ ID NO: 10360 - DNA, 205 bp, Gossypium hirsutum
  Clone ID: LIB3135-014-Q1-K1-G2
gctaactctgtgaatcatggctacaccaagggagatgggcttggtgctgaaattgttggcacctttgtgcttgtttacactgtgttctcagccactgatgccaagcgcagtgccagagactctcacgtccctattctggcaccattgccaattggtttcgcagtgttcttggtgcacttagccaccatcccaatcacaggaaccg

SEQ ID NO: 10361 - DNA, 250 bp, Gossypium hirsutum
  Clone ID: LIB3135-014-Q1-K1-G3
aagcccctttccccacagcaaaaaatgaagtacaacccacgagtctcctcctctcgccgcaagagccgcaaggcccatttcacggcaccctcgtcggtccgccgtgtgttgatgagcgccccactctcatccgatttgaggtccaagtacaacgtccggtccatgccggtgcgcaaggacgacgaggtccaactggttcgtgggacttacaaaggccgggaagggaaagttgttcaagtttaccgtcgca

SEQ ID NO: 10362 - DNA, 421 bp, Gossypium hirsutum
  Clone ID: LIB3135-014-Q1-K1-G4
tccacgcgtccgaacaaaacaagctgctgggtaccattccggatattttcaaatcgttcaccgaccttagaattcttagactttcccataatgaattttcggggaaaatcccagaatcaatattgtctttggcaccgaaaatggcgtaccttgagttgggccataatcttctggtcagggcaaataccgagttttctcggaaagtcaaaagcattggacactttaaatctttcatggaattcattcacaggggtagtacctaaaacattttcaaacttaaccaaaattttaaacttgaacctttctaacaattttttaaacaacccattctcccaattgaatttgaaaggctttgaacaactgatttaatctattaacaattttcaatttaaatgaaatcccaaatggggtcactttattt

SEQ ID NO: 10363 - DNA, 114 bp, Gossypium hirsutum
  Clone ID: LIB3135-014-Q1-K1-G5
gcgtccgaacatgttaactagatcattgtaattcgagctcaacgtcatgtttttgctagtagatggtgttcacgtagatgaatttgatcatccgttgtatgcggtataagagaa

SEQ ID NO: 10364 - DNA, 301 bp, Gossypium hirsutum
  Clone ID: LIB3135-014-Q1-K1-G7
cccacgcgtccggattgtctcagatccaatttctcctcctcctcattttccttctctttcgcttctcaattccttcttcccaccagaggttttgcttctgagtcactcaccccaaaaagtgaccacagtgtgattcctgatgttccagcaacagtggctgctattaagaaccccagttctaaaatagtttatgatgaatacaaccatgaacgttttcctcctggtgaccccagcaagcgggcatttgcctattttgtcctgacaggtggtaggtttgtatacgcatctgttatccgtctgc

SEQ ID NO: 10365 - DNA, 187 bp, Gossypium hirsutum
  Clone ID: LIB3135-014-Q1-K1-G8
cccacgcgtccgtataatgtacaatagttagtttaagttgaatttccatcttgcaaaagtgttctggttttttttcccctgtattcttgtagatccttgccccttgaacaattcttttacgaaatcctgaattatgccatatgatgtaattttgtttctataaatttgagtgatcctatttgtgttt

SEQ ID NO: 10366 - DNA, 278 bp, Gossypium hirsutum
  Clone ID: LIB3135-014-Q1-K1-G9
acatcatacctgttcaagaggtcatagccgagatgaccggtggtggacatcaccgccatgtttgatgttccgtgagcacacaccccacgacttctgcattccaatgtatacactatggttgggagacgtatcactgcttgtgggggtgaccaacaaagacgatgcattcaaatctcatccagtgtatctactgtatgaaacgactctcactggttctttctttggacactacgaacctccaactgatattcctgatgcccttgatagaaacatgaaca

SEQ ID NO: 10367 - DNA, 245 bp, Gossypium hirsutum
  Clone ID: LIB3135-014-Q1-K1-H1
cgtccggccacgcgttcgcccacgcgtccgcccacgctttcgcccacgcgtccgctttgtctgaaaagactacagtgccgactcaaacacatgtcatgatttctggtgctagtgattttcttccaaaagaggccaagttggccgatagttcaatcgctcttacattctggaaatgcaatggctgtggagcctgaaatggtgtcacatgcagcggcaactaatgtcgggcttaagcggagtttcta

SEQ ID NO: 10368 - DNA, 372 bp, Gossypium hirsutum
  Clone ID: LIB3135-014-Q1-K1-H11
tcggtacttcaagagagcgcacgatatcaaagcggtgggaggtttcttgggggccaagcatgctgccagggtcatggttccggccaagaaaggttgcataccattcacttcatgtctggctacaaaaatcagcttctgtggcccccatgcatacaaggcatctgagcatgcgcgtgcagggatgacgaaaagcacagccgtcgaaataggctgtgcatcgcaatttagagaacaacatactattattcactcttcattgcaaatttctgacctccaatgtttacagagaatcaaattgggatacctcgataagaagaatgtgagaggagatgaatgctgcttctgcagtgttgaaaggcacttgattggagc

SEQ ID NO: 10369 - DNA, 270 bp, Gossypium hirsutum
  Clone ID: LIB3135-014-Q1-K1-H2
gacccacgcgttcgcccacgcgtccgcccacgcgtccggttggattttttttgcaaaaaaaaatcaaattctactgatggttataggaattgatatgtggattttagtgcttgacagacgtgaaaaatggggttgtctttcacaaagctattcagccggcttttcgccaagaaggagatgcgtatactgatggttgggcttgatgctgctggtaaaaccaccattctttacaagcttaagttgggagagattgtcactaccattcctacc

SEQ ID NO: 10370 - DNA, 324 bp, Gossypium hirsutum
  Clone ID: LIB3135-014-Q1-K1-H3
ccacgcgtccgctaatttgatgaagctccgctccgattacattgatgcctttgttgagaaacacggtgtcaagttgggatttatgtcaggatttgttaaagccactgttagtgcacttcagcatcagcctattgtaaatgctgtaattgacggggatgatattatttatcgagattatatagatatcagcattgctgttggaacttctaaggggcttgttgttccagttgttcgtgatgctgataagataaattttgcttgagatagaaaagacaatcaacaatcttgcaaaaaaggaaaggatggaaccatttaaattgataa

SEQ ID NO: 10371 - DNA, 219 bp, Gossypium hirsutum
  Clone ID: LIB3135-014-Q1-K1-H4
gtcgggactgtaaaaagggctgtgggaaatcttctgctccattcccaaaagggtgtttcttcacatcctctggagggttaaggagcttcgagcatccccagaacgagttgaaggcagtgccaagggtggatggttcaggtcaggcctgtggtgctacgtactgtgtggatacagagacggagaaggattcaaccgaaatgaaaaaagtcgacagtgctt

SEQ ID NO: 10372 - DNA, 290 bp, Gossypium hirsutum
  Clone ID: LIB3135-014-Q1-K1-H5
gtcattctcaccctgagcttatggttggcagtggctcagatagagttcaagtaaagactctgcgcagacatcttgaggaagcatctcagatggttcagatgctgaaggcagaaaaagctaagattgaatcagaggcattaatgtaccaacaattggcaaggcagctggatgctgatctcaagagtctctcagatgcctacaatactcttgaacagaccaatatgcagctagaaaaagaggcgaaaactttgaagagcggtgggacatcaacatctcctgttatcgaggca

SEQ ID NO: 10373 - DNA, 263 bp, Gossypium hirsutum
  Clone ID: LIB3135-014-Q1-K1-H6
attgatggatgggtccacgcatccgaacttaacacgctattggctgccgacaaagagctgagtgatcgcctagtacaacggggggtggactctataaaggtgctccatgacaggatgctggctccagaggcggagggtgtgtgtctgaagcgttaaggctctctttttagcacgcgatgcgatgtcataatatataagaagagttgatgtaccgaagcccgcgtaagtcctttccaaaatgaacttgtaccgtttcacatata

SEQ ID NO: 10374 - DNA, 415 bp, Gossypium hirsutum
  Clone ID: LIB3135-014-Q1-K1-H7
gtccgcttggccggtgatttcttcagccttgctgatctgagccacctaccatttactcagtacttggtgggtcaaatgggaagggaatacatgataaccaccaggaagcatgtgagtgcttggtgggatgatattagtagcagaccgtcctggcagaaggttctccagctctatgctcctcctttctaagacttgaaaatgatgcaatctggggatgggatctttgcaatgatgtctgctttgtggcttagcagcttggtttggcttggggtctgggctttgtttgaagaagccacctaactatcctatgttagctatagttcaataaaaatgttgatgccgggtagggggcccgggttacagatattcttggggttggccatggttggtggtaagaattaagattgaaaaattc

SEQ ID NO: 10375 - DNA, 235 bp, Gossypium hirsutum
  Clone ID: LIB3135-014-Q1-K1-H8
tcgctctgttcaatcttatacgggtacctgatatatccggcatcatgacaacattaaggcgacgtgcagaaagaaaggtggggaagttccgaatgaacataacaaagagaggtgctgtgcctgagacaaccacaaagaaggggacggattatcccgagggtcctgtgcttcttgggttcttcatatacgacgtgattggagcatattctctttcagaatatcaaggacagcgacc

SEQ ID NO: 10376 - DNA, 261 bp, Gossypium hirsutum
  Clone ID: LIB3135-017-Q1-K1-B10
ttttattctcattttttgcttaaactttgtttgaaatcaacgttcatcagtataattaatctgtttacagagaatgcaatacttttatatcaattttcctggtttctactgaaaaccctttaattactttttatcatcaatggaatgttaatgtcttttgtgttttttattccaaaatatatattaactcttttttattttttactttttaaattattacataattatttcgcgccccttctttatcatcctatctttctt

SEQ ID NO: 10377 - DNA, 251 bp, Gossypium hirsutum
  Clone ID: LIB3135-017-Q1-K1-E12
ttcatataatggacaacttcacaaccgccgctttatattgatatacggtccaacctttctttaattttattgcatacccatctcctttattgcatgcctatccatattttatctcgctcgatttcattcacctttttgttgttcaaaaatttttgaaccattcgttccctctaaaatatgctacttatatattttatttcaaaatattaatcatctactctctacaaaattatattttaaaacaatatttt

SEQ ID NO: 10378 - DNA, 375 bp, Gossypium hirsutum
  Clone ID: LIB3135-017-Q1-K1-F11
aaaaaaaaaaataaagggaaagttaaaaaaaaaggaagagtaaaaaaaataaattttataaaataaaaaaaaagaaaaaaaaaaaaaaaataaaaaaaaaaaaaaaaaaatttaaaaaaataaataaaaaaaaataaaataaaaaataaaaaaaaaaaaaaaaaaaaaaaaaaaataaaaaaaaaaaaaaaaaaaaaaaaataaaaaaataaataaaaaaaaaaaaaaaaaaaaaaataaaaaataaaaaaattaaaaaaaaaaaaaaaaaataaaaaaattaaaaaataaaaaaaaaaaaaaattaaaataaaaaaaaaaaaaaaaaataaataaaataaaaattaaataaaaatatttaaataaaaataaaaa

SEQ ID NO: 10379 - DNA, 371 bp, Gossypium hirsutum
  unsure (1)..(371): unsure at all n locations; Clone ID: LIB3135-018-Q1-K1-A1
aatttattcagtgtctgaaaataatgacatggtatccaccttcattcggccattgctgggaaataaattgcagagctgaggcaaatggatgaattttcatatcagctccatggcaaagtcagtcaatccacactaatgccatttgaagcagcttgttgctattgaaattgaaagacaacaaacgtaaatgatggagtttccaacaattgaaatgggaaaaagaaaagntgaattgcatttatatatgtttatttgaccctgttggtttggatcatcattttgtgaaaaaattcaatgatagttgcaactcttttatgttgtaaaatattataacatatggattatgacataaaaaactaatgaaatcatgt

SEQ ID NO: 10380 - DNA, 424 bp, Gossypium hirsutum
  Clone ID: LIB3135-018-Q1-K1-A10
gctcaatgatgtctaccacacacttgctaatatttctacttggagtggccgctctagccactccctcttttggtacctatgagtctcccaactatgggaagccccctactcctgtttataagcctcctaaggtgaaacccccaccttatgaacataagccacctgtctatgaacctccaaagaaggaaaaacctgaacctaaaccaccagtttatacaccaccaaagaaagagaagccagaacccaagccaccagtatatgaatcaccaaaaaaggaaaagcccgaaccaaagccaccagtttatacacctccaaagaaagagaagcttgaacacaaaccaccagtttatgaaccaccaaagaaggaaaagcctgagcctaagccaccagtttataccccaccaaagaaagagaagcctgaacc

SEQ ID NO: 10381 - DNA, 428 bp, Gossypium hirsutum
  Clone ID: LIB3135-018-Q1-K1-A11
agtcaatattgagagagagtgagaaagatgggagagacagacaaagacagggaacaggctgagcatggatggatctaccaactgattctgttgtttctccgcccatgcactgcctcttccctggctctgcctcctccatttttttcctccctctttttttatttaactttttcaccttatcccattttggaattattattatgactgtaatttacatccaggttcatgataggtaccttttaacaaggtaattgtggtgacttttgttgagccccaatggccccagctcttttttcttcattttctctctattcttttcaatccaagtatagagattattcgctctactggtaatggaaatttgcattttgattctccaaccattttcaggaaccttattgtttttccactatcaccattgattgggg

SEQ ID NO: 10382 - DNA, 350 bp, Gossypium hirsutum
  Clone ID: LIB3135-018-Q1-K1-A12
cccacgcgtccgggaaaaaaaaggggggttgctctgttagggtttcaaccctagcaccccccacgtcgccgccgtcaaagatccaccgccaccaggtcgtcccttggcctccgacgacgctccggcaacaccaggtgtgggcgttggagaatgtgggttgtgcgaggtgataaccgctggaggaagaacgtgtgcggcactggggaggctacttgctgctgtagcactgatgcgaagagggttctttgatgggtttattgggctaggttaaattaggttttaggctaatgtaatttggttacaatttgggcttgtaacatttgtaattgggccacgtgaattaagttttt

SEQ ID NO: 10383 - DNA, 371 bp, Gossypium hirsutum
  Clone ID: LIB3135-018-Q1-K1-A2
ggaagctgtacaaacagactctgatcgaatagcaacttctgtcaattataatgatgcgcaagacatactgtcactgaaggactcaattactgctgtatgtaatgctacacaagctgctgatcgaatacatcaaatgttcaggatgcaatccttccagtggaaacagttgatagagtccagtgatgctgtgtctgatgaacatgttatttcacttctaactactaagacacgcaggccatttcaaagtgatggggtagctcatgctgctgcaacacaaatccagaaaaaatttcgtggttggaagaaaagaaaagaattcttattgatccggcaaagaattgtcaaaattcaagcccattgtaagaggacac

SEQ ID NO: 10384 - DNA, 239 bp, Gossypium hirsutum
  Clone ID: LIB3135-018-Q1-K1-A4
tcccacgcgttcgcggaggccgttttgatgttttacggtcactctaggctcgtggggaccgggtctagtggcctatcctcttatttgcaacaaaaaccgaatgaaagaggactatttggtccttttacttatccgacgcaatcgtcaaagccaaacacaaacctgaaacggtcttgtggcccgtggctcttgtgaattgccctcttccactgataaacgtgtggctacttaaggtctat

SEQ ID NO: 10385 - DNA, 406 bp, Gossypium hirsutum
  Clone ID: LIB3135-018-Q1-K1-A5
tgcttatacggattctcacctgagcaggaaagtatgcaaggcattggaagaggatgcttttaggccagtcttgcaccactatgacggtcccaagttccgtctcgagctctcagttcctgagactttggatctaatggacctttgtgaacaatcaggctccccataaacaaaatgctagccgagtgcaaacgtagtagcagtagggtttgtgatgcacgtttacggatatttttccatatagcgcaagctgtggcgggtgttaaatccagatggggaaaaagtatgaaatggcattagccacatatgaataaatgccttcatgtcatgtgaaagatgcattgtaaaacttttgcattaatatgctatgaataaaaatcctatcaaagatatatttgcaagatggcaa

SEQ ID NO: 10386 - DNA, 430 bp, Gossypium hirsutum
  Clone ID: LIB3135-018-Q1-K1-A6
ttctgattgcttataaaatagtttgctcattagaaccttcattttctcgtcttttatttatttgtgtaaatcatttttctttgtttagtgacacaacgaatctttgaaaaatgatttacacaaataaataaaagacgagaaaatcggacgcgtgggcggacgcgtgggctcgaagaagatgatgccatcaccaaaagctcccaccgtggtgctatggtggctggcacacaacaatgccttgttctgcagtaacaatctggaatataactagagctccagcttatcggatctggggctcggtttctattatatcggcttggtgtctaggattaggattatgtttagaagcaatcttattcagatttgagtgttagatatgagtatgtattctaaggatgttactctttatgtgcaacttttatgtttattt

SEQ ID NO: 10387 - DNA, 398 bp, Gossypium hirsutum
  Clone ID: LIB3135-018-Q1-K1-A7
ctccgtgaaggggatcaagggcctcctcaaccgattgccatcggcttgcgttggagacatggtgatggctactggcaagaaaggaaagcctgatctaaggaagaaggtcttgcctgccgtcatcgtgaggcaacgtaagccttggcgcccaaaggatggtgtttacatgtactttgaagataatgctggtgtcattgcgaatccgaagggagaaatgaaaggttctgccattactggtccaattgggaaggagtgtgctgatctgtgggcaataattgcaagtgcagccaatgccattgcttagggatttgaatttttctagaggtttttgctcccttgagtcatggcctttttgctggatcaagattttgaaatgttttttttagggattccttgaa

SEQ ID NO: 10388 - DNA, 90 bp, Gossypium hirsutum
  Clone ID: LIB3135-018-Q1-K1-A8
gaaacccccaactagagatgtaattccataacctaaacaactcacttgagagctccgtgactggttcaagggaaaaaaaccccttgaacc

SEQ ID NO: 10389 - DNA, 304 bp, Gossypium hirsutum
  Clone ID: LIB3135-018-Q1-K1-A9
cccacgcgttcgcccacgcgtctttcagaaacgaccggcagagaaataaaaatgggaggctgggcaatcgcagtgcatggtggtgctggtgtagacccaaatctccctaatgaaaggcaagaggaagctaaaagactcctcaatcgttgccttgatattggaatctctgctcttcgttctaacctctccgccattgacgtcgttgaacttgtcgtgagggaattggaaacggatcctttgtttaattccgggcgtggatcggcacttacggagaaagggacggtggaaatggaaactagtatta

SEQ ID NO: 10390 - DNA, 194 bp, Gossypium hirsutum
  Clone ID: LIB3135-018-Q1-K1-B10
tcgcccacgcgtccgtccacgcgttctgaatccgccctgccctgtatggatagtatgggatggcggacttggtcaaggttaacttgatagccagaggaatgcgatcctggtattcagtttgttcaaccattaactcatttttgcttccccccctataaatctgcagatcttacctagaaagctatctaggtttt

SEQ ID NO: 10391 - DNA, 238 bp, Gossypium hirsutum
  Clone ID: LIB3135-018-Q1-K1-B11
tattgttcccagacctgggttcttgataggcggtggtgaggcttatctttggagtccatagtgtgtcatcattaatgttattatgccttaatgagctataaacttgatgatattttttgttcccttttttccatctaagtggtcctggagttttacctctcttcgtgggctgctttccttcactcaatgttctatctaaaccttatattatccaagtctatagcctgcttctgttttt

SEQ ID NO: 10392 - DNA, 353 bp, Gossypium hirsutum
  Clone ID: LIB3135-018-Q1-K1-B12
attaaccaaagcccacaacagattagttgactctgttcactagtcccccgactaaaaacccaggacactgtcaaaatatatgattactatcttccttatattggcgacaccgagggcaataatcgtccacagccactttcttatgcttgaggttaataagagtaggaataaaactccatgagattcttcatactgtaattgtaacttttgagggaatgtataaattccgtagctttctgtagaatttcttgtttcagcctgtataatataattactaggacccaagttagtctcctgtaatagtttataggcacttttaactaagaaatcaccagactattctttttttcaaa

SEQ ID NO: 10393 - DNA, 409 bp, Gossypium hirsutum
  Clone ID: LIB3135-018-Q1-K1-B2
ataacagttactctttgtttactagctgtgcttgaaattaagtggtctggcattgagttagaagagtggtggagaaacgagcagttttggttgatcggggggacaagtgctcatcttgctgccgtgcttcagggtctgttgaaagtgattgctgggattgagatttctttcaccttgacatcaaaatcagcaggagatgacttggatgatgagtttgctgatctctacgtagtcaaatggacatccttaatgataccaccgatcacgatcatgatggtcaacttaatagcaatagcagtcgggttcagccgaacaatttacagtgttatccctcagtggagtcgtctactatgtggagttttcttagcttctggttctggctcatctctatccttttgctaaaggcttg

SEQ ID NO: 10394 - DNA, 385 bp, Gossypium hirsutum
  Clone ID: LIB3135-018-Q1-K1-B3
gtacacgcttaaatgtagctcgaccaccatgattctatgtccgatgctgatgcccgggcgtccgaataccttttctggctaggccgtgtctcatcctgcctgaacagctatatcgtgggtaagagacgtgcctgaaaggtttgtgtatgcttctcctccgatacgggcgagcacggacgtgcttagtgtcacttcgtggggagcgatatcttaactggaagtaaggcggagatattgttccctcctcccataactgtgatgttccgcatgtcaatcgtactgactaccaattgattgacatttctgaggatggatttgtgagtttgctgactgaaagtggtgacgctgaggacgatctgaggctccccactgatgagaacttgtt

SEQ ID NO: 10395 - DNA, 406 bp, Gossypium hirsutum
  Clone ID: LIB3135-018-Q1-K1-B5
ttgagatgctaagaaggggagagaagctaccttctggcactcaaaatccaaaacgaatcaagagcggaccagaaggtggaaataccactttgctaaccgatcccaaacctcctccatgccgtgatcttgatgcctgctaatgttaacatgccaccgcagtctcaaataatgtgaagcttgggtttgccaaggcttttttggatgtatgttcttgttgaatttgtgaagctcaaccaatcatatattttgaattttccatgcaatttcaacttggtataagttatgagatgactaaatttgcattgtaccaaataattgatgttaatgtttttgccataatcttctatgaaagcaggccataattgttgtgggtaaaaaaaaaaattaaataaaaaactcaaatatt

SEQ ID NO: 10396 - DNA, 285 bp, Gossypium hirsutum
  unsure (1)..(285): unsure at all n locations; Clone ID: LIB3135-018-Q1-K1-B6
tcgcccacgcgtncggacccttttagggtttcctcaaccctcatatgccaccgctcagcctcgcgccaaggctttcgtcgatgccccgatctccgatcgcgacagagaggggcaccaactcggcgattccggcgaaaaaggtaggttttctcttcctttctttatattttaagcaaaaataaataaaaaaatagcgaaagtaaaaaaatcaaatatatatatgtacaaatgaagaaaaaaaatgaaagaacgataatcgacaaaaaaaagaaaacctttttattt

SEQ ID NO: 10397 - DNA, 309 bp, Gossypium hirsutum
  Clone ID: LIB3135-018-Q1-K1-B7
cttccgagtccgggcccttccgttccagcatgctccaataattctgatgctgattctttcggcatcaatgttatattggagagttggccaacaaccgaaagcgaaagacagtcgtcagcctcagcagaaacgggcacgtcggtgaataagccagaatctggacgtgtgccgcctgctaatcaagtaccttcccgggggaacgaagctggtccatcgaatcagcccccacaaggggtcccaaacaaaaaaaaaaaataattttataaattatttaaataaatattaataaataatatttaaaaagggcgg

SEQ ID NO: 10398 - DNA, 344 bp, Gossypium hirsutum
  Clone ID: LIB3135-018-Q1-K1-B8
caagcaataaacaccatctctattaatgtatgtaacaagatgtcaccgtctctaatttatgtttattaccgatgcataccatttatggcatttataggaagacacaggtgggttgaatatgcgaaaaaggatcgttatgatgcttctcaggtaccaccagaatggcatggttggcttcacttcataactgaccataccggtgatgagcttttgatgctaaaacccaagaggtacggggtggagcacaaggagaacttatctggtaaggggaatgagtttatctaccattctaaaggacatgcacttaatccgggtcagagagactggacaaggtaccaatcatg

SEQ ID NO: 10399 - DNA, 230 bp, Gossypium hirsutum
  Clone ID: LIB3135-018-Q1-K1-B9
atggggtttcctttcccttaaagtcagtgttgtgcttaaatgcttggcatatgctgtaatgagtaaattcggaaggaagaacaaactggaaaaaagaaaatggaaggaacaacttgaagattatatgttggagacattttgctttatattaaaagtaataattacttaatttaagttgtggcccttaatggtgccttttttattgctcattataaaatttaataataaaa

SEQ ID NO: 10400 - DNA, 366 bp, Gossypium hirsutum
  Clone ID: LIB3135-018-Q1-K1-C10
cacagcattcgccgcacggcatctttctcatcaggcggggaagaatgtctcacaggaagtttgaacacccaaggcatggctcccttggatttcttccgaggaagcgagcttctcgtcacagagggaaagtgaaggcatttcctaaggatgacccaagcaaaccttgcaagctcactgcctttttgggctacaaggcaggcatgacacacattgtccgagaggtcgaaaaacctggatctaagcttcacaagaaagagacatgtgaagctgttacgatcgttgaaacccctcctatggtgattggtggggttgttggttatgtcaagacaccacgtggtcttcgcagcttgaacaccgtttgggctc

SEQ ID NO: 10401 - DNA, 387 bp, Gossypium hirsutum
  Clone ID: LIB3135-018-Q1-K1-C11
ggtgaagcttttaatccttttggcaacctcactcttgatttactcgctcatagttttactcaaagtcctgtatgactactggtgggtgcctctccgtatacaacacttcttgaattcacaaggacttaaagggcctccttacaagttcatccatggatgcaacaaacaaattaacaaaatgagaagtgaagcattaagcaaacctatggggctgacacatgacatacttcccagagttttccctcattattactcctggatcaacttatacgttgattaggaaagaactatctttcttgggacggtgttcaagctcaggtggtgactactgacccagaactaataaaagaggttcttaaaaatagtgaacaaactttttggaaaaag

SEQ ID NO: 10402 - DNA, 343 bp, Gossypium hirsutum
  Clone ID: LIB3135-018-Q1-K1-C12
ggacaactcatgggcaaaaaaggttatgtgtttacaagcattgaaggggaagaaaggggcaagattgggagacaccatacttgcatctgtaaaggaagccatgcctaatggaaaggtgaagaaaggaaaggtggtatatggtgtggttgtgcgtgctgccatgcagcggggtcgttgtgacgggagtgaggtcaagttcgatgacaatgcagttgttcttgttgacaagcaaggccaaccaatatggaccagagtttttgggccacttccgcatgagctgaggcagaaaaagcatgtcaagatcctcactttggcatggcacattgcctgatgcatggatcca

SEQ ID NO: 10403 - DNA, 183 bp, Gossypium hirsutum
  Clone ID: LIB3135-018-Q1-K1-C2
atttttctttttgatgaaaaacaagaaaatagttattacatcaaattaaatcgaacaaaagcatcattagcctttttttgttgaataagctttaagacttcatttggagcgtcgtcttttaaaaaaaaaaaaaataaattaataaaaaataaaataaatatttttttaagggcggtcgttttt

SEQ ID NO: 10404 - DNA, 288 bp, Gossypium hirsutum
  Clone ID: LIB3135-018-Q1-K1-C3
gacctggctttcacgtaggagggtaggagatcgtgggttggactgccatgctgttttcatgaagacaggttgtgtacatcgtgctgacaacatctggtgggataatggtccatgaataagcctgaagaaagaaagactgtggaaaagtacttgcgttcttctattgaagggatttgtttagaattaaaacttaacgaattatgttctatcactttaaacatctgacgtaacctatgcctattttgttaattgcggcagttatcctatatgtaagtcgcttatagatgt

SEQ ID NO: 10405 - DNA, 426 bp, Gossypium hirsutum
  Clone ID: LIB3135-018-Q1-K1-C4
tgcttccatcatttccagctgttaatacaattttactagctggcgttgctcctcatatcaatcctgctttctttggtcgtggaatggcacctaatgggttgggaatgatgggtgtagctggaatggatgggcctcattctgggatgtggactgacacaaacatgggtgggtggggaggagatgagcatgatcgcaggactagagagtctagttatggtggtgaagatggtgcttcagagtatgggtatggggatgcgaatcatgaaaaaggaaggtctagcggtgccactcgggaaaaaagatcgggcttctgagcgtgagtggtcaggcaactctgagaggaggcatcatgatgagaaggaacgggaatcggacaggcctgagagggagcacaaggaacaccgttacacgtgagagaaagacagc

SEQ ID NO: 10406 - DNA, 338 bp, Gossypium hirsutum
  Clone ID: LIB3135-018-Q1-K1-C7
gctaaaaatcctggtttgtgctgttctggttgctttgggagatgttcggagccggctcttggcaaaatgacccccctccccctggcgcacacgcgcaaagggaggatatgttattcactgtgtgagatcggagtaatagttcttttaccatgccctgtaagttcatcttatttcaatgattgatgctagcactgccttaattcattcacgaagcatctgcaataagtttactaaaacaaccccctcaccattttccaaatgaagagaggctttagacatttcactagtgcatgcaatctgtccagcggttcaagattgtaattctgtttttatgaatt

SEQ ID NO: 10407 - DNA, 329 bp, Gossypium hirsutum
  Clone ID: LIB3135-018-Q1-K1-C8
tcgcccacgcgtccgcatgaagggaggtaaatccaagtcagatactaagagctccaggctcgccgtgaacaagaaatctagcgccaaagctggaaagaaatcggggaaggcggctaaggatccaaacaagccaaagaggcctgctagtgccttcttcgttttcatggaggagttccgtgagcaatacaagaaggaacacccaaaaaacaaatctgtcgctgctgtgggcaaagctggtggagaaaaatggaagaaccttgtctgatgctgaaaaagcaccttatatagcaaaggcagagaagcgaaaggtcgagtttgaaaagaacatg

SEQ ID NO: 10408 - DNA, 434 bp, Gossypium hirsutum
  Clone ID: LIB3135-018-Q1-K1-C9
cgaaggacaggcttgccctgcataggctacgtgaggcggctgaaaaggctaagagtgagctttcatctacatcccaaactgaaatcaaccttccattcataactgctgatgcttcaggtgcaaaacatttaaatataacgctaaccacatccaagtttgagggtctagtcagcagcctgattgagaggactagaattccgcgtaagaattgtttgaaggatgccggaatatccctcaatgatgtggatgaagtattgcttgttggaggaatgactcgtgtccccaaggtgcaagaaattgtatcaaaaatatttggcaagtctccaagcaaaggggttaattcctgatgaggcaggtgctatgggagctgctattcaaggtggtattcttcgaggtgatgtaaagagctgcttctcgtggatgaaactcctctg

SEQ ID NO: 10409 - DNA, 417 bp, Gossypium hirsutum
  unsure (1)..(417): unsure at all n locations; Clone ID: LIB3135-018-Q1-K1-D1
tgcaagtcgataatgaagattttggaagacctgttgcatattattttggtgtcagtggagacggtcccaaactccttgcatacactggaaatgacgatgctaggaagttcgtctttgatggagaagtgacgttggataaaattaaggcttttggggaagattttttagaagacaggcttaaacctttctacaagtcggatccaattcctgaaacaaacgatggggatgtgaaagtagtggttggcaataactttgatgaaatcgtattagatgagtcaaaggatgtccttcttgagatctatgcaccttggtgtggccattgccaagcacttgagctgacatacaacaagcttgccaaacatcttcgcggcattgactctttggtattgctaaatggatggacaacanatgaacatc

SEQ ID NO: 10410 - DNA, 384 bp, Gossypium hirsutum
  Clone ID: LIB3135-018-Q1-K1-D10
tcgcccacgcgtccgcctggaaccactctgttgtcgctgcccttcgggcacaccttcggcgcttaccagtcacctacgctcttgcagcatgcccccttcgggcaatactactttcgtaatacgcgaagcagctgagcgatagctcttcgatcgctatattctcgcgatggcgaaggatcgaagatcttcgcgagacggcccatgaatcaatctcgagaatcgagcatggggcttgaagaccctaccgcattccggccccggggccttcaattgggcctttctctcttctcttttaccagggagtggggagcttccctgctagggaggtacctcttggattcggagtttgttccaacatctgccacacgtgagattctgatcgtc

SEQ ID NO: 10411 - DNA, 332 bp, Gossypium hirsutum
  Clone ID: LIB3135-018-Q1-K1-D11
agaattaacaggtcgacccacacgttcaaaaaacccggaaatggcggacgacgatcatcatttcgaatccaaagctgatgccggcgcatgcaaaacctatactcagcaagccggtactatccgtaagaacggctatatcgtcattaaaggccgtccctgcaaagttgtggaagtatccacctccaagacggggaagcacgggcatgctaagagacacattcgggggatcaatatcttcacaggcaagaagatggaagatattgttccctcctcccataactgagatgttccgcatggcaatcgtactgactaccaattgattgacatttctg

SEQ ID NO: 10412 - DNA, 213 bp, Gossypium hirsutum
  Clone ID: LIB3135-018-Q1-K1-D12
tctctcacgcgtccgattttgttcttataattgtttcagctttgtattacttactactatacaataaggattttggtgttgaagagcttcttggttactggttaaattttttaaagaggaattgccatttgaattcataaaataaaaaaaaaaaaaaaaaaaaaaaaaaaaatataaaaaaaaaataaaaaaataaaatagtaataaaaatat

SEQ ID NO: 10413 - DNA, 147 bp, Gossypium hirsutum
  Clone ID: LIB3135-018-Q1-K1-D2
ttctcgtcttttcacgcgtccgggatacttcggtgctgatcgatcaattttacagtgacaaaggccactgctcgaatcaatctctggatggagaagtatcggagataaactacgtagacttacgaggaacctattctagtaaaccgg

SEQ ID NO: 10414 - DNA, 425 bp, Gossypium hirsutum
  Clone ID: LIB3135-018-Q1-K1-D3
caaaggcgtgctgcatatggcaattactccaatgctgcactgcagtatcctgtccgggcttgtggagacctgtctatggttccatcaacagcttcagctatttgcgttcaagcccctgctgagaaaggatttgccagctttgccattgatttcctcatgggtggagtttctgctgctgtatcaaaaacagctgctgcaccaattgagcgtgttaagcttttgattcagaaccaagatgaaatgatcaaaagtggaaggctctctgaaccttacaagggtattggtgattgtttcaagcgaacaatcaaggatgaaggatttggttctttgtggagaggaaacactggcaatgttattcgttatttcccactcatgccttgaactttgccttcaaggattacttaaagaggcttttcaacttcaag

SEQ ID NO: 10415 - DNA, 416 bp, Gossypium hirsutum
  Clone ID: LIB3135-018-Q1-K1-D4
aatttgtagcagaaattgtgagtattggtcgtctgcgacaccggaatttagtccaactcttgggatattgccggcgcaaagatgagctgcttttggtctatgactacatgcctaatggaagtcttgataagtatttgcatgaccagccaaaagtcaccctaaattggagacaaagattcagagtcatcaaaagtgtagcatcaagattgttctatttacatggagaatgggatcaagttgtggttcatagagatgttaaagccagcaatgttttactggatggcgaattaaatggaagattgggagattttgggcttgctagattatatgaccatggaacggatccccaaacaactcacgttgtgggaactcttggttatttggcttccgagcatactcgaaccgggaaagccacg

SEQ ID NO: 10416 - DNA, 255 bp, Gossypium hirsutum
  Clone ID: LIB3135-018-Q1-K1-D7
aaggttcatcaggaggatctgttgttttttttgcacgaaccacctctaggggttgggggtaagctcttaggccctttcactcccaatttacagcagttcaccttcttcactgataccgccttctctttagaccataagagctgtcatcgacccttaagtgaccctagaaagcttgtcccctccgtccagtagcttgatttttctaatgtggaaacgcaccctgttggttctcgaaggaatccttcttcaagaaca

SEQ ID NO: 10417 - DNA, 129 bp, Gossypium hirsutum
  Clone ID: LIB3135-018-Q1-K1-D8
gcgtgtagatagacatacccatttatcacgttatatttgcctcataatgactgaggatcattatataactggacaatgcctatgggaactggaaacagtgtgtgagggactccatgatcatagtgcacg

SEQ ID NO: 10418 - DNA, 303 bp, Gossypium hirsutum
  Clone ID: LIB3135-018-Q1-K1-D9
gaaatttccaagatcttcttcattatcctcttatcccattcgatcaaaagaacggaaatctttatcatccaccatgggaggaggaaatgcccaaaaatccaagatggctcgcgagaagaacttggaaaagcaaaaggctgccgcttaaggaagccagcttgattctaacaagaaggccatgaccattcagtgcaaggtgtgcatgcaaacattcatctgtactacaacagtaagtgaaatgccgggggcatgccctggcgaaacattcttaaattcgtcctatacacatgttttcttcacctt

SEQ ID NO: 10419 - DNA, 251 bp, Gossypium hirsutum
  Clone ID: LIB3135-018-Q1-K1-E10
caaggcagcgacaaagaggacaaggaagtgcaagacaaacaggcgacccgggaggaaacaaaacaacactgaggccccgcaacccgggaggcccaacgctacaaaggcggagaagaaggagaagcgagcgagaaagaaagaggagaaggacccaaataagaacctcgtgagcaaggccaggacacaaatcggaggggggaaaacgacaggaaaccgggcagaaaaaagaaaaacgacgagaacacaaaaga

SEQ ID NO: 10420 - DNA, 399 bp, Gossypium hirsutum
  Clone ID: LIB3135-018-Q1-K1-E11
ataccctcccaaagcacttgcattgctggctgctgtggctgcattgtgtgttcaatatgaagctgattttcgacctaatatgagcattgtagtgaaagctcttcagcctcttttgaatccaactcgtccagcaacaacatcccgtgcctacggtgaaaggtgacatcgtgatgatgagccaaatagtggctggaaactgaatcaagaccagttgaagttgaaaaacctgcctgtcattattatttgttttgtaaataggtagctttgcttgtattccacccttaaaccccacaagttgaattattagagctgccagataaagagtagctgtagaatgtaaagaatattcatataattcatttgcgcagtctgtctgttttttacattgggtttttttca

SEQ ID NO: 10421 - DNA, 304 bp, Gossypium hirsutum
  Clone ID: LIB3135-018-Q1-K1-E12
ctctgaaaaataagaaatgccattctggcatttctgctgctgtcaccgccactgctgccagtgccggtggtggcgaactctaaaaccatttctccaacctattattgtacatttgttgggtgattattctctttgaatgacttgatttctgcctcctaaatagcccctgccattattggtttcttgaattttaaaactattcttttctcttgatttctaagactaaaagtatttgtttggtttaaaaaatattataatataattttgtattataatttctttttattttaatttattaattggt

SEQ ID NO: 10422 - DNA, 443 bp, Gossypium hirsutum
  Clone ID: LIB3135-018-Q1-K1-E2
ctaaagccaagaaagcaagccattaaggttttgagaaaagatcaaaatggattcaaaaagatcagcttccacagccctccttttagccctcaacattctcttcttttccctagtcagtgctaattgtggatcttgttcttcttctggctctaacccaaggccaactcccacccctactccatctgcacgaggtaggtgccctagggatgccctcaaattaggtgtatgtgccaatgtgcttaacttagtcaatgtcaccgttggttcacccccggtgatgccatgttgttcccttctcaacggtcttgtggacctcgaagccgctgcttgcctttgcaccgctatcagagctaacatcttatgcatcaaccttaacatcccagtttcccttagcttgcttttcaacgtttgctcaaggaatgttcctactggtttccaatgct

SEQ ID NO: 10423 - DNA, 362 bp, Gossypium hirsutum
  Clone ID: LIB3135-018-Q1-K1-E3
catcgatggagaggttaaagtcgacaaaatttattttaagaagacacctgctacaactcactctgctcattgaaacgttggggtttgttctctgttgctgttcacattttctatggattcgctcaaaagtttgtcttgctaatctaatgttatgtcctgttttggaagccattggtttggattaaattaaagaaaatgaaagtaaaagctaaggcaagctttgaaatggatttttttttttttgagatgttagtgtgcctttacatgaataatagttttgaaaaattattggttttgttatttttttttcatgcagattatcaaaactagataaccccttttttttttctttttataaaaat

SEQ ID NO: 10424 - DNA, 434 bp, Gossypium hirsutum
  Clone ID: LIB3135-018-Q1-K1-E4
tcgcccactcgttcgaccacgcgtccgatctcttcttacccaaacctcacccacgacctccatcctcctcctgtcttcagccatcgcctccaccgcaccaagaggtaccatatttgtcagtttcctgatgatcgttcgagaatcaccttcaacctcaatctccctcaacccaagttgtaacctcagcttcagtacctgaagacacgctactgcttctgcagaaaaaacagacgagcacgactctttggtgtggttgttgaaagctgtgtcaaagttcactttcaatctggatccatcggcgcagaccatctgtcaacacagatccgtcttccaggtatagcactttttagatcatcaagttcctttaaatatacttgcacaaaacttgcaatctgactgccagtttagtttaccccatcatgaatgaatttgtt

SEQ ID NO: 10425 - DNA, 431 bp, Gossypium hirsutum
  Clone ID: LIB3135-018-Q1-K1-E5
gggaagacaatttggtggacagaaacttccttacaataagaacaagtccatagctggtagtgttgcaatggcaatagctggtttttttgacctctgttgggtatatgtattatttttcctactttggatatatcaaagagagtacggagattgttttcggtttcttgattgtgtctctcgcatcagcacttgtggagtcacttccagttagtaccgagctcgatgacaacctcacggttacattaacctcaatattggtcggcagccttgtcttctgatttaagaatcagtcttagaatgcagaggctagttgtaggagcagtgtttatttggggactgagaaatgttgtaatttagtgtaacatataaaatgttgaaatgtggccaatgacgatattccactgatgacattgaagttcaagtcccgagct

SEQ ID NO: 10426 - DNA, 308 bp, Gossypium hirsutum
  Clone ID: LIB3135-018-Q1-K1-E7
cattccttctatctgattattcttttcctttttcctctttgtttcacgtgtgaaaatggggaattgctgcacaagtaacaaaattctatcagaaaacgacgacctacaaggctgcagctgcaaccaacctaatcaactcatcaaggatatgggagatgttacagtttccaaatcggaaggggctgctgatggagttaagaccaacaacaacaacatggagaagaaaacgattaagaagaagaagaagaaggtggtgagattcaacttaaatgaagaaaacagtggtgatgatagatcagggaaacaag

SEQ ID NO: 10427 - DNA, 351 bp, Gossypium hirsutum
  Clone ID: LIB3135-018-Q1-K1-E9
gcgcccacgcgggcggccacgcgatctggacgacttcattttcttcttcaatggcaggggcagaaatctcgcgacggaggcatcatgtattcttgagctttagaggtgaagatacgcgcaaaagttttacggatcatctttacacagctctggtgcacttaggaattcaaacatttagagatgataaggaaatcgagagagggaataacataaaagatgaaaactggaaaagcaatactacaccactgcaaaaattctatcgttggcgtctcaaagaattatggcgcatccacatggtggcttaacgaacttataatgatattggagcacaggaaatcctctaaacacatt

SEQ ID NO: 10428 - DNA, 425 bp, Gossypium hirsutum
  Clone ID: LIB3135-018-Q1-K1-F1
cccacgcgtccgctgtggttgcatctcttactggctacagtttctgggcatcgaagaagggcaaggacttcagctatctcggaccgattttgttcaccagccttattatcctcatcttaactggtctaatccagatgttcttcccgctcggcccaacatctactgctgtatatggtggaattagtgcgttgattttctgtgggtacatagtatatgacaccgacaacctgatcaaacgcttcacatatgatgattacatattggcctccgccactctttatttggacatcctgaatttgttcatttccattttacgggttctgagatccggggataactagttatacaatatttctcacaaggccagtcggaaagatttcaaggtatggcgaacgaagtattgtctgatgaataggaaaaatatt

SEQ ID NO: 10429 - DNA, 402 bp, Gossypium hirsutum
  Clone ID: LIB3135-018-Q1-K1-F10
cccacgcgtccgagtgctagacaagaagaggaggaacttggcaatgggctcagtaacaatgtcaacatgcagagaccaacacctgaaatatctgaagaaaatgagatgatgacaaaagacattatacttgatcaggtatctgagtgctcgtcttatgggttaagcaggagaggaactgctgcagaggttgatactgagacgcttgagttgtgggaaactgctgaccatgatgctaatgccgacctgaaagtcagcaaggcccagaagatggccactgcaccaactgactaccgacagattggaactgtgaaggcaggcaagagcagaactccctctacagaatctcttgtgaaggagttgggtgtagataaagagagctcgaagagatttgcagagcccaac

SEQ ID NO: 10430 - DNA, 385 bp, Gossypium hirsutum
  Clone ID: LIB3135-018-Q1-K1-F11
acccacgcgttcggttaggaaccacgaaaccaaggctttggcttttcttgcaaccttagctggtgttgcaaccaacgaccatcatgggccttggtggcagctctctcaatggaaccaagctcttggtgaagtcaactcgccagagtttcaaacccaaaaactacagggctggtgctgtggtagcaaagtatggtgataagagtatatactttgatttggaggatattggcaacacaactgggcaatgggacttgtatggatccgattgcaccttcaccgtacaacccacttcatatcatgttctttgagacatttgcagcttcatttaccaagagaggattgttgcttatgttcctgatctttggaagcggtttcctttgtcttt

SEQ ID NO: 10431 - DNA, 283 bp, Gossypium hirsutum
  Clone ID: LIB3135-018-Q1-K1-F12
cgtacgcgcccggtcgtactcataaccgcatcaggtcttcaaggtgttcagcctctggtcaatggaacaatgtaggcgagggaagtcggcaaaatggatccgttacctcgggaaaaggattggctctgagggctgggcacgggggtcccagtcccgaacccgtcggctgccggcgcactgctcgagctgctcccgcggcgagagcgggtcgccgcgtgccggccgtgggacggactgggaacggctccctctggggccttccccgggcgacgaacagtcgact

SEQ ID NO: 10432 - DNA, 445 bp, Gossypium hirsutum
  Clone ID: LIB3135-018-Q1-K1-F2
aaaatcagtgcgccgatcatcgtccttcttctcatccagtgtttcagggaataaaagaaatccataacagaagcggcactgcagaaaagtgtttcataaaaaaaccctatcaaaagcttcgatgcaggcgtaaaacccttgttcccaccccctgttttcattgataaagaaaatggaggaaccaaagattggggattgcgaagagtgcaaaaagaaggcgtcaaaatacaagtgcccaggatgctgactccgcacctgcagactcccttgcgttaatgctcacaagcaacgcactggctgcactggcaaacgcaacatcacttcctttgttcccctctctcggttcgatgataatcttctctgcggcttcacttccacttccttttactatttatttacttaatgtttgtgtacgagcccattcatctttactgaacctaaattg

SEQ ID NO: 10433 - DNA, 437 bp, Gossypium hirsutum
  Clone ID: LIB3135-018-Q1-K1-F3
tccacgcgttcggtcattgccaaaccggtgattgtggtggactccttcaatgcaaaggttggggtgtacctccaaacaccctggctgaatatgcacttaaccaatttggaaacatggatttctacgacatttccttagttgatgggtttaacatccccatggtgtttggtccaactaatggcggttgtcacaacattcggtgcactgcagacatcaacggacaatgcccgaatgagttaagagctcctggtgggtgcaataacccatgcacggtgtttaagaccaatgaatattgttgcactcaagggtacgggacctgtggtccgacccgttattcaaggtttttcaaggaccggtgccgtgattcatacagttatcctcaagatgatccttcgagcacctttacttgccctgctggttccaattacagggtcgtg

SEQ ID NO: 10434 - DNA, 386 bp, Gossypium hirsutum
  Clone ID: LIB3135-018-Q1-K1-F4
gttctttgattgctgattacgttctcaaatatccctcttttttcccattctttatatcctgtggctccaaaggttgctgagtagaaacccgttccataaaaaccacctgaaaaagtcttctctgcagtaaatgccacaggcggtgtaaaaaacctctaaatatggctgggcacatttgatgacaagaatgttaacatgagcgtcgtgacttacaagatctacatcttcaacgtattgaaacaggttcattctgatatggggatctccatcaaagcgatgtggatattgaacagattcatgaactatatctttcagaaattggctcatgaagcatcgatattggctttgtataataagaagccgacgattacatctagggtgatcca

SEQ ID NO: 10435 - DNA, 365 bp, Gossypium hirsutum
  Clone ID: LIB3135-018-Q1-K1-F6
tccacgcgttcgatacaatcgaacgttacggttgatgaattgttgggatggttagattcaaagccacatggttcagtgctatacgcgtctttctgtactgaagttgctcccaccaaacaacagttccagcaattggctgatgcattagaagcctcgaacaggccatttatatgggtgatccaacatgggtcgggccgaccaggttcaccatctggtccaccacctgacccacctcaattcttatggaaccaacctgattccaatgatggagtctttgaagaaaagggttactttccacatggttttggaccaaaaggtcggtcaaaagaggatttgatcaatacacgggtttgggcacccttagt

SEQ ID NO: 10436 - DNA, 323 bp, Gossypium hirsutum
  Clone ID: LIB3135-018-Q1-K1-F7
tccacgcgtccgaaacaatcgaacgttacggatgatgaagtgatgggatggttggattcaaagccacatggttcaatgctatacgtgtctttctgttctgaagttgctcccaccaaacaacatttccagcaattggctgatgcattagaagccttgtacaggccatttatatgggtgatccaacatgggtcgggccgaccaggtacaccatcttgaccaccacctggcccaccttaattcttaaggaaccaacctgattccaaagatttagttcttggagaaaagggttactttccacatggttttgaccaaaatgtcggtca

SEQ ID NO: 10437 - DNA, 396 bp, Gossypium hirsutum
  Clone ID: LIB3135-018-Q1-K1-F8
ccgatgttcaagctggtttcacagctttatgaagtggtgcctcctattcttactgagttaggcaaggttaaaaacccttggcccaatgttgatgcacacagtggagtgctgctgaaccattttggtttaactgaagcttgatactataccgttctttttggtgtatcaaggagtattggaatttgctctcaactaatatgggaccgagcactatgattgcccctcgaaaggccaaaaagtgttacaatggattggcttgaaaattattgcaagaaagctaaagcagcttaaaatcggtggatgaattaattaagcataataatttctcacaaggattggtcttgtgatgagggtagcagctacctacattggcaaacggaagctgtttcgcttttt

SEQ ID NO: 10438 - DNA, 311 bp, Gossypium hirsutum
  Clone ID: LIB3135-018-Q1-K1-F9
cccacgcgtccggtaaagaaatattgtaagtttcgagaaaggggcgatcctatgtggaaaacaaaggtggttttaaacaagggttggggaattggtgaaacgcttttagggggtttaaaaactatttagggcgttgtttttacttgatgaatggtgatgaaggtcgagtgtggggtcaaagtgggtgtttgtttattgtgtggctctggcaaaaagtcttgctgataaaatgtcattgtagtcttaaaatttcagcaacggtgacataagaaatgaaaattgccacattttaaaaaaattgattatttttt

SEQ ID NO: 10439 - DNA, 284 bp, Gossypium hirsutum
  Clone ID: LIB3135-018-Q1-K1-G1
gagaaaggcaaaaatgagagggaaatcaattcttctgccatttcttacctgtcgaactttcagtgtccgctctggttcttcttcttcttcttcttctcggattctttttaatcagagttacttaatgtcaaccccccagacaaattcttcaatccctaaaaccccattttcagtttggacccctaaaaaccttaatctcttccgacccttctcggactcttcttctgattttttcaaaccatccttcatggaaaccgaaccggtgccggttccagagaatgttg

SEQ ID NO: 10440 - DNA, 266 bp, Gossypium hirsutum
  Clone ID: LIB3135-018-Q1-K1-G11
tccacgcgttcggtcagctattttactcattttgtcctaaatgtgagcactgggggcttggtggggatgcatgaaaaaccgtcacatccctgttaggtactatcatactgtaattacataatggtttttgtggtgagcaaccaaactgaatcatgcgagacatttgaggattgggaagttcaatacctaattaaagctattaactgtgtaggatcttggtttatctttttatcagtgatataaaacaggtcaccatctatattctt

SEQ ID NO: 10441 - DNA, 297 bp, Gossypium hirsutum
  Clone ID: LIB3135-018-Q1-K1-G12
gtcccaccacgtcctgcatgccatcccatacagaacttttaactactcgatggtaccgttctccagaagtcttgttgcaatcttcctcttacactcctgctattgatatgtgggctgttggtgctatattaacggagctttttacttcatcttctatttttcctggtgaaagtgaaatagatcaactgtacaagatatgctgtgttttgggtgcgcctgattggacttccttttctgaagcaactaacatctttcgtttaatcaatattagttattctgagaatttacctaccaacc

SEQ ID NO: 10442 - DNA, 430 bp, Gossypium hirsutum
  unsure (1)..(430): unsure at all n locations; Clone ID: LIB3135-018-Q1-K1-G2
cttaaaagggcaaatggacttcctgcaaatagaagtggaatatgcaagttttatggggatagggggtccattccgctgttttatgtggatttttctgcagttccctatagttttatgtatatgcattgcggaatgctgctttgttcaaggcgtatgcaattagttcttgtaaatactgatgaaatatttagtgcatgtgaagaagacaagtcatgtctaacctctgttgtagatttttccaagcgtttgagtggttctaatgtagttaaggttgataatttcgggagcaaaggtgtttcagatcgcgcttccaaactaaaagaaataggtcgaaatggtcactataaacatggtctttcttgcattatccanaggaggaggagtttgatgcggagaaagagagctagaagtccttggctttcggcataca

SEQ ID NO: 10443 - DNA, 294 bp, Gossypium hirsutum
  Clone ID: LIB3135-018-Q1-K1-G4
atagtggtgaccgactatggcgaaggcgacaacaccgatttcatccttagtccccgcgcatatgcaaggatggcgcgaccagacaccgcggcacatctgtttgcttacggcgttgttgatgtagagtaccaaagaatcccctgccaatacggtggttacaagacccaggttaaggttcatgagcatagcaaatacccaaattacttggccattgtagtgttataccaagctggttaaagtgaaatcctatccgtcgatatttggcaggaagattggtaagaatggataggaatg

SEQ ID NO: 10444 - DNA, 379 bp, Gossypium hirsutum
  Clone ID: LIB3135-018-Q1-K1-G6
cccacgcgttcgcaccattccgcaaagagctgctaactccgtggatgacagctacactgattgatttctatataaatgttgttgctctgtcggtttgggttgcctacaaagaatcaaattggactacggcatttttctggattgtcctacttataagttttggcagcatttccacatgtgcctacattgtcaaagaactctttaagctcgcttggcaagatcctctctaccttattttgataagaaaaggcaacagggcagaacatatgtatgagaacatataatgttgaatagtggtacaaagaaagtgatattgagaaaaattcgtgctgggttagtatgatttttaagcaacccacaaaggatgggaacttgtttt

SEQ ID NO: 10445 - DNA, 275 bp, Gossypium hirsutum
  Clone ID: LIB3135-018-Q1-K1-G7
tcgacaaatcgttgcttacgccgccatttttcccatacaaaacctcctgcaatctcagggcatcgggattcccagtgcttacatattacttgcgacactcgtgcttgtcctactgctttgttgggtcgccccttacaagaaagggtagggctcgataggtgcatctcttggtgctcaccccgtcaaaccgcatcatagtgggggcccaaaaggagtatatctctgtaagtgacaaatgatcccttacatggaccggactgatttcgcatgcctat

SEQ ID NO: 10446 - DNA, 265 bp, Gossypium hirsutum
  Clone ID: LIB3135-018-Q1-K1-G8
tcgcccacgcgttcgcccacgcgtccgtttgaagtttgcaacttcagtttgatgtaccgtaggcgcagcccacaaacaaagaaaaaagaaaaaaagattactaaaactcaactttgttattagtttaccagcatgtgctccaataaactataagatttgcgatactatatatttcaattctgatatttctttttctctattttcttttaatcctttctgctttcatctttgtgtaaagttttgtgttattcgatgtccttttgtt

SEQ ID NO: 10447 - DNA, 431 bp, Gossypium hirsutum
  Clone ID: LIB3135-018-Q1-K1-G9
ggacaatgaagggcattcaagctttggataatgcttattccaatcaaataatagcacaacatttgaaggttctctatgtagttggaaaagacaataatattcagaaattagtatcagctgtcaaattcaagggatattccatctcaatcagctcctacttgaatagcatggaatctggaaacagcctagactgtggtggcagaatgagacccacagtctccattatcgatactgaaaacatcagttgtacagatttgggagagtatggtgttgtaataattccagactttgttctatcaattgatgattatcttcaaattctcacgaggatggcacggcacacagtcaatggtgtattgcatagttttttaactaaagatgattcgcagcatgctggcccgttgatcgaaatccttgaacaatgtgggcag

SEQ ID NO: 10448 - DNA, 236 bp, Gossypium hirsutum
  unsure (1)..(236): unsure at all n locations; Clone ID: LIB3135-018-Q1-K1-H1
cgaacttttcaatgaccaaaaaaagccncaattgtctctttctattcgaaaccccattgctggtcttaagctaagttgtgctctagtgttgtgcatgttggtggttgaacccattgccacaaccaccataacatgcggcgatgtgacaagcaaagtggccggttgcttatcatacttgcaaaaacggaggaacgtgccgaaagcttgctgcgacgggatccggtccctgaacaaca

SEQ ID NO: 10449 - DNA, 272 bp, Gossypium hirsutum
  Clone ID: LIB3135-018-Q1-K1-H10
attaggcggtggctcatgctgtttgattttgggattaccattcttttattttggctgcttccatttatgagcctttgggttttgggactactggtggtaagcgtatgcaaatgaaggaagtcgcggcttttcttgcacatgtcggcgccaagacatcttgtggagatggtgtcatagacggaggaccgttggcatggggtctttgcttcaagagagaaatgagtcctagccaggattactgtgattgattactacaaatacatgtattcatg

SEQ ID NO: 10450 - DNA, 187 bp, Gossypium hirsutum
  unsure (1)..(187): unsure at all n locations; Clone ID: LIB3135-018-Q1-K1-H12
ttatatacgattatgacggtttgttgttattttcagtttgagaatcgacgaccatctcttattggttctggtcacggatcgttggcacgtgccgggaaagtgagagggcaaactccaaaagtagccttttntgtaaagggagaaagagagaaaccttgttacttttatgaagaagaagttgtttgat

SEQ ID NO: 10451 - DNA, 353 bp, Gossypium hirsutum
  Clone ID: LIB3135-018-Q1-K1-H2
ttcgatttgatgaaccgctgccggtggtgaccggtgagtcgattttaggacgaattgaacaaacgaaagcaggtgcagaaatgccggaggaggatttggtggatataaagttcaagatttatgatggctcggatatcggaccgtttcgatactccgccacatcgacggtggatatgcttaagcaaagaattgtctctgattggcccaaaggtaagacaattgttccaaaatcagtgaatgaagtcaagctgataagttctggtaaaattttggagaacaacaagactgttggcctgtgtaaagtaccctttggtgaagttccggggtgggctataataatgcatgttgtagta

SEQ ID NO: 10452 - DNA, 360 bp, Gossypium hirsutum
  Clone ID: LIB3135-018-Q1-K1-H3
gtgcggaaaaagttgaacaggttttgttacaagtagatggtgacgttgatgctgctatagagtttctgatagcagaacaaggggctgaagaatgtacagctgcaaatgattcacttacttgtcatgcaaatggttcttatggtaatgatgaaaatggaaacagtgaacaacacaaggaagaaaatgtagggaagacctgcgaacaggatccatatagtgatggcactaaaacccttggtggtaacactcctcggctggatgaaaagaagattccaagaaacaagttatgcccctgtggatcaaagaaaaaatacaaggcttgttgtggatctgtctcagggaggtcctcgactaagatca

SEQ ID NO: 10453 - DNA, 282 bp, Gossypium hirsutum
  unsure (1)..(282): unsure at all n locations; Clone ID: LIB3135-018-Q1-K1-H4
cccacgcgtacgtccacgcgtccgaccacgctttcgaaatttaaaaaaaaaaattataaaaagggtgatatcataaaatagaaggggctaaagatagtaaaaatggaaggagagtcattttatttggaatgaatatggggttcgtggtgatgtattagttgntttttttgggggggggctttttattagattaaatttttcttccggtgttgcaaggaacggtaatagggttttttttgtgggggccccttaatttttattcctgtgggggggggttttaaa

SEQ ID NO: 10454 - DNA, 251 bp, Gossypium hirsutum
  Clone ID: LIB3135-018-Q1-K1-H5
tccacgcgtccggatggcatcaacaagaaaatagaggaggccattctaaaggctgataggatgggggtcaaggtcattagccttgcagcattaaataagaatgaagctctaaatggaggaggaacattgtttgttaacaagcacccacaacttaaagttagagtttgccatggcaacacattgagtgctgcagttattgtaaaagaaattcccaaagatgtcaaaaaaagtgttcttaacaaggcttcact

SEQ ID NO: 10455 - DNA, 171 bp, Gossypium hirsutum
  Clone ID: LIB3135-018-Q1-K1-H6
agagttcagttagagaagcgacgacaatcacaaatgggttaggttcacggatcgttggcacgtgccgggaaagtgagagggcaaactccaaaggtagccaagctagacaagaagaagaagcccagaggtcgtgcctattagcggatgcaatacaatcgccgtttcgtcact

SEQ ID NO: 10456 - DNA, 196 bp, Gossypium hirsutum
  Clone ID: LIB3135-018-Q1-K1-H7
cacttctgcatggaccaaaaaaagcccatggttctgttctatacgcatccccatcattgctaggaagctaggttgcgctctagtggagtgcactggggaggttgagcctagaactgcagtcacaatgagacgcttttatttgacaagtgacgcatcaaaattgcaacatcgttcttgccatactgtgggggcctgc

SEQ ID NO: 10457 - DNA, 212 bp, Gossypium hirsutum
  Clone ID: LIB3135-019-Q1-K1-A10
cccacgcgtgcttacatggcaaccgggaatgatgttcttccggaccacattctatcgtagcggcgcttggaatctatatggtgctggcggtattcatcgcggtcatcatcaggattggatacctcctgatatgagccatcttgtcagaaattgacagcggttgaatacacggtgcatgtaaagatgcaaaggacttgttgttagaccaagag

SEQ ID NO: 10458 - DNA, 393 bp, Gossypium hirsutum
  unsure (1)..(393): unsure at all n locations; Clone ID: LIB3135-019-Q1-K1-A11
attaaaccttctgcttagcttaaaaaatcttgaatccgtactctcctacttccctcgttatcgtcaatggcttcggacaagaagattaagatcgggattaacggatttggaagaatcggacgtttggttgccagagttgctcttcagaggaacgatgttgaactcgtcgccgttaacgatcccttcatttccaccgattatatgacatacatgttcaaatacgacagcgttcacggtcaatggaagcaccatgatcttaaggtcaaagactctaaaaccctcctcttcggcgaaaaacccgtcactgttttcggaatcaggaaccctgaggagattccatgggctgaagccggngctgagttcgttgttgagtcaactggagtgttcactgac

SEQ ID NO: 10459 - DNA, 438 bp, Gossypium hirsutum
  Clone ID: LIB3135-019-Q1-K1-A12
caggatatttgagattgcaccatcagccaagaaactattctcattcttgagagactcaaatgttccattggagcaaaacacaaagctgaagccccatgccatgtctgtctttgtcatgacatgtgaatctgcagttcaactgcgtaaagcaggcaaagttacagtgagggaatcaaatttgaagaaattaggagctacccattttaagtatggggtagttgatgaacattttgaggtaacaaaatttgctcttttggagaccataaaagaagcagtaccagatatgtggtcagatgagatgaagaatgcatggggtgaagcctatgatcgtttggttgcagccattaaaatagaaatgaaggcatgctcactagctgcatgatttcacaagttccctacattattgcttgctaattttgggtccaataagattgaaag

SEQ ID NO: 10460 - DNA, 291 bp, Gossypium hirsutum
  Clone ID: LIB3135-019-Q1-K1-A2
gttaggctttgggccaattggagttaaaatatgccttaattcttgcttacctaaatcatgggtgattgggtaagttgtatttattagttatacgaacttactaagcttaattgcttactccattttattttccgagttttatattgattcgtgagctcacttggttgggagttgtcagaaactgcctcacactatcaaacacttattttggtacttgggattataatattttggtaaaatgacaatgtataggttgttttggctaatgtacccaaatggttttgttggtgt

SEQ ID NO: 10461 - DNA, 171 bp, Gossypium hirsutum
  Clone ID: LIB3135-019-Q1-K1-A4
cgggcgcgtgggctttacgccggatgaaaaacctatggtggtaagaaggacacgagaacatccacaaggttcctgtctatgtagtatgacgctaaccccttgggatacggtggagacctttggggtttacggcgcttgataaaaaaaaaaacgggaagtcgctctacagga

SEQ ID NO: 10462 - DNA, 340 bp, Gossypium hirsutum
  Clone ID: LIB3135-019-Q1-K1-A5
cgcaccttagctgattacaatatccaaaaagagtccaccctccacctggtacttcgtcttcgaggtggcatgcaaatctttgtcaaaactctcactggaaagacaattaccttggaggtcgagagttcggataccattgacaatgtgaaagccaagattcaggacaaagaaggaatcccaccagaccaacaaagattgatttttgctggaaaacaacttgaagatggaagaactcttgccgattataatatccagaaggagtctactctccatttggttctccgccttcggggtggtatgcacatcttttgtaagactcttaccggaaagaccatcactt

SEQ ID NO: 10463 - DNA, 358 bp, Gossypium hirsutum
  Clone ID: LIB3135-019-Q1-K1-A6
cccacgcgtccgtttgagaatcatgaaggagaaaagccaaggcaatttcacacctccgcttgttattgtcattgctgacgaaagctgcaacccggaaacacttaagtatgctttggggcaaggagccattgagtatgagaagttcttagaaagtggtgaccctgactttgcttggaagcctcctcaagatgagtggcaaagcattgctttaggctatacttccggtacgacagccagcccaaaaggggtggtattacatcaccgaggggcatatctaatggctttgagtaatcctattatatgggaaatgaatgaaggagctgtatatttatggactctgcccatgttccattgtaat

SEQ ID NO: 10464 - DNA, 348 bp, Gossypium hirsutum
  Clone ID: LIB3135-019-Q1-K1-A7
cccacgcgtccgatttgttaaagcacttgaagatctctttgagagacacaaagctcgggtcggatatgctgatcttccattaaagatcctttgagcgaatcatgctttgtttatttgccaatcccctatatttgtgcgattcaagtgcaatgtgttagccaagtaacatagctgtatattcatgcatctcaataggccttttttttgtattgtatggttatgatctgcaggttactcttaaaaactaattatcatgtaggcattaaaaagcttttagaagctgtttttattgttaattggggtcaaaaaggatttgggcaactttcaatccaataaaaatttaccatt

SEQ ID NO: 10465 - DNA, 266 bp, Gossypium hirsutum
  Clone ID: LIB3135-019-Q1-K1-A8
aagaaataaaggaagaagaagcaatggccactcttacagtgcccacgacagttccttcggtgtctgaagattgtgaacagctaagaaaagccttttcaggatggggaactaatgagggcttaatcatagatatattgggtcacagaaatgccgagcaacgaaacttgattcgaaaaacctacgctgaaacctatggagaggatctcctcaaggcactagacaaggagctcttgaatgactttgagaggctgggtttgctttgggct

SEQ ID NO: 10466 - DNA, 257 bp, Gossypium hirsutum
  Clone ID: LIB3135-019-Q1-K1-A9
gcttcttcttcttccatggagatggggaatgaagtacttctgcgacacacttttggatgcagatggagaatgcgatattcttgggtggcagtacatctctgggagcttaccggatggtcacgagctaaaacgattagacagcccacagattgaagggtccaaatttgaccctgaaggtgaatatgtgaggcaaaggctgccagagctagcgaagatgccgactgagagaatccatcatgcttgagatgcacctcata

SEQ ID NO: 10467 - DNA, 391 bp, Gossypium hirsutum
  Clone ID: LIB3135-019-Q1-K1-B10
acgcgaactgaaacacgaaccagtgaagactatctactgtgagcagcgatatcataatcgagccgagaccgatccagaagtgaagaaacagaccggagctgattaccaagaggagcaggatgcaaggcttccaaaatgagacagtatcggcataaatatgcctctaactgagaagacaagaaggatgaatgacaaagatgagagcgcgaagatgaaaaacggagtccgtattggaaacaaagctcgaggagcaactatggatactcaagcagccgctgatgcttgctcaaatgaacacattgcaagttacacaagacatattgggtatacgcaaccagatacgaaagaccatggatggcagaacatgaaaaatcaagctatgactggtcat

SEQ ID NO: 10468 - DNA, 294 bp, Gossypium hirsutum
  Clone ID: LIB3135-019-Q1-K1-B12
gcgagcggacagctggaatggggtacttttcttaccctcgcatgggaaaaatgggcggtctggcctagaccttattccgcgcaagctctcatagcattcaactatcttggttctgtggggaacacctctattgtagacgttgtctcgctctatcaagatctgggctagctgggaagccgcaaggacagcgggcgcaggggccaaattggagaagcaaccaagcatgggatgagcgggaactaatacacatgcaaagactggtacacgaggtcgggcaaatattcacctgtcgga

SEQ ID NO: 10469 - DNA, 266 bp, Gossypium hirsutum
  Clone ID: LIB3135-019-Q1-K1-B2
tcgctcgaaattaaacaagaatgcagaaaatgacacaacttggggagcagctggtatttctagacgctagcaaccctgccttctttggatggcaaagatggcagcctgataagctgaggaggaatgtttattagatacttgaggggtgtctttcgaggaaagataccatcattctcgaaaaagaaaagccagggaagatcaaggcaagaaacatctggatagcggtttatctccagtgccaggtaatcaacctaactatttggagg

SEQ ID NO: 10470 - DNA, 292 bp, Gossypium hirsutum
  Clone ID: LIB3135-019-Q1-K1-B5
ggtgttgtcacttatgactatgagaataccttcccagtcgcccctgccaggcttttcaaggcctttactgttgaagctccgaaagtttggcccacggctgcacctaatgcagtaaagagccttgaggttgaagctaatcctagctctggaagtatctgaaaaatcaactttgttgaaagccttccattccaatatatgaagcaccacatcggaggacatgattaaaggtaatcttcataccggtaccactttaatcgaaaagtgggccctttggggggataaagctttgaaa

SEQ ID NO: 10471 - DNA, 256 bp, Gossypium hirsutum
  Clone ID: LIB3135-019-Q1-K1-B6
gcggcttatgattcgtgtaacataaaattcttcttgaaaatgactactcacctgggaagactcacgagcataggttcctgggttgaaactaatgtaattcgtcttcagtagcattttggagtgagtcctgcattaatgtgatttcagttcaactaagggataaccgaaatcgctattggtttcaaggttgaagaaagaaaaacgtagtcaagaataacccatgtattgtgtttaaaatggggtatgttaaaaattt

SEQ ID NO: 10472 - DNA, 360 bp, Gossypium hirsutum
  Clone ID: LIB3135-019-Q1-K1-B7
gtcgtttacaaattctaggggttttttccctattctatgaaagaagaggaagaatcaagcgggattttctctcaggatgtcagaggtaccattcagacctagggaaaagcttatcgagtatcagaaatattttcaaggcatccataaacacacttacttgaaaggtccttacgataagatcacatctgtcgccattcccgccgctctagcagcaagttccctgtttttaatcggacgaaggatctataacatgtctcatgggattggaaaaaagaatgagagctcttcacttcagggtagaaaacatggctttcacttttggggttcaatatagcatgaaaatgcttgtttggttgctct

SEQ ID NO: 10473 - DNA, 280 bp, Gossypium hirsutum
  Clone ID: LIB3135-019-Q1-K1-B8
aagacaaggaaaaaaagaaggatattagtgggcatcatgattctggtgctgatcactcaagaaagcaccatgaaaagaaaaggaagcatgatggagatgaagatcttagtgatgttcacagacacaaaaaaagtaagcataaaagctcaaaaattgatgaagttggtgcaattaaagtagcaggctgaaagggtggctctctagttcatattgtctcagatggttttcagagtatgggagggtttgcttaatgctctctacattggttgagagtaacctt

SEQ ID NO: 10474 - DNA, 208 bp, Gossypium hirsutum
  Clone ID: LIB3135-019-Q1-K1-C12
acggcttcattgacatactgagggatgttcatgcttcctacgaacagaggaagccatatgttgtgtgctttgttggcaggagtggagttgtgaaatcaacgaatctcggcaagggggttctctcgcgtactgcagaacacaccaaacgttatgatggctgctggtgatacaataccttcagggactggtgagcagtggacaacacatg

SEQ ID NO: 10475 - DNA, 201 bp, Gossypium hirsutum
  Clone ID: LIB3135-019-Q1-K1-C2
agttaatcgagccttgcttcgaagtgatcataatttattttcgactgagggtgctgatacaattgaaattgtgaataggtttagtagtaatcaaacagctttctttgaaagctttgtggaatctatgatcagaatgggaaatataagccctttaacaggttcggaaggagaaattagatcaaattgccgcgccgggaattc

SEQ ID NO: 10476 - DNA, 292 bp, Gossypium hirsutum
  Clone ID: LIB3135-019-Q1-K1-C4
actaactgcaaaaatgtgaagtgagatggatgaagagagggttttgcagcagcttgcaggagataaaatatatgattaaaaagaagaagaagaagaatgaataaggattttgggatggaattttcaaaatccaaaattagtctccactttagtgtagtgaggctttgtttatttcgtcttatgttttggtccctgcatgttggttctaaactttatatccactatgtattggctattttaaatgttttaatgaattaaaagtttatgctttggtcaatcaataaccgtattt

SEQ ID NO: 10477 - DNA, 237 bp, Gossypium hirsutum
  Clone ID: LIB3135-019-Q1-K1-C5
ctgacgcgttggccaaaatagaaccactttgtgggtttaatttcccagcaagggatttcaagccaggaagatttccctgctccacttggaccaacaatggcgaggatttcccatggcttggctttgcactttacatcctttaggacatgttccatcccaggacatgcatcttgaaactgggatgatggctcttgttgtttacgtcctgatcaaccactttttgctgggtttttattg

SEQ ID NO: 10478 - DNA, 237 bp, Gossypium hirsutum
  Clone ID: LIB3135-019-Q1-K1-C6
gaaaaatgggtttgaaggaggaattctaggagtatgcggagaaagctaagacccttcccgagaacactaccaacgacgacaaactcattctctatggactcttcaagcaagctacttgtggaccactgaacaccagccgtcctggaatgttcaacatgaaggaaaagttcaagtgggatgcatggaaggctgttgtaaggaaaccgtatgaggaagcaatgaacgattattttactt

SEQ ID NO: 10479 - DNA, 278 bp, Gossypium hirsutum
  Clone ID: LIB3135-019-Q1-K1-C7
gaaatgaaaggttctgccattactggtccaattgggaaggagtgtgctgatctgtggccaagaattgcaagtgccagccaatgccattgtttagggatttgaatttttctagagttttttgttcccttgagtcatggctttttgctggatcaagattttgttatgtgttttttagggtttcttgaaaaatatcgtatggatagctttgatttggattttgatgctgggatgtaattaatggatttcttccatgtttaagcttattattttcgcttttt

SEQ ID NO: 10480 - DNA, 428 bp, Gossypium hirsutum
  Clone ID: LIB3135-019-Q1-K1-C9
ggaatttcaactcgggatgcagctttgtccttcgagttaggtatgcgagcactcgatttagctgtcggtagagccatgaacgtgtcaaatgataatttccaaaatgaaggagagtcatgcccttgtagtccatatgataagggtgtattgctggccagagggcatctcgtcattaaccttctggagagcgaagatacaaaagaattgagccagatttgcaaaccactcttcaaaaaatcaacatggttaaggcccaaggctacaagatcctcattcagagagatttatttaatttgtcaagatttaaagtcacagtaaggttcaaaatctttacggtggcggcaactatttgttaccccaatgacctcccggatatgaatgtcaaatatgggtatgttaatttcttttaatgaatttggaggatcata

SEQ ID NO: 10481 - DNA, 320 bp, Gossypium hirsutum
  unsure (1)..(320): unsure at all n locations; Clone ID: LIB3135-019-Q1-K1-D1
gttatagccggaggacgagctcctgaatatcttgctatggatgcatttgtattgaacatggttcgcaattttgttaattctggaaagcctgttgcttcaatttgtcatggtcaattgatattagctgctgccggggcagttggtggtctaaaatgtactggtttccctgctgttggacctacacttattgctgctggtgcattgtggattgaacctgatacttttgcagcttgtgttgttgatggtaatatcattactgctgctacttatattggtcatccccaagtttatcaggctgtnttggaaaaccttaaggggca

SEQ ID NO: 10482 - DNA, 357 bp, Gossypium hirsutum
  Clone ID: LIB3135-019-Q1-K1-D10
aattgctctccaatcctattagacaagttcccagttgaagtcagcaaggagaatgaagacctttcagtgaaagcgaagtctaggtttagtatatcactgcgcaccctttcgcagcctatgtcacttggtgagatagcaaggacttgggatgtttgtgcccgagcagttatttctgatcacgcaaaactgagtgggggaggcaactttagttcaaaatacaggacttgggagaattgcttgagtgctgcataagcatctatacagactctagtagaacacctagatcagctttattttgtcacagctgccatcttgaagactgcataaacaggtttcggatgcatatatttataataa

SEQ ID NO: 10483 - DNA, 129 bp, Gossypium hirsutum
  Clone ID: LIB3135-019-Q1-K1-D11
ctcgccttccaatccataaatgatgtatgtttcaaggcagtgaaacaagtggatgaaaaaatgagtgaatttaagaaaaaaaagttaaaaatataactagcaaaaaacaaaagaaaactaagtaactta

SEQ ID NO: 10484 - DNA, 306 bp, Gossypium hirsutum
  Clone ID: LIB3135-019-Q1-K1-D12
cccacgcgtgcgaaaaccttaaaagaaaaatatctatattctagccccaactgccatggcgactcctggataccaaattgctgaaatttatgtcatgcggaagcttcataaagagaaaatgaagaacgaagaagaagaaagagcaaagagtgaggatgttggatttgcagggaagaaatccaagggttggtgtttctcatcgatgttcaaaaaagttcattcgggtcatgcatctacgataggtcatgtaagaaatgaattaaaagatgatgacaagaacaaagcttgttaagaggatatgacaac

SEQ ID NO: 10485 - DNA, 278 bp, Gossypium hirsutum
  Clone ID: LIB3135-019-Q1-K1-D2
ctggttgctactgtgattgctgtatatgctaactggggatttgcaaggattcaaggaataggatggggatgggccggtgtcatatggctttacagtgttgttttctacatcccacttgatctaatgaagttcgccattcgttacatcttaagtggaaaagcttggctcaacttgctagaaaacaagactgcattcaccaccaagaaagactacggaaaagaagagagggaagctcaatgggcacttgctcagaggacattacatggacttcacccacc

SEQ ID NO: 10486 - DNA, 338 bp, Gossypium hirsutum
  Clone ID: LIB3135-019-Q1-K1-D3
gctttccattttccctttttgatatccaaaaatacattctttcttttttatttcttttcttagttttggaaagatctggtaggtggtggatagatggggaggttatttgtggtgaaccttgaagggaaagtttatagctgcaagcactgcaaaatccatcttgctcttgttgatgatattctttccaagggtgaatgtttctgttggggagaaagaagatagactgatgattacagggttgcacactgtagcagatatcttctgcattgggtgtggatcaattgtgggatggaaatatgaatttgcccatgagaaaagccagaagtacaaaaaaggaa

SEQ ID NO: 10487 - DNA, 263 bp, Gossypium hirsutum
  Clone ID: LIB3135-019-Q1-K1-D4
gtcctccccttctccgaacaactcttcttcttcgccacccttatttggcgccatttcttcggcggcgataaatccaaaacctccctatcaccgtcgtcgaagccatacatccccgactacaagctcgccttcgaacacttctgcgtccacgccgcaagcaagacggtgctagacgagctgcaaaagaacttggaactcagcgaaaacaacatggaagcatcgaggatgaccttacaccgattcggcaacacatcgagcagcag

SEQ ID NO: 10488 - DNA, 230 bp, Gossypium hirsutum
  Clone ID: LIB3135-019-Q1-K1-D6
gcagccgtcgattgagtattttttttttgggtggaaaaagaaaagccatggcgttgaacggtggtcttagattggcttcgaagtttctgacttcgacctctcaatcacttctctacaagtcagggaatagagggtttcattcaactggagtgaaaaggatgggaggagggcatgggcatgatgaaccatattaccttcatgctaagcatatgtacaacttggataggatg

SEQ ID NO: 10489 - DNA, 324 bp, Gossypium hirsutum
  Clone ID: LIB3135-019-Q1-K1-D8
gtgctcttggacaatgaagcaatttacgacatatgccggagatccctctatattgagaggccaacttacaccaatttgaacaggctgatttcttaaaccatatcgtgcttgacgacttctttaaggttagatggagccattaatgtagacattacagagttccaaaccaatcttgtgccatatcctcggatccatttgatgctctcttcttatgcgcctgttatctcagcttgagaaagcataccatgaacagatatccgttctctggatcacaaacgctcggtttgagcccttaagcatgatggctaagtgctatccatggca

SEQ ID NO: 10490 - DNA, 182 bp, Gossypium hirsutum
  Clone ID: LIB3135-019-Q1-K1-E1
gggttgtggtggcgatgccactaataaagacaagggaaagagctgtgatgataaacaagtcaagaacaagctttagcttttcaagcggttgtccaaggacttgtacatgcttcctcagattgctaatggcgaggatactatgaatggattgtccgctgaagttaaagccaccatcattcatg

SEQ ID NO: 10491 - DNA, 411 bp, Gossypium hirsutum
  Clone ID: LIB3135-019-Q1-K1-E10
gtgattcgtcgaacgaggggattgcatataattcatgggggcactggaagctggcggtgcgggacttggacgaagctctttgcttgtaattacctttggagcacgggtaaggatacccggggctatacaatatgactcgaaagtcctaagtgatgggcaggctggcacaccacaaaatgttgacaaatcaaccagcttggcacggaaagggatccgtctctttaagattgtgaacgatttgcatggtcttattagcccagttcctcaaagaactccccttccacttgttctgctaggaaagtcaaagaatgcactcgtgtcaactttcttatttctcgatcaaattgtgtggcttggcagaacaggcatctataaaaacaaaaaacgtgctgagttgattggacaaatatc

SEQ ID NO: 10492 - DNA, 289 bp, Gossypium hirsutum
  Clone ID: LIB3135-019-Q1-K1-E12
ccacgcgtccggtcggggacgcttctttgaaattgctgacctatccactgtccacgggaggacagtggagcggtgcgtgttttagtgaggtggattgctattcattgtcaggcgagagaaagagtgtggtaaccgatgcaccatttctcgggcatcttaaggctcaaccggcacttattaagcttcaagctcttatgaggcatgtgatcagtaacgtggaggaagccagggctaaaggtaggcaggcaaggaaagacatgatcaatagcttttcttcggaaattgttgc

SEQ ID NO: 10493 - DNA, 186 bp, Gossypium hirsutum
  Clone ID: LIB3135-019-Q1-K1-E4
aaaaaaaataaaaggatgaaataaaggaagaagataaaagtaaagagaaaaaaaaagaaaaagtgggaaaagaaagaaaaataagaaaaggagggggaataaagaaggaagaaaaaaatagaaaaaaagaaggaaaaaaaagaaaaacaaaaagaagaaaaaaaaaaagaaaaagaaaaaagaaaa

SEQ ID NO: 10494 - DNA, 376 bp, Gossypium hirsutum
  Clone ID: LIB3135-019-Q1-K1-E6
gtccgaatcaagacatggcagggaggttctggttcagtgaaacaagtgacattctcagacatacaattatcagaagttgaaactccaataatgatcgatcaattttattgtgacaaaagccactgctcgaatcaatcttcggctgtagaagtatcggagataaactacgtaaacatacgaggaacctatacagttcaaccggtccacttcgcgtgcagcgatagcttgccgtgcagtggggtttcgttaagtaccatcgagctgcaatcagtttaagaaaaccatcctctcagtggacctttctgttgggaaacatatggtgagcttaaaacatcaactgaaccaccaattagtttgttggagagtggaaaaccat

SEQ ID NO: 10495 - DNA, 318 bp, Gossypium hirsutum
  Clone ID: LIB3135-019-Q1-K1-E7
gagaaaaccacgacctcgaccaggctgccaaactcacttccgctcttcgggagctgatagcgagagagaatcagcaaaaggaaactatgtgattaagaagagctgctgtttgtatcttagcattaatatattatatgttggtgagagtgatcaaccacggtgcttctattcttctggtcttcatcttttatgcagtgtttgctgtgtggtgttatcttcggtctttggtttgttaagcaggtggattcttaaattgtcccctcaggttttgcttgaccatctttttttttcattaaaatttgcttagatttccctttt

SEQ ID NO: 10496 - DNA, 381 bp, Gossypium hirsutum
  Clone ID: LIB3135-019-Q1-K1-E8
gggatagaagcacatactgcacccgatatgtcaaagcagcttgaagccctgcaactcgcgcatactgatgaaagggaaaaggccaattcacgcatttttcgcagagtacctgaaaagccctatgagctaactttccatttgacggaaaagagcaagcggacctgtgaaagtcacatcttttactaatataacaggcttctgagaggattctttaatcaaccaaaacctgcagtccttaatttctaccacttacaagttgagatttgttccattcccaatggcagaagaaggatgcaagctggaaggacttggacaagatattattcacttggacaggagctgcagcgcgctttagcgtcggaaaaatccctctacatgggt

SEQ ID NO: 10497 - DNA, 451 bp, Gossypium hirsutum
  Clone ID: LIB3135-019-Q1-K1-E9
acgcgtgcgcccacgcgtccgcccacgcgtccgggcatggctaaagctacatcttttactgctttcctttggatggcttctctatttctttcttctcacttttctgtctcaaaagcagacaactccgctcccatagtgagtgggctctcatggactttctacaaaacttcatgtcccaaagtagaatccattattagaaaacaactgcagaaggttttcaagaaggacatatgccaagctgctggcttgctccgtcttcatttccatgactgctttgttcaaggatgtgatgcatcggtgctgctggatggatcagcgagtggaccaagcgagcaggatgctccgccgaacctgaccttgagaggattcgaaatcatcaatgacctgcgtgcgcgtgtccacaaggagtgtggaagagtcgtctcttgtgctgatatcgctgctcttgctg

SEQ ID NO: 10498 - DNA, 428 bp, Gossypium hirsutum
  Clone ID: LIB3135-019-Q1-K1-F10
cccacgcgtccgtcttatttgaacttaaagtcccagctaatattagaatcatgggggctgggacttatgactatgagaatacctccccagtcgcccctgccaggcttttcaaggcctttactgttgaagctccgaaagtttggcccacggctgcacctaatgcagtaaagagccttgaggttgaagctaatcctaactctggaagtatcgtaaaaatcaactttgttgaaggccttccattccaatatatgaagcaccagatcggaggacatgatgaaagtaatttttcatacagttacgatttaatcgaaggtgggcctttgggggataagctcgtaaaaattagctatgagaacaggtttgaagcaactgcaggtggaaggagtatttgcaagagctcaatgaaattctacactatatgcgataat

SEQ ID NO: 10499 - DNA, 421 bp, Gossypium hirsutum
  unsure (1)..(421): unsure at all n locations; Clone ID: LIB3135-019-Q1-K1-F11
acgcccacgcgtccgagacagggttatggaagaaaccaaggataaaaagaatgctgttgaggcctatgtttatgacatgaggaataagcttagtgataaatatcatgattttgttactgctccggagaaagaagagcttactgccaagcttcaggaaactgaggattggctatatgaagatggcgaggatgaaacgaagggtgtttatgttgccaagcttgaagagcttaagaagcaaggggatcctattgaagaacgttacaaagagtatatggagaggggaactggcattgatcaacttgcttactgtattaacagttacagggaggcagcaatgtcaaatgatcccaaatttgatcacatcgaacttgctgaaaagcaaaaagtcttgaatgagtgcgtanaagctgaagcctggttg

SEQ ID NO: 10500 - DNA, 437 bp, Gossypium hirsutum
  Clone ID: LIB3135-019-Q1-K1-F12
cccacgcgtccgtcttatttgaactcaaagtcccagctaatattagaatcatgggtgttggcgcttatgactatgagaatacctgcccagtcgcccctgccaggcttttcaaggcctttactgatgaagctccgaaagtgtggcccacggctgcacctaatgcagtaaagagccttgaggttgaagctaatcctagctctggaagtatcggaaaaatcaactttgttgaaggccttccattccaatatatgaagcaccagatcggaggacatgatgaaagtaatttttcatacagttacgatttaatcgaaggtgggcctttgggggataagcttgaaaaaattagctatgagaacacgtttgaggcagctgcaggtggagggagtatttgcaagagctcaatgaaattctacactataggcgataatgttatcact

SEQ ID NO: 10501 - DNA, 242 bp, Gossypium hirsutum
  unsure (1)..(242): unsure at all n locations; Clone ID: LIB3135-019-Q1-K1-F2
gcttcagaagcaaatcgtggtgaagatcggtgaagatttggagcgaggcttggcttgcggcgctgaagtttacccttgaaccctagggtttccgaaattattcttgggcttgggggttaatttttgggccatttgttattgtattttggtttgggttttgggtctgggccatatatgccacttgnaatttgagcccctttaggccctggcaaaatctgttattacaattatatttacctcaa

SEQ ID NO: 10502 - DNA, 254 bp, Gossypium hirsutum
  Clone ID: LIB3135-019-Q1-K1-F4
tgctttctcagcccgaaaacccgagacaaaaggcttctcctccgtggacggtctcaacgacggggagggagggctctgatgacgcaagccaaggttcgggtaagcccttttttccccctctcctttattctatccttttttgaaatagattcgaaataaataaaaaaatacaagaatagaaaatcgaaaaagaaaaaaaaattacaatcaaccttttttagctttctttttcggttttttgaattgcttaaatc

SEQ ID NO: 10503 - DNA, 162 bp, Gossypium hirsutum
  Clone ID: LIB3135-019-Q1-K1-F5
cccccaccttatgaacatcctgttgataaacctcctaaggtgaaacccccaccttatgaacataagccccctgtctatgaaccaccaaagaaggaaaagcctgagcctaagccaccagtttatacaccttcaaagaaagagaagcctgaacccaaaccacca

SEQ ID NO: 10504 - DNA, 279 bp, Gossypium hirsutum
  Clone ID: LIB3135-019-Q1-K1-F7
tcgaaatgatgtagcttttaattatggttattgttgtaaaaatagtgtatccatgagctattgatttgcagggattcattcaagttgattaactgcagaataagatggaaaagtcctgcaaaatctgaaacaaagcccttccactctttctctagagggcttcttctgtgattctgttatctagaagtaaaagcttttcttgggttttccatttttcttttttcctttctaaattggtttccactttttttagcaagaatgaagcattgaattttattt

SEQ ID NO: 10505 - DNA, 297 bp, Gossypium hirsutum
  Clone ID: LIB3135-019-Q1-K1-F8
cgtctggaactctcgcgcatgccatcatcaggaagtacgggctcatgtgttgcagacagtgcttccgtagcaatgccaaggaaattggattcattaagtaccgctgaggaatgtttatatggctagaagttggaaacactttttggctagtatgaacctttgtttcgaaattgtagcaacttttaaaaaaacattgctgttttttggtgaatttaatttaaaaacttgaaagtttgtttttgcaaaaggaaaatttgttggtttctcaaaggaagaaatcatacctgtttttatctt

SEQ ID NO: 10506 - DNA, 441 bp, Gossypium hirsutum
  Clone ID: LIB3135-019-Q1-K1-F9
cccacgcgtccgggctaaaaaggcaaaggatgttgtggaagcagtagaccctgataagaattgggtcactttcagagtgatcgaaggagatctaatggaagagtataagagctttgtaatcacgattcaagtttcgcccaagagcgagggtagtggcagcgtagtgcactggactttggaatacgagaagctgcacggcgggattgagcatcctgagactctgctgcaattcgttcaagatgtctgtaaagacattgacggccacctcacccaagcaagttaagcagtatcacatgatgctattgttgccgctacttgaagcactattcatctatttaatgaataaaaggacaacttcctttctcatgtatttcgatctgaatatgtacgtttagatcaatatgcaggcacggggaggagctttgtattttcttgcatgtt

SEQ ID NO: 10507 - DNA, 142 bp, Gossypium hirsutum
  Clone ID: LIB3135-019-Q1-K1-G1
tcgcccacgcgttcgacagaattagcttgaattttacaaaatagcaccattgtgttccaatagaccgaaggaacacaatggtgctattttgtgaacagaattagcttgaatttcaaatgcaatcaaaggtgatatgttttgt

SEQ ID NO: 10508 - DNA, 361 bp, Gossypium hirsutum
  Clone ID: LIB3135-019-Q1-K1-G10
gatgtgcgtgcgggaacggcctggccggcccaatcactacgagctgccgaatggcggacggctgatcctatgcaacctacgtgcatcgcgtgcacggcagaaccgagaacaaacaatgctcatccgggcttgaaaccggtgctgatgtaaccgcaacgataaaagcagagcatcatgaaagcgacattggagctgggttggaatgtatgaccactaatccaatggcatgggaaggttcagttaacccatgggtgaagccaatggaacaagctcctaagggtctccttgctatagggattacaacacataacgttgctcatcgatttggtgggacaaggcaggatccggatcttgctgcgga

SEQ ID NO: 10509 - DNA, 261 bp, Gossypium hirsutum
  Clone ID: LIB3135-019-Q1-K1-G11
ccacgcgtccgcccacgcgttcgcccacgcgtccttatctggtggcgcatttgccagatacgtacctgtagggcgtcgtttatctgacgatggcaacttggaaaaatttggtatgaccaaaaatgagttgtgtggagctcatatacttgcaagactgccggtggcggccctacatgctctaacgcaacgctgtatgaaaggaagacatgcaaaaggggggggagacacaggcaacaaaagcggaagcaacttaggaggagg

SEQ ID NO: 10510 - DNA, 326 bp, Gossypium hirsutum
  Clone ID: LIB3135-019-Q1-K1-G12
agagaaaacaaatttgaatcctagtgaagttggggatattgttgtgggaacggtcttggcgccaggatctcaacgagctagcgaatgtcggatggctgcattctatgctggcttccctgaaactgtgcctgttagaactgtgaacaggcaatgctcatccgggcttcaagcagttgctgatgtagccgcagcgataaaagcagggttttatgaaattggcattggagctgggttggaatctatgaccactaatccaatggcatgggaaggttcagttaacccatgggtgaagcaaatggagcaagctcagaattgtctccttgcta

SEQ ID NO: 10511 - DNA, 138 bp, Gossypium hirsutum
  Clone ID: LIB3135-019-Q1-K1-G3
gccatttgattattttggatcatcttgtttatgcgaaatattcttctttttttggtttccactctttgccataaaatgaggcttcaagaacaaaaaaaaaaaaaataatgattgtataaatcaaaaactaaaatgggg

SEQ ID NO: 10512 - DNA, 392 bp, Gossypium hirsutum
  Clone ID: LIB3135-019-Q1-K1-G4
cccacgcgtccgcgggaagacaacaaattcgagaaccttaacttcaatatgttaaacttggactccaagattggagataatgtaagcaaaagctcattccgaaatggtacctacaatataaatgctgtttaccagaaaaataatagcaatagcctgggaaacctggctggcaacaaatatagcggcaataatcatagcagcaaatatgtcaataataacagcagcaccagcaataacaacagcaacgagaacagtgcaaacaatgctgttgacaaacggttcaagacattgcctccagctgagacactcccgagaaatgaggtgcttggaggatacatttttggtttgtacaatgatacaatgcaggaagatctaaagcggagctattttgt

SEQ ID NO: 10513 - DNA, 234 bp, Gossypium hirsutum
  Clone ID: LIB3135-019-Q1-K1-G5
agaatatctcgacttcatctcattccacaaagttgccaatggcatcgattggcgccgccgcaagagcagttctccgatcaagttctgctcgcaacgctgcggctcggctcgccccacaatctaaagctgcaccatcgcagtttcgtgtctcctccaggattcctctttccaactgcatttgcaggtgtccagttgaagcgagtttctgcttggaatcgatgctgccgaatactc

SEQ ID NO: 10514 - DNA, 278 bp, Gossypium hirsutum
  Clone ID: LIB3135-019-Q1-K1-G7
tcgcccacgcgttcgcccacgcgtccgggaagaagagacggtagaaggagcagagcagatgttgtggaggagtatcttccggaccacaatgagaccatctctggcgttcttgacaggtttgccgccatgggtattgacacccctggagtcgttgccctcctaggatctcacagtgtcggcagaactcactgtgtgaagctggtgcatcgtttgtacccagaggttgaccctgccctcaaccccgaccatgttccacacatacttcataaatgccctga

SEQ ID NO: 10515 - DNA, 196 bp, Gossypium hirsutum
  Clone ID: LIB3135-019-Q1-K1-G8
gcgcccacgcgttcgctggaagacaacaaattttagaaccttaactttaatatgttaaactcggactccaagattggagataatgtaagcaaaagctcattccgaaatggtacctacaatgtaaatgctgtttaccagaaaaataatagcaatagcctgtgaaacctggctggcaacaaatataggggcaataatc

SEQ ID NO: 10516 - DNA, 332 bp, Gossypium hirsutum
  Clone ID: LIB3135-019-Q1-K1-G9
cccacgcgtgcgcccaatcgtgcgtttttggctgagcatataccacatacctaccggcggggtctcattgcctgcggaagtccactggccataacccggcctgacccaagatgaccttgcaggccgagatactgagcggtacatcatagaatgactgctctctgcttttatgcatctccgcgtgggcattggacatgccctctatcatctagccctggtaatatcagggcaaggggtgtcaagggcgactccgccatcgcaatattttcaaaagcggcggttgcctataaatagactaccctacttactcgtatatacatccgcagacatct

SEQ ID NO: 10517 - DNA, 285 bp, Gossypium hirsutum
  Clone ID: LIB3135-019-Q1-K1-H1
cccacgcgtccgcccacgcgtccgcccacgcgtccgcccacgcgtccgcccacgcgtccggtgccttgtacgtagtaacagtagcgggaaagagagaagcctcaccgccgctgccgcagccaccatgggtcgtatgcacagtcgcggtaagggtatttcagcctcagctctgccttacaagaggaccccgccaagctggctcaagatctcgtctcaagatgttgaggaaaacatttgcaagtttgcaaagaagggcttgaccccatctcagattgggggtcattc

SEQ ID NO: 10518 - DNA, 418 bp, Gossypium hirsutum
  Clone ID: LIB3135-019-Q1-K1-H10
ggggggtaactcacctcgtgcttattgcacgttgcttcgtcgccgttgtgccaaagactgcatctttgcaccttatttcccttccgacgatccgcacaaattggccatcgatcacaaggttttgggtgccaccaatgtcagcaaaacgttacaggttcattaacaaccccctcatctaatacgttcattaacattttgggtaaattgcaatagtagccacccaactattagtaatttctttgttggtcactcaactatttagttttgtcttttttgatcacccaactatcttggattggaacttacattgttgggtgtttctattttttagttagtgatgacaaaaaagaagaagacaaaattgaataggtgagggctattttgcaactttttatggttgggcgaccaaaaaaagata

SEQ ID NO: 10519 - DNA, 445 bp, Gossypium hirsutum
  Clone ID: LIB3135-019-Q1-K1-H12
cttcgattatattccttaaaaccatgggaggaaactcaccttgtgcttcttgcaagttgcttcgtcgccgttgtgccaaagactgcatctttgcaccttatttcccttccgacgatccccacaaattcgccatcgttcacaaggtttttggtgccagcaatgtcagcaaaacgttacaggttcattaacaaccccctcatctaatacgttcattaacattttgggtaaattgcaatagtagccacccaactattagtaatttcttttttggtcactcaactatttagttttgtcttttttgatcacccaactatcttggattgtaacttagattgttgggtgtttctattttttagttagtgatgacaaaaaagaagaagacaaaattgaatagttgagggctattttgcaactttttatggttgggcgaccaaaaaaagatact

SEQ ID NO: 10520 - DNA, 233 bp, Gossypium hirsutum
  Clone ID: LIB3135-019-Q1-K1-H2
ctacgcgttcgggtggggctgatgcaaccgaaagagtgcttggtgccccagcattggctggcttacttcagacactggtgtttacaggtacgaaacgggcaaaaaaaaaggccgcatcacttgctagagtgtttcagaggtgcgagaaagcatacttgcattttggtggattgggtgtttgatattcatttaacaggcaactcaactcttcctaaaagggatccacgattcac

SEQ ID NO: 10521 - DNA, 239 bp, Gossypium hirsutum
  Clone ID: LIB3135-019-Q1-K1-H4
gcttatacaccggctaagagagaggagcctgtacccgtgcgaccaggctctgaacactcggagaaggaagaggccgctccaaatgcaccagtttatacaactcctaagaaagagatggctgagcccgaaccacctgtttttgaacccgcaaagaaagaaaagccatgtcctaagccaccagctggtacaccaccaaagaaagagaagcctgagcccaaaccaccagtgtatggaccacc

SEQ ID NO: 10522 - DNA, 257 bp, Gossypium hirsutum
  Clone ID: LIB3135-019-Q1-K1-H5
ctcctttcttaggtggttgacaagccaagatcaagttctctactttaaacacctaggaaatgcatcacccatctctactttgaaatggcaacgtccttttcttcctctacccttttcaggcccaatcttaattcttccaagtctttcctcactcattcagattgtgcccaggagggaatctgtcgcgtgaagtgtcattacatcaatgttagtgcgcactcgaggagcttggctgcgaactacgccaggattcgcca

SEQ ID NO: 10523 - DNA, 110 bp, Gossypium hirsutum
  Clone ID: LIB3135-019-Q1-K1-H6
aaaccttaggaactaagctcaaagagaaggcaggtgaaaagacggaaataagtcctcaataagctgatgacttttcaaaccgacccgggatggaagtggggctcaaagca

SEQ ID NO: 10524 - DNA, 178 bp, Gossypium hirsutum
  Clone ID: LIB3135-019-Q1-K1-H7
acgaccacgcgtacggctctgtatattgaaatttatttactcgaatctctctttagccaaaaaagatgcagatcttcgtaaagactttaaccggctagacgatcactcttgaggtcgagagctccgacacgatcgacaacgtgaagaccaaaaaccaagagaaggttggcataccttc

SEQ ID NO: 10525 - DNA, 304 bp, Gossypium hirsutum
  Clone ID: LIB3135-019-Q1-K1-H8
ttgtgggtgctgtacactgtatctcctagccatcacacgtggatgccgatgtcgccgcaccaggtgtaccgaagaagagaacgttcaagaagttcagtttcagaggtgtccatctcgatgctctctcggatatgtccactgatgaactcgtcaagctcttttccgcccgtgcacgccgaaggtttcagagaggtctaaagaggaagccaatggctctgataaaaaaattacgcaaggcttaacgtgaggcgccacctggtgagaaacccgagccagttaggacacaaccttcgcaacatgatta

SEQ ID NO: 10526 - DNA, 369 bp, Gossypium hirsutum
  Clone ID: LIB3135-019-Q1-K1-H9
cagtctatggtttcagtgacaagggtggtcttctttctttccctcaaagggacgatgcattcgagatgaccaagccttatagcagcaagaccggtgcaatcatcgattccgaagttagagagtgggtaggcaaggcatacaaccgaacagtgcagctgatagaggagcacaaggaacacgtagctcagattgcagaattgcttctagagaaagaggtccttcaccaaaaagacttggtccgagtacttggtgaacgcccatttaagtcgagtgaacccactaattatgacaggcttaagaaagggttgcaagaagaagataaatcatgcaaggacacatcaacagagagcaagactgtggatgataatg

SEQ ID NO: 10527 - DNA, 214 bp, Gossypium hirsutum
  Clone ID: LIB3135-020-Q1-K1-A1
atactgcgttctcctgaaagcctgacagggaggtgcgagggtctgaggatcagaaagagcctggccttcacccagagggatatgggacatcctaactataactcctccacttatatatcgaacttaagaggacatgtccgaggaggtaccccactgtggccaggactagccatagagacatattgtggtgcgctatatgtgatgaaaactctaa

SEQ ID NO: 10528 - DNA, 101 bp, Gossypium hirsutum
  unsure (1)..(101): unsure at all n locations; Clone ID: LIB3135-020-Q1-K1-A10
attgcctgctnccagataaggtgcangaattcaacactgnacatcaatatagggtctaggggcacactaagggatcggaatcataatacttaaacttattt

SEQ ID NO: 10529 - DNA, 192 bp, Gossypium hirsutum
  Clone ID: LIB3135-020-Q1-K1-A11
gttaaaaaaaataaaaagaaacaaaaaaaaaaaaaaacaaactgggcagccacctcaaaagctggcgacttagaaaccctgggatgccacaaacatacatctattattgcttcaccttaattcatttcaccaaccttccaattacaccgacccaacttggaaaaccctaacgacaccaaactcattcgcctt

SEQ ID NO: 10530 - DNA, 354 bp, Gossypium hirsutum
  unsure (1)..(354): unsure at all n locations; Clone ID: LIB3135-020-Q1-K1-A2
gcgcaccactgctgaacgggaaattgtccgtgacatgaaagagaagcttgcttatgttgccctggactatgagcaggaactggagactgccaaaagcatctcatctgttgagaagaactatgagttgtctgacggacaagtcattactattggagctgagagattccgatgcccggaagtcctcttccagccatctttcatcgggatggaagctgctggaatccatgaaactacctacaactctatcatgaagtgcgatgtggatatcangaaggatctctacggtaacattgtgctcagtgngggttcaaccatgttccctggtattgcngaccgcatgagcaaggagatcac

SEQ ID NO: 10531 - DNA, 167 bp, Gossypium hirsutum
  Clone ID: LIB3135-020-Q1-K1-A3
tgggctgtgcaacttaatttgtggactttggtctacgtactgataccattggctgcattagacttacaggatgcttatgtggtattcttggctaacgatcaactcactaagctggatctactaatgggcttatttcaaattcccaaagttttgatactatctgatgg

SEQ ID NO: 10532 - DNA, 417 bp, Gossypium hirsutum
  unsure (1)..(417): unsure at all n locations; Clone ID: LIB3135-020-Q1-K1-A4
cccacgcgtccgcccacgcgtccgcgacttctctggattgtccctcttttctcccttcacattgggaacgagtttgggtagccatggcaaagcaccatcctgatttgatcatgtgccggaaacagccggggattgcaataggacgattatgtgagaagtgtgatggcaagtgtgtaatctgtgactcttatgtccgtccttgcacgctcgtgcgagtttgcgatgaatgcaactatgggtcgtttcaaggtaggtgtgttatctgtggaggggtggggatatctgatgcatattactgtaaggagtgtactcagcaagagaaagatcgcgatggttgtccaaaaattgttaatctcggtagtgctaaaacggacttattctatgaaacgtaaaaatatggntttaagaaaagatgat

SEQ ID NO: 10533 - DNA, 348 bp, Gossypium hirsutum
  Clone ID: LIB3135-020-Q1-K1-A5
gcggtcacaccatttcagagagttgcgtgttggtgattatcttgctgtgaagggtcccaaggggcggttcaggtatcaacctggtcaagttagagcatttgggatgattgctggaggctctggcattactccaatgttccaagtagccagagccatattggagaacccaaaagacatgacaaacgtacaccttatttatgccaatgttacatatgaggacattcttttgaaggaagagttggatagccttgttgccaagtaccctggtcgcttcaaagtctactatgttttgaaccagcctcctgaagtctggaatggaggtgccggctttgtgtcaaaggaaatgat

SEQ ID NO: 10534 - DNA, 283 bp, Gossypium hirsutum
  Clone ID: LIB3135-020-Q1-K1-A7
agcctgcgttctactgaaagccggacaggtgggcctggcatgcaagagaatctcgctgtatgtggccttggcatgagcaggaactgcatactgccataactccgctcatctgttgataagacctatgagtagactgacggacaagtacttactattggagctgacagactccgatgaccggaaggcctgctacatgcagctatcattgggatggaagctgttggtatccatgacactacctacagctttatcatgacgtgcgatgtggatatcaggaaggatc

SEQ ID NO: 10535 - DNA, 383 bp, Gossypium hirsutum
  Clone ID: LIB3135-020-Q1-K1-A9
cccacgcgtccgatggaaaggaagatgttacagtggtgagagtctccagttgagcttcaccgagtagttccggacctctgcgtttgctgagggttttctttctcacggaacggaaggctgcaaattacacgcattccactgagatggctcatctttgcgtatgttaatgtggtgttgaaggttacgttttggtatcagtttcattttgtggttgagaattgagataggaagaaaactcaaaacttatctgataatcacagcctagtttgaaacagtaagagaagggacgaaatttgactcggattggatttccgttattaggaaaagaggcattgagttgaaatatcaaagattattgatttggggtgatgtcaaagtttact

SEQ ID NO: 10536 - DNA, 398 bp, Gossypium hirsutum
  Clone ID: LIB3135-020-Q1-K1-B1
acatgcgtccgcatacgcggtcggagagatacaatgaggggactccaaaaaacgaggacagggctgcactttcggaagctagagtacaaggtattgccattaatgatgttattcctattgatcaagacaatggaagtttgctggctcgaaagatgatgcggcgtgaatatagttcctggaatttccaacattttaatgaagacaatgacagctttcctgccttagaacaagcaccgcaagttactgagtttctccgtcaaaatattgaagttttggtttccggtacaatcaaagagatgcaagagtggcgtacacctaaggattccggctgggatcaattgaaaaagtggaaggccgcgctcaacttgggtaagacaattggtgttgaagtgaaagct

SEQ ID NO: 10537 - DNA, 314 bp, Gossypium hirsutum
  unsure (1)..(314): unsure at all n locations; Clone ID: LIB3135-020-Q1-K1-B11
cacgcgtacgcccacgcgtncgacgtaaggctacaactgataatccatggaagaatgggcagcttggtcctctctatttacggaacaatcaccaaacagcccaaccggcatcatcaggaccctaccatatgcttcaacaacagcaacagtttaaacaaagattacagctccaccaacagcaaatgaaacatcacgctgagatgacgtttaggaagagtaacagtgggattagcttgaactttgaaaactctagctgcacacctaccatgtcatcaactaagtcttttatttcttccttgagcatagatggtagt

SEQ ID NO: 10538 - DNA, 358 bp, Gossypium hirsutum
  Clone ID: LIB3135-020-Q1-K1-B2
cggaacgaccgagtcgaccgacgcgtacgctgcaatctgcacaatggttttcattttcatgggaatgcgttgtgatctattcggtagtcaggagtctacaagcttttctgtttttgagtgtaaattttagatactttgcccatttcctgacatgcatgcatgcatactttgtctttcttattaatttcttttgttttactgcttttggttaaaattagaacacaagtttcattattacaaccaaaaagtagcggcatcagttttgtttcggtttacgttaagatggtttagagggtcgcgtctgagtttgagacatggcattcatgttatctttttaaacctctatttactgacgatt

SEQ ID NO: 10539 - DNA, 413 bp, Gossypium hirsutum
  Clone ID: LIB3135-020-Q1-K1-B3
acggtacttcaacaaagggttggacaacaacaaggagatccaagagctgaaggttgaggttgagaggttctcatcctcattcgatatgcctggcttcaagatgtccgaaatgaagtacaaggattagatctaaataatcatacgatctaattgatgttattatcagcatctgccactttttgggttgcccccatttgatgtcttatgagtgaaaggaaaaagaaagggaaaagagaaggatgcaaatgccttccacgtacggttttaagcgtcttcatttactggtcaatttgatatgatctttgtcaaagttttgctgttctggctttataagaatttgcataaaacgtatgtactaaatttatgtattcttttttggtgctagaaaaagtttgagggtggggtggggggga

SEQ ID NO: 10540 - DNA, 264 bp, Gossypium hirsutum
  Clone ID: LIB3135-020-Q1-K1-B5
gtgagcctcgccttcttatcctcacagatcctaggaccgaccaccagcctatcaaggaagcaggtcttggaaatattcctaccattgctttttgtgacacagactcaccaatgcgatatgttgacattggtattcctgctaataacaagggaaagcacagcattggttgtcttttctggctgttagctaggatggttcttcagatgcgtggtacaattgctcctggacagaagtgggatgtgatggtggatctatttttctaca

SEQ ID NO: 10541 - DNA, 276 bp, Gossypium hirsutum
  Clone ID: LIB3135-020-Q1-K1-B6
cttacactgattttacctcggctccccccatgttttgcaggagctcaagctttaggggattgggcccttgtttgactgaaacgtggggtgatctcccgctcaaagaagacgattccgaggacatgctcggttacggactcttacgagatgctctaaccgtcagttgggcaccgttcgataactctacgacgaatgtcgcgctgatgcaagccggcaaccgcatgaatttctaccgcagacatcggtggaaaaagtggataccgacgcggagaggac

SEQ ID NO: 10542 - DNA, 286 bp, Gossypium hirsutum
  Clone ID: LIB3135-020-Q1-K1-B7
gcgaatgggacatggttcgtcatacggtgttggcgtcaagctaggactagtaagagctgagtgtgctgttgaccataacaacggaactggtgcactcttcttccgatttggagaaagatattaaaatgtgatttcgggtctaattctgctaaggtgggccgttacaggttccggttatggttgaactgttatttatcttagaaaatcttgttgagaagtatggaactaggcatgttcttgtgtcaaataaattttgtttcgattttgggctatataattttatctt

SEQ ID NO: 10543 - DNA, 440 bp, Gossypium hirsutum
  Clone ID: LIB3135-020-Q1-K1-B8
cggaacgaccgaggcgaccgatcaaattgttggctcaacttaacttgttcctttcagttcccaacgtagatcatttctctggctcaagtgggcctttgagctccccaagcaaccataagagctttcacacaagttggacgaattaggccaatctaaacaattctatttagccattttagctcaaccatcacctcattaattcaaggctattagaagacatcaaatggctgtccattgacgtctccaaagctaggaatcttcaaggaagcttcaagggacgttctaggaagctacatgaaattttcaattcatttgttttgaaaataagctgactttttagctgctcaagtgtccattcggctagcctaagaatttaactataaatagtttgctttgtaaattgttttggcgttagacaatatacttttaaactttatatg

SEQ ID NO: 10544 - DNA, 388 bp, Gossypium hirsutum
  unsure (1)..(388): unsure at all n locations; Clone ID: LIB3135-020-Q1-K1-C1
caggaaaccaaaccaaactagtgagccgcagcttctcttcttctgtatcccaaaatggttgcgtttaggtgtcatcaataccaagtggtgggcanaggtcttcctacagacgcagatgagcatcccaagatttaccgtatgaagctttgggccactaacgaagtccgtgccaaatccaagttttggtattttttgaggaagctgaagaaagtgaagaaaagcaatggacaagttttggccatcaatgagatctttgagaaaaaccctaccaagatcaagaactatggcatttggctgcgatatcaaagtcaaactggttatcacaatatgtacaaggaataccgagacacaaccctcaatggtgctgtagaacagatgacactgagat

SEQ ID NO: 10545 - DNA, 404 bp, Gossypium hirsutum
  Clone ID: LIB3135-020-Q1-K1-C6
acgattgaatcagtgaaagtaaagctgtctaaagaagatttgaaagaaattacagatgcgatcccgatccatgaggttgcagggggtacttatcctgaaggtttaaagcaattcacttggaaatatggcaatacaccaccaaacaagaggacctaggtttagaagcaaagcttcatgggtgttgggatgaatggatttcccaagaaactgcagccattgaaagattgatgagttactaaagtttggattgtcattaatggagggttcagtatttatgatgttgttgtgtcatattttgtatcgtgttctttttagttgtttgaaataattaagtgtaagtgtttactttgacgaatagagttgtagctattggttaatcaatgtatgttttaatggtctaatat

SEQ ID NO: 10546 - DNA, 487 bp, Gossypium hirsutum
  Clone ID: LIB3135-020-Q1-K1-C7
cggaacgaccgggccggccgggcgtgcgatcggaatcaatggatttggaaggatcgggcttttggttgcgagagttgctctcgaaagctgggatattgagctcgttgctgttaaccatcctttcatcaccactgaatacatgacctacatgtttaagtacgacagtgttcacggtcaatggaagcatcatgagcttaaggtgaaggactcaaagacccttctctttggtgaaaagcctgtcacagttttcggtatcagaaaccctgaagaaatcccatgggctgaggctggagctgagtatgttgttgagtctactggtgtttttactgacaaggacaaggctgctgctcacttgaagggtggcgcgaagaacgttatcatttctgctcccagtaaggatgctcccatgtttgttgtgggtgtcaatgagaaggaatataagcctgaccttaacattgtctccaatgctagttgcaccaccaactgt

SEQ ID NO: 10547 - DNA, 447 bp, Gossypium hirsutum
  unsure (1)..(447): unsure at all n locations; Clone ID: LIB3135-020-Q1-K1-C9
acacacaacatctagttttggctcaatttgacaaggngactcgtacaaagagcanatgtaaattcacacttaaggattgcatcatgcatataaacaataaagacattctctttaataaagcaacaggcgaatttgatttctgattttgttagataaaactgtaatcgccatcgtattgcagcacttgccttaaaagagcaagtcaaggggtgttattctgtgtttcgtaatttgtcttttaattattattagagtgaaaagttgattgaagggcatgggatatgctttatattaatgtcttccttaagacttgggttcgatggttgtcgtattttacataaaggaagagagcattttctgccttagaatgtatgactacttgagacacctttttgcacatctaaaaacttttgcaatggaatatgtaatttcatttataccatatac

SEQ ID NO: 10548 - DNA, 349 bp, Gossypium hirsutum
  unsure (1)..(349): unsure at all n locations; Clone ID: LIB3135-020-Q1-K1-D10
acggcagaatcgagtatatttattgcacccaaatcggaggatccttgctctgcggctgcgttgcaggcttactaatgttttccatcgcttccatctccgcattcaacttgttcaggctgtattcccccaccaagttcatgcacttgaaactctaatcataaattacggttnaaaaaaaaaaccactaattttaacacgatattacattaatacgcgaataagaagaggggaaaaggcactatttttgccccccaaagacatatcttgtccgacgaaccatgcggaaaacataaaaaaaaaaaaaaagggggcccccttttaagagatccaatttatattccgcgggttt

SEQ ID NO: 10549 - DNA, 206 bp, Gossypium hirsutum
  Clone ID: LIB3135-020-Q1-K1-D11
tacacaccaccgcccactcctgcgcccgctcttgcacctacctaccatgacaactgtgctttgggcaacataagcatgtgggacgcgacaactactaacactcttttgattagaggttgatctaacatgggatcaaactactagagatcctcaacactttcatctgcatcaccgacggcatcatactactaccactcaccttctcc

SEQ ID NO: 10550 - DNA, 240 bp, Gossypium hirsutum
  unsure (1)..(240): unsure at all n locations; Clone ID: LIB3135-020-Q1-K1-D12
cgattctatattaaatcacctgcttaagtatcgagaccacagcccanaatggaaaaaacttctcaatattattattatgttagtttaaacgtttgtttggaactgttacatattgagggatggttcgaaatactatatttactcgttctgtttattgaccagctcccggtgccccattttcaatgtaatatctaaactcgtcctctatggcatgtacccagtaaaactaccctttctttt

SEQ ID NO: 10551 - DNA, 291 bp, Gossypium hirsutum
  unsure (1)..(291): unsure at all n locations; Clone ID: LIB3135-020-Q1-K1-D2
actttcttgtttatggtactctatttgcaagncaagtgggtatttgcgtatgttggtgttgtagttgaatcagagctggtnncttgaaccattaaaacgaagtaaaaatttagttcacggactgaaaagaattgctttctctatgcttctgttttacgggttcttcagtgggattttaatctgggtctcagctgcagactggggttatgcagctgctgataaatggaaaagctgggcatttgttatacatattgggagcacttccactttgttcatgtagattatgctttc

SEQ ID NO: 10552 - DNA, 334 bp, Gossypium hirsutum
  unsure (1)..(334): unsure at all n locations; Clone ID: LIB3135-020-Q1-K1-D3
ccacgcgtncgctaactcttaagccaagaaagcaagccataaggttntgagaaaagatcaaaatggattcaggaagatgagcttccacagccctccttttagccctcaacattctcttcttttccctagtcagtgctaattgtggatcttgttcttcttctggctctaacccaaggccaactcccacccctactccatctgcacgaggtaggtgccctagggatgccctcaaattaggtgtatgtgccaatgtgcttaacttagtcaatgtcaccgttggttcacccccggtgatgccatgttgttcccttctcaacggtcttgtggacctcga

SEQ ID NO: 10553 - DNA, 195 bp, Gossypium hirsutum
  Clone ID: LIB3135-020-Q1-K1-D4
atgacagaacttattatgaacctcaaagtactctaagcagctcaggccgaaatgcggaaagttgtagggtatagaatagtgttcttagaaactgatctgcctcaccttgattacatgaaagctgtcattatagagacctggcgattacatcctcctgcaccggtcttacttggtaggggatctatggaagacctt

SEQ ID NO: 10554 - DNA, 242 bp, Gossypium hirsutum
  Clone ID: LIB3135-020-Q1-K1-D8
attgtgtctttatcttcagggctgcagctttgttttcaatcagagttcagatcaaaatgagcataaaacacatgaagaaagtccaaatttgtagcagattaattggttgttccaagctgttttatgttttttcccctcaaagtttgttgaacaaaaatggttggttatacgtctgctatttcatctgaataattagtgcttcattgcttgaatttctttcagctgacaaaatgggtgggttt

SEQ ID NO: 10555 - DNA, 306 bp, Gossypium hirsutum
  Clone ID: LIB3135-020-Q1-K1-D9
cccacgcgtccgcccacgcgtccgtgttgctgccacaaatgaggctaaagatgatgctaacgtggatgaatctgatgttgtagtcgtccagactgctattagagggttcttggcacgcaaagagctaggaaagcttaagaacttagtaaagttgcaagctgccttacgggggcacttggttcgaaggcatgctgtggggacattacggtgcattcaagccattgttaaaatgcaaatgctagtccgtgcccatcatgctcgtttgtctcaagaattgtcctattccgaaaaagatgctgcttctac

SEQ ID NO: 10556 - DNA, 377 bp, Gossypium hirsutum
  Clone ID: LIB3135-020-Q1-K1-E10
cccacgcgtccgcccacgcgtccgcttcaactatcaaaacaataaaaaaagcttgtgtacaggagcgctcaagtttttatcaatccacagtttgaatttgaattgaacaaatcaatattaagataagagaaatggctcgctctctctccaacgctaagcttttctctacttttgttgtcgatggaatctctaacgttatctccagacgaggatatgcggcggcatcacaaggaattgtgtcgagtggaataagaagaggagcgggaaggagcgctgctacggtggccaagaaaacaggggaagagatgtctcgcggagctaaagagaaggtttcgtgggttcccgaccctgttaccggatgctacaagacccgagaa

SEQ ID NO: 10557 - DNA, 453 bp, Gossypium hirsutum
  Clone ID: LIB3135-020-Q1-K1-E11
tacaaatcacccccacctccagtgaaggctccagcacctacctaccattacaactggccctccgtgaccatcaccgagcgccggctcccccatactactacaaatctcccccaccaccagcccactctccctcaccaccatactactacaaatctccacctcctccatctccctcaccacctcctccatactactaccactcacctcccccacctgtgaaatcacctccacctgcagtctacatctacgcttctcctccaccaccaacaccctactagatctaaaaagatcgaccacacaccgttcatgttgtagtttcgccagcaaaataaaggaaggtgccaaggaggaagggagatttggacatcaaagcagttccttttcaagtccatggaataagggtctaagcattacattggagagatacaattttgataattcaagcctacatat

SEQ ID NO: 10558 - DNA, 353 bp, Gossypium hirsutum
  Clone ID: LIB3135-020-Q1-K1-E12
cccacgcgtccgcgaatgttgaaaaaagttggggcattttcaaaggatccgattgctgatacgggtgtaaccgtttgtggtgtgtctgagctcgatgcttgctccgatgcttgtgctcgtaccgtttgtgttaaccaacatcaggtacccaactggaatgacattggccttcgaaggtgtcaaagtgaatgtcttagactatctgcttcccattcttcttagaacattggcttttaattacagtgactgccatatcagtttcaaaacttgggtctctcaatggtgtgatccttttagcagtcattacgtgattggtgaatttgtttttgtgttttgacaattagtggttaaaa

SEQ ID NO: 10559 - DNA, 204 bp, Gossypium hirsutum
  Clone ID: LIB3135-020-Q1-K1-E2
ccgccgcgttataactagaaatacttgtcttcaatggaacagctctgaccgagatcaataaatttaataggcttctcgttcagtttggaaaaggaggcgaacaactctgaccactccttacgtgacaacaaatacatacacggcgtgtcaagacaccttctcttttccgtgatgaaccactaaaaattaacggagattcagggc

SEQ ID NO: 10560 - DNA, 194 bp, Gossypium hirsutum
  Clone ID: LIB3135-020-Q1-K1-E3
cccggtcgaccacgcgtccgatctcttcttgctgtgtactaggaaaggcgcttatgctctaatcaagtaagcactctaaaagggagctttgaaagcggtcaggagtgctccatatccaactataccttcgactctcaactcatacttaaaaaaaaaatgccatctctgaggtgtagatgtctgaccgcctattt

SEQ ID NO: 10561 - DNA, 283 bp, Gossypium hirsutum
  unsure (1)..(283): unsure at all n locations; Clone ID: LIB3135-020-Q1-K1-E4
agcctgctgaggagaaaaaggcctacaatgccccanctgagaaaataccaagagccagcaagaaacttcctaaggaagcctcgaacaagaataagaatcgcatcatgaagagcattgaaacctacaagaactacatctttgaggtgctgaagcacgtccattctgatattggcattttcagcaaagtcatgggtattatgaacagcttcatcaacgacatcttctagaagctggctcaagaatctttgaggctcgcacgctttaacaagaagcccaccatcac

SEQ ID NO: 10562 - DNA, 337 bp, Gossypium hirsutum
  unsure (1)..(337): unsure at all n locations; Clone ID: LIB3135-020-Q1-K1-E7
atactgtnacttgcaagagaaagcacaatgttggatatgattcgttatgtggccttaaagtgatgatgatgatgactgtaacttgttttataatatggtttttaagattgttgctggtagaattctgatattcctctttctggcaatttgttgttggatgaaagtgaagggtaacacttgtctcccattgcggtgtatatatatttttttttttttggacccgcctgacaaataaattatttttggtttggggtagaatttaaataaagttttgttgtcttgtaacatttataatcttttcttcttttatttattttaatttttttttttttttatt

SEQ ID NO: 10563 - DNA, 196 bp, Gossypium hirsutum
  unsure (1)..(196): unsure at all n locations; Clone ID: LIB3135-020-Q1-K1-E8
accgaccggatcaccggtcgaccacgcgtatcgaccacgcaaccccccacacctcatttcagactaccgcanacctccattcacctcagtggatttcgttccctttaagccgctttctacaccatctccatcaatcccttccttcacttttcacataaaggcacactattcttatatttaaatcatttcaccatat

SEQ ID NO: 10564 - DNA, 330 bp, Gossypium hirsutum
  Clone ID: LIB3135-020-Q1-K1-E9
cgagtttgctgctgcacttaagacagtgttccaacgatacgcgacttacttggatgcatttggtcctaacgaaacctacttgcgaaagaaggtagagaatgagttgggatcaaagatgatctacctaaagatgagatgtagtggcctaggttctgagtggggaaagattactgttcttggaacctcgggactctctggatcttatgtggaacaaagagcttagcagtaaattggtgagacatttcatgtgaactcttttttttggtctggtttagatcatgtttatgaatagtaagagacaagttggtggtggtcttctagaaaaccttg

SEQ ID NO: 10565 - DNA, 383 bp, Gossypium hirsutum
  unsure (1)..(383): unsure at all n locations; Clone ID: LIB3135-020-Q1-K1-F1
cggttcgacccacgcgntgcgccacgcgtnncgccacgcgtncgtgatccataccaccctgaccagaccgctgaactcctggcaactttctgtgaacgttgcaaggaggacccaaaccactggactaaaatatctgatggagggcttaagaggatttatgaaaggtatacatggaaaatttattctgaaaggctgatgacattggctggagtatatggtttctggaagtacgtttcaaaactcgagagacgtgagacccgaagatatcttgaaatngtctacatcctcaagttccgtgaattggtaaaatctgttcccttggccagtgatgattaaagcttaatccctgcgtgcgctcgtaaggtactggtagtatacataca

SEQ ID NO: 10566 - DNA, 231 bp, Gossypium hirsutum
  Clone ID: LIB3135-020-Q1-K1-F10
gtggaactctggccaaggaaactagccaccgctaagttcttgcttgatgacatgaaagaggtgaaaaaggccattcccgatacaacgattaatgatgtcctgtttgggatagtgtcatgtggactatcaagatacttggatcacagaacaccaaatgccttgcatgaaggccttcgtatgacaggtgtagctatggttaatttaagagcaaaaccagggttgcaggaaata

SEQ ID NO: 10567 - DNA, 300 bp, Gossypium hirsutum
  Clone ID: LIB3135-020-Q1-K1-F11
atcagttgcagtgccattagtagagccctgaccaaagaatccaggtttacttttggcatagcgtaaatgttaacaaacggcccttgtatgctaaattttgtggtgcttcagagaggtgctggagagtgtctactagtgttgcttttatcgttcccatttttgttttccttcttttaaaaagggtcatagtctgatagatagaagtccatataaatacctcatagtttttgctttcccgcttttaatattttgttgcgttatattaatagttcttttcccctttaaaaaaaaaaaaacaat

SEQ ID NO: 10568 - DNA, 89 bp, Gossypium hirsutum
  Clone ID: LIB3135-020-Q1-K1-F12
aacaaaaatatcaacacatggaatcttgataaatttaatgatctgaccaaacaatccatatatcctacaaattaatacccaacaaagct

SEQ ID NO: 10569 - DNA, 424 bp, Gossypium hirsutum
  unsure (1)..(424): unsure at all n locations; Clone ID: LIB3135-020-Q1-K1-F3
tccgcccatcgtctgcttttgccaaaagacagtttaagactccactttgaaaaccggaaatgtgggacgagtagcatcatttcgagtccaaggccgacnccggcgcttccaaaacctaccctcagcaggccggcaccatccgcaagaacggttacatcgtcatcaaaaatcgcccctgcaaggttgttgaagtttccacctccaagaccgggaagcatggtcatgcaaagtgtcactttgttggaatcgatatcttcactgccaagaagctcgaagatattgttccttcttcccacaattgtgatgttccgcatgtcaatcgtactgactaccagttgattgacatttctgaggatggatttgtgagtttgctgactgatagtggagacactaaggatgatctgaggctcccaactgatgagaa

SEQ ID NO: 10570 - DNA, 377 bp, Gossypium hirsutum
  unsure (1)..(377): unsure at all n locations; Clone ID: LIB3135-020-Q1-K1-F5
nccacgcgtacggcggtgaggaactggtggctgacagtcacttgttaccagccatggcagttgggaggagggtcagtgatttgatcagagaatacccacggtccgatcccaatccaaccgctgcgcttgtcttcggtggtacggttttggatatcaaaccatcaccggttgttgcagcgtttagttcccggggacccaatatggtgacgccacagatcttgaaaccggacgtgattggacctggtgtcaacatattagctgcttggtcagagggtattggtcccactggtttggccaaggactcgaggaagaccatgttcaacatcatgtcaggtacatcaatgttatgcccacacatcagtgggctagcagcgttg

SEQ ID NO: 10571 - DNA, 332 bp, Gossypium hirsutum
  Clone ID: LIB3135-020-Q1-K1-F6
atgcctaggggatctgatgttggtggggctccgactcatacatgtgctctagccacggtatgggtggtagcagatacatgggtcgtgggggtggttctgggtcatactactgatattatagagactgtgaggcttctgtatggtgtggagcatttgaagctttggtttttgtacccatggtattggatagaagtatgccaaatgctatagccttcatacattgtagtacaaggtcttttggcataagtttaatgtggaagaggcagcatgctggttcaaactgtttctagtttcacaaacaggatacttgtgattgtgagtattcaagttta

SEQ ID NO: 10572 - DNA, 311 bp, Gossypium hirsutum
  unsure (1)..(311): unsure at all n locations; Clone ID: LIB3135-020-Q1-K1-F7
agagctccatgctgtgagagaatgngagtgaagaaaggtccttggactccggangaagatcagattctcatcaattacattaatctctacggccatggcaactggcgagcactcccaaaacaagctggtttactgaggtgtggaaagagttgtaggctacgctggactaactatttgaggccagacatcaaaagggggaatttcagcagggaagaagaggataccataatcaacttacatgaaatgctcggtaatagatggtcggctattgcggcgagattaccgggacgaacagaacaacaaattaaaaa

SEQ ID NO: 10573 - DNA, 483 bp, Gossypium hirsutum
  unsure (1)..(483): unsure at all n locations; Clone ID: LIB3135-020-Q1-K1-F8
cccacgcgtccgttgacttctaccatttaaaaagtcgcaagggaatgagtcagctggaattggaggatgaggtccaagatgatttgaaacgtgcaactggagagtttgtcaaggatgcagatgatgcaaataagcttaatcgcattcttcaactgactggattgagtgacccagtatatgctgaagcatatgtgactgtccatcactatgatattgttcttgatgtcactgttatcaatcgaaccaaggaaactcttcagaatttgtgcttggagttggcaaccatgggtgatctgaaacttgttgagcgtccacaaaactataccctcgctcctgaatctatcaagcaaataaaggctaacatcaaggtgtcttcaactgagacttgtgtcatatttggcaatatncgttacgagacttcaaatgtgctcgaaagaacttgttgtgntcttaatgacattcatattgatataatggactaca

SEQ ID NO: 10574 - DNA, 110 bp, Gossypium hirsutum
  Clone ID: LIB3135-020-Q1-K1-F9
cccacgcgtccgaaggcatcctgcactctactactcgccaaaggtattgaaagaagacacttgatttgatcctctccaaataacactcgaataatatcatgttttcaggt

SEQ ID NO: 10575 - DNA, 374 bp, Gossypium hirsutum
  Clone ID: LIB3135-020-Q1-K1-G1
ctcgcctaaatgaaatctgatgcttgagatgcccacatgtgaagggcagagaagatggtttagattatatggatgttgaagcactgaagaagctaaacaagaacaagaagttggtcaaaaagcttgccaagaagtatcatgcttttttggcttctgaatctgttatcaagcagatccctcgtctcctgggtcctggtctcaacaaagccgggaaattcccaacccttgttactcaccaggaatcgctagagtccaaagtgaatgagaccaaggcgatggttaagttccagctgaagaaggttctttgcatgggagttgccgttgggaatgttgcgatggaggagaagcacatcttcctaaatgtgcaaatgagc

SEQ ID NO: 10576 - DNA, 147 bp, Gossypium hirsutum
  Clone ID: LIB3135-020-Q1-K1-G10
cccacgcgtccgttttaattggtgctatttgctttcaagtttacccaattgtatgagaaggggtatgggttttcgaatgatttggggcaacccattcggttttttcagtattgcagaaaatatgaatcagatatgaatgttcattaa

SEQ ID NO: 10577 - DNA, 391 bp, Gossypium hirsutum
  Clone ID: LIB3135-020-Q1-K1-G11
attagcggttcggccgacgcgtccgcccacgcgtccggttggccaacatccgaaagctaaagacagtccccagcctcaggggagaccgtcacatttgtggatggggcagaatcttcacgtgtgccgcctgctaatcaagtacctacccgggggaacgaagctggtccatcgaatcaacccccacaaggggtcccctatccgcatcaagaaaatcaaattatagggggggattcgatcctagcgatcgaacggcgccttttggagcacaaacacactccttctgaccacgagctctacatggctcgtattcaagccgaacatcttttcgaggtcaaggtcgagattatcaaactcatggctgttcttgaaccaacgggggattggatggggc

SEQ ID NO: 10578 - DNA, 267 bp, Gossypium hirsutum
  unsure (1)..(267): unsure at all n locations; Clone ID: LIB3135-020-Q1-K1-G4
ctgaacactctntatctcttgccacaactccgatatccgctttattttgtcctctttcatatgcggcatcgaaattgattgtgacaaaactgtccattggttttttccattttttaacagttatggaagtttgtcgactatttttaccaactgaatctaactctaaaatgtagctattaacaaatctccctatttctattccagatttactccctttgttatgcagnctgttattcctatctccccaaatggcccgtactgcaacac

SEQ ID NO: 10579 - DNA, 426 bp, Gossypium hirsutum
  unsure (1)..(426): unsure at all n locations; Clone ID: LIB3135-020-Q1-K1-G5
cccacgcgtncgtccactcgtccgccgggttcaagtcctcattgccccggaatacctagcgtggaaccccgacaccggggcagggaccataatagattcgggtacggctgtaacccgattcgtccagcccatttacaaggcaatccgagatgagtttgtgaagcatgtgaaaggtccatttactgccattggagtatttgacacatgctttgatgctacagcagaagctgaggcacctttaataacattacatttcgaagccttgtcgatgccattgccaatggaaaacagcttcttacacaccaatgccgggtctcgggcatgcttggccatagcaccggtccccaacaatgtgaacgccgccatgaatgtgatagccacattgcagcagcagaatcataggattctctttgatgtcatcaattc

SEQ ID NO: 10580 - DNA, 244 bp, Gossypium hirsutum
  unsure (1)..(244): unsure at all n locations; Clone ID: LIB3135-020-Q1-K1-G6
tgatagatcttgctgagctccatggtgacagaaggaggannacaatgacgtcgtgttcatgaagcttgtgagaaatggggcttctttcaggttgataaccatggagttgataagaagttaatggagaaggtgaaagagatggtgaatgattactatgatgagaatttgacagacaagttttatgaatcggagatgactaaaagtttgaacaagaatgagaaaatctncgacatggattgggaaa

SEQ ID NO: 10581 - DNA, 379 bp, Gossypium hirsutum
  Clone ID: LIB3135-020-Q1-K1-G7
cccacgcgtccgcccacgcgtccgataaaataaaaccttcagctcaaatccgaggtcctccgggtcatcaagaacccaaccacggtactggcaaagcaaacatgaacatgccaaagcaagtgacaaacacatcttcaccgaaaactccacgaagcaaccagtcacctcgaaaccatgatgctggtagacatctttttagttcattaacaagtacatggcctaagtccttccctactaccattgcaatgatgatgcaaccaccaactgctaccggaaacatgactcggtgccggcatttgagcattaacggacccgacgcatcgaggctgaactacacgagagaccagggagttgttagaaaggacataatgcaatggat

SEQ ID NO: 10582 - DNA, 430 bp, Gossypium hirsutum
  Clone ID: LIB3135-020-Q1-K1-G8
tgtttatagctttggagtagtgatgttagagatagtaacggcaagaaaaccgatagagcacgggaaatatatggtaagagaagtggcgacatcgatggataaatcgagaagtttatataatctccaagagattcttgatccaaccattggttcagatacagatacaataccccatgggttggaaaactttgtagatttagcaatgagatgtgttgaagaagcaagaactgataggcctacaatgggtgaagtagtgaaagagattgaaaacattatgcaagcagccggcttgaatccgaatgcggaatcagcttcgagttcggctacttatgaagatgcaaataagggaactcctcatcatccgtacgcttgtaaaatttggaccgaatttaatttggggtgaacccggttgagtgtcatttatattact

SEQ ID NO: 10583 - DNA, 357 bp, Gossypium hirsutum
  Clone ID: LIB3135-020-Q1-K1-G9
ggacatttgcaacaatggaaggggaagcctgagaacgtgctagctgaagatgatgacttcttcgaggctcttattaatgctccagtggagaagtttctgagagttgtggtgattaaggagatcaaaggtttctaatatggagtgcatctagagagtgctgtgagggaccgattggcagctgacgacaaatactaagaggaagaggaatgaagcctttgtaaaaagttgttgaattcttccagtctaaatattttaagaaggattcagtcatcacttaccatttttcagcaaatttagccactgctgagattgcattcacgacggatggaaaggaggaagcaaaaaatcaagtttaga

SEQ ID NO: 10584 - DNA, 344 bp, Gossypium hirsutum
  unsure (1)..(344): unsure at all n locations; Clone ID: LIB3135-020-Q1-K1-H10
ggcatgccgatcgctgctgctttgaagacgatacccgtatgaaccactatactagcaatgctgttttccgagtgaatagcaagaaagttttctctgctttatttacagcgattgattgctatcggatcgtaaatagagatttcgggactaaggatcaccataaaaacaaacattttgaaacattttctgtattgaaattcttttgtttataggtgaagctctaggttgttaaactcttgttaatttcattttctaattgacatgtaaggcatgtaagtattttgtttacacgctttctagtaatcgaaatttatgcaccttgttttgtctttgcnnnnnnaaaa

SEQ ID NO: 10585 - DNA, 398 bp, Gossypium hirsutum
  unsure (1)..(398): unsure at all n locations; Clone ID: LIB3135-020-Q1-K1-H12
ctgctggtttcaattacagggtcgcgttttgcccccgaggcgcacctcgtatagagatggtcggaagtaagagccaagaaaaataaagggatcatctcttggtctagttaatctgcgccttggaactaaaaaataaaaaagtcatttggtcttccaaatgatatcaaacacgtggttctacttggtttattttacatatgttttgtttaataatattgngcagtttcaacagcacaagacgtcacaagttgctatcatctttcatcaaaatttccaactcataaatacccatataaaaaagttctttggcaaaaaagcaaacaacctacgacatccccacctggacgtaataaaaatatcttttttgtttttcaataaacaataaaatttttttttat

SEQ ID NO: 10586 - DNA, 388 bp, Gossypium hirsutum
  Clone ID: LIB3135-020-Q1-K1-H2
tctctttcactcacaaacaagcacctccaaatccaatggccgcggcagcttcggcgccaccaccatgcgcgcgccctaaaccttccatggcaccacctgaaacaaccccgataggccaccccgtcttcaccaggatccgcctagccaccccttcagacgttcctttcatgcacaaactaatccaccaaatggtcgactttgagcggctgacccacctttgctccgacaccgaatcttacctatcttccaaccttttcctctaccctccttttcattcattcacaatttttctactcgaacttttctcttcccccaatccttctcttctttcccctttaccaactttcacttccattgaaaagacatttaacttctacattcccttaaa

SEQ ID NO: 10587 - DNA, 419 bp, Gossypium hirsutum
  unsure (1)..(419): unsure at all n locations; Clone ID: LIB3135-020-Q1-K1-H5
gcgaccacgcgtncggcctttggtctcaacactcaagaccttgttgctctcgttggaggacacaccgtanggagttcagcttgccagctttttagctacagattatacaacttcaccaacggtggtccagaccccacagtcaactcagcattcgtgcctcaactgcaagcactttgcccacaaaacggtgacggctcaaggctcattgatttggacactggtagtggaaacaggttcgacacctccttcttcgccaacttgaggaatgttcggggaatactagagtccgatcaaaaattgtggactgatccctccaccaggacttttgtgcagcgcttcttgggtgagagaggctcgcggcctttgaactttaacgtggaatttgcaaggtccatggtgaagatgagcaacattggtgt

SEQ ID NO: 10588 - DNA, 401 bp, Gossypium hirsutum
  Clone ID: LIB3135-020-Q1-K1-H6
atctgctgggatagattgggtgcaagccacaaaaccagcagcgttttctgcttttccgatgatgggggctatgctcggtgacctgccgtcatttgacccccacaacttcagccaacttcgtccctccgatccttctaatccttctaaagtggtacctaccacctaccgccccacacatagacggacttcttcacctcctgatcaagttataactaccgcagccaagaatatacttattagaaatttttaccagcgtgccgaggagaagttgagaccgaagagagctgctactgaacacccaacaccggaacatggatgcaagcaacctatggcatccaccacatggtcataatgagattttcttttggcttttcaatgctcatctaaatgtatcttctcat

SEQ ID NO: 10589 - DNA, 332 bp, Gossypium hirsutum
  unsure (1)..(332): unsure at all n locations; Clone ID: LIB3135-020-Q1-K1-H9
gaatgcagctgaattgggtcttaaattcttcttgaagatatttgagattgcgccatcgtccaagaaactattctcattcttgagagactcaaatgttccattggagcaaaacacanagctgaagccccatgccatgtctgtctttgtcatgacatgtgaatctgcagttcaactgcgtaaagcaggcaaagttacagtgagggaatcaaatttgaagaaattaggagctacccattttaagtatggggtagttgatgaacattttgaggtaacaaaatatgctcttttggagaccataaaagaagctagtccagatatgtggtcagatgaga

SEQ ID NO: 10590 - DNA, 302 bp, Gossypium hirsutum
  Clone ID: LIB3135-021-Q1-K1-A1
ggaaaggtgtataatgtaacccaattcttggaggaccatcctggtggagatgaagctttgcttgctgcttgtggtaaagatgcgaccaatgattttgaagacgtatgtcacagtgatgatgcaagagagcagatgcagaagttctatattggtgaggtggatgccaccaccattcccgcacgatggatgtacaaagcacagacgttaaccgcggttacttatcaagaggagcctggctttctgtctaagattatacagatcctggtacccctcttgatattaggcttcgcattcggcttaca

SEQ ID NO: 10591 - DNA, 442 bp, Gossypium hirsutum
  Clone ID: LIB3135-021-Q1-K1-A10
gtcatcaccatgattcaaggaaaataattatcatatataatcaatctctttgttgtgctattgatttcaatatctgatatatattggcaagatatactcaaacaagtgagcagattgttctttctctgaaacttacaacttcaccatgaacaaaagcaagctccagctgcaactctgtgcagggatatttactttaagcatcctctccaatggtgcttatggtagtgacaaaatctttgacataactcacaaaatcactttttagttggcaacctttggatcaaaaaaggggcttgggcaaatcatttggcttccttcccggattaaaaaaggggtccacagcgaatgtgtcggaattcaaattgtgaaaccacactggcactcacgttgatgctcctagtcacttctttcagaagtactatgaacaaagatttgatgtttc

SEQ ID NO: 10592 - DNA, 377 bp, Gossypium hirsutum
  Clone ID: LIB3135-021-Q1-K1-A11
gcgtccgcccacgcgtccgcttttttttttttttttctctttttctttttccttcttttttggggcgtggtttcctttctttcctttcttttctctctctttttaattcttttcctttctttttatttttcgcttcttttttttgtcttctcttttttatctctttttatttgtgtctttttattctttgtttttgcttttttgctagctgttatttttggatttttaaccttccatttgttttttgtttttgctttttgccctttctttgttttttatcctgttttctttttggcttttttttatgcggcgattcttcccttctctttttcgtggggcttttggggctgtttgtttttcctttggggcttccgttt

SEQ ID NO: 10593 - DNA, 449 bp, Gossypium hirsutum
  Clone ID: LIB3135-021-Q1-K1-A12
gaaatgcaattataaggttcttaactgaacagaacataaagattggcaaaccgagtgactggtgtccttggtaattgctgtctatggcttattcttgtaactatacattattggaagtgtggcgactacatccaggtaatctcctatggaggttttaactaatttcaggtgacttacttgagttcataattgctgaacccacaagttctgaaaaccccaaataaagggtgaccccaatttggcaactaaaattgactcaacgattgcgtaaattaaaatcagtgctacaaatttaaggttcaatgaccaacggccagaaagcaaaggagcgagtcaaggacccaccaccatgtggccaacattcgaggtgctaactttcagtcgcgatccatgccactgggcatgctaaggcaatcttgggcccatcgtcaatgaatctttaaaatgat

SEQ ID NO: 10594 - DNA, 410 bp, Gossypium hirsutum
  Clone ID: LIB3135-021-Q1-K1-A3
cccacgcgtccgggaggcagttgagatggccggtctagcctggcagggccgtgcccattgcggcctcgatgatgccaaaaacactgctcacttacttaccctcatgatgcgcaaaggttttaaatttgcgatcacgaactcactgatgtggcaggctagtgatggtccattgatgtggaacccggtccccgagaacatggccttctttccacatcacccccacaagccaaaggatcagcaaatgcccctattccattaccacccttactgtttctgtggggtgaagagtagcaaaggaatggttcgggagcccggactgaagcaaggaagtgtgttctttggttgtggaaactggactgtcaaccgaggtgcccgctgccactacttcgagtgggcttcgtcctgaaact

SEQ ID NO: 10595 - DNA, 341 bp, Gossypium hirsutum
  Clone ID: LIB3135-021-Q1-K1-A4
cccacgcgttcgtccacgcgttcgcccacgcgttcggaaattagctttacaattcaaaaaccttgtggaggattgggttatgcctacactgcaaagcgagtcaaccagttctggcgatgatgactggctggttcagaaaaagcaaaacctcaacactgaggttaaaacccacaatgatggaaatcttaactctaaccaaatgagctctgcaacttggccacgtgcttgcttcttgcccgaagccgatatatacgcattaccattcacggtaccgttctgaactatattttgcataggagaaaaaggcctgcaaagtgcgagaaactagaaaaaaaatagtg

SEQ ID NO: 10596 - DNA, 303 bp, Gossypium hirsutum
  Clone ID: LIB3135-021-Q1-K1-A6
gcctcccgtccatttacacgtacgtgcacacaattcttgtgttagcaaagcgagtgctttcactggtggaggtattgcctagacgctcgccacattgagcattccttgggttattattggtcatcctgggaggagacttatgttgaaggcgtcaaatttgtgcgttaccgctcaagatgcttatacacttccttaacgcttgaaggtgatcgccttgattacggaaacacttggtcacgagaagcatgattactgggcagtcgagtgcaaaactctcattgagtaaaaataaactggctgatg

SEQ ID NO: 10597 - DNA, 386 bp, Gossypium hirsutum
  Clone ID: LIB3135-021-Q1-K1-A7
gttgaggtccagccgaaatttctgtattgatatcgtattgctgtgcatagttctgggaatagctgcctatttgtacaagtaagattctatctcatgccttcatttaaaaaagcttccctttaatactaaccacaaactgtgtcctgtattctcgatattcatacagtttactgtagtggaacttgctatactgcgtgcttcagttatatttggttggtgatagatgttggatttttcttagtaatgattttatgtggaaatgctgttaatggattaactgacttgttctcctatttcgttgtttttatcattgagaagtctcccctaattgttcttcatttgcagtgttctgaagaagtgaagtgataaaaggataaatctatgag

SEQ ID NO: 10598 - DNA, 378 bp, Gossypium hirsutum
  Clone ID: LIB3135-021-Q1-K1-A8
gccacgcgtccgcccacgcgtccgttttgagtaaacaacactctcaaagcaatggcaaacaatcgctcacagcttctttcatcagagttgatagataggtgcatagggtccaaaatttgggtgataatgaaaggtgacaaggagctcgcgggtactctcagaggcttcgatgtctacgttaacatggtccttgaagatgtcaccgaatacgacatcactactgagggaagacggatcacgaagcttgatcaaatcttgcttaatggaaataacattgtcattctggttccaggaggctcacctgatccagaatgaggctgccacctctattcggttttatgttcatccctttcaacggtatcaaaatctcagtttcag

SEQ ID NO: 10599 - DNA, 361 bp, Gossypium hirsutum
  unsure (1)..(361): unsure at all n locations; Clone ID: LIB3135-021-Q1-K1-A9
cccacgcgtccgacttgaggaaattggcagagcaattccagaagcaggcacctggtgctggtgagggtaccggtactggtgcagtcgccactcaggaagaggatgatgaggaggtaccagatcttgtacctggtgagactttcgaagctgcagcagaagaagtccaagctgctgctaaatagtgtttttctctttaattttattgttatatgttttggtggtttttggtgctctttccttgtactcttaatggtttggttcagagtaaaccattttgttttctagaattcctattattattggcaatggattagatgcatttttcccaaaggccaannntaaaaaaaaaaaaccctccctt

SEQ ID NO: 10600 - DNA, 297 bp, Gossypium hirsutum
  Clone ID: LIB3135-021-Q1-K1-B1
cccacgcgtccgcccacgcgttcggccggaagcaacttgacgaagccggacaagccttgctgtccggaattggctgggctagtggaaagtagccctcaatgcttgtgttatttgctggataagaacgcgacggcgaactatgggttcaacattgacatggatagagctcttaagcttcctgatgtttgccatgttaaaactcctcctgttagtctttgttcagctattgtcggggctccaatcggagttccaactcaaagcactgaaggatctatgtgaccagcatccgagccaaca

SEQ ID NO: 10601 - DNA, 456 bp, Gossypium hirsutum
  Clone ID: LIB3135-021-Q1-K1-B11
attctactgatctagtcgctttgtccggtgttcacacattcggaagggctcgatgtgcggcgttcatggaccgactctacaacttcaataacataacggggaaaaccgatcctaccctcaacgcgacatatgcaaacacactcaaacaacgatgtcctaaaggcggagacactaaaagtttgatcgatctcgatgaacaaagttcgcttacgttcgacaacaagtacttttcgaacctacaaaaccgaagggggttgcttcaaacagaccaagaattgttttccactaatggggctgaaacagtggccattgttaacagatttgcaagcagtcaaagccagttctttagtagctttgcgaaggccatgataaagatggggaacttaaaccctttgactggtaccaatggagaaataaggctcgattgcaaaaaggtcaattagagattatgtgaaa

SEQ ID NO: 10602 - DNA, 426 bp, Gossypium hirsutum
  unsure (1)..(426): unsure at all n locations; Clone ID: LIB3135-021-Q1-K1-B12
gaaaaaacgaacccaaatccaaagaaatctatcctgttttttcgttggcatattgttgttctgttcccttttctttgttgttctgttttgcgtttgttgctgcaggtaatgctggcgtacggaacggcgcacgatggggagggtcgtggtgcgtgattcgcggcggcgtgcaatggtgagaggcggcagcgttgaaacaaataggctcctagggtttctgctattttgtttttgtgtgggctaggtttagtgggttgggtctagtatttacgctgcttgttgggctttgtaaaaaaattggacttcatttatttatttggtttatgcatgcgggcccgggctaattgggcctgctacattggttacatacattgcattcctaatgagaaaatgtaaattcgaactttaaagacaaaannggttgat

SEQ ID NO: 10603 - DNA, 317 bp, Gossypium hirsutum
  Clone ID: LIB3135-021-Q1-K1-B2
tcggtttctggatttgagggacgacgcacgcgttcgcttactcgttcgcccacgcgttcgatttcctctgacagtacccgtaaaaagggaggcagacgtgggataaggctgtgattctttgcttcgtatctgttgctcactgttgctgctcctccaatatgcgtggaatttcttttttaaacaatttttggtttagatagaagcttgttttgccctgttatgttgctgcacattggttccagaatggattttgatacggaatttacatgtggtactcttggtagttaagctttttattgatttcgatattaccttgg

SEQ ID NO: 10604 - DNA, 352 bp, Gossypium hirsutum
  Clone ID: LIB3135-021-Q1-K1-B3
gcttgacttacacacagatgttaccgcagatgccgcttcacattgatgagatcaccgtcttgcttgtcactgccatgaaggaaagatgcacgctctgtaaaaattaagaagagctaatactttgtcaagatcacagttcgctgctcaaagtacattgcttcacactgtgtgttccatgctgagaaggctgataagttgaagcaagctctttctacatgtttgcgcgtacaggacctgtgaaaatagggccgctttcagtttatcattcaattactatgtgaaagccagattttgactttggttttatcatatttcatgccctttaaactcaaaatttaactgaatggattct

SEQ ID NO: 10605 - DNA, 329 bp, Gossypium hirsutum
  Clone ID: LIB3135-021-Q1-K1-B4
ggtcacatcctgacacgcgtccgggcgaggagtggaatgcccttgagcgttaaatcaccagcgaagtaagccgcgtccagggagaggaagagacgagagaagagaggcgcggtcgacggaggggtaggtctctaaattcgagtgaagcatacatggggtatttgcgtccgtacccaggaaaataggacatcggatctgatctgtacttggaactttgattaagatgggtgattacgtttatatctctgaagccgattgacgctaaagaatgataattactaagtgaaggcgaattgtatatgttgattttaggaattattgattctgat

SEQ ID NO: 10606 - DNA, 130 bp, Gossypium hirsutum
  Clone ID: LIB3135-021-Q1-K1-B5
aaaaaacccaacgttgttggattctaaaatcatggtggaaagtctacttattcttgtatgtatgggactgtattttacgctgtctgacatattaacactttctattctatatcggtgtgcggatagctct

SEQ ID NO: 10607 - DNA, 360 bp, Gossypium hirsutum
  Clone ID: LIB3135-021-Q1-K1-B6
tcgtccacgcgtccgtccactcgtccgattcccactgacagtacccgtagaaagggaggcagacgtgggagaaggctgtgattctttgcttcgtatctgttgctcactgttgctgctcctccaatatgcgtggaatttcttttttaaacaatctttggtttagattgaagcttgttttgccctgttatgttgttgcacattagttccagaatggattttgatcgtaatttacatgtggaactcttggaagttaagctttttattgactgtgattttcctttggagtcaaaatactatattgggaatcaattacatctgaaactcattttatttaattaagtcctgcttttatctgatctt

SEQ ID NO: 10608 - DNA, 409 bp, Gossypium hirsutum
  Clone ID: LIB3135-021-Q1-K1-B7
ccgaattcgagggacgcgccaggcgtccgggtacacttgcactactaggttttaatccaaactcaaaagtcatttgattaatctgaattgaaacctcaagtcaataactcaaatctacctgtgctccttctattgatgatggtataatgatttgactgacattttatatggaagcaaatgcaggactggtacggtgatgaattgaaggcaaagttggaagaagtggagcctaacaaagatgcctggaagaacctctgcacgagcttcctcaaggatagattatgaaggtttttattttaaccaagaataaaagaaatgtaaataggaaccctttttcaagaatcaagtcgttctatagagaggtttgtgatagaatagcacagatgcattattcatttaaacatgtagt

SEQ ID NO: 10609 - DNA, 396 bp, Gossypium hirsutum
  Clone ID: LIB3135-021-Q1-K1-B8
tccgagaaaggcgcctgtagcgatccaggctgccgctttgaatggactggattagttgatgggaggggaactgtccgtgaaaaaggggatggagcgtggataacaggctgacttggagagtgagagttccgactctgatgtggattctgacctcgagaggatgattgctgacagatctgggatgaatgcctcttggaaagggcagaaatcattgataacaataagagagcggtgaagatgatagctcttgatccgcattatggggagagaaagattaagagagggaggccaaagcaaaggagtagttcgaagagaggaattagtgattctgatgatgaagatgaaggttgggggggagcggagggaaagaaaaagagaaagatgaggggttgattc

SEQ ID NO: 10610 - DNA, 452 bp, Gossypium hirsutum
  Clone ID: LIB3135-021-Q1-K1-B9
gtctattgaattctttccctcactttctcgaaaaaaaaaatgtcttcaggttgcaattgcggatctaactgcagctgcggtgacaactgctcatgcagcaggaaccttaaccttggatattcggagaagacaaccagcactcagaccatcatctccggagttgcgccagtgaagatgacctttgagggaccagagatgagcactactgaatcaggacatggatgcaagtgtggatcaaactgctcttgtgatccatgcaactgttgaaaagcttgatgaaagccatagattatgaaaaaaagaaagcagcaaaaataacaggcctctgtaatgatatattgtcaaggatggatgcctgcaaggtctataattatgtctctgtctgcgtcttgtgtaatagaagctttttgtggtgaaaataatgtataaaccatttggttgggagcaaattg

SEQ ID NO: 10611 - DNA, 311 bp, Gossypium hirsutum
  Clone ID: LIB3135-021-Q1-K1-C1
ctcacgcgttcgattttagtttcgatcgtagttttgagcgccagttgtggttgctggggggctagcgaggaggataatgacaatgatgatcctggcatggatactaacattgaaacgaacaaggaaacgatcgacatcattatcggcggaggtcgtggtgaagctcctgataattgtcctgatgagtgacctgatccgtgacgtgcacctgaatggtctgcaccaacatctccaccaccaccaccaccaccaccaccaccacgactaccattaccaataccaaaaccaaaaccaaaaccaaaaccaaaacc

SEQ ID NO: 10612 - DNA, 406 bp, Gossypium hirsutum
  unsure (1)..(406): unsure at all n locations; Clone ID: LIB3135-021-Q1-K1-C11
ggcggctggtcgggtccctggatacggtgtcattaccaacatcatcaatggtggcatcgaatgtggcaaaggatccaaccctcaagttgaggatagaatcgggttttacaagagatactgtgacatactgaaagtgagctacggtgacaatcttgactgctacaaccaaagaccctttgcttaattatgcactttaatccatcgtatcatgggtggggtaataaatatatgaaagaatagcatttacaaatcaaattatatttaaaataatcatgctattgtactacgactatatatagatgcatcttccgtggagatggaataagataaatattcaattttnaaaaaaaaaaaaaaaaaaaaaattatattaaatataataatttataaataagggcgggcggtt

SEQ ID NO: 10613 - DNA, 316 bp, Gossypium hirsutum
  Clone ID: LIB3135-021-Q1-K1-C2
cggttctgaattcgagggacgcgccaggcgtcccgaacaatctatttatgctgaatagacaatctggactttgcgacgggagcaatgagggggaggtggagattgaagcatataggacactgagggataagggtacataccctgctcatcaggttgttaaggatctggaatgaagcttagccttggtgatctatgacatcaagactgggaccgtgttttctgcactgcgggctgatcgtatggtgaagctgcataggagaattgcacctgatcgctgtgtggtcatatctgatgattcacacgtcattaaagaagg

SEQ ID NO: 10614 - DNA, 378 bp, Gossypium hirsutum
  unsure (1)..(378): unsure at all n locations; Clone ID: LIB3135-021-Q1-K1-C4
cataagagaacgaggaatatcggtgtcaagtaaggctgttatcggagcgttttcggaacttggaagatcgacaacgacgagtgatggtctcattggctaggattatagacaaaccccatgttctgtcccaatttcatggcaaaaagagaaagctattgaacagtaaccacttcaatgatgaatgcaacattcaagatcttcacaggttggcttctctgaatcaaacatgggattggatttgaaacacattgaagaattggaatcatctataaaatgctgggaaacattgcttctcgaaatcggagaaactatacgtgaagaagtgcgcgatttcaggacatgcttacggncttcttcggttgtgttactgaaatacag

SEQ ID NO: 10615 - DNA, 404 bp, Gossypium hirsutum
  Clone ID: LIB3135-021-Q1-K1-C5
tccacgcgttcgtccacgcgttcgtccacgcgtccgtactttgagcttgttttgattagcaatgtaagtggggcaggatccatccaatccgtatccgttaaaggctctaaaactgggtggatgtcaatgtcaagaaactggggagctaactggcaatccaatgcctacctcaaccgtcaatcgttgtcgttcaaggtcaccactaccgatggtgttacccgactgttccctgatattgtgcctgcaagttgggggtttggccagactttctctatcaaagtacaattctaagctcactaaaagctttagttcccggcggaggcgtgctacattattttacaaaaaagctgtccgccatacatggtatttatcgatacatcacatggtcaataatatcaggctac

SEQ ID NO: 10616 - DNA, 373 bp, Gossypium hirsutum
  Clone ID: LIB3135-021-Q1-K1-C6
gaacaatctatttatgctgaatagacaatatggtctttccaaagggagcaatgaggcgatgtttgtgattgaagcatataggacgctgagggataggggtccataccctgctgatcaggttgttaaggatcttgaaggaagctttgcctttgtgatctatgacagcaagactggaaccgtgcttgctgcactggggtctgatggtggggtgaagctgcattggggaattgcagctgatggctctgtggtcatatctgatgatttagatgtcattaaaaaagggtgtgccaaatcctttgctcctttcccaactggattcatgttccacagtgaatgggggctgatgagctttgagcatccaatgaacaaaatc

SEQ ID NO: 10617 - DNA, 421 bp, Gossypium hirsutum
  Clone ID: LIB3135-021-Q1-K1-C7
cccacgcgtacgcccacgcgtccgcttgctcttcaagtgatagctcttctaagagacatatttacagctgttggacttaatctctatttatttccctatggcgttctcccaactggtccagagagaggtattattgagtttgtgcctaatacacgaagcagaagccatatgggtgaaacaactgatggtggcttgcactagatttttcaacacgattatgggcctgttggctctcctaatttcgaagctgcacgcagaaactttataattagcagtgcagggtatgctgttacaagccttctacttcaaccgaaggatcgacacaatggcaaccttctttttgaccatgtcaggaggactgttcatattgattttcgcttcatcttggaaacatcacctggttgaaatatgccgttcgaga

SEQ ID NO: 10618 - DNA, 291 bp, Gossypium hirsutum
  Clone ID: LIB3135-021-Q1-K1-C8
gcgtcacgcgtcgcgtccgacacatgagtggccgtgcatttcaggtttcacctcgaggacagttgggagtctagctaaaaacgcagcttccagtgaccttcgttacgcttgtgaacatctacacccccaatattgcgatgataggcaatgctgacaatatatgggtgagcggatccatcaaagccctgtggcagctgtcacattaactaccaccacgtatggtttgggtacacagcacatatcatcctaaccgaagcatatggagtatatggcaaccacccatttatgtta

SEQ ID NO: 10619 - DNA, 449 bp, Gossypium hirsutum
  Clone ID: LIB3135-021-Q1-K1-C9
attccgggggggcggaagcgttcgcccacgcgtccgattttttcagggctaagaaagagaaaaaaaaatggctttgcaaaaggcgaaggacatcgtatctaccaatcctgtcgtcggtttcagcaagtcctactgaccgttctgtgtggatgtgaagcaattgcttcaacaacttggagcttctttcaaggccattgagctcgacagagaaagggatggatctgatattcaagcagctctggctgagtggaccggccagcggactgtgccaaacgttttcattggtgggaaacacattggtggctgtgattctacaatggccttgcacaaggaaggtaagctggttcctctgctaactgaagctggagctattacaaaatcatctggttaaaatagaaggaagctgcttgtctcccctaaaattaataaaagaaaaccaagttcgaatt

SEQ ID NO: 10620 - DNA, 338 bp, Gossypium hirsutum
  Clone ID: LIB3135-021-Q1-K1-D1
cggacgcgtgggcggacgcgtgggcggacgcgtgggcggacgcgtgggcggacgcgtgggcggacgcgtgggcagcaactaaaaaaaaaaaaaaaccccaaacagacaatagcctaggacaggaggatctctcagggtttaggtgatggcttcaaagcggatcttgaaggagctcaaggatctccagaaagatcctcctacctcttgcagcgcaggccctgttgctgaagacatgtttcattggcaagcaactattatgggtcctcctgacagtccttatgctggtggagtgtttctagtcaccattcatttccctccggactatccatttaaaccac

SEQ ID NO: 10621 - DNA, 395 bp, Gossypium hirsutum
  Clone ID: LIB3135-021-Q1-K1-D10
acaccgacgcttacacctccttatatcacagtgtccaaacagcagatttgtcatgggtaggcagaacatgggggtgtcaaatgtggcactagcggtttatgccactgctcataaaagacgaatcatacaatgaagaggtcaatcaaggtgcctgctctcagtatcaagcttgctgacattcctacagaagattattcatggaggaaataccggcagaagcccatcaagggttctcctcaccctatgggatattataaaagtagccatatgagacagttgccctgcttggaagcatgcttagaggcgcttataaaaaccatccatgcttattgttacctatgaaggtgatcattaccacccaagactaccattagcagtatacaacgtatggaaaa

SEQ ID NO: 10622 - DNA, 360 bp, Gossypium hirsutum
  Clone ID: LIB3135-021-Q1-K1-D11
ccacgcgtccgcccacgcgtccgcttgccagcaagacaatatgttctgatgatttggtggtagtctcaccagatgttggtggtgttgctagagcacgtgcttttgcaaaaaaattatctgatgcacctcttgctattgttgataaaaggcgtcatgggcataatgttgcagaggtcatgaatttgataggtgatgtgaaaggaaaggttgcagttatggtggatgacatgattgacactgctggaacaatcgcaaaaggtgcagctcttttgcatcaagagggggctcgggaagtgtatgcgtgtaatacacatgctgtttttagtccttctgcaatagaaagattgtcaagtggtcttt

SEQ ID NO: 10623 - DNA, 218 bp, Gossypium hirsutum
  Clone ID: LIB3135-021-Q1-K1-D3
cgcgtccgaaaaaccctcaagatcccctaagaccacctctgtctatacattagagtctaccttctgggggggggcgatggaaaagtacgcggaggaaccagggccccttccggaattaacggagctctaaccggtcagcatacttgtgggaactgccgtcattgttacttaggggtaaccggtataacaccctctttaaaagacttaaacgtatggat

SEQ ID NO: 10624 - DNA, 373 bp, Gossypium hirsutum
  Clone ID: LIB3135-021-Q1-K1-D4
aaaaaatggaaaaagaagaaacaaaatctagctgcagtagataatcacctttgaaaatattctttggttgttttctattgatttttgtgtgtattttgtatacaatccgtaacctatttctctgacaaaaaagaagaaaaccatcccccttttacaatgaaagattgaaggctttatagccaaatacaatacagtttctacctatttctttgctcaaattgcaggtactgtgatgttgtagaggagtgcatgatcgtggggcgtggacgtgcgatctatgggtcgtgcgtgggcgtgtctatgtacgtggtggagaggcgtataacgtgggggctacagcgcaaggagaaagaaaggtttgttcgttctgact

SEQ ID NO: 10625 - DNA, 200 bp, Gossypium hirsutum
  Clone ID: LIB3135-021-Q1-K1-D5
gcctttctgggctaagggcgttcatatgtacactctcattagtaatgccctgagcggacgcgtatgcagttcttaaactactattaatactccaagcagacaataggccacgacaagaggagctctcagggtttaggtgatggctttcaagcgcagctcgaacgagctcaaggatcttcacaaagatggggcggccgctt

SEQ ID NO: 10626 - DNA, 338 bp, Gossypium hirsutum
  Clone ID: LIB3135-021-Q1-K1-D6
gccacgcgttcgggaaaatccaagtctctctctgtctaaccatgtgtctcttcggtctgggcggaaatcatcgaacattccgtccaaaaaaaagtgcaccttcaggaagtaagggtgcacagcttcaaaagcacatcgatgccaccttaggcagcggaaacttaagggaagcactttgactacctccaggggaggatttaaatgaatggctcgcagtcaatacatgtggatctttttaatcaagtgaatctgctctatggtaccctcactgagctaagtactcctgagaattgccccacaatgactgcaagacctaaatatgaatatagatgggctga

SEQ ID NO: 10627 - DNA, 325 bp, Gossypium hirsutum
  Clone ID: LIB3135-021-Q1-K1-D7
gcggaaaaccctaaactcccctaaaccacccgggcatacttcggagtctctttctagggcgttctcactgtcaaagcaagcggaggtaccggcaccggggcctcattcaccttaactctcaccggtcagattacttgtagaacacccgttcattctcatttggggctcaccgtgctgacgttctctttcacattcactaagatagtgactgtgacctttctatatacagtctaagcgaatacagaaaagaaacaagatgaaatcgcgttgtgggcattgctgtgtcaaataagaggccgacaatgactggtagtaacggtggaca

SEQ ID NO: 10628 - DNA, 187 bp, Gossypium hirsutum
  Clone ID: LIB3135-021-Q1-K1-D8
ctggcatgcattaaagccggtccatgtcttgagcatcatcttccttacaatccgtggtttatgtatcgttccattctcgcataccataggagtggttcatatccatggcgcgcgcctttggacttgcataaagacgacttctccaacatttgtcacgtcttgggaacaatttgactgccttctgatg

SEQ ID NO: 10629 - DNA, 344 bp, Gossypium hirsutum
  Clone ID: LIB3135-021-Q1-K1-E1
gaaaaaccctaaaactcccctaaaaccaccacggtcaatacttcggagtctctttctagttcgttctcactgtcaaagcaagcggtggtaccggcaccggcgcctcattcacctcagttctcaccgctcagattccttgtagtctccccgttcattctcatttcggtctcaccgttctgccttcctctttcagattcactaagatagtgattttgaccttttataagcagtcaaagtgaatacagaaaagaaacaagatgaaatcggttgtgggcattgttgtatcaaataagatgcacaaatcagtggtagtagccggggacaggctctttcacaacaagatt

SEQ ID NO: 10630 - DNA, 270 bp, Gossypium hirsutum
  Clone ID: LIB3135-021-Q1-K1-E10
tatagcccacacctgctttaactatatccattactatcgtactctatttgtgaggtttgcgaaatgattcatctgacccgccccaaaactgttcctgccattaagagaatatataaatagatgggtgtgcatgagaatcttagaagaaaagcttgacgattactatagaaagatacgacattattacatgatttgcctaataagctatcctatttttcatgtttaaaactgtcatatctatgggtgttgaaagattgtctaaaaataaaa

SEQ ID NO: 10631 - DNA, 146 bp, Gossypium hirsutum
  Clone ID: LIB3135-021-Q1-K1-E11
acccacgcgttcgcccactcgtccgcccacgcgtccggttttgagttcaaaatcttttatcttaatagtcggtagttttttcgcataaagagtgtagtgtgctgaactttaagctaaagcagaaaattaactaaattaccactttt

SEQ ID NO: 10632 - DNA, 438 bp, Gossypium hirsutum
  Clone ID: LIB3135-021-Q1-K1-E12
cccacgcgtccggctaatcctagctctggaagtatagtaaaaatcaactttgttgaaggccttccattccaatatatgaagcaccagatcggaggacatgatgaaagtaatttttcatacagttacgatttaatcgaaggtgggcctttgggggataagcttgaaaaaattagctatgagaacaagtttgaggcagctgcaggtggaggaagtatttgcaagagctcaatgaaattctacactgttggcgataatgttatcactgaagacgaaatcaaggctctcattaaagggagtgaaggagtttacaagcctgttgaagcttacctcttggctaatcccgaagcctgcaactaggatataagttgctttaaattcttattgctgcttttaaagaggggtttgattttaatgttgtgcttttgatattttcttttt

SEQ ID NO: 10633 - DNA, 303 bp, Gossypium hirsutum
  Clone ID: LIB3135-021-Q1-K1-E2
acgcgcacgcgctaaaaacgaagatccgacttgtggaggcacatatactaagcgataaatgcggctgaatggtgtatcaacaatctaataggcgcaaataagtggtccttcctgcagtaaagaactgttctgaataaaagaataaagatcaaatattagataaaagtaaagtaatcttatacttatgatggaagaaacgataaacaagattggcttacagattctccaataaaaaaaaggtagcaaaaaaaagcaaaattcgtgaaactgctcaaaacaactaaaaaactttaaaagggcggc

SEQ ID NO: 10634 - DNA, 390 bp, Gossypium hirsutum
  Clone ID: LIB3135-021-Q1-K1-E3
caagagtttgcagaagagaagagaaagagtgagaaggccatgaacgcccccgaccgttacgagagattcgtcgtccccgaggggaccaaaaagtaggctctttatccctaaatcctctgtttatcaaactcactgctacatatttgttggttaaatttttagggtttcttacgagagagacaccaaaataataaatgcggccaccttcacaatcgagagagaagaccacaccatcggcaacatcctccgaatgcaattgcatggagatgagaacgttttgtttgctggctacaagcttcctcaccctctgcagtacaaaatccttgttaggatccacacaaccagtcagtcttctccaatgcaagcatataatcaggctataaacgatct

SEQ ID NO: 10635 - DNA, 386 bp, Gossypium hirsutum
  Clone ID: LIB3135-021-Q1-K1-E4
cccacgcgtccgcccacgcgtacggatttttaggtgttcctgcacagtgaggaagctcccctgaaagcttcagttgaaaatgcctaagcaaattcatgagagcaaggacttccttctcactgctagaaggaaagatgctcgctctgtaaaaatcaagaaaagcagagatgttgtcaagttcaaggtgcgctgctccaagtacttgtacacgctctgcgtgtctgatgctgagaaggctgacaagttgaagcagtctcttcctccaggcttgagcgtccaagacctgtgaaattaaaactgcccttagcttgtactaggcaatgaaaactagattctgacttttagtttattgcttgcatttcgaatcgttttgcaccgatcaaaag

SEQ ID NO: 10636 - DNA, 375 bp, Gossypium hirsutum
  Clone ID: LIB3135-021-Q1-K1-E5
cagagcgatagtgtctacgccggacgagctggtggcggccggttgccgaactccatcacctaagataacggcggacgctctggtgaaacggttccttgagacgaactcctccggcgtgtgcatgcacatcggagaccatgtccaattcgcttattctcaccataaagagtctcctttacagcccagatcatttgctgtgaaagacgaaatcttctgcttgtttgagggagcccttgataacttggggagtgtaaagcagcaatatggtctggcaaagtcagcatatgaagcgatattggtcattgaagcttacaaggcccttcgtgaccgagcaccttatcctccaaaccatgtggttggccatctaattgggag

SEQ ID NO: 10637 - DNA, 286 bp, Gossypium hirsutum
  Clone ID: LIB3135-021-Q1-K1-E6
cgctaaaaacgttgcttcgacttgtggagtcacatatcctaagtgttagatgttgcttaatggtgtatctactatctactggcagcaaataagtggttctttttgctgtaaagtactgttctgaataaaagaataatgataaaatattagataaaattaaggtaatattttacttatgttggaagaaatgataaattagtctggcttacagcttctccattaaaaaaaagtacctatatataaaaagattactataaaatactcaatgaactcacaatttctttag

SEQ ID NO: 10638 - DNA, 417 bp, Gossypium hirsutum
  Clone ID: LIB3135-021-Q1-K1-E7
aaagaaggaaaaacctgagcctaaaccaccagcttatacaccaccaaagaaagaaaagcatgaacccaagccaccgatgtatgaaccaccaaagaaggaaaagcctgagcctaaaccgccagtttatgtacctccaaagaaagaaaaaccagaacccaaaccaccagtttataagccttcaaagaagccaccagtgtatgagcctaagccaccaaagccaccggtttatgcaccaccaaagaaagagaagccagaacctaaaccaccagtacatgagtctcccaaaaaaccaccatatggtcactatccaggacaccctccattggagaagcctcaatagagagattccctcggctaaccattcccgacaactgagctactatggctacatagataaattactatcactgcaataag

SEQ ID NO: 10639 - DNA, 370 bp, Gossypium hirsutum
  Clone ID: LIB3135-021-Q1-K1-E8
cccacgcgtccggtaaaaaaaatacaatcgattccccctggctttatagccgaatgttcaaaataaaaaaaatacaatttttctttatttgctttcgtattggctattgttgctgctattgtttgtctgtttctttgcatgttcagtagcccgttggcgcggtgtttcgtggcgcttgacgtggtgcgttactggctgagcgctggaaggctctgagccagtctttgtgcgcatggaggccgtacatatggcgtttgctgctgcgcacctaaaaaacctagggtttatgaaattgctttaacctttgggcccttgtgccgcgtaatcttaagctatgatatttattttggatttgggttagtgattgggt

SEQ ID NO: 10640 - DNA, 434 bp, Gossypium hirsutum
  Clone ID: LIB3135-021-Q1-K1-F1
acgagatcaggcaatggggtcattggaccctgcttgccctttggatcccaatccagcatgatgttaactttgatacccagcacaccctgcctaagaaggacatgtctaacagcagaatcaatatattccttgtcaggatgaccagaggatatcatgtacccatccttgaacttcatcgactttgcacgctgagctcggagctttccactcactatgacctcgcatcccttggctccactctccatgacaaatctgagaacaccatagcaagccctccgaacagcaaggcctccaaggaagaggaagagtgtacagaaaagaaagactttgaaccgcttgctccccatgccaatatcgaggttcccgttgtggcttagagcccaccccaaatgagtcttgaatgtagcagttcactcaagctttcaactatttag

SEQ ID NO: 10641 - DNA, 447 bp, Gossypium hirsutum
  Clone ID: LIB3135-021-Q1-K1-F11
cccacgcgtccgaaacggctgtaagacgttttacaaagaactgccaaccatgaagataatggtagccgtaaagagggtcgtggattatgccgttaagatcagaatcaaacccgataagagtggggttgaaacccagaatgtgaatatgtcgatgaatccgttttgcgagatagctttagaagaggctttgaaaattaaggaatctgggttggctaaggaggtcgttgcggtcaccatgggaccttcgaactgcgtcgatacgcttcgaacgggtctggctatgggtgccgatagagggatccatgtcgaagctgctcgtgatttggttcctctcagtgttgctaaggttttgaagaagcttgttgaggttgagaatcctgggttgctcattcttggaaagcaggcaatcgatgacgactgtaatcaaacatggcaaatgatagctgc

SEQ ID NO: 10642 - DNA, 397 bp, Gossypium hirsutum
  Clone ID: LIB3135-021-Q1-K1-F3
gattgctcaggtgacggaggtaacagggagaagattttgtgtgatcttgcatttgaagaagtgaaagacatatccacaaagatagaggagcacgtgcagggaagggcatcaactgaaactggaaatagcgtatatgctgaaggatcaatcgatgtcgcaagggatgatgtgccgcataaggagagttcacataatacagtcgttactgctttattattagatactctgcctcatgtagggctttccgatactgaacataatatggatcaggaacagcattgaaagctggggagggacattgatgattggaagataagttttttattttttccctcgtgaagttttgtatgttttggctgccaactgttttgagatagagagagacagagagagagtt

SEQ ID NO: 10643 - DNA, 360 bp, Gossypium hirsutum
  Clone ID: LIB3135-021-Q1-K1-F4
ccacgcgtccgcagaagcatacacctgattccatcgagacaattatatctgatgtttcattagcgatttcactgctgacaaataggaaaacacgggatttaatcatgattctcaactctaaaagattcctagacagactggttagttcattggaggaaaagaaatatcacgaagcaaagttaaaagaaggattgaaggatgtggctgccaaacgtatggagcttcagaattctctatcttcttcatggccaaagcaagaagctgcacttgcaaaaaccagggaactgaagaaactatgtgaaagtaccctttcatcggtatttgatggaagacccgctcatataattggagagatcaatg

SEQ ID NO: 10644 - DNA, 277 bp, Gossypium hirsutum
  Clone ID: LIB3135-021-Q1-K1-F5
caagaacctattttcattggcttacaagactcaccatctgtataataatcccttaaccaatccttctgcagcatgttgaagagaccccaacaagggctttgtagtgaattaattaattagtcaattattttaatttgttgaaatagaaaaaaaaagtataattataacacgtttgtaaataatataagatacagtcgttgtatgtaataaatactaaaaagctttacgtacactctaaatgagacatatcatatcaccatagcgctacctccttact

SEQ ID NO: 10645 - DNA, 126 bp, Gossypium hirsutum
  Clone ID: LIB3135-021-Q1-K1-F6
ctcggctctcgcatcgatgaataacgtaacgaaatgcgatacttggtgtgaattgcagaatcaaaataaaaaataaagaagaaacaccaacatgggctccgtagtatattaaaaaataaatcactt

SEQ ID NO: 10646 - DNA, 402 bp, Gossypium hirsutum
  Clone ID: LIB3135-021-Q1-K1-F7
cccacgcgtccgcaatctccaagtataagctgcctgcacacttggaagtgcattggagcattccaagcctcttgcaattcaatcttcagaattatcgagtaccagccatccattagccgctgtaatgaagagtggaatcctctccagcacttaatttactggaagccttcccactaagatttctcaagatggggggcaaacttctcagccttcagccccaaatcagcctcctgctgttttaacaacctcacgtttgatgcttgatcgtgcaaatgcatctggttctgctacccatgattcaatatcagctacaccaaatagttcccgggaaaaagttgaacagctgccactgactgctggaccaccaccttcatctcttgttagtaatgccccatcaccaac

SEQ ID NO: 10647 - DNA, 321 bp, Gossypium hirsutum
  Clone ID: LIB3135-021-Q1-K1-F8
gcgtgcgccacgcgtcagctactccgcatcttaataacttcttccgttgatcttcgatagacgagtggcgtcgttaatcgattcattatgggaaagatcaagatcggaacccttggatttggaaagatcgaccggttcggttcgctagagtggctctccaaagcgatgatcttgagctcgttgctggtaacgagtcctttgcatgaccactgaatacatgacgaacatgctctatctcctacatgggtcacggccaatggaggcctcgtgagctcaaggtgaaggactcaaagacccttctctttggtgaaaagcctgtca

SEQ ID NO: 10648 - DNA, 308 bp, Gossypium hirsutum
  Clone ID: LIB3135-021-Q1-K1-F9
gggcaagggagggggtaaacagaacaacggacacccaaggggctggggcccgcgcaacaggaaggcccaccaaggacctaaagaagaagcacaacccccggacgaaccgagccccacaccacaaacggcaagaggaggaaacccccagcccaagcaagataccaaagagggattctcaagaacaggcaatttagaggcgaatcaaggcgcaacgcgcccaacagggaaaaggacacactgagggtcaatactaacggactctgccaaggggggcacccaaaagaaagcacggaaggtggagaagcaaa

SEQ ID NO: 10649 - DNA, 383 bp, Gossypium hirsutum
  Clone ID: LIB3135-021-Q1-K1-G1
caatctccaagtgaagcagcctcaacacttggaagtgcattggagcattccaatcctcttgcaattcaatcttcagaattatcaagtacgagtaatctattagctgctgtaatgaagtgtggaatcctctccagcacttcatttactggaagccttccaactaagatttctcaagatggggggcaaatttctcagccttcagtcccaaatcggcctcctgctgttttaacaacctcaggtttgatgcttgatagtgcaatttcatctggttctgcaacccatgattcaataacagctacaccaaatagttcccgggaaaaagtagaacagctgccactgtcttctggaccaccaccttcatctcttgttagtaatgccccatc

SEQ ID NO: 10650 - DNA, 370 bp, Gossypium hirsutum
  Clone ID: LIB3135-021-Q1-K1-G10
ttaatttcgggggagacgcacgcgtgcgtccacgcgtccgcacacgacgtctcgttcacagcggacgtccacgcatgcggcaatcggggacaaccagacaacccgcggagatgaattgaacacaacactgacttcggcgcaggacttttatcaatatagaggccctcgcttaacaaaacattgcgtaaacagaacgctggatgatctgatcggaccgcggacacgcgagagcccatcacaagaggaatgcgtggttgccatccactaaatggtacaggcgctcacagtccccctccctctaaactaaccaataccatagctagccaaacctggcggcacaataagagaaagaaggagctaatctgcttgc

SEQ ID NO: 10651 - DNA, 411 bp, Gossypium hirsutum
  Clone ID: LIB3135-021-Q1-K1-G11
acgcgcacgcgtacgcgttcgacaaggcgtccgtgcgctcgtacgaccacgcgtacggcaatcctgggccagccagtcaagcctgggaggtgaattgaacacaacactgacttgggccaggttcttctatcaatctcctggcccttgcttaactccgtggtccgtgaaccggtcgctggttgatctgatcggaccccggacacgcgagagcccatcccgtgaggaatgcgtggttccctggcgcttcatgggacggtcgctcacagtccccctccctctaatctaaccctaccttgctcgcccaggcctgccggcacaataagagaatgagggagctaatctgcttgcttgtgcatgcgaggaccactctgctagagcgcgcctgaggagcttctagtgacttgttatggc

SEQ ID NO: 10652 - DNA, 358 bp, Gossypium hirsutum
  Clone ID: LIB3135-021-Q1-K1-G12
gccacgcgtcggccatttattgttaaatgtagttgtcaatgaagggtaatttaataagagagctgggcaattaggttgttgtaaaatcatggtctatgtcggtgtgagaaaagggcccatcaatttcatgatattatatatagttatatacgtttgatttgttgctgttaggcggtctttattatttgcattttgtgtgcgtgtagattttgatatatttgatgcttgttgtgctgtccacgacattcatataaaattgtatgtattgaaccaccatttttattcttttaaaaatatgtgtcatttatttaaaataaagaaataatataatttgtttatataaaaaaaggggcggccg

SEQ ID NO: 10653 - DNA, 249 bp, Gossypium hirsutum
  Clone ID: LIB3135-021-Q1-K1-G3
acggacgccctagctgctatagctgttgtgacaaaggtggaggttctcgcaatatggtcggatcatttattccacatggctctgctcggaacacacgttaggtgaaactgggatgatgctacgaatagtccatgccgggagaagaccatgcctcgcccagttccccagaataaatggaactgtcaccctgtgcgggctccttggtttgaggacacttctcgactgtcatcccaacgcgtgatatgtatt

SEQ ID NO: 10654 - DNA, 314 bp, Gossypium hirsutum
  Clone ID: LIB3135-021-Q1-K1-G5
tcggctttcttttactagcgagagcgcttatggcagcactcattggaatgcctattttatgtcttcttatttctcaatgagcaatatcctgatttcaacacagctgatgtaatgaagtgtggaatcctctccagcacttcatttactggaagccttccaactaagatttctcaagatggggggcaaatttctgggggcgtcagtctcaaatatccctgctgatgttcgaacaacctgacgttttatgcttgatattgcgacaccatatggatctgcatgccatgattttataaccgctacacctgataaaaccc

SEQ ID NO: 10655 - DNA, 366 bp, Gossypium hirsutum
  Clone ID: LIB3135-021-Q1-K1-G6
cgctataaaaaggtcttaagaatacatctggcatcaaaatcaatgcaacaaagtcgatgatagggcactgtctgggtgcagcaggcggtttagaagccattgccactgtgaaagccattaccacgggatggctgcatccctccataaaccaatttaatccagagccatcagttgagtttgacactgttgccaacaaaaagcagcagcacgaggttaatgttgcaatctcaaattcatttggatttggaggacacaactcggtggtggcattttcagccttcaagccatgaaagtctgttacttacgtgttctgcatttgctaggaaagatgatgatagagaatattgatcgttaaaagagcgagtc

SEQ ID NO: 10656 - DNA, 414 bp, Gossypium hirsutum
  Clone ID: LIB3135-021-Q1-K1-G7
acgctaatgcattggggttcgggttgccgaaggaggaagctcaagattaaatgttggatcgggtcatcgatcatctattggggggtcatccacatgggctaaggcgtccattaacctacgagttgttcatatgcaaaatactattttgcttcgcagagttggacgagttctgaggaacttttactgtgacgtgctgggttggattgggtagtgtactgcactaacattcataagcatgctattagttatcgtgtttctatgaatattgtgatactaatatgtattgtatattgcaaccttgtgctatgtttatttactgctgtatatactcaccgcttaaggctttctttggtgcaccgcttaaagtcaatgagttgcagttggattcccaaccttactgggaagctgtttggt

SEQ ID NO: 10657 - DNA, 408 bp, Gossypium hirsutum
  Clone ID: LIB3135-021-Q1-K1-H10
gaataattgaggaattaaggatttacgcttggtatgtagccaagcccaagaaagagggaacgaggggaagaatcgacatggaatccataacaaaaaaaaaaaattgtgaatgaaaaaaaaagcgcgacgagaataattttctcaacccggaggtgaaggttacaaaatgaacaacttatcaatcctcgtagtcgaaccttgtttttgtggaatatgtaccccggccatgtatcatgaacacatgaagggtacggcatcgggtcaaataggaagaattctccaaacactaaaatcctccgtggacggaaaaaggaaggcgaaagcctatctataactaaggaccgccaacccaaactttgatcaacattaagccaactgctgattctggtagtgaaaagaaagcccata

SEQ ID NO: 10658 - DNA, 285 bp, Gossypium hirsutum
  Clone ID: LIB3135-021-Q1-K1-H11
tcgcccacgcgttcggccatgtcttgcggcattcgagtctgacatttctccgcctgcattcaaaggggggtggcttggaacgagagagaatgaagctaccgagctgcttgtgaaggggccgagtgggcccttgctgcggcacgcgagagaaggagggaggccgtcatacgtgcagaaaataacgtcaacatgtgaagtgcgggactttgggcgtcagacccgcatcatagaaaggaactgggatgagcatcaggccggcatgatcctacttgagcaaggaagcag

SEQ ID NO: 10659 - DNA, 377 bp, Gossypium hirsutum
  Clone ID: LIB3135-021-Q1-K1-H12
tcgcccacgcgtccgtgaccctgtttatgtaagggctgcttgtgaaggtagcttgaaacgtcttggtgttgattgcattgatctttattatcagcatcgggtggatacaagggttcccattgaagtcacgattggagaactgaagaaactagttgaagaaggtaaagtgaagtacataggtttatccgaggcttctgcatcgaccattatgagggctcatgcggttcatccaataactgctgtgcaattggagtggtcattgtggtctagagatgttgaggctgacataattcctacttgcagggaacttgggattgggattgttgcttacagtcctctgggaagagggttcttttcatctggccccaaaatgatgg

SEQ ID NO: 10660 - DNA, 418 bp, Gossypium hirsutum
  Clone ID: LIB3135-021-Q1-K1-H2
acgtgaacatgcttcacctggttgaaccttacgttacatacggataccctaatctcaagagtgtgaaggaattgatttacaaacgaggtttcgggaagttgaataagcagagagtcgctttgactgacaatgcaatcgttgagcaggcgcttggcaaatacgggatcatctgtgtcgaagatctcatccatgagatcatgacagtgggtcctcattttaaagaggccaataacttcctttggcctttcaagttgaaggcgccgttgggtggtttgaagaaagaagaggaaccattacgtcgaatgaagagatgccggtaaccgggagaattatatcaacgagctgattagaagaatgaattaaaaattggtatttttttcggtgttaaatggatcgatttcgtatttaaatttaattt

SEQ ID NO: 10661 - DNA, 400 bp, Gossypium hirsutum
  Clone ID: LIB3135-021-Q1-K1-H3
accccccattcccatttgccgaaattgaaaagaaaataaatgagctttcacccttcttccatttgctagggccggtgaccacgcccatcattgcaactcctccacatgcgcgccgcgacggcggccggagagagagccaggtaaggtctctccaatcctttctaaaatcccttttaaaaactctgttgtatttcaaaaaggaaggaaaaaagatccgcgataaaataaaaaaaaaacttgaaataggaggactataatcaccttattcaaatgtatggaagttccgtctcaaaaaaacatgctatctgtctttcttttatgtatttctctcctgatttcgtaaagaaaaaaattccccttttacatttgtgttctcggttttaaagcctttttacaaccg

SEQ ID NO: 10662 - DNA, 198 bp, Gossypium hirsutum
  Clone ID: LIB3135-021-Q1-K1-H4
acgctaaagcctccttttgactttcagagctttgatcgatcatgggtcactcatacgcgtggaattctcacactaagacccacgggcctggctcttgcgcctgtcgcgtgtgtggtaacccccatgccatgataaggaagtataggatcatgagctacagacagtgcatccgtagcaatgacaaggagattgtattca

SEQ ID NO: 10663 - DNA, 342 bp, Gossypium hirsutum
  Clone ID: LIB3135-021-Q1-K1-H6
gtaaggcctccctctgaccaacaacgcctcgttcgatccgggatgcatcacgcatatggacgtaccatactcgaatacaacatccaagaggattgcgctctccacctgggtgtacacctcaagggcgtcgccaagaagaggaagatgaagacctacacccagcctaagaagatcaaggacaagaagaagaaggtcatgctcgcccggctacaaatctacatggtggaggaatccagcatggttcagaggctgatgaaagagtgccccaatgctgtgtgaggggcaggcactactatggctaaccattttgataggcactattgctgtgagagtggactcact

SEQ ID NO: 10664 - DNA, 57 bp, Gossypium hirsutum
  Clone ID: LIB3135-021-Q1-K1-H7
aaaaaaaaaaaaaaaaaaaagaaaaaaaaataaatgaactataacacctaataacag

SEQ ID NO: 10665 - DNA, 430 bp, Gossypium hirsutum
  unsure (1)..(430): unsure at all n locations; Clone ID: LIB3135-022-Q1-K1-A1
cggtaatcgtcgacctgctgatggcgccttgcccggcgcaagggctgcggatcaaatgggtgaccgagcctacgagctggggagcagcggcaagaagcggaaagcaaccgcagacgcctctcaccatctgggcagagcagcagcagcagcacattcccggaatgtcgccgcagcctccaacccgaacggcggcagctacccgcacagctcttcacaggccatagaagacgccgaatgctcggttgccagctgcagcgtggacgacctttaccgcctcggcaatggcggcaacgccaagcgttgcccccgcccttcagggtgccttcctgacgacgccatgtccgcgtgcccgtgcacgcccggngcgagggacggggaggacgaggacgcggcgggcgtgcacgggctggagctagaggcgtacgggtcg

SEQ ID NO: 10666 - DNA, 352 bp, Gossypium hirsutum
  unsure (1)..(352): unsure at all n locations; Clone ID: LIB3135-022-Q1-K1-A10
tttagccattcatgcgccccgaaaaggaattattgaggtgtggcagatgagaaccggaccgggtgtcttagctatccagtgtgctaaaggatgcagattgttacagccaacatacaggtttggatcattatcagactctccttatgttcctctcgaagtgtttttgttgaatggagactcaggtcagttgtcagtgctgaatcgttttcttaattgaaaattttacatagaaagttcanatgttcagtctctgttctcaatttgatttctttacctacaactgagtttgcttctcttagaaccacaaattaacgttctatgaaatgtatgtatgttgtagacagaattcatg

SEQ ID NO: 10667 - DNA, 126 bp, Gossypium hirsutum
  Clone ID: LIB3135-022-Q1-K1-A12
ctcatgcaccctttcagtttgtttttccatttttttttgtttgcatgccttttgtatttggatgtaagaatctgtaatatattgctccaacattaagtaaagtccaatataaatgtgctctctttc

SEQ ID NO: 10668 - DNA, 351 bp, Gossypium hirsutum
  Clone ID: LIB3135-022-Q1-K1-A2
ctttcatttgcccgcactagcagcagcagcgccacactcttcacagtgctgatcaaccatggcggagcagaccgagaaggcatttctaaagcaacccaaagtgtttttaagctccaagaaatctgggaaagggaagagaccaggaaagggaggaaaccgcttctggaagagcattggtttgggcttcaaaacccctcgtgaagctactgaaggaacctacatcgacaagaaatgcccattcaccggcactgtttccatcaggggtcgcattttagccggtacttgccatagtgccaagatgataaggacaatcattgttcgacggaattacctacattatatcaagaaata

SEQ ID NO: 10669 - DNA, 344 bp, Gossypium hirsutum
  Clone ID: LIB3135-022-Q1-K1-A4
cccacgcgtccgccaagatcgataaggagcagaagtaagtccattctatcaaaaataaagtcgaagaattatccaaaggcaagttcaactcatcctgatagttcagggagtatcgaatccttctattcgaaatacaatcggttacaaaagattttagaagaggattcatcaagtgatacttcttctctttttggcagcaattctgataatacttcttcctgtactgatagcacacaagatgactcactggattctgtatttggcgattccgatgcttcatcttccccttcctcttcttcctcttaactcaaagcattcaacccttagctgatttaaaaccgata

SEQ ID NO: 10670 - DNA, 434 bp, Gossypium hirsutum
  Clone ID: LIB3135-022-Q1-K1-A5
gccacatacatgattctcgtgccgatcataggtgtttcggtgatgaggaatgcggaggggactctagtacgtgtagaagaatatcatgcagaatggctgcttactgcgggttgcggatccaatgatcactgaagatcaaaaccatgtattctttctagcatagacttatacattgaaatcacaaaacacaaaagtcaaaaagtatttcctcagtttgtaaactacttagatgaaacagaaaaagcaagcttagaaacacatgtagcacttgcaagataatatggatacgcattgtcacctaattttgcttcaggaagtagctattaggctgccatattgatcctgaatgcattatccaacaaatacaacctattgagcgacgctttgtcttttcttttattcattttttgaggtgtaatagtgcgtcgtcaata

SEQ ID NO: 10671 - DNA, 292 bp, Gossypium hirsutum
  Clone ID: LIB3135-022-Q1-K1-A6
aggaatttcattctattaaaaaagggggtggggaattaaccaaaggcgacgacaacccagcctgatagtttcagggattatccgaatccttttattcgaaatacaatcacctacaaaagattttataagaagattcatcaagtgatacttcttctctttttggcaacaattctgaatatacttctttctgtactgaaagcacacaaaattacttactggattctgtatttggcgattccgattcttcaatcttcccttcctctttttctctttactcaaagcattcaccctt

SEQ ID NO: 10672 - DNA, 435 bp, Gossypium hirsutum
  Clone ID: LIB3135-022-Q1-K1-A7
cgaaaatagaagaaaacccaaagtctcatttcgtgtttgtggattgtaatagcagcccgggagccaaatttatacatgcagctgttgatttatctgtgtccgacattgtttcacctacatatgttccgttggttgttcaatcgttcttcgatcatgatcgagcaatcaactatgatggtcacaccaggcctttgttatcgattcaggtcaccgaactggtagatggagtgttcataggttgttcaatgaaccatgttcttggtgatggagctaccttttggcatttcttcaatgcattatccgaaatatttcaagctcaaggagatactaaaatgaaaatctcacgtccgccagtgctagagaaatggtttccaagaggtcatggtccattacttaaccttcctttcaccaaccaagatgagttcatcactagat

SEQ ID NO: 10673 - DNA, 384 bp, Gossypium hirsutum
  Clone ID: LIB3135-022-Q1-K1-A8
cccacgcgtccgcccacgcgtccggttacactgctgtcggtgtttttgttcttgggccgaggtttcatgaggcttggggaagtaaagctggagagaagcacgtgcaattcaatgatttcattgagtggaatcgtatttgcatatcaatggagttggtaactgcagttcttggagaccatggacagcgctctcgagaagactatggaaatggaatttaattggcaacctgtgctgggaacttctattggattttgtggggcagcgtttgggcatctttgaaggcttaggtggaaggggccttgctgatcccattcttacccttattgttgggattgatccaaagtctgcaacagctatttcaaaatgtatgatcatgggtgcaac

SEQ ID NO: 10674 - DNA, 321 bp, Gossypium hirsutum
  Clone ID: LIB3135-022-Q1-K1-B1
ccaccgacataatttacaacgttatgagggataagcattgcttgggctttgagcatgatcttctgtctgctatgcctgctgcatttcagacactactcgcgtaaacttgacatactccacatggatatgactaatgtgtatgtatgtcgcaggggtatattaacccacgggactttcgggctgttctagcgagcaagttggcctgataaacagtcttttacatgataatgcaataccttggagctatatgtggcgctccgacgaaagagcttcaaagaccaatacgaaggcttgcggcgggcaacacggtaactcggatat

SEQ ID NO: 10675 - DNA, 149 bp, Gossypium hirsutum
  unsure (1)..(149): unsure at all n locations; Clone ID: LIB3135-022-Q1-K1-B10
ntccgcccacgcgtccccattacctattcctctatttactttcattgaccttctctctttatcattcacaaaaagaaatatagtaaaatatttaataccaaccattccccccaatcacattaaaaattccattataaatcctatacttc

SEQ ID NO: 10676 - DNA, 284 bp, Gossypium hirsutum
  Clone ID: LIB3135-022-Q1-K1-B12
cccacgcgttcggggtttcttggccaatagataagtgtcctcaaatgctctgctacaaagggaaacgggcttctggtacatagagatgaaattttcaatgcattttgggtgtgggggaaactttgagttactcacattatcattccttattaatctgccaagttatattaaaattttgagttcataggaagaatgcataaatttaatgtttgttgagatttactttattgtttaaaattattaatttttataataagtttatatctaagaagataattttagcc

SEQ ID NO: 10677 - DNA, 269 bp, Gossypium hirsutum
  Clone ID: LIB3135-022-Q1-K1-B2
aaaacacatacgatcaatacttagacaaaaacaaacactataaataagcaaatactactgggggggtgtctaatgcatcacgacttacctacgcatcatgcactgtctttaatgtaaacaagaacaactacatttatttcttttagaacgggatctaccacatcattgctgatataatccatgattttatcaaattaattacaactgatatgcatacctactttcgcacaccagatccatcaacaaacgctgtctttatcagcactctc

SEQ ID NO: 10678 - DNA, 279 bp, Gossypium hirsutum
  Clone ID: LIB3135-022-Q1-K1-B3
gctacacgttcggtcttactgtgactaattcgggcactgtgcattatcaaagcatgtgaaggggaatgcaatgcaccgcctggtaacgattggactaggacatgctaaactgaaagccagaccaactgcatttataccttacaaaaggtgaactgtggaaacccatgaaaatggaatgctgaacactggcgaattaatgaaacagagagggcctaagaactttcgcttacaagaggcagctgcaaatgctcttttacgctattctatgcaatttacaaa

SEQ ID NO: 10679 - DNA, 296 bp, Gossypium hirsutum
  Clone ID: LIB3135-022-Q1-K1-B4
acaacagatattgacatgtggtcctttggctgtatagttgccgaactctttttaaggcggtgtttattcccaggtgcttcagaatttgatcttctaaggcgaatgattgaaatacttggggtaaagactacaggtctcagtttcaaatgggaaatggtgctttttttggagctagttatattcagaatttatgaagttgaacccgaaaaatcggaaactttcaagatgttgtgaaagatgggagcattcagttcaaaaaatcagcatataagttcttaaaatcgcattttaggttt

SEQ ID NO: 10680 - DNA, 188 bp, Gossypium hirsutum
  Clone ID: LIB3135-022-Q1-K1-B5
cccacgcgtacgtattaatcggctgtagtttatagcctctagccatgactttcaagccgaggaatgtaggccgaaacaagcatgccctttgccatgtcaaatacatccgctgatctaactgtggcacatgctgccctaaggataagtcaatataatatgccaactgtgaggtatattgtaaaacaaac

SEQ ID NO: 10681 - DNA, 422 bp, Gossypium hirsutum
  unsure (1)..(422): unsure at all n locations; Clone ID: LIB3135-022-Q1-K1-B6
cccacgcgtccgctgtcgcagttcccttctcgccgaagatctcctgtcctccgacgacagtggttgccgccaagaagaccaagaagacccatgagagcattaacaacatattggctctcgttatgaaaagtgggaaatatactttgggttacaaaattgttttcaaatctcttagaagctccaaaggctgaaaatgatgctgtaggccaagaacttcagaaacaactggaggctgctgtgaaggaactgaaacaggttcaggagttattcagtcaagcagcagataattgtctcaacttgaagcaaccagattgaattcatttccttgaacaatccctccttccatgtttcattttattgtctttatattcngttaatcctaggattcttttcctaggattctaaacgtttatttatgtact

SEQ ID NO: 10682 - DNA, 441 bp, Gossypium hirsutum
  Clone ID: LIB3135-022-Q1-K1-B7
cccacgcgtccgcccacgcgtccgcccactcgtccgccagatcggaggacatgatgagggtaatttttcatacagttacgatttaatcgaaggtgggcctttgggggataagcttgaaaaaattagctatgagaacaggtttgaggcagctgcaggtggagggagtatttgcaagagctcaatgaaattctacactataggcgataatgttatcactgaagacgaaatcaaggctctcattaaagggagtgagggagtttacaagcctgttgaagcttacctcttggctaatcccgaagcctgcaactaggatataagttgcttaatttgaattcttatgcttgcttttaaagaggggtttgattttaatgttgtgcttttgatattttctttttcatcttaaaacctatattgtcttctggttgctcagtaggaatgatg

SEQ ID NO: 10683 - DNA, 429 bp, Gossypium hirsutum
  Clone ID: LIB3135-022-Q1-K1-B8
cccacgcgtccgtttgctggaacttcttgctcctactgtctagtgtcggctttattagggtttagtttatttttcattagcctaaaggatgttgggttacaggaggtacagaaagtggtgggtttacaagtatgcatagcaagcttggtatttgccacattaagtacatcatacagcaatttaccatctgctccttcaagccaagctaatattgatcttccatattttacaactgagataacaaaggaatcaagtccttttgcgctttctcttgcaaggcatctacattctataagagctaagatgtatggggctttttggtgttctcactgtctagaacaaaaagagatgtttggacgtgaggcagcaaagttgttggactacattgaatgctttcctgatggatataagacgggaacaaaaatgatc

SEQ ID NO: 10684 - DNA, 280 bp, Gossypium hirsutum
  Clone ID: LIB3135-022-Q1-K1-C10
ggcaaaactgccaaattccttgagcaatgtttcctgatgctcctgaaatactttacgggggagactgactattcttgcctagcctacaaattttcattgactatgtgaggaaccctaaactttatcctcttgacatcatcaacccttataagattgtcgatacttaaccttataccaacttgatatctcaaatcattaccgtcaattcccgctgcaattcacctgatgccaacttgcctaggaaatggattgtctgtgtctaggtgtctcatgatcttta

SEQ ID NO: 10685 - DNA, 135 bp, Gossypium hirsutum
  Clone ID: LIB3135-022-Q1-K1-C11
cgagaaagaaaatgatgggaaggaaattcttcgtcggcgggaaattgggaaatgcaatggaagcgcactgaaggaaagtgaataaggattgtgaagtactttgaatgctggaaaggtgccttctccggatgttgt

SEQ ID NO: 10686 - DNA, 428 bp, Gossypium hirsutum
  unsure (1)..(428): unsure at all n locations; Clone ID: LIB3135-022-Q1-K1-C12
cccacgcgtccgcggacgcgtgggctttactctgatgaagaggaggatgattttggtgtgggtgaggatgattgtgacgatgatgaagtaatgagcacagctcactctccaattggaattaagcgaagctttcagaatcaagaccatgataatgatgtaattgagcaagttgctagttctgatggtccaaacaaaaggcaaaaactactgaatggtgggcataagcaatcgataatggtggatgccgcttgttcagtgaaattggaaggctctcacgagtatgatagcgatgcagaatcaagctaccgaggggagattttacatactgaacagtcaatgaaggataagattcgcttgacactaaaaatccttgagagcantatacctggtacaaaaggaaaggacccattactggtccttgatgaatc

SEQ ID NO: 10687 - DNA, 283 bp, Gossypium hirsutum
  Clone ID: LIB3135-022-Q1-K1-C2
cccacgcgtccgcccacgcgtccgggttgatgccatcgatgagtatgccattggtcaggtgagggaatttgagggcaaaaagcttgtgtctgcaacaaaggaaggtttgaagcttgatgagagtgaagatgagaagaaaaagaaggaagctttgaaagagaaatttgaaggtctttgcaaggtcatcaaggatgtcttatgtgacaaggtggagaaagttatggtctctgatcgtgtcgttgattccccttgctgtttggtgaccggcgagtatggctggact

SEQ ID NO: 10688 - DNA, 195 bp, Gossypium hirsutum
  Clone ID: LIB3135-022-Q1-K1-C3
tcagactttagatactactgtataaaaaactttttcttggcacttatcatcaataacggggggtactttgaaagggacctgataaaccttggcctgcgacgaaatctacaaaacgcctgcttcaccttattaaaaccttaaaaaacgggggaattggaacccaacgaaggaaaagtgttaacaccactttttact

SEQ ID NO: 10689 - DNA, 394 bp, Gossypium hirsutum
  Clone ID: LIB3135-022-Q1-K1-C4
gttagattctcgttccgacagtcaagaagtagagaaaaatgcattatcaaaagatgaggggaagaatgcagaagacggcctgctgaggattggactaggacatgcgaaacttaaggccagccgaactggatttaaaccttacaaaaggtgttctgtggaagccaaggaaaatagagtgatgaacactggcagtcaaggtgaagagagaggtcccaagagggtacgcttagaaggggaagcttcgacttgacttttacgctattgcatgcaattaacaaatgcgatgtttgtttgttgcatgcaatccctaattttttttccccatatcttatttccttttcatatgttgatcttaaaaacgagcattacgagaccctttcgggtaagggggggt

SEQ ID NO: 10690 - DNA, 305 bp, Gossypium hirsutum
  Clone ID: LIB3135-022-Q1-K1-C5
gacaatattaatggcatacaatacaaagctgtgcaagtttagcaccttaaaattgactgtgaaaaagtggcatgtgataatttttttggtccttgagataatgggctatttattgtttggaccttaaacctcaactataaataggccttctcatttcttatttcaaaaaaaaaaaaaaaaaaaaaaaaaaaaaaaaaaaaaaaaaaaaaaaaaaaaaaaaaaaaaaaaaaagggcggccattttgggggtcgaaagcttacatccgcgttcatgaaacctggttggttgttttttgggtgaccta

SEQ ID NO: 10691 - DNA, 332 bp, Gossypium hirsutum
  Clone ID: LIB3135-022-Q1-K1-C6
gaaagatatcatggaatgccttccatcctatccatcagctatggcagccacttggtccgtttccaagggagtactctgaggcacttggttttggttgagccgttctaagtggcttccacctgtacttgtttggaggaaaggatccactaagggggtcaatgagacgagttgttttctatagtgctcggacaaacaagtggcacagagcaccaggtatgcttcgaaaatgtcatttctttggttcctgtgtaataaataaccgcctttatgtggctggctgagaatgtgatggaattcataagactttacgctttgctgaaatttatgatcct

SEQ ID NO: 10692 - DNA, 404 bp, Gossypium hirsutum
  Clone ID: LIB3135-022-Q1-K1-C7
acggagttttcttggttgtctttaatgcaacttctggagcatgctcttgcttttttctgtcgaagctgataggcaggcctttgcttacttggctgtggcctgataaattaagattttttcaagctgacattgctaagcgaagggacaagttgctgaattacatgctctttctgagaattactccaactctacccaacctatttattaatttggcttcacctatagtagacataccgcttcatgtgttcttcttagcaacttttgttggcctaataccagcctcctatataactgtcaaagctggtcttgcactaggcgatcttaagtctgtcaaagacctgtacaatttcaagactttgtctgtgctttaacttatcgggatggtctccatatttcctaccctt

SEQ ID NO: 10693 - DNA, 369 bp, Gossypium hirsutum
  unsure (1)..(369): unsure at all n locations; Clone ID: LIB3135-022-Q1-K1-C8
cccacgcgtccgcttcgagcatcagagattggaagctcttcatatacttactctgtaggggaacccgtttgtttgcctcaaacgccttaatcagtctcttgctagccattggacattacacggcaaaaacatctttctcagctcttgtttcatctctggccaatcggtgataggttggcgtgaagaatcctcaactctgggtttccaccatagttttttcatcacccacaagatacatggaagtaatgctaactntatctgcttactgtatatgaaccactttgaaaaactgttagacatcgaacacgttggcctaaggaccttcttggaactccgagcaccattgaaaggcctaagcttcagggttcc

SEQ ID NO: 10694 - DNA, 148 bp, Gossypium hirsutum
  Clone ID: LIB3135-022-Q1-K1-C9
gaccacgcgttcgcggctctttggtgataatctattacatcttttgttttactgcaagaaaacatttcctacgtcattgattttttgaagctcgtttcaagcttttatacaaattctgctggggacgttgtgcaattcataagtttta

SEQ ID NO: 10695 - DNA, 434 bp, Gossypium hirsutum
  unsure (1)..(434): unsure at all n locations; Clone ID: LIB3135-022-Q1-K1-D1
caaatctcatatgggttggtctatacaagctttgccttgcgcagcctgaacattgggagcgcgtactaggctacccatcggaccacactcaacctttggagaatgacttgactcacaggctacacttactccagcaatctttccaaaccgacactttgggttatcatctctcagtattgaagccaatttatcctggagggttaacaatgttatctgttttcagtggcattggtggggctgcaattgctctacatcggcttggcattcacttaaaaggtgttgtggctgtagagacttcggaagctaagcaaaagatccttcggaattggtggcaaaacacgggacaaactggtgagttggtgatcatagaagacatccagaagctaacaagtagaagactggagagctngatagataagttaggtagtattgac

SEQ ID NO: 10696 - DNA, 385 bp, Gossypium hirsutum
  Clone ID: LIB3135-022-Q1-K1-D10
aaacaggagagggaaacaatgagccggagtttgggcataccagtgaagctactgcacgaggcatcgggccacgtggtaacggtggagcttaagagcggagagctttacagaggaagcatggtcgaatgcgaggataactggaattgccagctcgagaacatcacctacaccgctaaagatggaaagatatcacagcttgagcatgttttcattcgaggcagtaaagtcaggtttatggtcataccggacatgttgaagaatgctcctatgttcaaacgcctcgatgctaaaatcaagggtaagagctcatctctaggagttggcagaggtagagctgttgcaatgagagccaaagctcaagctgttcgggcgtggcacaacaagt

SEQ ID NO: 10697 - DNA, 407 bp, Gossypium hirsutum
  Clone ID: LIB3135-022-Q1-K1-D2
gacaaagcctatatgcattggaaggcatgccttcggtgatcagtaccgagcaactgatgctggcattaaaggagctgggaaacttaaacttgtttttgttccagagggacagggtgagaagactgaatatgaagttttcaacttcactggtgaaggaggagtttcactggccatgtataacacagatgagtctattcgtgcttttgccgaggcttccatgaacactgcttatcagaagaagtggcctctttatcttagtacgaagaatactattcttaagaagtatgatggaagatttaaggatatctttcaagaggtttattaaggtaactggaaatcaaaatatgaagctgctgggatatggtatgaacaccgtctcattgatgatatggtggcatatgctctaa

SEQ ID NO: 10698 - DNA, 390 bp, Gossypium hirsutum
  Clone ID: LIB3135-022-Q1-K1-D3
cccacgccttcgaggtaatcgaggatgctatggacgatacggatgccgcggatactacgggggatacggatgtcgtggtgggtatggtggacgataccgtggacgaggacgtggacgttatcgaggaggttatggataaggatgctcctattgatactattattcaaaatattaccgaagatgctgccctaactgctgcgattatgttaatgatgatacaaatgctgaaacacattattaaactatatactaaaataaaatcatgtctatatgcatgtatataaaaatatgaaatggtataacatattttacactatgctacgatgttaacttagaatattggtttattttctggaattatatatctatttgaattacttttttaatttt

SEQ ID NO: 10699 - DNA, 116 bp, Gossypium hirsutum
  unsure (1)..(116): unsure at all n locations; Clone ID: LIB3135-022-Q1-K1-D4
aaaaaaaaaaaggacccacgcgggcgggcaaaatntatatgaaatcaaaaaaatttttttttatacccctaccgaaaaaatttggtttgttttttataaaatcttcctcttaaaca

SEQ ID NO: 10700 - DNA, 374 bp, Gossypium hirsutum
  Clone ID: LIB3135-022-Q1-K1-D5
tatctatctaacttaataagacatgttctttgaggtaccccaaagaggccagggggatgcatatatacatatttgtttgctttatttgatcaaaactcgaaaccaggtcctgaattatacagacactttgggttgttttcaccaaacacgcaaccaaaatatcagcttcatttttgaggacgaaggcattgggatattgcttcttaggaatataatggaactctttctcttaagcttcatatgttatatataccattctcgttaacttaaaactttttattgctttttagactttataagcctatctaaaaatactttaaatattataaaaaaacacgggactaacttgttagatgtggatcatataagacatt

SEQ ID NO: 10701 - DNA, 326 bp, Gossypium hirsutum
  Clone ID: LIB3135-022-Q1-K1-D6
ataacgaaccaggaaagagaacctggccaaaggatttttttttacaatgtatatgtctgggttgacaaagctgtttacgtaatacgctgctggctagaaacataggaattgggaatgttgagatgactggtacgtttatcgaaacactcgagtagatgctttcaacaagccccactcacagatagctaatgagctagctcttttaaaaaggaaccagcaatactggatgcgatgtttggaacaaaaagaccaccaaaggttccccgaaatgttcgcaaatgacttgtcatatggccgtacagaagaacacgcagacatggacaatt

SEQ ID NO: 10702 - DNA, 440 bp, Gossypium hirsutum
  Clone ID: LIB3135-022-Q1-K1-D7
aaaacaggagcaaaaagttcattagacctttaagttcaagtaaaagcacattagcgcttgctgttgcaatgagtggttcagagactgatagtttttcaagcgctggtgaggattcttcttcaacttccagtcctaggttattactacctccattacacccacaaacgaaaatggtttctttgtataataacagtattagtattaccccttcttcatcaccgtcgagtggtggccggaatttctctaactggcggtctttttcattggctgatgtacgtgaatataactgactgttatagttttacatggagtttgatatactttttatgattggctcctccttgttaatctttatttgatggaaaaaaaagagagagagaagaaattgttggcctccacaaggatttttttgtcagtctgtagttttcatttttgagatc

SEQ ID NO: 10703 - DNA, 411 bp, Gossypium hirsutum
  Clone ID: LIB3135-022-Q1-K1-E1
cccacgcgtccgtgatttaaaaacttgtgcacctctatcgctagcttctccaaacaatgtgctgacatcagcaaacagtaaatgagaaaccgacggagccccttttcttttcctttgctcccttaatcgacccctccctcaaggccatcctcataagcctcgaaaggccctcattataaattaaaaacaagaaggtattaatagggtcccttgtctattcctctcgccggtttaaaagctcgttatgtaaataaatattttaaatattttaacatgtgtttaaaaatattttgttcaaaactatgtaatttttttaatttatagatgttgctgtataattattttatgtattttcaaaagtatttcatattaagttaaaacattatttaatttgaaatgtaatatgcttat

SEQ ID NO: 10704 - DNA, 205 bp, Gossypium hirsutum
  Clone ID: LIB3135-022-Q1-K1-E10
gtcatatctttaaaattaaagtatttaattttatacttccacccattacaacagcatcagaatatgaacatctccaacaaattaactccttactaaaccagaaaacctttatttaactttaactccatcatatactaattctctccatatttcaacttatgataaaattccaacctaagctaaactctaataattcttttctcct

SEQ ID NO: 10705 - DNA, 280 bp, Gossypium hirsutum
  Clone ID: LIB3135-022-Q1-K1-E12
acccagcgtcccttatcatccataaaagattatccttcttatcaatattacccatttatcatgcttttggcttgcgcttctttcaaacactttccattccaactcctctttctaatcatcaattctttttactaaaaaaaataatgttgtataaggccattgctaatcttatctttttctgtgtttccatgcttaatttactatatatacttcgattaaaaatgttcttctttaatgatttttaagaatcttataatcaataaaaaacctttttcgtttt

SEQ ID NO: 10706 - DNA, 405 bp, Gossypium hirsutum
  unsure (1)..(405): unsure at all n locations; Clone ID: LIB3135-022-Q1-K1-E2
cccacgcgtccgataactgctgtgcaactggagtggtcattgtggactagagatgctggggcggacataattactgcttgtcatgaacctttgcttagaacccccattatcacttactcgaagctgtaagtattctcaatttttgggctaattttagattactcctcaaaatgtttccatcacctagcagtaagcttgaaaacggcgtgtggtgcagacaaaagcagcgaaaccggtgataggaaaatactaccgggagccgaagaaatcagggccgattccgtttcacttaatagagaatctagtgtcgagcatganacacgatcattacgtgagcaacagcggagagnatgtatttatcagacggatcccaacctgtttctcctccaatccgatgaccattta

SEQ ID NO: 10707 - DNA, 342 bp, Gossypium hirsutum
  Clone ID: LIB3135-022-Q1-K1-E3
cccacgcgttcgattactacaggatgctgtttctatggctcatccggataggacacatgcttggattaagatggacaacttctacacacagacggattatgaaaagggggctgatggtgacaggatgtacaaaacacttctaggaactcaagggttccgaaagggtatggatctttactttaaaaggcatgacgggcaagcaggaacttgcgaagacttctttggtgccatgaaagatgcaaaaggcgcggaacgtgctaacttcttgctatggtatttacaagctgagactactgtagaaaaagttacttcatcctataatggtgaagcccatactttatg

SEQ ID NO: 10708 - DNA, 313 bp, Gossypium hirsutum
  Clone ID: LIB3135-022-Q1-K1-E4
cacacgcgttctactacttggctgagaacattgttatatttgagggcatcttactcaagccgggaatggtaaccccagggactgaacacaagaagagggctaattctgagactattgcgaaatatacactcacaatgcttaaaaggagagttccaccagctgttacaggaataatgtttttgtctggaagacagatggagatggaagccacattgaacttgtatgcaatgaaccagagccccaacctatgggacgtatcttactcttatgcacgagcattgcagaacactgtactaaagacatggcgaggacg

SEQ ID NO: 10709 - DNA, 345 bp, Gossypium hirsutum
  Clone ID: LIB3135-022-Q1-K1-E5
cccacgcgtccgaccacgcgtccgtgcatgcgttcgcaacgatgaggatcgctgtgcggggtgcacaggtgatatggatgagcaagataataaagtcttggatgttattgttagagaaaggtatgcagaatggacaaaggattactttcccataaaaaactgatgaaacgcccgatacggctactgaggacattggattacggctgcagcagaaagatcatgctacatttaaacgaatgggtgatgacttatttgtggagcatacattggcacttactgaggccctctgtggctatcatttcatactgactctcttacaaggcacttgcatatatagcatactcg

SEQ ID NO: 10710 - DNA, 386 bp, Gossypium hirsutum
  unsure (1)..(386): unsure at all n locations; Clone ID: LIB3135-022-Q1-K1-E6
cccacgcgtccgaacaatagaccgtgattatggtatattcaatggtatccaccatgacattggcacccatgtcattcatcatctctttcctcagatcccccattatcacttagtcgaagctgtaagtattctcaatttttgggttaattttagattactcctcaaaatgtttccatcacctagcagtaagcttgaaaacggcgtgtggtgcagacaaaagcagcgaaaccggtgataggaaaatactaccgggagccgaagaaatcagggccgattccgtttcacttaatagagaatctagtgtcgagcatgaaacangatcattacgtgagcaacagcggagagattgtattttatcagacggaatcccaacctgttttctcctc

SEQ ID NO: 10711 - DNA, 415 bp, Gossypium hirsutum
  Clone ID: LIB3135-022-Q1-K1-E7
gcaggacagaatatgccctgactagctcaatgaggctatatacggcttgctctttgcggcgtcaaggaggggggattttcccgagcttctagagattcgagccgtttttacattatactacggcaaagaattcgatgctcgtgcaatcgagctgcgcaacaattgtggagtgaacgctaagattatacagaagctggcaaccagacaaccagacttgtagagcatatggaatgtgctcaaccagatggctgccgagtacagcattgcttgacaactcgaggaaaccactgattccagcaagggaaatctggatgtaagcatgaagcaggagatatcagtttaggcaaggcatgatacaggacatgatgatgagtgctctgattcaaaaaaaacaaggtgataattcagggatgtg

SEQ ID NO: 10712 - DNA, 292 bp, Gossypium hirsutum
  unsure (1)..(292): unsure at all n locations; Clone ID: LIB3135-022-Q1-K1-E8
angtgcactcgtttgcaagaaggtgttttattgctagtgaaatggctaataggggtctgtgtaataaggctggaacatgaaaattatcccaaattgtaattaaaaagaaggcagaattcatgtttctgtatattggtgaaataatgttgtattgttacctttggaagatgtataatataagtgtacaaatactgaatcagcctgcttctgtgaaaccagaaaaaatagcttaaagacgtgtttcataaattcaaagttgacttttatcaatgaacttactcattattgattt

SEQ ID NO: 10713 - DNA, 363 bp, Gossypium hirsutum
  Clone ID: LIB3135-022-Q1-K1-F1
ggcattcgggtggggaatcaacggtaacatatgttggtgctacgatttctgggtcgacgtctgcgagtgcatgtcccgttgcagaaagcccaaggactgtggacttctccgtgaagattatctcgagtgcctccaccattctaaagaatttcaacgaaggaatcgaatttataaggaggagcaacgtaaattaagagctgccgcacgaaaagacaaggaaggcgaaaatggtgttcatcatcatgcatagtcataatttgtgatcctttaattttccaataataataatgcatggagattgttgtatttatgttaggattgatatttaaactctttgctaaattaccttttggttttcctttc

SEQ ID NO: 10714 - DNA, 107 bp, Gossypium hirsutum
  Clone ID: LIB3135-022-Q1-K1-F10
caagctttagcaattttaatttagaagagatgttatgagagaataaacgaattgtacggagcatatgtttgtgtgaagaagggttgtttcagttttattacccaagt

SEQ ID NO: 10715 - DNA, 278 bp, Gossypium hirsutum
  Clone ID: LIB3135-022-Q1-K1-F12
gtggagaatacatgttcatatcacatagtacttcgttatgggagagggctactgaacgggcgcaaacatgattctctgttcgtaaagctaggtcatctgaataatccccttcatacttcccaagtgctaatacaccaaataacgtgaccgttatttcctgtccagagtccttcaccaaagcacagtattgggttaaggagctacaaaagcatgggagcccaggtatagtgatggccttggttggtaataaagccgaccttcatgaaaagcgcgaaata

SEQ ID NO: 10716 - DNA, 68 bp, Gossypium hirsutum
  Clone ID: LIB3135-022-Q1-K1-F2
aaaaaaaaaaaaaaaaaaaaaaaaaaaaaatttattgggcaatcaaaaaaaaaaaaaaaggggggggg

SEQ ID NO: 10717 - DNA, 397 bp, Gossypium hirsutum
  Clone ID: LIB3135-022-Q1-K1-F3
cagagaccaaaaaagcttcattggctcttttattgaaaaccccatggctgctcttaagcgtagggtgtgctctagtgatgtgcatgttggtggatgagcccattgccacaaccaccataacatgctgcgatgtgacaagcaaagtggccggttgcttatcatacttgcagaacggagggaacgtgccgaaggcttgctgcgacgggatccgatccctgaacaacatggctcgaaccacccctgaccgccaaaccgtgtgtgggtgcttgcaagctgccgctaaagctgtcaaaattaaaggcaacttggctgagaccctcccagccaaatgtagtgtcaacatcccttacaagatcagcacttgcactaactgctaaaatgtgaagtgagatggatg

SEQ ID NO: 10718 - DNA, 394 bp, Gossypium hirsutum
  Clone ID: LIB3135-022-Q1-K1-F4
cccacgcgttcgatgggaaatataagccctttaacaggtacggagggagaaattagaggaaggggccgcgccgcgaattcagcaactatcagatccaactcagatgctgctctcgtcagctcaatataatatttgctgaactgaaggctaagaaaaatgggcagaagagaagctattttcctactcaaaatcaaaacgaataatatatctgaactctttaatgcctacaataaaaccctacgacgcttgttgattgtaaaaataaaattaagcacgatgcatggcaaaacactgtactaaagacatggcgaggacgttacaaagaatgttcatgctgcacaaaaggctctttgggtgcgtgcaaaagcgaaactctctggctcaacttggaaaa

SEQ ID NO: 10719 - DNA, 92 bp, Gossypium hirsutum
  Clone ID: LIB3135-022-Q1-K1-F5
gtccaaaaaaaaaaaaaaaaaaaatttattttaaaaaaaaaaaaaaaaaaaaaaaaggctgtgattaaaaaaaaaaaaaaacaaaacaaaaa

SEQ ID NO: 10720 - DNA, 354 bp, Gossypium hirsutum
  Clone ID: LIB3135-022-Q1-K1-F6
aatatctttaaaaaaagaatatgaagaaaatgctaaagtgtgagatcaaagaaaagggggggggtataccagaccactatatattcacaactgatgaacgagccaatcgtaatgttatatatctacacggagttatttttctaccaaaatataaacaacttttatgatattaaaagatcttactaatactaaacttaatcctgactacaaaagtgtatgccatatagcactcgctaaagaaaataattcagacctgaagagattttgataaggacagattcttacacctgtactgctacaccatttggtaactttcatacaggcattgggaatacagaagctcgctcagtatta

SEQ ID NO: 10721 - DNA, 312 bp, Gossypium hirsutum
  Clone ID: LIB3135-022-Q1-K1-F7
aaacccggatcgacgcatgcgtacggcggatataacgtatgctgtggcttttatttcaaacgcggcggatgttgatatggtctgtgactctgaaatggtgggcctcgttactcgaggaggcggagcgtctgatgggatctgaaagacttatggtcgtagggatagcatttaagtgggctttggactttgctttctcagtgggatgatgacgtgtttcatatattggtactttattgttgatatgtagcatttagaaatctcttatttttgacccatgtttatgtgataaaaaactatggatggaagtatact

SEQ ID NO: 10722 - DNA, 429 bp, Gossypium hirsutum
  unsure (1)..(429): unsure at all n locations; Clone ID: LIB3135-022-Q1-K1-F8
aaaagagggaactcgtttttgaaaaccctaagcagaaggaagaaatcgaagtgaggttgtccactgcctttgctccgccgccagccatgaagttcaatatcgccaacctccagtacgagatgccagaagaagctagaaatcgacgatgaccagaaactcaaggggcatgcaaatgtggaacctcttttcaacagcttggccttgcagcaatacattcttttatgctcacaggtatgttaaaaaatttctcatttggaaggtgtgatgtggacctcttgttggatacattatgtactcgtaccattcaaatccgtgaaggaagcatagttaaagctcttgattgtaatgctgctgtggctagtcgggatgcattggcaaagacagattatgctcgattgnttggttggcttgttgataagattaatatat

SEQ ID NO: 10723 - DNA, 375 bp, Gossypium hirsutum
  unsure (1)..(375): unsure at all n locations; Clone ID: LIB3135-022-Q1-K1-G1
ggaaanaaccgggtccgacccacgccgtccgcatgacattgctaccagattantgattgtcgatctttatacggtacgttgtacgtttccatagtatgtgcggaaaaattccttggtgttcggtcttgtaacaacataatgactatggattctagattagcacatttgtaatatgtttataaggcgctacgaacatgagtattccccgtgttggttcgcaccctccagaccttggaagtcactcgtgcacctgatatcctgatagtgggatctattaggatatgtgcgagcaactcttcgggtgaaaggtatctgttgatcagctcttccttccatttcctagtcgtactatcaataagatccaaaacaaattct

SEQ ID NO: 10724 - DNA, 161 bp, Gossypium hirsutum
  Clone ID: LIB3135-022-Q1-K1-G12
gtggagattacatgtttatatctttttgtactttgttatgggagagggttagtaaacgtgcacaagcttcattattttttcttattgctgtttcatttcaataatccaattcagaatttccaagtaaaaatacacagaaaaacatgaccataatttccttt

SEQ ID NO: 10725 - DNA, 370 bp, Gossypium hirsutum
  unsure (1)..(370): unsure at all n locations; Clone ID: LIB3135-022-Q1-K1-G2
attctctcttcaaaccaagaaaacaagataaaaaaagatgtctaagctttgttcacttggcggagctgcgcttctttttaatttcatgcaaagctatgctgctaggcccgagccaactttgtccttaacccaacatgagggagttgaggcagagaaagttgatgctgatgagaactgtgaaggaattggcaaagaggagtgcttgatgagaagaacccttgctgctcatgtggactatatttatacccagaatcacaagccatgaagttgaattgttatggtaaaatattggttcaatcgtagcatcaaaagccataaataaaatcacatatatttccattaaaaaaaaaggggnaaacaccccaggaat

SEQ ID NO: 10726 - DNA, 295 bp, Gossypium hirsutum
  Clone ID: LIB3135-022-Q1-K1-G3
cccacgcgtccggtgaattgaagcttcaatttacactgtgtgtcttgagagttgtttggttgctgatgtaaagtagcatatagtcaacatttcagctccttaaaaaaaaaatcattattgataagaaattcttgggttgaaaatcatagattttgttttccatgcaatatgcatgtttaaatatcgaatgtaaagagttgatgttgatttagtatagagtttgtaaaatccttactttgaaacagtcaaaaaccatccgtgttattggtaaaagtattgattttctattctaagg

SEQ ID NO: 10727 - DNA, 438 bp, Gossypium hirsutum
  Clone ID: LIB3135-022-Q1-K1-G4
cccacgcgtccgcccacgcgtccgtagggtggttgtggtgggattgttacggcaatctgtagatctcaaaaatgaagcttatgcatcacaaattagcttatctgatggtgctgttgaaagtgtattgccaacatatagttcaggcgatgagaatcaggatgatgattcggaggtgcttctcaaccaactgcagggcagtgcgtgataacctattatttaaaatctataagtgcagggaaagttttgtatctatcttatcatggaagtcatgagttagcatatgctctgatgttggcaaagaaagtgaacttatagccatttctcccaaccattttgtgcaagggaagatacacttggcaggtaaaaaactcacctacatgaattcttgctggagccctttcctttgcccttgtttcaaatgtatgaattttccaattt

SEQ ID NO: 10728 - DNA, 356 bp, Gossypium hirsutum
  Clone ID: LIB3135-022-Q1-K1-G5
aaaccaccaaaaccaccagtttatgtacctcctaagaaagagaaaccaggacccgggcggccattttatgaacatccaaagaaaccaccgtatggtcactatccaggacaccctccattggggaagcctcaatagagacatcccatcggctagccatcccaagaactgagctactatggctatatagataaattagtatctatacaataagagtttctttctactcatgttctattctcttgtatgacatgtagtaatgttttcttttacctgcgagaatgccgatggcagtacctattggaatgcttattttatgtcttcttgtttctcaatgagcaatatcctgatttcaacac

SEQ ID NO: 10729 - DNA, 240 bp, Gossypium hirsutum
  Clone ID: LIB3135-022-Q1-K1-G7
cccatcccttcaatcaaatccataattatttatggaagacaacgacatctacgtgtttcgttttttaaacttgccatatatcaaacattcctcatctataaaaacaatctctcttaatactaaaataattaaaaccaaaatctcaaagcttggttccatctacaaccttttactttaagtaaggatgacaaagataaaaatcccaatcttgtaaacgtgcataaaacctatttttaaaaa

SEQ ID NO: 10730 - DNA, 409 bp, Gossypium hirsutum
  Clone ID: LIB3135-022-Q1-K1-G8
accacacatacactcactttccaattcctttggaatcgactacaccgaccccggggctgtggagttgatagtaatgacacttatacatcttgatgccatggatggtaagatcaacgtatccttgctgcaaaagtgttaaactttccacaatgtcaatacaaaacaagcatttgctaatgcactaacaacggctacatctataaaaacactccgaaacccacccataggcccattacagacactcccatatcaccacaacccggctattcgcagagcaccatactaaagcgacttaccaactaaagaaacaatgggaaatacaaaaaggacataccttgaggtttatcattaatatcaagccatcggaggacatacatcaagatgatgaatataactaattaagaacaaa

SEQ ID NO: 10731 - DNA, 205 bp, Gossypium hirsutum
  Clone ID: LIB3135-022-Q1-K1-H1
cccacgcgtccgcccacgcgtccgaatttttagcattttcctttggcattgaaaacatggcggacaatttgcgcctgtcccattggcatatacaaataatttttagttgtgtgctaaaaaaaaaaaaaaaaaataaaaaaaaaaaaaaaaggcctggcgttcatataaaattccaactttcaaaacgcaggcatgcaacatcata

SEQ ID NO: 10732 - DNA, 197 bp, Gossypium hirsutum
  Clone ID: LIB3135-022-Q1-K1-H10
cccacgcgtccgcgaaaccaaatcttctctttctttttcttctgggagtgaagctgaaacttcttgttggtgcggaggaggggtgagagatctgcgtgatgggaggaggcaatggccagaaatcaaggatggctcgtgagaaacacgtggagaagtacaaggccgctaaaggtagtcaagctggaatcaaaataaga

SEQ ID NO: 10733 - DNA, 163 bp, Gossypium hirsutum
  Clone ID: LIB3135-022-Q1-K1-H11
ggtcgaccacgcgtccgaaaaatggagacaagcaaataaggaagactgttacatatgcataatatattgtctctgggatcgggtgtatcagagtttcttcgagtgatgttttgaagaaatagcacagcttttaatgaacattggctttctggcgttagcccta

SEQ ID NO: 10734 - DNA, 123 bp, Gossypium hirsutum
  Clone ID: LIB3135-022-Q1-K1-H12
gaacaatggaccctatctaacacggaagtttccctttcgattccgtgtgcgatccaaagagctcggagcggtaaaccctatatacactccttagcttcaatgctactagtgaactcttaaaac

SEQ ID NO: 10735 - DNA, 443 bp, Gossypium hirsutum
  unsure (1)..(443): unsure at all n locations; Clone ID: LIB3135-022-Q1-K1-H2
gcaaaataagggaaatttagggttttatttgaattaggggaaaatggcgatgaggaaagtggcagcgagataaaagggatgaaattgaaggaagttcctggctacttcaagccgatgctatctatgggttacttgaagaaatctgttcaaaggggtttggacaattaccatgctaagtacattgagactgattctatcgaacctctctaccatgtctgtttcggtgggatgaacttttcttaccttgttgctcttcccaacgagcgacgccacctcgagcacaagaagcatgctgagcaacacggtcatcattaatcccatctagctttaaagatggtttggatcgttgttgtgcccttctcggttttatccagtaacaattcgatttgcttaatgctttttggttgtaatttgtgaacaatgtangcagaggaagatgctgt

SEQ ID NO: 10736 - DNA, 368 bp, Gossypium hirsutum
  Clone ID: LIB3135-022-Q1-K1-H3
tgaagacgacgtcccgcctcctggtcaactgtttgctcagatcggggcgggctgctttgggggcgttgaactggctttccagagagtttcggagatcaccaaaactgaagttgcgtattcccaaaggttcatgcataatccgagttatgaaaacgtgtgttcggggactaccaatcacagagaagtggtgagggtttagtatgaccctaatgagtgtagctatgacactttgcttcatgtcttttgggctcgccatgatcctactaccctcaaccgccaaggtaatgatgttgggacacagcacacatctgggatttacttttacagcccatagcatgagaaggcagcagtggaatccatggaaaaac

SEQ ID NO: 10737 - DNA, 444 bp, Gossypium hirsutum
  Clone ID: LIB3135-022-Q1-K1-H4
cccacgcgtccgcgatgatggagaaaggcaaagagcccgccgcagccaacgaggatggcgaggttggtaaggccgagagcgaggagattcaggaagccttagaaattgtcctctttcaagtctctgaatgttatgtttatttgatacctccaaggaaaactgcagcatcttacagggctgatgaatggaatgtcaacaaatgggcatgggagggaactttgaaagtcattagcaagggagaagaatgcattatcaggcttgaagacaagaatacaggtgaattgtatgctcgagcatttctgagagatggagagccacatccagtggaatctgtaattgatagcagtagatattttgttcttcggattgaggagaatattggtggtcgccttcggcatgctttcattggcattgcgtttcgagagagaacagatgcttatgatt

SEQ ID NO: 10738 - DNA, 191 bp, Gossypium hirsutum
  Clone ID: LIB3135-022-Q1-K1-H5
gatgaatacacttcatatcatatattattctgataacctatatgatacaattatggcgggtaattaaaccctgtgcccttggcctataccaattacttttaatttaccgcttatctgagaatctattatatatcactaattcacaggatatcacaatgcaaatgaacaacctactggctttaggcacattt

SEQ ID NO: 10739 - DNA, 442 bp, Gossypium hirsutum
  Clone ID: LIB3135-022-Q1-K1-H6
catgaaagtgcctcaaggaggatgggtgcctcttgtgctgtctgtcatctttatgttgggtatgtacatatggcactatgggactcgcaagaagtacaactttgacctgcacaacaaagtatcactgaaatggttgcttggcttgggtcctagcctcggtattgtgcgtgtgcctgggataggcctcatttactctgaactggcaacaggagtccctgcaatattttcccactttgtcacaaacctgccagcgttccataaggtgctggtttttgtttgtgtgaaatcagttccagtcccatatgtttcaccagaagaacgctttcttattggtcgggtatgccccaagccatatcgtatgtataggtgcattgtcaggtatgggtacaaagatatccagcgagatgatggggattttgaggaccagcttatacaaagcata

SEQ ID NO: 10740 - DNA, 391 bp, Gossypium hirsutum
  Clone ID: LIB3135-022-Q1-K1-H7
ggcctccatactttgaaccctagctggagaaaaaaaccgtaattttcttggaaaccgggcacctcgattaatttatctccagtcaatcgccgagaaaaaaaatgcagcaccagaggctgaagcaacagcaacaagccttgatgcaacaagctcttcttcaacagcagtctctctatcatcccggcatcttagctcctcctcagatagagccaattcccagtggaaatctgcctcctggttttgttccaagcacttgccgcagtgtgtatgtgggaaatatgcatacacaagtgactgaaccactacttcaagaggtttttgcaagtactggccctgttgaatgttgcaagcttgtcagaaaggaaaagtcatcgtatggattcgtccacta

SEQ ID NO: 10741 - DNA, 439 bp, Gossypium hirsutum
  Clone ID: LIB3135-022-Q1-K1-H8
cccacgcgtccgcgcactttccgaagccgatggaatcgactacaccgaccccgaagaggtcgagttgttagtaatgacacttatagatcttgatgccatggatggtaagagcagtgtatcgttgttgcaagagtgttcgagttcccccgatgtcaatacgagacaagcattggctaatgcactagcagcggctccgtctatgtggacactcggaaacgccggcatgggcgcattacagaggctggcagaagacgacaacccggcgattgcggcggcagcatctaaagcgatttacgaactaaagaaacaatgggaaatagaagaaggggatagctggaggtttatgatgaatatgaagccatcggaggacatagatggagatgatgaagataactaattaagaagaaataattttaaaaagaaagtggaaattcatact

SEQ ID NO: 10742 - DNA, 359 bp, Gossypium hirsutum
  Clone ID: LIB3135-022-Q1-K1-H9
tccactcgttcgtccagatttcatattgcattacgatggcgtcattggattcaagggaatcgcctgctaataacccaggccttcattttccccctgacgaagccaccaaaggctacatcatgcatcaaaccatgtttcgtattaaggatccaaaacgtactcttgaattttatagtcgtgttttgtgcatgacgttgcttaacaaagtggatgttccatatatgaaaatgacattgtatatgatggtatatgaggattgttcatcaacaccaaatgacccatttgagaaaactatttgtacattttgaagaccagctacttatgaactaacacacttttggggtaccgaaaactatcct

SEQ ID NO: 10743 - DNA, 116 bp, Gossypium hirsutum
  Clone ID: LIB3135-023-Q1-K1-A10
acgctttgagattagccttcgtggccggttatctgtagcgatagcgctccactgtttcgacacatggctaagataaatgacggtgatgacttgcgggtctcgtttatggaacttga

SEQ ID NO: 10744 - DNA, 253 bp, Gossypium hirsutum
  Clone ID: LIB3135-023-Q1-K1-A11
cgagggacgaggcaggcgaaagcctacgcgtagggcaaaaaggggggaatgcggccggggcgagaaacctggggggggggaagggcgacggacaggaagagggacgggcggggggaagaggacgtggaagaagcggacgggggcgggacaggggggacggaaagaggaacgacggggaagggggggaacggaagaagcggtgaggagaaacagaggagaggagagacaggagcaaacagaacaggggggaggg

SEQ ID NO: 10745 - DNA, 445 bp, Gossypium hirsutum
  Clone ID: LIB3135-023-Q1-K1-A12
ccacgcgtccgcccacgcgtccgattgaagccattcaactgtaatctcctatatcatgatcgagtcaagatagatccagaattggagaaacagaccggagctaaattcgaggaggatcttgatgcaatgcttccaaaatgtgacattattgtcataaatatgcctctaactgagaagacaagagggatgtttgacaaagatcggatcgcgaagatgaagaagggagtccttattgttaacaatgctcgaggagcgattatggatactcaagcagttgctgatgcttgttcaagtggacacattgcaggttacagtggagatgtttggtatccgcaaccagctccgaaggaccatccatggcgttacatgccaaatcaagctatgactcctcatatttctggtaccaccattgatgcgcagttacgatacgctgccggagtcaagg

SEQ ID NO: 10746 - DNA, 323 bp, Gossypium hirsutum
  Clone ID: LIB3135-023-Q1-K1-A3
caggaggtggctgtggaattgaacgcgtagatgtatctattgatggcggaaaaacatggatggaagccactaggtttcagaaaactggtatcccttacatagcagatggcataagcaatgacaaatgggcatgggtgctttttgagctaacagttgatatcccacagagcactgagattattgccaaagcggtagattcagctgcaaatgtgcaacctgaaaaggtgcaagatatttggaacctaaaagggattcttaatacttcatggcccagagttcatggccgcattggccactcaaatatgtaaaaacgaaccccgaat

SEQ ID NO: 10747 - DNA, 237 bp, Gossypium hirsutum
  Clone ID: LIB3135-023-Q1-K1-A4
gaaaaccccaaaagaaaaaagaaaacagaagaagcaagagaacgattcaaaaatcaccttttttttgtattgatttcgcgtttttgatacaatatgcgtgggtattccccctttcaatttttcgtaatggctttatatagcccaaaaggaaatacaaaatccctatttttggctttcttttttctctgctattacaaattttgctcaatattgtgtgctattttttttatatgtttc

SEQ ID NO: 10748 - DNA, 277 bp, Gossypium hirsutum
  Clone ID: LIB3135-023-Q1-K1-A5
gccacgcgttcgatctggtggaacctatcataatacaaggggtaggctttggaggttcgagtttgggtaaaaaaatgccgctgaaatggttacagctataatttaaaatgtacattttactctgcattgcgtgtgtttaggggatttgggattataggggaatatgaaaacatttttctttctttaatttatttcttggatttctgtctgctacccatttgtctttgtgcattttccccgtatcatataattaagttattatttatcgctttttttt

SEQ ID NO: 10749 - DNA, 176 bp, Gossypium hirsutum
  Clone ID: LIB3135-023-Q1-K1-A6
gtggtgggtactgtatatggagttgttgggttaatcattttttggaggctttgttgcttaaaaatatatgaacctcttctttgatgctcaaaggaagatatagattacttggcttaatcttttttttttctggagtgtggatcagatgttggaaaaaaaaaaaaagagaatttatt

SEQ ID NO: 10750 - DNA, 313 bp, Gossypium hirsutum
  Clone ID: LIB3135-023-Q1-K1-A7
tcgcccacgcgttcgaaaccagccaagcttcttgaaacctagagatatagctgaagccaagaaagagaaatatcctgcgaatggcatcttggatgggaagtttgtaaagacaatgtcaatgaattgaccaaagacatgcccttgaaagttccatcgcatagtataccgtcactagatatgtaaatatttggctaccattaatggttcagaaactttagacgttcctttgctgttacaggccactgatacaaatcatagtaatttaacagtggattacaaaaaaaatgcattgtgtatgccaacactagatatg

SEQ ID NO: 10751 - DNA, 241 bp, Gossypium hirsutum
  Clone ID: LIB3135-023-Q1-K1-A8
acttgttaaaagtgatcagctactttgcaatgggaggcagggtcacctatataacagaaatgcgagacatggactcgtgaccaatatgttacgtgagcatgaaattatggatggtaatggtactgaaatgaatcctgtggattttttggttgctcagttccctggttttgctaccgaaaaccttgcggaggcttattttgcgaatagttgtgatttaaatcggacaattgaaatgcttact

SEQ ID NO: 10752 - DNA, 448 bp, Gossypium hirsutum
  Clone ID: LIB3135-023-Q1-K1-A9
aacgcatattgtatgttctagaaagaactagcgtatcttcagacatcatccttgacacttgacgaggcagtcaagactacaaatcgcagggataatgctttggagaatgttgagaagccaagggtggagaataccataagttacatcaagggagagttggatgagcttgaaagggaggatttcttcaggttaaagaagatacaaggttataagaagagggagatagagagacagcttgcagaggccaagctgcttgctgaggaacaggttgctgagaaggcttccttgagaaaaggggtctctataaatgcagctcacaatatgctatccgcagccagggagaaggatgaagatattattttctaatgaagaaggtagttatggtctttcctaagagttctgggtttctatctggtgcctatttgatggggggagatactttaattat

SEQ ID NO: 10753 - DNA, 447 bp, Gossypium hirsutum
  Clone ID: LIB3135-023-Q1-K1-B10
acccacgcgtccgtgctattgttcaagttgatgctgcttcattcaagcagtggtatctccagcactatggcattgacattggtcgcaagaagaaatcagctgcagccaagaaagaaggagaggaaggtgaaactgctactgaggaggtgaagaaaagcaaccatgtattgaggaagctggagaagcgtcaacaaaatcgcgctcttgacccacatattgaggaacaatttggcagtggtcgtctgtgggcttgtatctcttcacggcctggtcaatgtggccgtgcacatggttacatcttggagggcaaagaactggagtgctacatgaagaacatccagagaaagaaggggaagggagctgcttaaaaaattatagcatagttttcagcattcatatcagaatgccgcccttaaggattgcctttcacatttccagaacatttaa

SEQ ID NO: 10754 - DNA, 446 bp, Gossypium hirsutum
  Clone ID: LIB3135-023-Q1-K1-B11
acccacgcgtccgcttttttaatgtcctcaatgaccatctccttaagcagctgccagtgactccagcagccttccgaaacttaaacggtgagggttgtcataaagggtagggttcacggtgtgttctataagaactggaccatagagaatgccactcaacttggcttgaaaggctgggttaggaacaggagggatggctcagcggaagctcttttctctggaaccccggattctgttgaggagatggagcaaatgtgtcggcatggcccaccagctgccatggttaccgggcttcaagttgtaccttccaatgatgatcctggtaccggatttcagaggaagcaaacaggctgatcagactacacttaaagagattacccccattctgtattaacatgtatagtcgacttctctcacgaataaaatagccgagtcatctatgatta

SEQ ID NO: 10755 - DNA, 391 bp, Gossypium hirsutum
  Clone ID: LIB3135-023-Q1-K1-B12
gtcactcgttcgagtacctgtggatttgttgctcctgagggtttagccacaggtcatttgagtgcttggagggatgtcgatagtttctgagttcttcgtgcggggatggtatggtgccgccgggccctttgacagaatcgaccattcggtgaacacagcctggtgggatgggcgcaaaccatacctggccaacagacgccatatgtgtgcagcgcctatattaccgtgcgtgaacgccaatatgtaatggaaggtgccttcaacggcggaacccttgatgtgggatgcttgactgttgaagcctaattcggaccgaggatgaacgaggacgcaaccgcattggagcgagttcacgatacaagtgaatgccggagctatgcaaacatcatta

SEQ ID NO: 10756 - DNA, 112 bp, Gossypium hirsutum
  unsure (1)..(112): unsure at all n locations; Clone ID: LIB3135-023-Q1-K1-B2
gctgtatgacagatgagtacgcacggacggctttagactggggagatatttaccaaggttttgcaaatggggagttcttggtgtcntcaatgatgaaactatggtttgatga

SEQ ID NO: 10757 - DNA, 300 bp, Gossypium hirsutum
  unsure (1)..(300): unsure at all n locations; Clone ID: LIB3135-023-Q1-K1-B3
gttaatgatggcaaggcattggacaaagagttgcggaccgagatcccgattcctcgtggaggaccgcatatttcttgtgctgcgataaacaaacgactgtttgtaatctgccgtaacaagggtgatattatttcaatactttgatactcccccagttcatagacatatatacgtgacattactttctgnggactaaaggattctcatcacttgattgccttgtttggagaagaaaataatgctgtgtgcaatatccccatttggagtcccactttaacgtatactatatgttgttacaat

SEQ ID NO: 10758 - DNA, 123 bp, Gossypium hirsutum
  Clone ID: LIB3135-023-Q1-K1-B4
gttcatatattgaattaaagtgatttttttatatcggtagttaccctagcacatcttgtctcttttgctttttattgctgttttgacgcaggcgtgagatttggacgtctgacaagtgggacg

SEQ ID NO: 10759 - DNA, 105 bp, Gossypium hirsutum
  unsure (1)..(105): unsure at all n locations; Clone ID: LIB3135-023-Q1-K1-B5
tcgcccacgcgtccggccacccagccgtttatattttgttcatggcttggatgctgtggggggggttccttatgactatgttgtcncacaaatttcattttattt

SEQ ID NO: 10760 - DNA, 268 bp, Gossypium hirsutum
  Clone ID: LIB3135-023-Q1-K1-B6
cccacgcgtccggtacggagttgcgtcagctgtagatatagactaggctaagggacggagccttccactgtagaccgggactacgcaaaggtagaacaccatagaaacttcgcttactttctcataaaccttgattttgctacgaaaaataagaacccggaatagcggaaatcggttcgtgttccgctatcaagtaagttgtctttgcccaagtgtgaactgcagacgactcttcagtggtttcatttccttcttactttactttttg

SEQ ID NO: 10761 - DNA, 381 bp, Gossypium hirsutum
  Clone ID: LIB3135-023-Q1-K1-B7
cagagtcaaaacatactagtagaaaaaataattttgagataattggttttagagacccagttttatttattggacacctttctaaaaattccatcttgatggtagacaaaccatggatggaagtagttaaatcttttgatactgccccagttcagagacatatatatgggacataacttcctgtggacgaaaggatgttcatcacttgagtgccttgttaggagaagaaaaaaatgcagcatccaattaccccatttggagtcccactttaacgttaactatatgttgttacaatgggggtggtagggttgggggatcaaaagcattgtgttgtgtattgtactcaatttttgttaacgagcttatattagtttttctgtt

SEQ ID NO: 10762 - DNA, 250 bp, Gossypium hirsutum
  Clone ID: LIB3135-023-Q1-K1-B8
cccacgcgtccgggagtcattattttatttgtgggtataaaggttattatgaatatgccaagtcaaaaggagtagatgtcggtgtgcctgttggttgatgttcttattgatggaacagttcctactggttctggtctatcaagctctgccgcttttgtttgttcatctacaattgctattatggctgcttttggtgttaactttctaaagaaagaattgccaagttacatgtgattgtgaacagaacatt

SEQ ID NO: 10763 - DNA, 429 bp, Gossypium hirsutum
  Clone ID: LIB3135-023-Q1-K1-B9
cccacgcgtccgagatgcaattcataaggtagctgcagcttatgactgcaaaattgttgaaggtgttcttagccatcaactgaagcagtttgtgatagatggaaacaaagtcatactgagtgtctccaacccggatacaagagttgatgatgcggagtttgaggagaatgaagtttatgcagtagatatagttgcttcaactggtgaaggcaagccaaaactattggatgagaagcaaaccactatttataagagagcagttgacaagaattatcatttaaagatgaagacctctagatttattttcagtgaaataaatcagaaatttcccattctcccattcactgccagggctctggaagagaaacgagctcgtctaggtttagtcgaatgcgtgaatcatgatctggtgcaggcatatcccggtct

SEQ ID NO: 10764 - DNA, 297 bp, Gossypium hirsutum
  unsure (1)..(297): unsure at all n locations; Clone ID: LIB3135-023-Q1-K1-C1
tacgcatacgcatagggtagacatacgagaagaataaattattttgtaataattggctttagagtaccccgtgttatttattggacaccctctctaacaaatctcccatctttgattgtgtagacacaatccatcggagtggagattatgttaaaatcttttgatacggccccagntcagagacatttatatgggacataactttctggggacgaaagganttttcatacttaggggccttgtttggagaagaaaaaaatgcagggtgcaattaccccatttggaggcccactttta

SEQ ID NO: 10765 - DNA, 432 bp, Gossypium hirsutum
  Clone ID: LIB3135-023-Q1-K1-C10
gctccattgacatactgagggatgtacatgctgccaaggaacagaggaagccatatgttggggtctttgttggcgttaatggagttgggaaatcaactaatctcgccaaggttgcttactggcttctgcagcacaatgttagtgttatgatggctgctggtgatacattcccgttctggagctgttgagcagttgacaacacatgcacgtacactccagattcctatttttgagaaagggtatgagaaagatcctgcacttgtagcaaaggaagcaatttaagaggccactcgtaatggatctgatgttgttctcgtcgatacagctggtcggatgcaggataatggaccactaatgagagccctctcaaagcttatatacctcaacaatccacatctaatcttatttgtgggagaggcactacttggaaat

SEQ ID NO: 10766 - DNA, 407 bp, Gossypium hirsutum
  Clone ID: LIB3135-023-Q1-K1-C11
gccactcgtacaactaggcgttcactttttctacatttggggaactggaaatggggttatggctattactagggagctgtacaattatgatgacctggatcgggggacgaccgatactgacctgaactctgataacacaaagaaccttgtgcagaagtgttttttttggtactagtaggagtggtcttcataggacataaactgtggaagaacccaatctgcttggctcggagatcctacgtatatggtaacgggaaatgctatggtacaactgaggaggctaaaaatatcattacaacattatacgaacatgaaattccttatgatgataacggggaggtcggagagaactctacattagtgcgacttacctttgtgaaaagactgaggcgctctgatttacatgt

SEQ ID NO: 10767 - DNA, 436 bp, Gossypium hirsutum
  Clone ID: LIB3135-023-Q1-K1-C12
gtgattcgtaaaactagggatttaaatttaccacatttggggaaatgaaaatggcattatagtaattacaagaaagctttaccattataattaccttgggcgacagcccacggttactgtcgtccactcttattacacagtgagctttttgcagtgttttatttattgattctcttagttctcgttttcatcggagaagaaaagtcaaaaaacaaaaatttcatggctcggaaattctttgtcggtggcaactggaaatgcaatgggacaactgaggaggttaaaaagatcattacaacattgaatgaagctgaagttccttctgaggatgttgtggaggttgttgtgagccctccatttgttttccttacctttgtgaaaagtctgttgcggtctgatttccatgttgctgctcagaactgttgggttcgcaaag

SEQ ID NO: 10768 - DNA, 96 bp, Gossypium hirsutum
  Clone ID: LIB3135-023-Q1-K1-C4
ggtcctcttttggattcacttgaccatatcatatagggtacacccaagctcatcacttctggtttgggtgatatcgacgatctaatgtctgccacc

SEQ ID NO: 10769 - DNA, 235 bp, Gossypium hirsutum
  unsure (1)..(235): unsure at all n locations; Clone ID: LIB3135-023-Q1-K1-C5
tcggttcttgatatcgaagctctctacgatatctttttccgtaccctcaagctcaccactccaagttttggagatctcaaccatctaatttctgccaccatgagtggtgtaacatgctgccttcgctttcctggtcagcttaactcggatctccgcaaacttgccgtaaaccttattccatttccccgactacatatctttatgtggtgatttgcacctntcacctcacgcggtt

SEQ ID NO: 10770 - DNA, 161 bp, Gossypium hirsutum
  Clone ID: LIB3135-023-Q1-K1-C6
cccacgcgttcgctcttatttgaactcaacttcccagctaatattagcatcatggccgttgccacttatgactacgagaatacctccccagtcgcccatgccaggctcttcaaggcctttactgtagaagctcctaaagtttcgcccactgctgcacctaa

SEQ ID NO: 10771 - DNA, 274 bp, Gossypium hirsutum
  Clone ID: LIB3135-023-Q1-K1-C7
gaacggcacttgcacatgggttagtcgatcctaagagacgggggaagcccgtccgacagcgcgtccagcgcgagcttcgaaagggaatcgggttaaaattcctgaaccgggacgcggcggctgacggcaacgttagggagtccggagacgtctgcgggggcctcgggaagagttatcttttctgtttaacggcctgcccaccctggaaacggctcagccggaggtagggtccagcggtcggaagagcaccgcacgtcgcgtggtgtccggtgcg

SEQ ID NO: 10772 - DNA, 170 bp, Gossypium hirsutum
  Clone ID: LIB3135-023-Q1-K1-C8
cccacgcctccgggaacgcgtacgtccactcgggctaccacgcgtacgaaaaattagcgcagttatactgtgtacgtgttggtgatacccgtgtctaatgcttttatagctagtacagtgtgtactgcttctcacatttgaagctcgtcgtctatttgtatgctcattac

SEQ ID NO: 10773 - DNA, 225 bp, Gossypium hirsutum
  Clone ID: LIB3135-023-Q1-K1-C9
cccacgcgtccgcccacgcgtccgcggacgcgtccgcccacgcgtccgcccacgcgtccgtaattttattgcatttctactttttttgtggtggtgatacccgtttctatttcttttctagcgagtaatgtatgtcatgttttccacatttgatgcttgtggtctattatatactcgggtatcggtaatagatgaaaataaaatttcccacttcactttcttcct

SEQ ID NO: 10774 - DNA, 369 bp, Gossypium hirsutum
  Clone ID: LIB3135-023-Q1-K1-D10
tgccgtgtgtcgactgacccttcgaggttctgacggagacggacatcgcgaatctactggcacgggatcattcaccaaaattaacatggtgcatcctgttggtgcatcgataggaaataactttctgcagggcatgtgctcgatttggtctcggcttgtatctgtatcatgaagaatatatgttagagagaggatggaggctgactaacctttcaaatcaaacgtgcctttagctcttgcatgaaaactggggtgtgacttaaattctgcctttccctgtttagcatgacatgatatataatcacatttgctaacgctcttgtagaatatatatcaaatctttaactaatgccaatggttgagaatgtg

SEQ ID NO: 10775 - DNA, 378 bp, Gossypium hirsutum
  Clone ID: LIB3135-023-Q1-K1-D11
cccacgcgtccgcccacgcgtccgaaaaaaaaaaaatttaaacctccaaagaaaaaatgaaaaaggggggggggggaataacaaaaaagcaaaacaaataaaaaaaaccaagggcgaaaagaacacgggtactgacaaaacaaaagggattacacatatagctggggggccgtgatagacgtacccattctaccaaggcctctcatttataaggagaacacctgtcaaaaaaacaaaccgtccatggtaaagccccggcgtgtcaaaactaactggctaggcaacccaaccccttttgaagataaagcgattattacaacagcgcccttacctaagcggtctcaaaaggaagacggccccaaccgtgagagctctcca

SEQ ID NO: 10776 - DNA, 423 bp, Gossypium hirsutum
  Clone ID: LIB3135-023-Q1-K1-D12
gtgattcgtaaaactagggatttaaatttaccacatttggggaaatgaaaatggcattatgggtattcaaaaaaggccttaccattataattaccttgggcgacagcccacggttactgccgccactcttattacacaagaagctttttgcaatggtttatttattggttctcttaagttttggtttccatcggaaaagaaaagtcaaaaaacaaaaatttcatggttcggaaattctttgtcggtggcaactggaaatgcaatgggacaactgaggaggttaaaaagatcattacaacattgaatgaagctgaagttccttctgaggatgttgtggaggttgttgtgagccctccatttgttttccttacctatgtgaaaagaactgtgcggtctgatttccatgttgctgctcaaaactgt

SEQ ID NO: 10777 - DNA, 56 bp, Gossypium hirsutum
  Clone ID: LIB3135-023-Q1-K1-D4
ttcacgcttacgacataatgttagcaaatatttaaaatgaataatagaaaaaatat

SEQ ID NO: 10778 - DNA, 105 bp, Gossypium hirsutum
  unsure (1)..(105): unsure at all n locations; Clone ID: LIB3135-023-Q1-K1-D6
cccacgcattcggncaagcgttagttcattctgacagacaattttagaatcaagcggcgggggtctaatgagtgcgagaaaagcacaccaggcgcacatgccagg

SEQ ID NO: 10779 - DNA, 165 bp, Gossypium hirsutum
  Clone ID: LIB3135-023-Q1-K1-D7
cccacgcgtccgagatggcgtaagtttattctggcaagcatacttagtacctacatgcggagatctatttcgtgcgtaatagtcatactattagaagattgtatgatagccacgacattgtgctagtcaattgatgtctctaggccgtcgtttactgttatctat

SEQ ID NO: 10780 - DNA, 164 bp, Gossypium hirsutum
  Clone ID: LIB3135-023-Q1-K1-D8
ctcacgcgtacgtgatggcgtacgggcagcctggcaaactgcaagatgaacggcatgaggagcactagctcgtgctcactcgtctcagaaattatgtgtggtatgttagcgacgaaatggggctagtctggtcattctacagtgccgtaggtgactgtgatcta

SEQ ID NO: 10781 - DNA, 415 bp, Gossypium hirsutum
  Clone ID: LIB3135-023-Q1-K1-D9
tacactcgttcgctgacgcaaacattcacgcgtgcggccccacgatcaaaaaagcagggcatgattactctgtgcgcggtgaacaaacaaagcctgatctgctgcataacgaggtaaagataaaatgatggggatacataaggcgcgggggcgattagcaactctcttctttgtgatgagatgaatatggatgcatgccactttactgatggtgctttgagactctttcacttggactggaaggcaacaacttcaagcttaaaaaacttgagctggcaactttgaatttctgaactacacaatgataacaagccaatgcagaggaccaaagtatacacctgaaactggaaaactgcatgcaagcgaattgattgtgctatgcagaacacatcaacgactagacgaccgaatgcgc

SEQ ID NO: 10782 - DNA, 317 bp, Gossypium hirsutum
  Clone ID: LIB3135-023-Q1-K1-E10
ctcttttctcctccttgtgtcgtgcagataaaggatgagtacactggatgcaactagagcagaacttgctcttgtagttttgtatttgaataaagctgaagcaagggataagatatgcagggctatacaatatggctcgaaattcctaagtgatgggcagcctggcacagcacaaaatgttgacaaatcaaccagcttggcacggaaagtttttcgtctttttaagtttgtgaacgatttgcatgggcttattagccaagttcttaaaggaactcccttccacttggtctgctaggaaagtcaaagaatgcactgtt

SEQ ID NO: 10783 - DNA, 255 bp, Gossypium hirsutum
  Clone ID: LIB3135-023-Q1-K1-E11
ctttactaggcattttatggtttgatttcagtagaatctatctaaaatacccacaggtggcatctgaatttgggggaaaataaagggtaaatgactaaatgtttatcagggacaatttggtgcttaatatgcttagtgtttgctctaaagtttgtagctgaaattagggtttcaataatttttgtggatttgccataaaaaatatataccaatattggcttttatgatctaaattggtttcaaaaacgaatcttg

SEQ ID NO: 10784 - DNA, 80 bp, Gossypium hirsutum
  Clone ID: LIB3135-023-Q1-K1-E5
aacacgcgttcgggaaaaggttagttaaaacttagaagtagaaataaaaaaaacaggaatgggttaaaataccgaaagaa

SEQ ID NO: 10785 - DNA, 130 bp, Gossypium hirsutum
  unsure (1)..(130): unsure at all n locations; Clone ID: LIB3135-023-Q1-K1-E6
cccacgcnttcggcaaagcgtttgtttaccctttaaggcaacactaccaccttctggacaggaactagctggctcagaaccaccaaacaaggaaaagcttgaatctaaaccacgagtttatacacctcaa

SEQ ID NO: 10786 - DNA, 138 bp, Gossypium hirsutum
  Clone ID: LIB3135-023-Q1-K1-E7
cacacgcgtgcgtgcaagcgtaggtgtcgtctggaaagcaaccggagtacctacgtgataagatcttacttgcgcgaacaaagcaaactagtaacaattttgatgttaaccacgggcttgtcctaggcaaaaaaaata

SEQ ID NO: 10787 - DNA, 355 bp, Gossypium hirsutum
  Clone ID: LIB3135-023-Q1-K1-E8
cccacgcgtacgcccacgcgtacggatggcccgtagaggaaccggcctacatccgggatgtaaaccccatatcgaaagccagactttagcctcgagggtgcgatctcaaccttcggtttcgacgaagaagaaaccgtctccgatggctcggttgaaggtaccgagcgtgtgcttgcactatgcgtgagggggggcgtactgggctgtcgaacgggaggcactagccggggtggggctgaagcacttgcatttgacataagcactgtctggttgttgttgctgcgcgagccaaggctgctagggtttttggcctggtttttttttaactttaagccacttgggttaattgggtatt

SEQ ID NO: 10788 - DNA, 439 bp, Gossypium hirsutum
  unsure (1)..(439): unsure at all n locations; Clone ID: LIB3135-023-Q1-K1-E9
ctgaatgaacgatccttgtggcaccttgcagttcgtggagctctgtattgccgatgtttctgcatcaacgataataactatgctgattggccatctattcctcctattccagataacgtgatggtggagggggatgctcctgaagaagaaatactttcaattctggatgttccgcaagggaagatgggacgtgtcattggaagaaaaggggtttccatcttgtcaattaaggagtcttgcaatgcggaaattcattttgggggtgccaagggcccaccggacaaggtattcatcttatggcccgtgaggcaggtgaggaaagcggcagccatgctgaggggaagaatgatggattgatatttgatgtcttgtanggctctcctctcaaaaactagaactgaaaactgttatcagaatgatctttaaactccttacaccg

SEQ ID NO: 10789 - DNA, 438 bp, Gossypium hirsutum
  unsure (1)..(438): unsure at all n locations; Clone ID: LIB3135-023-Q1-K1-F10
cccacgcgtccgtcttatttgaactcaaagtcccagctaatattagaatcatgggtgttggcacttatgactatgagaatacctccccagtcgcccctgccaggcttttcaaggcctttactgttgaagctccgaaagtttggcccacggctgcacctaatgcagtaaagagccttgaggttgaagctaatcctagctctggaagtatcgtaaaaatcaactttgttgaaggccttccattccaatatatgaagcaccagatcggaggacatgatgaaagtaatttttcatacagttacgatttaatcgaacgtgggcctttgggggataagcttgaaaaaattagctatgagaacaggtttgaggcagctgcaggtggagggagtatttgcaagagctcaatgaaattctacactatangcgataatgttatcactg

SEQ ID NO: 10790 - DNA, 269 bp, Gossypium hirsutum
  Clone ID: LIB3135-023-Q1-K1-F11
cccacgcgtgcgttttatggtgggttccctcttcaactaagacgacatccgcgggcgcggtggcttatgtctgtacccaaaacccgggcacttgcccctgcctatctgacggattccttgcaggctgaaattattggccgttcctcataaaatgacgcttgtctgtatgtatacaagaacgttgtggcattaggcgtgtattataggatcctggcctggcttttaacagggcgagggggttctaaaactcctcccccaatgcatgtata

SEQ ID NO: 10791 - DNA, 427 bp, Gossypium hirsutum
  Clone ID: LIB3135-023-Q1-K1-F12
gggggggtgcaccaatggccacgacagatcaatgtaagggcgggcgttgtggtcaaggcatgaccacttactatcaaatgcaaacaaggagtgcagatgaacctatgacaacctaggtaacatgcgtaaactgcaacaaccattggaaatcctgttaggcggatcctgagatctgtcagtcaatgcggtgaaggtgtaaggttgatcatcttggaagctacattctgttcatctttgtttgtggattgaattttaaataatagtgtaatgacatatttatatgctatatagggactttcttagggataactaggtgtttgggggatgattgtgccaaaatcataactgagttgatacacatcttacgtgattgccacatcctgccattgttgcggaaaacaggagatgtgtctcctttgtatgattc

SEQ ID NO: 10792 - DNA, 421 bp, Gossypium hirsutum
  Clone ID: LIB3135-023-Q1-K1-F2
gccacgcgtccggcacctttaaaggctcgagccttggaaagggaaatcgaggagaaaacaagatctttggccccctctcaagcccgaatccgatgacggcaaaggaccaatcgccggccgatctaagggccgattcaggtgcactccctcttcctttttttatatttattttccttattaaaatgaagttgcaaaaagaaaaagcataaaaaaaataaaatggaaatgaaaatggatagagaccgggtgaggcttaacccttttgaacctctatttttttttttggttttgaattctaaagggcggtttttacaaaggaaatttccccccttacaaaagataaaattcggcttttaaaggcaatatattttttttcggtccctttggttattacttcccccatcattcgcaagccttcttt

SEQ ID NO: 10793 - DNA, 117 bp, Gossypium hirsutum
  Clone ID: LIB3135-023-Q1-K1-F7
cccacgcgtccgcccaagcgtccggttggtctgagaagcaaccgtcgtaccttcgtgatttgaactctctatcgcatgcccgacgctaacgtcgagggtccgatcttaaccttgagg

SEQ ID NO: 10794 - DNA, 424 bp, Gossypium hirsutum
  Clone ID: LIB3135-023-Q1-K1-F8
cccacgcgtccgcccacgcgtccgtcttgattggtgatggggctacatttgatgaaaagagaacttcacgttcatacacgtgggcccagcatttggcaggaattgattacttacctgaggtttcaccattgcttaatatccaggaagcttcaaacaatgaaaccaaaagcgaagctgctatctctggtcttgcattgtatcggcagcagaacagaatgcaaacagttgtgcaaaggatcccgtcacggataaaaactgagcttgctcttgcgtgaagtaacggcccgtatgtttggaggttggatcttggaccaaacaattataaaaccaataggagtggatttcacaatggggtcaaaactgaatattttggctataaaaaataatttcctgtgctaaggtctttgttggcatctttatgata

SEQ ID NO: 10795 - DNA, 359 bp, Gossypium hirsutum
  Clone ID: LIB3135-023-Q1-K1-F9
gccacgacatggtctagggcaccaggtttgctgaaggggtgacatcaatgcaccctgagatcatgttggcttagaacctctcaccctcatttaatggggatgcactgggcatgaccgtggaacaaataagagacttcattccacggatagccaagcttggtttgtgttgacagtgcactacgcgaactggatgacatgctgatgcattggtgaccgacgcattaccgagagatttcgccaggagggggatgctactgtatgtagagaagatcgaaaaagaagatggggacaacggtgcggacacatgggctgaccgctaatggtaagataccaactcttatgatagatatgtcatgaca

SEQ ID NO: 10796 - DNA, 386 bp, Gossypium hirsutum
  Clone ID: LIB3135-023-Q1-K1-G10
agagaaaacaaatttgaatcctagtgaagttggggatattgttgtgggaacggtcttggcaccaggatctcaacgagctagcgaatgtcggatggctgcattctatgctggcttccctgaaactgtgcctgttagaactgtgaacaggcaatgctcatccgggcttcaagcagttgctgatgtagccgcagcgataaaagcagggttttatgaaattggcattggagctgggttggaatctatgaccactaatccaatggcatgggaaggttcacgtaacccaagggtgaagcaaatggagcaagctcagaattgtctccttcctatgggtattacgtcagagaacgttgctcatcgctttggtgtgacaaggcaagagcaggatc

SEQ ID NO: 10797 - DNA, 435 bp, Gossypium hirsutum
  Clone ID: LIB3135-023-Q1-K1-G11
cccacatcatgactaagagttttacctcggagttccctcatgttgagaggtacttttggaccttggttaatcagccaaaaatcaagaagattcttggtgaagtgaagcaggcagtctctctaccacctgttccttcaaagaagcctgctgcccagccaaaagaaactaaaccaaaggctgaaccaaagaaagaagccaaaaaggaggttgagaaacaggcagcaaaggcagaggcagctgaggaggaggaggcaccaaagcccaaaccaaagaatcctcttgatttgctgcctccaagtaagatggtactggatgactggaagaggctttactctaacacaaagaccaatttccgagaggttgcaattaaaggattctgggacatgtatgatcccgagggatactcactgtggttttgtgactacaagtacaatg

SEQ ID NO: 10798 - DNA, 152 bp, Gossypium hirsutum
  Clone ID: LIB3135-023-Q1-K1-G12
accgaattacagatccaattgtatttgagggtgggaatgttgggttcaagaagccagcgcgcgaggatcctgagaagactaacaaaatcccatggcgtaaccctatgcaagcttgctatatgaaccccactttttatatgctgaccggagga

SEQ ID NO: 10799 - DNA, 206 bp, Gossypium hirsutum
  Clone ID: LIB3135-023-Q1-K1-G2
gggaaaccagcggagtacttgcaatatgatttggattctttggaccagaacctggctaagaatatggctggtgagatcattggaactaggaccgaagttgccgacgtgaaggcgacgccgtttcagccttacagcgaggtttttggtctacagaggcttaaggagtgtgaattgatccatggaccgtgggccatgttggctacgct

SEQ ID NO: 10800 - DNA, 429 bp, Gossypium hirsutum
  Clone ID: LIB3135-023-Q1-K1-G4
tcgagacaaggaaattctccaaattgtgaaggagaacttcgactttaggcctggcatgatcacaaacaacctggacctcaagaggggtggcaataaccggttcttgaagacagctgcctatggacattttggaagggacgaccctgacttcacctgggaagttgtgaagcccctcaagtgggacgagtcttaatcttaaaccaagctttgcccatccctcctgctcactggttactttatccacagggctgaataatactcgggtttcttaccctatatctaaaccatcccctgaatggttttaatctacctattaagtgccccattcattttttttcctttgctaatttgaaatttaaaatgggttatctgattttaatccccccttattgaaaaaaaaaaaaaaagggcgggcggtttaaaagattc

SEQ ID NO: 10801 - DNA, 435 bp, Gossypium hirsutum
  Clone ID: LIB3135-023-Q1-K1-G8
gcccacgcgtccgcccacgcgtccgggcacgcgttcgcccacgcgttcgcactgaacagaacaggcgaaaaattgctggttggaccataatgttattatgtgtaggggcatttggccttacctttgcagcttcaaatgtgtggattccgagtcttattcggttaacatgttgcggagttggtggtgttcttcttctgtctggtttgattgtgctcacctgtatagatcaaggaatggatggcaaggcataatttcgggcctacccgggggttcaatattcccctttggtccactttttacaaatggtttgcttcttattaatggtttaccggttattaaattgggggctgcaaccatggcctagggattcggggggcctttgataagggggggtggatatggggtctattggccaacccacaactcttttgttga

SEQ ID NO: 10802 - DNA, 319 bp, Gossypium hirsutum
  Clone ID: LIB3135-023-Q1-K1-G9
cccacgcgtgcgcccacgcgtccgaactaggaggcgcattttccagatacatacctgaaggatgacattggctgatgatgtcaacttggaagaatttggtatgaccaaagatgagttctctggagctgatatatatgcaatatgtactgaagctggtctacttgctttaagggagcgccgcatgaacgtgacacatgccgattttcaaaaggccaaggagaaggtgatgttcaagaagaaagaatgggttccggacggtctctatatgtacaaaaactcggtatatgtatatatattccagcgatattcatggtatgta

SEQ ID NO: 10803 - DNA, 219 bp, Gossypium hirsutum
  Clone ID: LIB3135-023-Q1-K1-H1
cttcctctatattttcctctcttgaataaaccaaaatctaaattgttgatttcaaaattcatcctaagcttgggctatgcaacaactcttgattattcttgatatttttaaaattcttcttgattttcatcgacttgattgctcaaggacgatcaatagtttaagtatgggggagtttgttaagttcaattttgagcttaacttattcaattaaattat

SEQ ID NO: 10804 - DNA, 441 bp, Gossypium hirsutum
  Clone ID: LIB3135-023-Q1-K1-H10
cttcgattatattccttaaaaccatgggaggaaactcaccttgtgcttcttgcaagttgcttcgtcgccgttgtgccaaagactgcatctttgcaccttatttcccttccgacgatccccacaaattcgccatcgttcacaaggtttttggtgccagcaatgtcagcaaaacgttacaggttcattaacaaccccctcatctaatacgttcattaacattttgggtaaattgcaatagtagccacccaactattagtaatttcttttttggtcactcaactatttagttttgtcttttttgatcacccaactatcttggattgtaacttagattgttgggtgtttctattttttagttagtgatgacaaaaaagaagaagacaaaattgaatagttgagggctattttgcaactttttatggttgggcgaccaaaaaaaga

SEQ ID NO: 10805 - DNA, 397 bp, Gossypium hirsutum
  Clone ID: LIB3135-023-Q1-K1-H12
gaagaagtgaagcttttgaagacctggtcaagcgcttatggattaagggttgtttgggcgttgaagctcaaaggtataccatatgaagcaattgatgaagatctgttcaacaagagcgctatgcttcttcagtataaccctgtgcacaagaaaatcccagttcttgttcacaatgggaaccccatctatgaatcccttgtgattcttgaatatattgatgagacatggaagcaaaatcccatattgccccaagatcctctacacagagccagggaacggctctgggccaaatttaatgatgaaaagttaaggatcttctgttgctgcatacattggagaaaacataaacgtatctctgttctggttgctggcgcaactactaccatcagcatggggt

SEQ ID NO: 10806 - DNA, 275 bp, Gossypium hirsutum
  Clone ID: LIB3135-023-Q1-K1-H2
accgctgatgtggatgcgttttagtgcacaatactcgggcagttagcagggggataagaagggtggtgagaaacaaggttttgaggtggggtgcgttacaaagagttacctgataggtgtggtggtggtagacaatcggatcagttacatctcaccttttgggatagctttctgtgtcgatatggactatgatgtcaaagattgacttgactgcacgatcactattctctgctattttagtactttttattatatttcacaactgtatgtaaaaa

SEQ ID NO: 10807 - DNA, 204 bp, Gossypium hirsutum
  Clone ID: LIB3135-023-Q1-K1-H3
gttgtggaggagcctcctgctgatataccttcactattggagttgaagcgtatctactatgaactgatgattaggtattactttcataacaatgactaccttgaaatttgccggtgctataaggcaatatacgagattccatccataagagaagatccatctcagtggatttcggtcttaaaaaaaatctgttggtacttgatc

SEQ ID NO: 10808 - DNA, 229 bp, Gossypium hirsutum
  Clone ID: LIB3135-023-Q1-K1-H4
gctccttcaatctggacttcttgaccatcgtccctccgaagtgaaaacatggcgattcaattcttctcccaccaggtgagaggtctctcctctatctaaagagtcctttgctagtctatgtgcttgcgagttccctaatctgtgaatatgcttaaagataatctcttgaaagcaaggcttcttattctggatatcactgataattgctccaatcactgatttgtctggt

SEQ ID NO: 10809 - DNA, 234 bp, Gossypium hirsutum
  unsure (1)..(234): unsure at all n locations; Clone ID: LIB3135-023-Q1-K1-H5
ggaaaggtggcttacaaattatccttgccttcttcagctcggatacaccctactttccatgtgttgcagttgaagaaacatattgggacggcggtgagtgcacccacattacctcccattgggtctgatggagctttgctcaagtccccagttcgaattttggatagacggttggtcaagcanggtaaccaggctgcagtggaagtactagtggaatgggcagacacgttccct

SEQ ID NO: 10810 - DNA, 217 bp, Gossypium hirsutum
  Clone ID: LIB3135-023-Q1-K1-H6
acgcgtacgctgatgtggactagttgaccatcgcacctccgaagtgaaaacatggcgattcaagtcttgtgccaccaggtaagaggtctctcctctatctaaagtgtcctttgctagactatgtgcttgcgagttccctaatctgtgaatatgcgcatagcattaaactcttgagaaaggttcttatttgaatatactgatattgtcaatactgatt

SEQ ID NO: 10811 - DNA, 441 bp, Gossypium hirsutum
  Clone ID: LIB3135-023-Q1-K1-H8
acgcgtccgatcaccatgacatgcttgaaagtactcctttgaagcctaacatggggacccccggttctgactccccgaaggatgacccagaggttattgctgagtacactgtccgtgccttgcagcgtaccgaccctgctgcagttcccgctattgtgttcttgtctggtgggcaaagtgaggaggaggctacccttaaccttaatgccatgaacaagctccagaccagaaaacatggtcactctctttctcatttgaacgtgccttcagcaaaacactctaaagcctgggctggaaaggagggaaacggtgaaaaaggacaagaatcctttctttgtaagggcaaagcttacctcggaagccaacctgggtacatacaaaggtgatgcaaagaataatgagggtgctggaaaaagccttcatgttaaggactacaaatac

SEQ ID NO: 10812 - DNA, 495 bp, Gossypium hirsutum
  Clone ID: LIB3135-024-Q1-K1-A1
atccggtcacccaccctccaaaaaaattaaaaaaaaaaacaaacacccaaaattttttttttattaaaaaaaataataaaataagtcgaattattacctatttccaaccccctatttttcttatacattccattttcttatttcttttcctcatcttaaacacacttttccctttattccctacattattacctttcatttcacccttctcttaaccttttcttttttcccatttatcatatatctcctttttaccccccttattttcattatccccccctcttatatttttttttattccccattttttcccctttttttatatccttaaaaaactttttattctctctcttttacttctttcaacccccttatttttttatacattttttacccccccttccctataaatattattcctcttttttcccttttccccttattccacccaaacccttttttctttaatcctccataaacctcaaatatcttttt

SEQ ID NO: 10813 - DNA, 401 bp, Gossypium hirsutum
  Clone ID: LIB3135-024-Q1-K1-A10
gcttgcgttcataaaaaaaaaaaaagaagtttacaatcgaaatcaataggggttatagccgaatgtaaaaaaaataaaaataaaatacaattcttctttcttcgtatttttgctactttcgtttgttctcttttgcaggtacgagtacggggctgtgcgttggcccttggcgtgaggcgtacgaaaggtggacgtggcgtacgaggactgctcgctggtcgtacggcgctaaaggttcggcgtggctgctgagcgacgcttaaggttttccccttctcttttggctgaaaagagtttaggatagctaggcatacttggactttaggatattgggcctatatttgggtcttgggcattggtttgggcttgcaatgatttggtttgtaaaaagacattaaaat

SEQ ID NO: 10814 - DNA, 407 bp, Gossypium hirsutum
  Clone ID: LIB3135-024-Q1-K1-A11
cccacccctccgtggtctttcaaaaggatgaaaatgcaaagggtaaagagggagtcgtttgaacaaccaagctgacataatgattctagctcgcccacttatagcagatggagattatcggacggggaaaagcggcactccacatctattaaacaacaccaagaacaaagccataccatgccctcgggagaaagacgtgatgattgccatgaatgctgccttccaggacgtgttgtacaagaaggtctttgccgattcctatcaacatggtgcacccctcattagatgggcgtgaaaaggccgtggagactttgaccgaatgaatagggatcaattgatagacatttttattgacgaagagaatccaatccaggatgaacgctcttttccttcgctatgtgctgact

SEQ ID NO: 10815 - DNA, 355 bp, Gossypium hirsutum
  Clone ID: LIB3135-024-Q1-K1-A12
ggaagggggtagggttcttaacctgtcttgaataggtgagattggaatgagagatggtttgatatgagcggacagggccaactcaagttcttttgttaattaagggcgttcgattccatttctttcgtttcttttagcttttatccttcactgacatgactaaaatatatatatgtattatgtaatgtgtgggtataaccgtaaaacgaaaatggaaatcctttcctctaatgctcataaaagaataaaaaagaattataataacataaagcaacccatcaatagatgaacataaaaaggactaggaaaactttgaccgaacgaatagagatcaactcgtatgacattttcattg

SEQ ID NO: 10816 - DNA, 490 bp, Gossypium hirsutum
  Clone ID: LIB3135-024-Q1-K1-A2
ggcgaccacgcgggcgatctccataaaaatgactgactgccatcccctatcaactcttatttacactgctctccaacaagctatggcttcagcagcaaatgcagaggtaatgtctctttgtatctttgaataggataacaaaactcttccttcggcatctctggccacaatacctgaggctgaacaatactgactctcattatatgctccattgaaatttatctttataaactcacgatgtgggtgctgccatctctttttttctatgatttttgccgattttcttttttcaaagttagttagctcagtaatgtaattgctggtgaaatttgcaatctcttttccattactgactttttcttcgtgtattctcctgtttcgatctccccatatggctcacaaagccgtaacagaattaaacggttttgccaagggttgaagtgttcttatacccaggtaatccactgtacgaaatccatactctgatcca

SEQ ID NO: 10817 - DNA, 367 bp, Gossypium hirsutum
  Clone ID: LIB3135-024-Q1-K1-A3
gcgggtagctaaggatcattccatatatttatactagcaccattaccaattcgccacagtatcccatctggggtaaatccctagcactacaaatgcttctccaggtaaacaatggaacgttttcggcagggcaaaatattgcataacgtaaactggtatagcttgtaaaatcgacttaacaaagacctttccccccatagataaatagcgcaaactctaacctttgttcgtcttctaaaccagcgaataaagttagcaaaagcccaagtatttttttgtccgaccatcataggcaaccctaaatacttctcaagatttgaagccaccctaacacccagtaatttgattatgggtttttttaacattt

SEQ ID NO: 10818 - DNA, 345 bp, Gossypium hirsutum
  Clone ID: LIB3135-024-Q1-K1-A4
ccatacatattacaatcaggaggcacattatagcagggatgggtggcatgcatttttcatctggtcttcctacaatgccaacatcatctccattttcaaaaccagcagacctgccactaatgtctggaactgtaaccagaaatcttggcctaccacttcttcaaatgccattttttcattcacagttaccactaccagcagctgccactccaacaatgttcccaaattatcttacagctcgtgatacatataacattgtatccaccacttccattgattgccaacaaataccaattaccattcagtcccattacaatagttttctcggtgaaaattatcttgcct

SEQ ID NO: 10819 - DNA, 212 bp, Gossypium hirsutum
  Clone ID: LIB3135-024-Q1-K1-A5
atgggcagatttttttttattggtacacaaacaaaaccaacttaaaaaattaaaaggttttcaaacttgaaaatttcataaaaaaaactcccctaacaagtctcttaaaaacctttcttatctataaacctacttttatttttctcccgcccttatctcaaaaaaaccaaatacccccctaaccatattttaaaccctcctcacatttttta

SEQ ID NO: 10820 - DNA, 281 bp, Gossypium hirsutum
  Clone ID: LIB3135-024-Q1-K1-A6
gtggaaacatgtctccaacatgttatgctagtgatgtatgttaagaaaaataaaataatgagcatggcgatgaaaaaaagagtatgggctcatccatacgccttcgtagccgccgatgatcatcccctgacggctgctgctgctgccgactcgcagctgggtggagatgtgcaggttgttgtgctcgcggctgcgacggctgcatgcagcccgcacttcatagatggaggctacaccaccgggatgtacagcggctgctctctcagcttatcaagaagggg

SEQ ID NO: 10821 - DNA, 313 bp, Gossypium hirsutum
  Clone ID: LIB3135-024-Q1-K1-A7
aaagacggcacccggatttaaacttgaatgatggtgtaaggcgggctatccctaacatacttgcaggggaaatgcttgtagccgccagcattaatacgcaggctacctgaggcactgaaaaaatcgctacagacacagacaacatgctttgcattgaaaccaatacatgcatgccctgccatacatcatcctatcgacttttgacacccaactgtaaaaggagagcaagatacatcgaatcaagtatgatgcaccaacatcccagtgtcttaaatgcggacctatcacatatgtactataggcgacttgcatg

SEQ ID NO: 10822 - DNA, 478 bp, Gossypium hirsutum
  Clone ID: LIB3135-024-Q1-K1-A8
tcgcccacgcgtccggtcaatggcaagaggagcgttttatcaagttccatacatgttacaagcaggcagtcacatgaaagcagggatggttggcatgtctttttcatctggtcttcctacaatgccagcagcatctccattttcagaaccagcagacctgccactaatgtctggaactggaaccagaaatcttggcctcccacttcttcaaatgccattttttcattcacagttaccactaccagcagctgccactccaacaatgttcccaaattatcttacagctgttgatacataaaacattgtatccaccacttccattgattgccaacaaatcccaattaccattcagtcccatgacaatagtttcctcggtgaaaattatcttgcctcgtcatcgccagcaaagcttccttctagttatcagtaatcgagagcttgcatggcatcacaatgatgaattgatttcccttgttga

SEQ ID NO: 10823 - DNA, 320 bp, Gossypium hirsutum
  Clone ID: LIB3135-024-Q1-K1-B1
aaaaaaaaacttatctggctcgttgacgtggtgacatctcctacttcgatatactccctcgccgccgaacactttcaagactacaacccccccacatagatgccatagcctcactgctttaactctcctttcttcgtgtcatagtaaactagacatgctctctccttcatccgttgcgcatacaatcatcggaagaggtattataacccagcggagatgaatctaccgctcccaatttttatatgcaacgtgcatttaatcaaatcctctaacaagaagggactgccttacactcttgctgtccattaatttgatgattg

SEQ ID NO: 10824 - DNA, 405 bp, Gossypium hirsutum
  Clone ID: LIB3135-024-Q1-K1-B10
gcgtccgcctccattttgtcttatcccgtataacataacattggagttgtatgtagagtcgtagattgttttaaatggtgatgtaaatagtcatcgaatgaggatggtttgtgtcagccatattgttgtaaatgttgcttcagtccggaaaggatctcttctttactgaattatgatgatagatattcattcagtcaccatgactttttcaaccaaagagaatcaatttgttggaaatgatcaaacagtggaagaggtggggtatcccttcatatgtaaatatatgtatggtcacactttcttgaattcgggatggtcgtgtcaccatattcaatggacaaggttgcttgtgttgcgttaatcgtataatttaaagagagaaaaaatatatatatatttatatat

SEQ ID NO: 10825 - DNA, 377 bp, Gossypium hirsutum
  unsure (1)..(377): unsure at all n locations; Clone ID: LIB3135-024-Q1-K1-B11
ggctttttgattatctttcanaaaatgatcagccaaatgaaaagaacacgattgtgttcaaactccatgtgcagtgtaaaagaggtagtccacgtattacagggatgatgaagatgattctgttgccaagatgaaggcagctgaggaagccttggaagcaaaacaaaaagtaacaaatagcttgtctgctacctgtttttttttttttttttatcatgttttataattttgtgacaaattgttcttggtactctgaagatatttatgcaaaattaccctatgattctattgtatttatcctacatggctgcaccatgtatttcttaactagtttgataaattttatgtgtggtgtttaatttttcgttnnnnaaaaa

SEQ ID NO: 10826 - DNA, 392 bp, Gossypium hirsutum
  unsure (1)..(392): unsure at all n locations; Clone ID: LIB3135-024-Q1-K1-B12
ttttttattatctttcaaaaaaggttcaacccaatgaaaaaaacaccgttctagtcaaacttcattgtccatgtacaaaacctantccacctattacaaagattattaaaattattctctttcccaaattaaagcaacttataaatcctttgaatcaaaacaaaaaataacaaatatcttttcttctacctgtttttttttttttttttatcatgttttataattttgtgacaaattgttctttgtactctgaaaatatttattcaaaattaccctataattctattgtatttatcctacatagcttcaccatgtatttcttaactagtttgataaatattatttgtggtcgttaatttttccctttaaaaaaaaaatctggaattttgcac

SEQ ID NO: 10827 - DNA, 422 bp, Gossypium hirsutum
  unsure (1)..(422): unsure at all n locations; Clone ID: LIB3135-024-Q1-K1-B2
gcgcggncgctttgctattcttttttctntttgttgtaaaagaaaaaccttaaatagtaaagatcaagagccgcaaatcacgctgtccaaaagaataaaaattggtctcatttaattgaaaaactgttttgtatatgaaaaattcggattctgctctctattttctctatatctggactgtattcccccaatacaatggtttatttgggtttttatacctgaaaatacagccaaacctctattttgctgcgctttttccgcaggcatggcgacgtggggcgaacttggcggagcggcgcgcgtggaggtgaatgccgtgtgtggcgagggctgttggaggcggcatcagtanggattttttctgccaaaaatgttaaggttttgggcccttttgggcttaaggtttggtggtttatttttgg

SEQ ID NO: 10828 - DNA, 281 bp, Gossypium hirsutum
  unsure (1)..(281): unsure at all n locations; Clone ID: LIB3135-024-Q1-K1-B4
cgggcgngcggataanataagcaagctgcctatatggaggccatcaagccgggaatccctaactcaaaatggaggcactctggcgtgatggccatgccttgcctagagcgaaacttatagaacttcttcaatatttgctggtcacttatatgcatcataagtcgatgctaagcatatccaggtatagttggaaacgctgaaacctgacattttaatttctttgtctctnggaaaaaagcccttcaaaaacaaagcaccttgggagaaccatacccccacca

SEQ ID NO: 10829 - DNA, 334 bp, Gossypium hirsutum
  unsure (1)..(334): unsure at all n locations; Clone ID: LIB3135-024-Q1-K1-B5
aaaacttaatcatggctcggttgacgntggtgtcctccatcatcctgtgggtatgctacgtcgccggcggatcaactttctaggactccaaccccatccacatggtatccgatggcctcagcggcttcgaatcctccgttcttcgtgtcatcggtcacactcgacatgctctctccttcgcccgttttgcgtacaagcatgggaagagggatgaaaacgtggaggagatgaagctacggcttcacattttcaaaggcaacttggatttaatcagatccactaacaagaagggactgccttacactcttgctgtcaattagtttggtgattggag

SEQ ID NO: 10830 - DNA, 223 bp, Gossypium hirsutum
  Clone ID: LIB3135-024-Q1-K1-B6
gcgttcggagatttttgcgagaaagtgagaggtcgagagagaaaataattcgcagggaatcaacgagaggcggccattttactgcgagttgtctctacaatcttctacggctatctgatctatccgacatcatgacaacatcaaggcgtcttgcataaagaaaggtggagaagctccaaacgaacataacaaatgagaggagctgcgcctgagacacaccaca

SEQ ID NO: 10831 - DNA, 395 bp, Gossypium hirsutum
  Clone ID: LIB3135-024-Q1-K1-B7
ggagatcagtgctatggttctgactaagatgaaggaaacagctgaagctttcctcgggaagaaaagcaaggatgcagtggtcactgttcctgcgtacttcaatgatgcccagagacaagccaccaaggatgctggcgttattgctgggctcaatgtggccagaattatcaatgaaccaactgcagctgccattgcctatggtttggacaaaaagggtggtgagaaaaacattcttgtctttgaccttggtggcggaacatttgatgtcagtatcttgacaattgacaatggtgtattcgaggttctttccacaaacggagacactcatttgggaggtgaggattttgaccatagggttatggagtacttcattaaactgattaagaaaaagcatg

SEQ ID NO: 10832 - DNA, 302 bp, Gossypium hirsutum
  unsure (1)..(302): unsure at all n locations; Clone ID: LIB3135-024-Q1-K1-B8
cttgctcgtgatatcgaggtcatggagcctaaatctccctaccatatctgtggggctcacttgcttgagggccgtgctagtgctcnttcaagtattgattcaactagacagaatttggctgctacgttcgtcaatgcatatgttaatgctgattttggccaggataagttaatgacggcgccagcagactcttcaattggtggttcatctgaaaattagcttttattatcaaaaaacatgggaagaccagtgccgcagcaagtctgggtatgattctattgtgggatgtcgactttgggctt

SEQ ID NO: 10833 - DNA, 368 bp, Gossypium hirsutum
  Clone ID: LIB3135-024-Q1-K1-B9
tcccacgcgtccgagcagcctctctgtctcatcttgtgatttgagcttcggggttggattgggttaaacaagtcgccaagatgcagaacgaagagggtcaaaacatggatctttacatccccagaaaatgttcggccactaataggctgatcacctcgaaggatcatgcttctgttcagattaatgttgggcatttggatgagcttggcagatacactggaactttctccacttttgctctttgtggttttgtccgtgcccagggtgatgctgacagtgcacttgacaggctttggcagaagaagaaagctgacgtccgacagcagtagtgggagttggattgctttttactacttgcttggtctctg

SEQ ID NO: 10834 - DNA, 404 bp, Gossypium hirsutum
  Clone ID: LIB3135-024-Q1-K1-C1
ggcgctttgaaagagaagatcaaggaatataacaagaaggaagccacattctatggcaacatgtttgccaggatgaataaaatggattctggggattccagtaaatcaactgcaaaggaaccccaaccaatgagcatagatagcaaggcatatgtggagatgaagcaaagcttggagaccttaatcaattaaagtgaagttgatgatccctagccttttatggtcttttaactacacattgttctatttgcaggacaacttatcttcgacatatagaatttgagtggtaatggattcggttctatctgaggtttgttgacattctaaaaaaaaaagatttctggttattggagattcattttcaattaaggggtactgccccaactgattgtgaaaaaacatgg

SEQ ID NO: 10835 - DNA, 404 bp, Gossypium hirsutum
  unsure (1)..(404): unsure at all n locations; Clone ID: LIB3135-024-Q1-K1-C10
tcccacgcgtccgcacgcatctcaaagttctcgacttgaggggatgcaaaagccttggggatgaatcgctggcggcaattgnctctctctgtgaattgaagatgttacacttggataattctgatatatccgatgtaggaatagcatacttgcaacatggcattattagctcattggtttcgttatctgttaggggatgcaagaaacttacagataaatgtatctctgttctatttgatggctcttctaaactggagttgcaagagctggacctatctaatcttcctaatctctccgacaatggagttttagctcttgcaaaaagtcggcttccaatttcagaactccgaatgcgacaatgtccactcataggtgacacttccatcatggcactagcctcaatg

SEQ ID NO: 10836 - DNA, 359 bp, Gossypium hirsutum
  Clone ID: LIB3135-024-Q1-K1-C11
gtaactgacatacctgtctgaatggactttatagcctctcgtacaaccgactataaacatcctatgatcttttttaacacactagcagtgcttgagcttgtcatcgccaagttccccaacatgcacaaggtcccgatctttggaatgaatgcagacaagtgaatgagtctccccttaaagaatagttggctttgcctgctagaaagccactgctgcttcccctatgctaaaaacgggcatcttttgtataggaggacatttcgaaagctgtcttttgattttttggattttgctgagtctgcgagactgcatttacaagctctcttagatcaataagtgtacagtggagaaatctaatg

SEQ ID NO: 10837 - DNA, 267 bp, Gossypium hirsutum
  Clone ID: LIB3135-024-Q1-K1-C12
tttaccatttcaattccttcgattccgtcacgttactgggtggcgtacatatgtacaaactaacataatatcttaaagacctgagcaaatacatggattggtaagggttactgtagttaagtcgtaattaaaggaataagcatgtattgatatatttggtgtacagcaaaaagtaaagtgaaaattaagtattaaattatacatgattgatataaaatattgaatatgaataaggtacgggtgaaaaagaaagtgctgtaaatatat

SEQ ID NO: 10838 - DNA, 341 bp, Gossypium hirsutum
  unsure (1)..(341): unsure at all n locations; Clone ID: LIB3135-024-Q1-K1-C2
gcgnccacgcgtccgaccacgcgtccgatagtttataggcgctacgtattgtgtactcacccgacgcttcggcactccagacttggaaatcttggtgtggtctttctgccagcaggataccgagaatcatctcggtaacatcctccgaaaagttatacattatcaactcctttttccaaagaaaaaaaaaagacggagccagcaaactctacaatagaaaggtacattaggaaaatggctattaataaacaaaaaaacatgggaagaccagtgccgcagctagtctgggtatgatactattgtgagatgtcgactaatagcttgctaaaatcggggggggc

SEQ ID NO: 10839 - DNA, 133 bp, Gossypium hirsutum
  Clone ID: LIB3135-024-Q1-K1-C3
gcgcccacgcgtccgcccacgcgtccgcaattactgtcgtatatttgtattaagcttatatatttgctgggggtcgtgtttgttactctaaacttattttatgtttattattatatatgcggcgtgttatatg

SEQ ID NO: 10840 - DNA, 296 bp, Gossypium hirsutum
  Clone ID: LIB3135-024-Q1-K1-C4
gcggtcgctgacaaatatggcaggggagtacccaagatctgtactgatagcccttgttattttctctcggggggagtctcccatgttaccttgagttacggctcgtcctcctgttgtctgacctgcttgcgtatgttgcggtccttcaccaccaggcggatcctgctatagctgcggatgcgcttaggttcaatctccaccctccgaaatggcaactacttgtgattgattactggatttttgtcgcttcaagcatccatttagtagctacataaatcaacctttattttcttttc

SEQ ID NO: 10841 - DNA, 389 bp, Gossypium hirsutum
  Clone ID: LIB3135-024-Q1-K1-C5
cgacgagcagccatctgtaatcaatcatgggtcattctaacgtctggaactctcaccccaaaaccgacggccctggctctcgcgcatgccgagtgtgtggaaaccctcatgccatcatcaggaagtacgggctcatgtgttgcagacagtgcttccgtagcaatgccaaggaaattggattcattaagtaccgctgaggaatgtttatatggctagaagttggaaacactttttggctagtatgaacctttgtttcgaaattgtagcaacttttaagataacattgctgttttttgttgaatttagtttaagagcttgaagttttgtttctgcaaaggataatttgttgttttctcaatgaagtaatcatactgtttttatcttaaaaa

SEQ ID NO: 10842 - DNA, 331 bp, Gossypium hirsutum
  Clone ID: LIB3135-024-Q1-K1-C6
cccggggcgaggcaggcgtccgcccactcgtccatgctttctgatgtttcaatcttattatcctccggtcttctcatttctaaggatgaacactgacgataagttgctgtgatcgtcataaaggacctgagatcatttttttaccttaggtatcctgcctttgatagatctacatatgcatcatatcttacgaggttactaaaatttaaaaaagtaatgtatggtcgcattacagaattaacttgttcctttttaattgcttgcttgatgcatccctctaatctctgctaatcataatcttgattgctctaatgttttgagttgtaacaaa

SEQ ID NO: 10843 - DNA, 311 bp, Gossypium hirsutum
  Clone ID: LIB3135-024-Q1-K1-C7
tcccttggcacgagaaaacaaaattatcttgaacccttttggggaggtgcatttgatcaggcaaaccgtttgaccataaggcaaggtatccaactctacttcccagtgtttgagtgttcatatatatgcatagaccataaggaaattatacatattgactaacaaaaaagtttactagctcggtagataaattagaacacgctttagagttcattacgatttaatcttcatatatatagacacacatatacatattgtgcttttgcttactcgggctagtgcttttattgtgccttttgcatgacgtaaaa

SEQ ID NO: 10844 - DNA, 404 bp, Gossypium hirsutum
  Clone ID: LIB3135-024-Q1-K1-C9
gcgggtactattgattctgatctcactattgtcctttccagcatttccatggccgggtagcaaattgctgctttggttcaaagggctagtatttcaaacttgactggtgttcaaggagctgtcaacgttcaaggagaggatcaaaagaagctcgacgttgtttctaatgaggtgttctctaactgcttgagatcaagtggaaggacagggattatagcatcagaggaagaagatgtgccagtggcagtggaagagagttactctgggaactatattgtggtatttgaccctcttgatggatcatccaacattgatgctgctgtttcaacaggttcaatttttgggatatacagtcccaacgatgaatgcctagcagaaatagatgatgattccactcttggttc

SEQ ID NO: 10845 - DNA, 442 bp, Gossypium hirsutum
  Clone ID: LIB3135-024-Q1-K1-D1
gcggataaaggtcaaaacatgggcaaagctgttaaattctttctgcaccagtggaaacattgagctggggcggatatataaagttcagatgcaatgctatgaggatgcaaaattgatgaagctgtttcccgagattgtgagatctctctatgatcaggatgtccttgcagaagacaccattcttcattggttccgcaaaggaaccaacctgaagggcaggcaaacctttgtgaaggccctggagccatttgtgaattggctggaagaagcagaagaagaggaataagctggccaataataatagtatggtcagcaatctatagaaatggtgataaaccttgtacttgttccttgtttttattaggctatctgttgtgagacaaccaactcatagttaccagatccttaagactcatggtgtggctattaaaatatgagatgc

SEQ ID NO: 10846 - DNA, 342 bp, Gossypium hirsutum
  unsure (1)..(342): unsure at all n locations; Clone ID: LIB3135-024-Q1-K1-D10
ttcctttctggtgaatttcaacnnngccgcaatcataacaccttcatccgatgtctatataatcctttctccccatccaaccatcgtctctttacttctaatcccgatccgctgtcgtatgccttctctttccatcatatacgagnngccgcattgtctggaccgccaataaggatccgttgatgcttaaatcctgatctggtctaaatggttaccagcaggctaggcgcggctcaacctcggtttgcaccaatatcaagatgctgtttcggcgtataagaagggtctggagattgatcctaataatgaagctttgaagtctggattggctgatgctcaatc

SEQ ID NO: 10847 - DNA, 395 bp, Gossypium hirsutum
  Clone ID: LIB3135-024-Q1-K1-D11
ggcactgggatataggggaaagacgccatttttggtagggtttcctaacgggcaacgtagaatctaaccggtcaacagaaaaaacaagcggggttgattcatttgcaacaggtactcgtatttttacgggtagtaaaaggggttcactcttctccttaacttcagagctttcgtagctttctttcactcctggtaatcatactaaaaggctagctcgataaaataaagggatatttaaggggctattttatcatgctttctaactggcttacttactcacctcctttaatacagcggtttacgcgagaagggacaaggcaggatggatggcctatgaactatgcaactacaacctactagctggaccctattcgcgctcgcttagatcagcattc

SEQ ID NO: 10848 - DNA, 405 bp, Gossypium hirsutum
  Clone ID: LIB3135-024-Q1-K1-D12
ggaaaaaaacgccgttgccagtgttatgatcttatcggactgtcatgatgggcagggacagtccaatccgactaatcagaaccttccagttgtttccaccacgcgcttggcccattcggatatccccgtacacaccttcggtttcggatcgtgcactcacgcgccaaacaacgatgccttttgcaaaatcgtgaatggtctattgagcgtcgtggttcaagacgtgaggcttcaactcggattctcatccggttctgccccgactgagatatcatcggcctattcattaacgactcgaccagctttgatcgggtctaattcggtgcgagttggagatctacatttgggcgaggagaaagacttattagtggaattgaaagtaccagtaacgactcgcgggtccca

SEQ ID NO: 10849 - DNA, 458 bp, Gossypium hirsutum
  Clone ID: LIB3135-024-Q1-K1-D3
gcggaaatatgtgggtcacatggaatgaaagatttcatgaacgagagcaaattgatagaccttttgagtggggctgagtatgttcctacttacgaagacagagatggagattggatgcttgttggtgatgttccatgggagatgttcgttgattcatgcaaacgcttacgaattatgaaaggatctgaggcaattggacttgcaccaagagcagtagagaagtgcaagaacagaggctaaggtaggtttaaaaacaacaatcccaattaaaatcaagccagatcaaaatcaaaattgtatgtcaaatcaattaaattgagaaccgagatcaaataaagggtttgaatgtgttgatgatcaagaagaaatattaataaaagttacgagggatatattttgatatttatcaagggacaagaaatcaaataatagaaaagttcataatgtttactttcaat

SEQ ID NO: 10850 - DNA, 257 bp, Gossypium hirsutum
  unsure (1)..(257): unsure at all n locations; Clone ID: LIB3135-024-Q1-K1-D4
ggcgaaaaatgtcgtcgtcggggaggaagatcacccttaagagctcatactgcgaatcattcnatgttgaggaggctgttgcgttggagtcacagactattaaacatattatcgatgactattgcgctgataacgggataccgtttcctaatgttacgagcaagatcttagcgatcgtgatccattactggcctatacacgtcaccgctcctaagacagaccatcgatccggcgattacgaactcaagagacttgac

SEQ ID NO: 10851 - DNA, 385 bp, Gossypium hirsutum
  Clone ID: LIB3135-024-Q1-K1-D5
attgaaacacctttctagggcgtctgtatatagtcctacttacgaacactgagcttgccattttattcttcctggttatcttccatgggaaatcttccttaattcatgcaaacgcttacaaataatcaaatcatctgacgcacctttacttaccccaacaccagtacacacctgccttaacacatgctaaggtacctttaaaaacaacactcccaattaaaatcaagccagatcaaaatcaacattctatatcacatcaattaactttagaaccaacatcaaataaacggtttcaatctctctatcatcaacaacaaatattaataaaaattacccaacatatattttcatctttatcaaggcacaagaaatcacatcataaaaa

SEQ ID NO: 10852 - DNA, 429 bp, Gossypium hirsutum
  Clone ID: LIB3135-024-Q1-K1-D6
cgcccacgcgtccgcagtaccagatggggatggtttaaatgtgtatgtgaatactgatgatccgggggagtcgccgaacatacctagagccgttcttatggctgtggttcgaagatcaaaagcacgtgctaagaaaaactatgccagagctgatgaacttcgccagaagattattgaatcaggataccaggtcatagaccttcaaaacgaagagattcttgctcgaaagtatcggattcgactgaggggtatagatgcacctgagatgtcgatgccgtttggaaaagaagcaaaagaagagttggttaagcttgttcatgggaaatgtttgagagtgcttgtctacagggaagatcactatggtcgttgtgttgcagacatatattgcaataggcatttcgtgcaggaagtaatgctaaagaaagactc

SEQ ID NO: 10853 - DNA, 434 bp, Gossypium hirsutum
  unsure (1)..(434): unsure at all n locations; Clone ID: LIB3135-024-Q1-K1-D8
caaacttggagataagagaaagctgacccctggtttgcttatctgtaggatcccctgnggggggggctgntggtggtttttacaggcatttcaaataccattttctatggttctttggctgttctgattctaattgatgttggaggggttcagtgaggattaagctcctcaatcatggaaggtctttgtgaaacaccagaaaatggtaaagtagcagatcccgaccttcggaatattcggtacttgccattccaaccctgtaccggattatcattactttggtttgatgtgagagtcttctatgttagagtcagcaattttcaggttgatgattcaacccccgagtttctgactctcaatcatatccccttagaccctgacacccttttggaagttaatggcattagaagcagcatatactctgatggggtctc

SEQ ID NO: 10854 - DNA, 428 bp, Gossypium hirsutum
  Clone ID: LIB3135-024-Q1-K1-D9
cccacgcgtccggcgggtagagaattattggaatctttgagtccaaagattgaggggaacactttgagaaatttgatggacatgaaagcaaacatgggatcttttgcggctgctctaaaagagaggaatgtttgggtgatgaatgtcatccctgaggatggaccaaacacacttaagttgatatatgacagaggcctcattggcactactcataactggtgtgaagccttttccacataccctcgaacgtatgatttactccatgcttggactgtcttttctgatattgagaagaagggctgcagtgctgaagatttgttactcgagatggatcgcattctccgtcccaagggtttcataatcattcgggacaaacaaccagttatagatttcgtaaggaagtatttatcagctttgcactgggaagc

SEQ ID NO: 10855 - DNA, 75 bp, Gossypium hirsutum
  Clone ID: LIB3135-024-Q1-K1-E1
gcgaataaatattagattaattaataattaaaaaattttggttttgcttaaaaaaaaaaaaaaaaaagggggggt

SEQ ID NO: 10856 - DNA, 347 bp, Gossypium hirsutum
  Clone ID: LIB3135-024-Q1-K1-E11
gttttatatttgattttttttatgggaagctggcggaattgaagttttacgggtgggagtggatcatgtgactaaccattacgtaaaagttacaacctcccaatatatactttcatattctcaaacatttgtatagcatatttctgtacatcatctttgtttatcctctacactgaatttcaacttccttcatttattcgtttgtatctgtaggaaatataaacccatacaatcaatgggttctataaatacactgtatacacatttacgaataaaagaaaattcaatgtcaaaaaaaaaaataatttgccccttgactttcttcaaaaatgccttaaatctctttc

SEQ ID NO: 10857 - DNA, 310 bp, Gossypium hirsutum
  Clone ID: LIB3135-024-Q1-K1-E12
cccacacatccggtctcttactagagtttcacagacacccctgttacaaaactcacgtaagcttcataagcgaagaaatcaaaattggcgacacaaaaacataaaaacgaataaagaaaaacaaaatcgtgccatgcggcggcagacctaatacgtgctatggtatcagactcatcatgattggattgtttcttacttacatagtgatgtgcttgcttataatataaattacggttaattacaccaatgtcctcactgaatacacatttacgaataaaaaaaaatacaatgtcaaaaaaaaaaaaatatt

SEQ ID NO: 10858 - DNA, 319 bp, Gossypium hirsutum
  unsure (1)..(319): unsure at all n locations; Clone ID: LIB3135-024-Q1-K1-E2
gcgcgggcggtcgctgacaaatatggcaggggcagtactccaatatcttttcttgatagacccttgttatttntctctcgtgggggtgtgtctcccatgtgtacctgtgtgttaccggcttcgctcctcctcgttgtgctgtccctgcttagtgtatagttgcagggccctccatccatccaggccggagccctgcttgtaggctgcgcgattcttcttcgtgctcatatctccatccctccgaaatggcgaactccttgagatattattaccttgattttatgtcgcttcataggagtccatttattatgctacataa

SEQ ID NO: 10859 - DNA, 467 bp, Gossypium hirsutum
  Clone ID: LIB3135-024-Q1-K1-E3
cggacgcgtgggtgctgatgtatggtcatgcggggttacgttgttcgtaatgctggttggggcatggcgttttgaggatcctgacgagccgaaagacattcggaggacaatacaaagaattatcaacgtacagtattcaattcctgattttgtccaaatatctcctgagtgtcggcatctgatttcgaggatttttgttgcagatcctacagctagaattacgattccagaaattaaaaatcatgcgtggttcttgagaaatctccctgctgacttgatggatgagaacacaatgggtaatcactttgaagagcccgatcaacctatgcagagtattgatacgatcatgcagataattgctgaggccactattccagctgctggagcccatggcttaaaccatttaatggtagacaaccttgatgatgaggacatggatgactttgattctgaatctgagcttgatg

SEQ ID NO: 10860 - DNA, 420 bp, Gossypium hirsutum
  Clone ID: LIB3135-024-Q1-K1-E4
gcggaaaatcttgagagagaaagtaaagcaaaaatcataaataaataaaaaatggagatgagtgagagatcggaaaattttagggttttcgattttcccttttgaagttttttttcattgattaaaagactttctctcttcgtctccgatttgttgaattttaccccttcttatcagtgaattcaacgtgcttctttttttaaaagcttcgattttttttccggtgaatttcttttctccgaccgcttgtttcgtcggtaatagcagctgaaaatcaacggttggtccttttccgatcatgggttatcccaaattttaccagaaggtcattttttgaatcaaaatcggattttttccgattataaaattttttgagctttttagcctgttatttaatttaaaaaatgggctttctttttt

SEQ ID NO: 10861 - DNA, 265 bp, Gossypium hirsutum
  unsure (1)..(265): unsure at all n locations; Clone ID: LIB3135-024-Q1-K1-E6
aattttcttagcaatttcctcttgaaatatactattcatcacatcccttctccntnnnaggggagagtattttaaaagagggcgagagtcccttctaaaaacaattttaaattaaataaaaaactttatctatcaaatctaccaacaccaaacttaataccacttgggcccccccttttaaacaatccaactttacttacccgctcatgcaacattataccttttttatattttcacctacaataaattcactgccccccttttt

SEQ ID NO: 10862 - DNA, 379 bp, Gossypium hirsutum
  unsure (1)..(379): unsure at all n locations; Clone ID: LIB3135-024-Q1-K1-E8
catgtttttttttctgaaatccaacaaggccntnatagtaggtccattttcgatacgctgagcgcacatcttnaatctttatatccttcaacaatagaacacctcttctcccctatgaccacttttattttacacctatttataagtaccttaacaatgccattctcattaattcctccaataaaacatcaaataaatctctctttatctactctctcaatctcttcaacttccaacatctaattcccaccctctacaccttccacatatactttaatcacatattttaccacaatgcacttcataccataaacaataaattttcttctttcataacaaccaattagcttttctaatagatatttaatactaaaaataa

SEQ ID NO: 10863 - DNA, 429 bp, Gossypium hirsutum
  Clone ID: LIB3135-024-Q1-K1-E9
catatctttgttaaatacagacaaggaattttgtgagtggacttggcaggggttaggtttgtatcatcgggcagaaatctttcactacatacacgcaattaccagctccaaaatctttattgttggacattcacagggcacaataatgtctttggctgctctcactcagccagacatagtggaaatggttgaagctgctgctcttttgtctccaatatcttatttagaacatgtcagtgctccacttgtacttagaatggtcgcaatgcatctgcatcagatggttcttgctttggggttacatcaattgaatttcagaagcgatgtgttggttaaccttgtggattctttatgtgatgaccacgtggattgtactgattttctaagttctataacagggcaaaattgctgctttaataaaactcgcat

SEQ ID NO: 10864 - DNA, 85 bp, Gossypium hirsutum
  Clone ID: LIB3135-024-Q1-K1-F1
agtaaatcgacctttcaagtttacatattttttccgtgacagcttgccatggaaatggaaatatcgttcatatcttttaagtttt

SEQ ID NO: 10865 - DNA, 409 bp, Gossypium hirsutum
  Clone ID: LIB3135-024-Q1-K1-F10
cccacgcgtccgcccacgcgtccgccagaattgaggccaaaggcacaggaggtttggcatcatccgttattttggagttctgagatgaggctttcatttcttcgagaggctagtgatcgtgttgaattggaagacaggaagagtgcatcagaagtattaaatgaattagaaagtattgcagcagtagctttggatgggaagtgggatgaaaagctggaacctgcattccttaataacattggacactataggagatacaaatttgatagtgttcgggacctactgcgggtaataaggaacaagcaaaaccactacagggaaattcctcaagatatccaagaattattggggccacttccagaaggatttgatggttatttctctagtcgatttccaaaactgttgattg

SEQ ID NO: 10866 - DNA, 268 bp, Gossypium hirsutum
  Clone ID: LIB3135-024-Q1-K1-F11
tcttgaaactttacaaaatctcatgggagctcatggtgttattgaggtcaacaggccgagtttgtttaatccggggaactttatagctagacatctcgattcttttaaaactaccgaactgtcaaggcatgaaagggaggaactagtaaatcatagagcccatgtacgatacatgaggctgcaagagcaggtgaaaacagaacatgcaataaaagatctggaacgcctagctcttattcgccaacagagatatgaagcttctaaatat

SEQ ID NO: 10867 - DNA, 426 bp, Gossypium hirsutum
  Clone ID: LIB3135-024-Q1-K1-F2
gccgagaaccggagctactgtcgtcgccgccgccatggtgaagtttctgaaatccaacaaggccgtgatggtgctccaaggccgatacgctgggcgcaaagcggtgatcgttagatccttcgacgatggaacacgtgatcgcccctatggccactgtttggttgcagggataaagaagtacccgagcaaggtcatccgcaaggattccgccaagaaaacagcaaagaaatcgcgcgtcaagtgcttcgtcaagctcgtcaactaccagcacctgatgcccacccgctacaccctcgacgtagacttgaaagacgtggttaccgtcgatgcacttcagaccaaggacaagaaagtggctgcttgcaaggcgaccaaggagaggttcgaagagaggttcaagactggatagaacaggtggttctttac

SEQ ID NO: 10868 - DNA, 407 bp, Gossypium hirsutum
  unsure (1)..(407): unsure at all n locations; Clone ID: LIB3135-024-Q1-K1-F3
aacaagacccacacgctctgtttcagatgtggtctccgcaacttccacctccataaaagccancgggcggccttatcatagggcgtttggccgtaatattacataaaacctgaagacgaataaactatctcgaataanagataccatacacctcatctcaattggttgagaaagaaaaccacattatttgaccagaaggatcgacaatcccgcaacgaaaaaaaactttccaagaacataacaccatcttagcgcggaaggaggcatccaacttagagttctactcaacaaaagaaacgcaagcacctattaatggatgattatgcgaattcgggttaaaaaaagaagtgagccagtaattttaactacaaattttgggcctaaaatcttttatatttattttggtt

SEQ ID NO: 10869 - DNA, 386 bp, Gossypium hirsutum
  Clone ID: LIB3135-024-Q1-K1-F4
aaaacaaacatggcttccatctactggtgcgggaatgcggaaccaaccttaacctaccatcggggatgtatcccctgcggatgtgtatttcgaagcgggaacacaaaggtaccctttctttcgccaccaacgatgataccaacctcaatctccagaaagaacatatgtttcggcctctatttgagactcttgattatcgggggattcaacggtataggaccaccatgaacagtaaaagctgtgggaaaactagagggctacattgatgatgacggtcctacattaacggataggcctggacaatttcatatgggacctatacgagtggttcccaaatgtactatatctgggttcagaaccaaggccctgacgagctcatctgaaac

SEQ ID NO: 10870 - DNA, 475 bp, Gossypium hirsutum
  Clone ID: LIB3135-024-Q1-K1-F5
gcgtccggaaaaaagtgaggatcaagcatagatggaaaacatgggagttctaggcaaggtggtggattagcgggctattgttatcgttcttcagcatcacattaacagctcagttggacatccccgagtccatcctcccccacgcctacaatcccttctatcaagtttataccacgttaacccaagattatttggtgcttgagcagcctgcttttttcaaggcacttatgacgttggaacttgtttaccaactccctctcgctttgcttaacatctatgggttgttatactctaagccctggttcaacaccacctgcctcctctttggtgcctctatcgttgcctctacgacagctatggtgggagacattctcaattcccagaaggcatcagccaatttgatggccatgtattatccaccgtttcttccattaggggttctggctatagtgcgaggggtggttggacaatcgag

SEQ ID NO: 10871 - DNA, 321 bp, Gossypium hirsutum
  Clone ID: LIB3135-024-Q1-K1-F6
aaccaatctacatcatctccactgtcttgtttttttctaaatccaacaaggcccaatggtgcttcaatccgatacgctgggcgctaacaatatcattatatccttcacaatagaacacgtaatccccctaggccactgttttcttcaaacataaataataccctttcaatgacatccgcaaggattcccccaagaaaacatcaatgaaatctctcgtcaagcgctttataaagctcatcatctaccaacacctgattcccaccctttacaccctttacgtatacttgaaatacgttcttaccggctatgcactttaaacca

SEQ ID NO: 10872 - DNA, 484 bp, Gossypium hirsutum
  Clone ID: LIB3135-024-Q1-K1-F7
ttcccggtcgagcgcaggcgtccgattcatggtttgcatggttcacaagcttggttatgggaactgggaggagttgaaggcagcatgtggtacatcccccttgtttcgatttgattggtttgtgaagtcgcgaacgactcaagagctggctcggagatgtgataccctcatccgattggttgagaaggaaaaccaagaatgtgacgagagggagcgacaagcccgcaaggaaaagaaacttgccaagaacataacaccatcgaagcgcggagggaggcagccaactgagagtcctactcaacaaaagaaacgcaagcagctatcaatggatgattatgcgaattcgggtaaaaagaggaagtgagcgagtaatgtgaactacaaattttgggtctaaaatctctgatatttatttgggtttaaaagcagaaatatcagaacgaggaattgggctgtagtttgcatttggtatttcatggaactc

SEQ ID NO: 10873 - DNA, 481 bp, Gossypium hirsutum
  Clone ID: LIB3135-024-Q1-K1-F8
catgaacacaagccaccggtgtatgaaccaccatagaaagaaaaacctgagcctaaaccaccgggggatgcacctccaaagaaagaaaaaccagaacccaaaccaccagtttataagcctccaaagaagccaccagtgtatgagcctaagccaccaaagccaccggtttatgcaccaccaaagaaagagaagccagaacctaaaccaccagtatatgagtctcccaagaagccaccatatggtcactatccaggacaccctccattggagaagcctcaatagagagatttcctcggctaaccattcccgacaactgagctactatggctacatagataaattattatcactgcaataagagctgctgccggctcatgttctgttttcttgtatgtcatgtagtattggtttcttttactagcaagaatgcacatggcagtatcattggaatgaatgcctattctgtatcttcttgtttctc

SEQ ID NO: 10874 - DNA, 425 bp, Gossypium hirsutum
  unsure (1)..(425): unsure at all n locations; Clone ID: LIB3135-024-Q1-K1-F9
ctttgaggagtgtggaactcttaaagttattcaaaatgaccaanctcaaagaaaaagaaaaattaaaaaaagaaaaaaccaaaaaaaaaaaaaaaaaaaaaaaaaaaaaaaaaaaaaaaaaaaaaaaaaaaaaaaaaaaaaaaaaaaaaaaaaaaaaaaaaaaaaaaaaaaaaggccccccccttaaaaaaaaccaaatttaaataccccttcaatccaacaaaaaaaaacccaaaaatttcaacaaaattaaaaaaaacacccctctcataaaaaactaattaaacaaaaaaacccctccctaaacaaaaaaaaatcccctttaaaaaatcccccttttccacaaaatcttaaaaacctaaaaccccctaacaaaaaccctttcaaaaaactttcccattcctaaaaaaaaaattttacacccc

SEQ ID NO: 10875 - DNA, 425 bp, Gossypium hirsutum
  Clone ID: LIB3135-024-Q1-K1-G1
cttcaataatgtctaccacacacttgctaatattgctacttggagtggtggctctcgccactcccgctgttggtacctatgagtctcccaactatgggaagccccctactcctgtttataaacctcctaaggtgaaacccccaccttatgaacatcctgtttataaacctcctaaggtgaaacccccaccttatgaacataagccccctgtctatgaaccaccaaagaaggaaaagcctgagcctaagccaccagtttatacacctccaaagaaagagaagcctgaacccaaaccaccagtatatgaacctccaaagaaggaaaagcctgagcctaagccaccagtttatacaccaccaaagaaagagaagcctgagcccaaaccaccagtatatgaacccccaaagaaggaaaagcctgaacct

SEQ ID NO: 10876 - DNA, 420 bp, Gossypium hirsutum
  unsure (1)..(420): unsure at all n locations; Clone ID: LIB3135-024-Q1-K1-G10
ncccacgcttccncccacccctcctagcttcttcaccttctccttcaatcagtttcgctccatttcctaccccatcaagctaacctgctccaacctactagcccactgcctaccaaggccctcctccctctgccagcctccaccaacggtaccttcattgatacaatcgatcttgccaacactttctttaatgcacctttggcttaataaagtgaacctaagaccatcccttttgggctcttcatcatgattctttagaatctttactttcatgctctcttttcttctttataacaatgtttacttctcttactttatataattcattacaccctaccctaaccgttttgattaaattaattgctatgtatgtttgatgattacgattctattattnttacttcccatggttcattttat

SEQ ID NO: 10877 - DNA, 435 bp, Gossypium hirsutum
  Clone ID: LIB3135-024-Q1-K1-G11
gggggcacgcgtccgcccactcgtccgcccactcgtccgggcttccaccacctgcctcaaaccgagcccttgcatcatcttgccgtcccaatctcacagagctttagcttccaatttctcttattcaaagccttttcccttccatggcctcaacctctcatcggtcactgaaaccagttccttcacctcatcaagatcctccaaccccttcactaccactgccttcttcttcaacaagttcaagcaggaggccgctccacatactcccaagcccacaaaagttcaagagctacacgtttatgaaatgaacgagagagacagaagcagccctgcagttttgaaactaagccaaaaacccgtaaactctctgggtgatctggttcctttcactaacaagctctactctggagacttgcagaaaagggtgggcatcac

SEQ ID NO: 10878 - DNA, 419 bp, Gossypium hirsutum
  Clone ID: LIB3135-024-Q1-K1-G12
aaaactgcacgatgcagctctgcctaaagccctggaagagttggagaccaaactaggagaagttaaatattcaatgcattatttgaatatttcttatgctgaaagaaggaacaatcccgaaaaatatggttttaaggaggcaaatatagcatgttgtggaagcggtccatacagaggaatgtttagctgtgggggaaggaggggtgtgacaaaatatgaattatgttcagaccctaatgattatttgttcttcgactctgaccatcttaccgaaaaggcctgcaagcagattgcccagctcatgtggagtggaacacccaatatcacgggaccttacaatctgaaagcattgtttgaagtatgatatttgatttgatccaatatcatctcaacatgattactttgttggttacctaaat

SEQ ID NO: 10879 - DNA, 409 bp, Gossypium hirsutum
  Clone ID: LIB3135-024-Q1-K1-G2
gcgcccacgcgtccgcccacgcgtccgcccacgcgttcgattctattctagaaccactgataggtaccgggagtacgtttatgacagaccctatgtttactccggacctgctgacaaccactgcccctctcttcttggttctgccacctacaacttctctccaagtcatggtaactacttcggctaccagtatcaggttccctatcttcactaatttcccaaaaaatggcaaaaaggtgactgtgatcctctcacattaactattagccttaaccttccatgttgcagagtatgaatgaatttagcattaaaaaaccaacaaaagaaaaaaatgccttgttaattttaatatgttgcacaagaagatattgtgatcctctaatatatgcactgggttgtgatgtatatc

SEQ ID NO: 10880 - DNA, 364 bp, Gossypium hirsutum
  Clone ID: LIB3135-024-Q1-K1-G3
gcgcccacgcgtccgatcataaggaaacaataatgaaaatgtttttgcgcatattttctaatctgccctgtatatattatgatgattgccaaaatttttgatactgtgttcacttgtagcttgttggttatgagttaaaattttaatagagtagttttttattttatggcatgacatccacttggagtcttgtgtttgtgtgtgatgtgcaacttaataggaaattcaattttcttcatttctcttaaaaaaaaaaaattaaaaaccaatttaaaaaaacttcttattttcaaaataatttttttttcttcctctataaagagaggggggtctttctctttgatttttggggtggttttttttg

SEQ ID NO: 10881 - DNA, 373 bp, Gossypium hirsutum
  unsure (1)..(373): unsure at all n locations; Clone ID: LIB3135-024-Q1-K1-G4
cggcggcgagatggtataccgngatcgtatcgagaacattgaaagtttcttcggccgatnaaaccgatgtctccgatagctgcaggaccggcgagcctggaaaggttgttctcaccattgataatcaaacatcaaagaagaagaaactcctttaccggtccaagaccaagccttattctgattgaagctttgaaatgatcaatggggttggattttgttttcttctttattggaaaaattatttttataaatttagaatctttggggatttatttttatttatatatatattttttattagntaattgggattgtggctttttattttgattaaaaatgaatctgggatggaactgtgtgtaatgtggaaaaa

SEQ ID NO: 10882 - DNA, 475 bp, Gossypium hirsutum
  Clone ID: LIB3135-024-Q1-K1-G5
gaaagacctgctgcgaaaagagacaatctctgaatctgtggctgacagatacctctactgcgggagagacccatcatacagagcaagctgccaactttcgcagttttcgattatataacagggagggagtaggtattagctattgctgacacgcgtattcgtaaaagatttggcattccgagaccccatcagagagcttagagagaatgtgagatactcacatctgtgaaccagagccctaggctgtactctgacgttggtcccccctaatgaaaactggcggaatgacaaggaaattgagaggcagcagcggcaggagaggcagccatcacctgagacctggcgtaagcctgcggagcagcctaaaccagtctctcctgaagctgctggtgttcgctatggaaaagcagcatcagcttttggagcttgctcaagccttttccaaatcattctcagatcagaaaacagatgatcg

SEQ ID NO: 10883 - DNA, 298 bp, Gossypium hirsutum
  Clone ID: LIB3135-024-Q1-K1-G6
cctatgaatacttccgaccctatcacaatcattacctctaagtattacgctttcccacatataaactttgtacacttgaatgaacctacctgatacactagcacattcttcactatctctactaattgatcaaaacatgcccaaaatgatactgacagccttctacactaactattacccataaacaaacatgtatgcccacatcaatgaattgatacctttttaccctacactatatacaaactccttaataaaaaaaataaatgcgacaactatatatttctaacctcttatatat

SEQ ID NO: 10884 - DNA, 340 bp, Gossypium hirsutum
  Clone ID: LIB3135-024-Q1-K1-G7
aattccggggcgagcgcaggcgtccggcaagacctggtgcgaaaagacacaatcactaaatctgtggctgacagatagatgtattggtggggggatccatcatccggagcaagatgcccactttgtcagttagcgattatatccagggaggagtgtaggtattagctcttgctcacacgtttattcgtaaaagatttggcatttctacagccgatcagagagcttaaagagaatctgagagctaccatgtgtgtaacagagcactaggctgtactctgacgttgagcccccctaatgaaaactggcggtatgacaaggaaattgagaggcagcagcggca

SEQ ID NO: 10885 - DNA, 413 bp, Gossypium hirsutum
  Clone ID: LIB3135-024-Q1-K1-G8
tttacatatcacacagtcccttgggtgcatagttacatatgagggggccagatctgttgtaaatgatctcaagttgctgatggatacatttcaccgtgtggagttcactgggacttggagaagactgttctctcgagttaagaagcatattatatggggagttctaaagtctgtaacaggaatgcagggtaaaaaattcaaagacacggcgcatactcaacagccaagtggaactggtgttcctgatagtgacctcaatctcagtgacaatgaccaggttgagaaacctggcccgtacccgatagcttttcttaagcgttcaactgatggagctggggatggatttggtacttccattacgggcctcttcaacactcaacggcggaaagtccaacaattcgggctacgaacta

SEQ ID NO: 10886 - DNA, 414 bp, Gossypium hirsutum
  Clone ID: LIB3135-024-Q1-K1-G9
gttttgtttctctttagtttacgttttttttgtccttttggattttttgagactagggaagggaagcaaagaagaagggaaatggagggcaaagaagaggatgttagattgggagccaacaagttcacagagaggcaaccaattgggaccgcggctcagactcaagatgacgggaaagactattctgaaccaccaccggctccatttttcgagcctggcgagttaacctcatggtccttttatagggctgggattgccgagtttgtggcgactttccttttcttgtatatcactattttgactgttatgggagttgttaaggaaaaaactaagtgcccaactgttgggattcaaggaattgcttgggcttttggtggtatgatctttgctcttggttactgcactgctggcatt

SEQ ID NO: 10887 - DNA, 438 bp, Gossypium hirsutum
  unsure (1)..(438): unsure at all n locations; Clone ID: LIB3135-024-Q1-K1-H1
aaaaactgtcaagagagctcttgcaacatatgggactcaagcactgaaagaaatgatccagaattgtgtggcacaagatttttcatggaagggaccatcaaggttgtgggagaagatgttgttgagcctcggggtggctggcagtgaacctggcattgaaggagaggagattgctcctcttgccagggaaaatgttgccacaccctgagcataatcagaaggcaactatggataaagcttagtaacctgttttcttagacaaccaagtccaagtacctgtctactctcgatagctattggcttgaccggcggaaaacaaactgatctgccatacgtgaagtcagtggtgctatttttgagagtgaaaagtcaggagatagtatgatataaatacatagntatagcagctaatgggtgttagtaatgttgtcaagaact

SEQ ID NO: 10888 - DNA, 419 bp, Gossypium hirsutum
  Clone ID: LIB3135-024-Q1-K1-H10
gttcccaatggaacaaaatcaaggtttgttgtatgcgagataaagaagaatgatctggaagttggacttaagggccagcctcctattattgatggggagcttttccaaactgtcaaacctgatgactgttactggagcatagaggatagttgtgcactgtcgatccttttgaccaagcacaaccaaatggagtggtggaaatcattggtgaaaggagatcctgaaattgacactcagaaagtcgaaccagagaacagcaaactatctgacttggatcctgaaacacggcaaactgtagagaagatgatgtttgaccagagacagaaggcgatgggccttccaaccagtgatgagcttcagaagcaggaaattctaaagaaattcatgtccgagcaccctgagatggacttttcaagggc

SEQ ID NO: 10889 - DNA, 370 bp, Gossypium hirsutum
  Clone ID: LIB3135-024-Q1-K1-H12
gccttttcgccaagctcctcgagaaagtcaacgtcgatgatctcatcaccagcgggggctccggtggtggtgctgcccctgttgccgttgctgctgcttctggtgcagctggcggtggtgctgctgcggcagcccctgctgttgaggagaaaaaggaagaagagaaggaagagagtgatgatgacatgggatccagcttgtttgactagacacaattcttcccagcttggatttttcttttgttttgttgtttgaaattgcggaaaattaggactcgttttaaacattagttgaatttttgtattgggttttgagaactttcgcagagattcaagaagttacatgggtaatcttacttggtttaaagaaa

SEQ ID NO: 10890 - DNA, 386 bp, Gossypium hirsutum
  Clone ID: LIB3135-024-Q1-K1-H2
cccacgcgtccgtctaggcctcggaaaatgatggaatttcacaatatcaagataagtcacgttgggctggtagttacatatgaagggtccagatttgttgtaaatgatctcaagttgctgatggatacatttcaccgtgtggagttcactgggacttggagaagactgttctctcgagttaagaagcatattatatggggagttctaaagtctgtaacaggaatgcagggtaaaaaattcaaagacaaggcacatactcaacagccaagtggaactggtgttcctgatagtgacctcaatctcagtgacaatgaccaggttgagaaacctggcccgtacccgatagcttttcttaagcgtccaagtgatggagctggtgatggatt

SEQ ID NO: 10891 - DNA, 312 bp, Gossypium hirsutum
  Clone ID: LIB3135-024-Q1-K1-H3
cccacgcgtccgcccacgcgtccggatgaatgaaaggttcgtggttgtagaaatatgaactatggagctggggaaaaataaaagaacatttacaagcgcaactacctcagtttctggcatgaaggtatgttaacgtatttatatacttggatcatgacacttatggctttagtaatattgtcatgttaaagaacatccatgtttcctaagatgttacacttttggactgccattgctataatcaaatctttatgttcaatcagttttaaggctgaaaaaaaaaaaaaaaaaaaaaaatataaaaaataaaaa

SEQ ID NO: 10892 - DNA, 350 bp, Gossypium hirsutum
  Clone ID: LIB3135-024-Q1-K1-H5
ggcgacgactgctattattatttttcaatgcatatcaaatcttttgcgctgtcagatttaaaccgaaatgggagtggaccgaatgataatcaccttgtcacaactattggattgttcttttatgtggattatgcatgtatgtattcgcaatactcctactgtatacagacaacctacctcttatattaacatagaaaatgatatcgctgcctgagcatcatattatctcttatgctattgctctctatgatcctgttaccttatcttctcgcaggcttggctgacgtaatagtgacggatgctgctcgaccgtagtgcatcaaactgaccgaggctacttaaaggctact

SEQ ID NO: 10893 - DNA, 370 bp, Gossypium hirsutum
  unsure (1)..(370): unsure at all n locations; Clone ID: LIB3135-024-Q1-K1-H9
ccactcgttccctccttattttatatccttcacaaggcctnccaaccaagtgctgtaaacattcaggctcctcatcctcctcataataagtctcttgaataggacttttctcatcacacaactgtttacttccataagctcctcctacctttattgacttcatacacatattaaatataccatgttaacatgactctctcaaaaacacaagctaatttacttcatgagaaaatttcaaacaaatcttacattgataacgatgtcataacgctttttgctacaacaagcaatgcacacatcaatgcaactcttaatcactacaaaaatgaatattaaaatgacataaacaatgacttgatatctgacccta

SEQ ID NO: 10894 - DNA, 356 bp, Gossypium hirsutum
  Clone ID: LIB3135-025-Q1-K1-A1
tcgcccacgcgtccgattttgatcggagcatcagtctggttagaagggatctcatggccactactggaggcaagaacatcaatgctaaattagttctacttggggatgttggagctggaaagtctagtcttgttttgcgcttcgttaaagggcaatttgctgaatttcaggaatcaaccataggtgcagcttttttttcccaaacattggctgtgaatgatgcaactgtgaagtttgagatttgggatacagctggtcaagagaggtaccatagcttggcaccaatgtattacagaggagctgcagctgctatcattgtgtatgatattacaaatcaagcatcatttgagagagcc

SEQ ID NO: 10895 - DNA, 465 bp, Gossypium hirsutum
  unsure (1)..(465): unsure at all n locations; Clone ID: LIB3135-025-Q1-K1-A12
ggcgaccccgcgtgcgccacgcgtncaaaaaaattccaaaaccccttcccctctcctttgctagggtttcaaccggggcggggggcacagtcatcggcccgccgtggtacggcggccggagttcctaaagggaaccctttttggctgatccaacctccccaatctcgatctaagggtaaagtacccaaactacccagccaaacttcaaaataaaagtgaaaaagaggagaaaataaaggggcctttcggctccctaataatgccgatgggattttcaatcgagtcccctaactcggtgaccttctaggccggagaaagcttcaagcacggcgcttaagacgaaagcgatgggacggggcaaagggtggttgaaaggtgtcaagcatcacgtgggtgagcggcgcggcgcacagggggaaccctatggttccttcgaaagtgttaaatttctgggctagggttttt

SEQ ID NO: 10896 - DNA, 339 bp, Gossypium hirsutum
  Clone ID: LIB3135-025-Q1-K1-A2
cgtgaattcagacgttataaaaatgttttcttgcggaaaatttacaggtctaagagaactgggtgcgcggtgatgcatgtgtcaagacattgtatcctttgctccaagatgggttcggttctaatgaatgggagtggttccagaattccctatgggatttgagaaggaccgcagaggaactatcacaagggctggataatcttttcaaagcagtagctgggtatttcaaaatagtttcgactgggggctatgctttgctttggaatctaaaaacaagcgttggtgtcccaaattcaatgctaggaagaaaagtcaaagagcaagctcttagatgaatca

SEQ ID NO: 10897 - DNA, 336 bp, Gossypium hirsutum
  Clone ID: LIB3135-025-Q1-K1-A3
cggacgcgtgggaaaattttaagggaacaatttcttttggtgttagcttcttttttgttggggtgggatggaccatatttggcatgatattggagacatatggattcgttgtactcttcaatggttattggccaacactggcagcgtttctgcagaggataccaattcttggttggatattccaacaaccatacatcagatcgttattggatcagtatacaggcaggagggtgcctgtctaaccatgccatatattaaagaattggaaatagtggggcgtcttatgaacaaataggcacatgctaaaagcgatggaatgaatggggtgaattatat

SEQ ID NO: 10898 - DNA, 189 bp, Gossypium hirsutum
  Clone ID: LIB3135-025-Q1-K1-A4
gtttgactttcagttattctttttctttttaatgcaaaaacgccagctttttaatagagagatctggtatttagagatgaaccgaattcaactgacagtgacgttaacagcctgagtttttaggagacgaagctgtctttaggattgccaggggtgggacgatcgtcatctggagctgtataaatttgt

SEQ ID NO: 10899 - DNA, 363 bp, Gossypium hirsutum
  Clone ID: LIB3135-025-Q1-K1-A5
cccacgctaccgactactcgtacgacaatcttaaggactactttaagcttgctgtcggcagaccggaatgttactgatgagtaggcgtgccacatggaatgtggaacctctggaggatattgaaggagctaaacccgtggggcacaagataactgaacctattactgccgtaccaccccatgattgatgatgatgcggctttgacttcgacaggacgtatgttcaacgattgtcttattgatgtggctgctgctgaactatgctctgctttgaaagatgtggcttcctcaagtagaaaaacaactgcgcagtctggtggttggacttcttctgatgatgaggctgatcctatggatcatgatg

SEQ ID NO: 10900 - DNA, 264 bp, Gossypium hirsutum
  Clone ID: LIB3135-025-Q1-K1-A6
accggaattgaaggtccgggccgagccacccgtgcgattggacgctttatcaagatcgtgaatggcaaaatgaccccgtgtaatatacaccagtctcggttgatcgattgctgcagatttgaaatggtaggtctccttagagcctgaaacctgaagatttggagtttatctggtgatacccatggcatgttcgatcgttctcttgcgctatatgaatttgtgtaaataatgtgttcagagttataggtgggtattttaaaatcg

SEQ ID NO: 10901 - DNA, 241 bp, Gossypium hirsutum
  Clone ID: LIB3135-025-Q1-K1-A8
gcgaccacgcgtcaggttatttctcttatttcaacacaccacctccacaagcatattaggatcaggggcgttgctacttactgctataaatcgacctctgcagacacccctacaaaacttaccaaggctattcatcttgaggctcacatggggtggcccaaacgtgctcttaataacgttaaatgcgttgagcttaaagctaagcttgcccttggaagtatcgtaaagaccacctttgttg

SEQ ID NO: 10902 - DNA, 438 bp, Gossypium hirsutum
  Clone ID: LIB3135-025-Q1-K1-A9
cccacgcgtccgtttctcctctttctctctattcgaaatttgaatactctctcattttgggatagtgcttagtgtgttttggatcgggaggttagaggtttatcatcaatggcggatactgagacgtttgcatttcaagctgagatcaatcagcttcttagtttgattatcaacactttctacagcaacaaggagatcttccttcgtgagcttatcagtaacgcctctgatgctttggataagatcaggttcgagagcttgacagacaagagcaagcttgatgcacagcctgagctcttcattcatattgttccagacaagaccaataacactctatcaatcattgatagtggtattggtatgaccaaagctgatttggtgaacaatcttggtacaatcgcaagatctggtactaaagagtttatggaagcactggct

SEQ ID NO: 10903 - DNA, 299 bp, Gossypium hirsutum
  Clone ID: LIB3135-025-Q1-K1-B1
cccacgcgtccggcggtgataaggaagaagccaggaatggcgagtgtgaaggacatgccacttctgcaagatgggcctcctccgggtgggttcgcccccgtcagatacgcccgtcggattcccaacaagggcccaagtgctatggctatctttctagctgcttttggtgccttctcgtatgggatgtaccaagtcggccaagggaacaagatccgcagggcactgaaggaggaaaaatttgctgcacgtagagcaatattgcctgtgcttcaagctgaagaaaatgaaagatttgtcaa

SEQ ID NO: 10904 - DNA, 430 bp, Gossypium hirsutum
  Clone ID: LIB3135-025-Q1-K1-B10
gggcattttacgacccgacacaggaaaaagcgataggcgagagggcaaagactgaacctatccccttagtaagggagaacgggcactgccaaagcagctttctcttctaggtctaggaaagaacatcgtcctgacagacacgactggattcgattgattgaaagccttagcttgagccttttatcactatcacaaatagaaaaaggaaaaagcaccacaaaaggacccctgacttattagcgagagtcgagaattcaaaccccctcgggagaaagaaagtggtgatgattgccatgaatgctgcttccaaccaagatattgttctcctcgatgcggttcttttcccgcgagttatattgtgctttcatacccggacttcgcatattacttggcacctgccttcaacttcaaagacatctctgcaaatagc

SEQ ID NO: 10905 - DNA, 407 bp, Gossypium hirsutum
  Clone ID: LIB3135-025-Q1-K1-B11
cccacgcgtccggaggagtggccttagggtccgtctaatgcttagacatgtgtcaaaacgtgctgatgcaagagtgaaaaaggggcatgatggagaaggtcaatgtgaggaagatgatgtttgtatttctgaactgccttcaaatgagaaacaacaagaagatccttctcagatgtctgatattcattcacatgggaatcctgcaagttccaatccaattcttataggagaagagcattctaatgagaaagagtgtgggcagaaaaaaagggagaaacaggggccggggtaaaagacgtgggcggactcaataccataataaccatcatagtagtcacggaaatcatgtaggcacttccccttcagcttcaagtaattgggtcagcaatgagcaagctactggagca

SEQ ID NO: 10906 - DNA, 92 bp, Gossypium hirsutum
  Clone ID: LIB3135-025-Q1-K1-B12
aaaaaaaaaaaaaaaaaaaaaaaaaaaaaaaaaaaaaaaaaaaaaaaaaaaaaaaaaaaagagagaaagaaaaaaaaaaaaaaaaaaaaaaa

SEQ ID NO: 10907 - DNA, 319 bp, Gossypium hirsutum
  unsure (1)..(319): unsure at all n locations; Clone ID: LIB3135-025-Q1-K1-B2
gtgaattttattcttagtttatcagttgaagaacaaaattccttgagacgggcacttaagcgggggacacctcgtattgaggtggatctaataaactttttgcaaaacaagaaagagagacagcgctctaagtcatcctatgatccctatgatgttgtaggaacatcatctgaagaaagatatattggtgtgcccaaaaagagtgctttccttgggaggtattcttccggttccattgatagtgaatgaggtatgaaatggggtaccacccangaatcaaccctgatcactggcagtattggccaggcaacatctgatg

SEQ ID NO: 10908 - DNA, 403 bp, Gossypium hirsutum
  Clone ID: LIB3135-025-Q1-K1-B3
acccgccacgcgtacgaccacgcgttcgttggttttcggctcacttgcactgcaaattcaccgctcttggtgaacatgaagagggtggtcgagtgacaaaatttcttgcactcaataaatgccttccagggcgcaagttcttgcaggttgttgatattgatctgatctaggaccttatgagggtcagttcgatgaacaatggctggcaataacaccgacattgaactgtctttcctttgaccttccgacgtggagacattggggtggagaaacaaactcgacatgcaagattgttgtccatgcggtcagaaccagattggaagacagatgaacccaacccttgtgaattttttaaaacagttccacctaacaaaccctttgatcttactttttttgggtctcc

SEQ ID NO: 10909 - DNA, 396 bp, Gossypium hirsutum
  Clone ID: LIB3135-025-Q1-K1-B4
aattgaagggccgacccaagcgacccgtgcgtccactcgttcgtttacgcgtgggtttaaatttccttcgtgagcttctcaaaattgggacggacgacatgaatgaaggtggagctgatcaaaaataagatatacaagaggatcctacatcttgtacattgcaacgatccatcacttgctgttaaggctgccaaaactattgagttgttgatactaaacgaacagacagaaatccttgtttcgtgccaaatcgcatttgttgaaacatgtcatctaatggaagaaaggctaacatactctaacacagaacatgatatgtttttgttgcaccatgaagtcgaagtagatttccctgatagcaaacagaccgagcgccatacacgcgactttactgga

SEQ ID NO: 10910 - DNA, 96 bp, Gossypium hirsutum
  Clone ID: LIB3135-025-Q1-K1-B5
ccgagtcgtagactaaaccctaaatccaggcccggttccccttcaccacatgccgcgagatgggaagtgcaactcatgtgtctactgacatcgcca

SEQ ID NO: 10911 - DNA, 256 bp, Gossypium hirsutum
  Clone ID: LIB3135-025-Q1-K1-B7
cgccaaaaaacataccaataactactaattgaattccaacaaataaataatcaaaaaaggaaagaaggatccaaaacctttcgaaagccctttctatcgttcgctttcattcgactgcttctatcgcgctttactaataacatacaaaggtctttcttttctcgcttgctaagtagggtcacgttattaaccttatcttgctaattaccacgacttgcagttgatggcccttaaagactctgccttcatgccaacc

SEQ ID NO: 10912 - DNA, 395 bp, Gossypium hirsutum
  Clone ID: LIB3135-025-Q1-K1-B8
cccacgcgtccgcggacgcgtgggtagaaatttcctttgtgagcttctgaaaattggtactaaagacatgaatgaagttgtagttggggaaaaaaaagatagccgaaaggatcctagaacttggacattgcaaggagccaggagttgctgtaaaggctgccaaaacgattgtgtttttgggactaaacgaacagacaggaatcccggtttcgtgccaaagcgcatttgctgtaacatgtcatcgaatggaagaaaggctaacatactctaacacagaacaggatatggttttgttgcaccatgaagtggaagtagatttccctgatagcaaacagaccgagcgccataccgcgactttactggaattcgggaagtctaagaatggaaaaatgata

SEQ ID NO: 10913 - DNA, 133 bp, Gossypium hirsutum
  Clone ID: LIB3135-025-Q1-K1-B9
cccacgcgtacgttatcttagatgatggactgagttggaagttgaattttaaatgaactggacagatgcatagaaataactcatgttgaaatttaattttttcaatgcagagaaatctccgttgactctgttt

SEQ ID NO: 10914 - DNA, 69 bp, Gossypium hirsutum
  Clone ID: LIB3135-025-Q1-K1-C1
accacgccatcacatgccttaattctatcaccttaacttagaagaccaaaatataaaaggggaagggag

SEQ ID NO: 10915 - DNA, 269 bp, Gossypium hirsutum
  Clone ID: LIB3135-025-Q1-K1-C10
aaagaaacaaagcaagaacaagaaaaccagatcgaaaaatgtcgggaatcatgcacaagagcgaagaaacccttcacatgggagggcacaagaaggaagaagagaagcacaagggagaagctcatcacgaaggcggccatggccatgcttatggcgccgctgagcacaagggagaagttcatcacgaaggcggccatggctatggttatggcgccgctgagcacaagggagaagttcatcacgaaggcggccatggctatggcgccgct

SEQ ID NO: 10916 - DNA, 321 bp, Gossypium hirsutum
  unsure (1)..(321): unsure at all n locations; Clone ID: LIB3135-025-Q1-K1-C11
cccacgcgtccgtgcctttgtatactttatggcagcactgtcaacaacaggcttatacagcatcagcactgctctcgcatcaactttgctcggctgcaagccttcttataccaacaccatctggctcgcctttgcattaatggatgtggtatttgtgggaatcgtcgcctcagccaccggtgctgctggtggcgtcgcatacatcggattaagagggcacagccacgtncggtgggacaaatctgcaacgttacgacgagtctgtcacacgtggaacgcatcgcatctcgtatttgcgcatctgtggtgtctcacatgtct

SEQ ID NO: 10917 - DNA, 424 bp, Gossypium hirsutum
  Clone ID: LIB3135-025-Q1-K1-C12
cagaaaggtaaatcgctaaggagaagaggaagaagagatggccgtgagcgcaacagtgaggggagcgacttctgggactgggcacccagatgtactccaacgctctacgcaagctcccttatatgcgacatccgtgggagcacctgttggggatgggtctgggagccgcgtttgttaaccagctcgtgaattgggacgctcagctccaacgggaccttgacaatatgctcgaaaaggccaaggctgccaacgagcgccgctactttgatggagatgatgaataacgctttcgccctatcatcagataagatattcatgcgccaagctactgtggtcataaaccggttcagattgtgagtgggtgactttggactcttttttttgcttgatttcaagcctgttgaaccttcttttgcttttattt

SEQ ID NO: 10918 - DNA, 249 bp, Gossypium hirsutum
  unsure (1)..(249): unsure at all n locations; Clone ID: LIB3135-025-Q1-K1-C2
gccacgcgtccgntcacgcgtccgcccacgcgtacttacaggtgtttgttcacaacagcaggtgcgtagttacaagaagaacattgataagttcaaggctaaaagaattgattcaatcatttgtgttgctcgttatgatccttatgttatgaatgcctaggcagacaaactgcatgccaaagatgtgattgaattctatggggactttgatgggagcttccaccagaaccttgtattgaaaaagatctc

SEQ ID NO: 10919 - DNA, 356 bp, Gossypium hirsutum
  Clone ID: LIB3135-025-Q1-K1-C3
agacaccaccgagaagatctctcagcatgatgttagtgacattataggaaggtatattaatgacaataaccttactaacccagcaaaaaagaagagagttctttgtgatgaaaggctttattctatttttggaagaaaaacaataagccgaatcaaagtctatgacttgcttgagacacactatgcagaaaaccaagatgcatgggatgatgacttcttttttagctcagaagaggagaatcttggtgaagaaaaaaaaagtttgagattggagaaaaaaaattaccagaagaaaaggggttttgaaacaccaaaaagctgctttgctgcataaaaccagagaatataaactagtg

SEQ ID NO: 10920 - DNA, 272 bp, Gossypium hirsutum
  Clone ID: LIB3135-025-Q1-K1-C4
aaagaaaagggcaaccaagcatacaaagataagcaatggcagaaggctattgggttttatagtgaggctatcaagcttagtgacaataacgcaacatattatagcaacagggccgcagcatatctagaactaggaagtttcctccaagcagaaacagattgtaccaaagctatcagccttgataaaaagaatgtaaagtcatatttacgaagaagcactgctagagagatgcttggttactataaagaggcaattgaagattttagctatgc

SEQ ID NO: 10921 - DNA, 258 bp, Gossypium hirsutum
  Clone ID: LIB3135-025-Q1-K1-C5
acgcctaaccaaaacctcattctgtgtgacattcttagatcatggaggcgtcctattgaggagggtttttgctcaaccatctctaggatatcccatatatgtcgacccctggaacttaacctctatggcttgcccgtatcttccacaaagtcactgtgcactgtcttaaaccgtacgtcctgttcaaaacatcctcttccctatcttaacatgcttggaataaatacttcttttttaccttagaagaatagaattttg

SEQ ID NO: 10922 - DNA, 199 bp, Gossypium hirsutum
  Clone ID: LIB3135-025-Q1-K1-C6
gccacgcgtcccgtcacgcgtcccgtcacgcgtgcgaacaggtgtgtgttcacaacaacaggggcggacttccatgaagaacatggataagttctaaagctaaggaatggactgcagcatttgcgtctctagatagtgcccttatgttatgaatgcctgggcagacaaactgcctgcccaaaaactgattgaattttaa

SEQ ID NO: 10923 - DNA, 299 bp, Gossypium hirsutum
  Clone ID: LIB3135-025-Q1-K1-C7
gccacgcgtccctaaaaaacccatataaggatttggagttcttataccttcaaaggaacagggaagtggtataaaaactatcggccctcctttctcatctgtgatgtttcctgatcgtgcacctaataatttgtatctctttacaacctttgttggaggaaaccgaaataaagatctggacaaacttcttacacactaattaaagcatattgatacttgcgaccttcacacttgtttggagtggagggagaaccaacattcttcaatcatttctattggagcaaggcatttcccttata

SEQ ID NO: 10924 - DNA, 135 bp, Gossypium hirsutum
  Clone ID: LIB3135-025-Q1-K1-C8
ccggaattgaagggccgacccaagccacccgtccgcatcattacctaattatgcctagttattcatctaataatagttacagtatcttttggtgaggctatcaagcttaagtgacacaaaacccaacatattata

SEQ ID NO: 10925 - DNA, 167 bp, Gossypium hirsutum
  Clone ID: LIB3135-025-Q1-K1-C9
ttctttatatacataaaaaggtcaatcttgcccagaataacatcgccttgtggcaaaatataagggagaacccatatatataatagctaatgttgtcaaaacgtgaaaaataaacctgctttcctgctaaaataaatatagctggtcactcctttccatttctatcc

SEQ ID NO: 10926 - DNA, 390 bp, Gossypium hirsutum
  Clone ID: LIB3135-025-Q1-K1-D1
cccacgcgtccgcaagaaacccctagaaggatttggagttcttataccttcaaaggagcagcaaaggggtttaaaaactctcggtacacttttttcatctgtgatgtttcctgatcgtgcacctaataatttgtatctctatacaacctttgttggaggaaaccgaaataaggagctggcaaaagtctcaacagatgaattgaagcatattgttacttccgaccttcagcagttgttgggagtggagggagaaccaacattcttcaatcatttctattggagcaaggcatttcccttatatggccgtaactatgcttcagtctttggagccattgaaaagatggagagagatctccctggatcttttatgcaggtaaccacaaaggggga

SEQ ID NO: 10927 - DNA, 374 bp, Gossypium hirsutum
  unsure (1)..(374): unsure at all n locations; Clone ID: LIB3135-025-Q1-K1-D10
ccgggcgacgacgcgtccggacttngtggtaagaaggtgaatggtggttggtgtagttagatcaaatgaagtcaaaagtagcatttttttttttttgaaaaaaaatgtggttatggactggaaaatgtttcacattacatgaaatagaaacttgaaaggtgtcagaatcaacaaaaaaaagacaaaaaaaaaaaaactaataaaaacaaaaaaccttaaaaaaaatcaaggtttgggttgacgatctagagcaaccaaaatttctttcacggggatgcaacattttaaatcttttgttggggccccaaaattcattcaactggccgtcgcttgaccactttcatggttggaaacaccctggagtaacccaattt

SEQ ID NO: 10928 - DNA, 367 bp, Gossypium hirsutum
  Clone ID: LIB3135-025-Q1-K1-D11
cccacgcgtccgcccacgcgtccgggatgttcctgattcccttccccatatctgaaaagggcagggagatcttcctctgaataacaacatgaagactgtgttatagctacttctgtttatatctgttttctgtactatgctatatatccagaatggagcaaacaactgctgcagaaaacaacactgctgtagctgcttccattctcctaggtaacattagtctgttgttttgaatttgagttcactgtaatcttttggcctcatgttaaagacctacatgtaagttttcttttcccacaaggcaccatatgaagattgtgtatgttaaatgcgtgcttataccagtgtgacagaaacaaaactatgc

SEQ ID NO: 10929 - DNA, 245 bp, Gossypium hirsutum
  Clone ID: LIB3135-025-Q1-K1-D12
ggcaactaaggagaggtttgaagagaggttcaagactgggaaaaacaggtggttctttactgagctcaggttttaagtgttttattggaacatgttttatgcttaagtagttttatcgaacaattttgaatttaatgacggattttgaatctgtttggataagatatttctgggttattatttttgttattttatggaacgtgatttgctcatttctataagaagtttaagcttttgaactaacc

SEQ ID NO: 10930 - DNA, 278 bp, Gossypium hirsutum
  Clone ID: LIB3135-025-Q1-K1-D2
gccagcagtgccacaaatcgatctcttgctaccaaacaaagtggtatggagaatatttggagcagactcaatggtgcaagtcaacaaggacgtattgtgtttagggtttgtagatggaggactggaacccacaacgtcgatagtgatcggagggcatcaaatagaggacaaccttctgcagatcgatctagctgcatccaagcttgggttcagttcttccctcctcttccgtcgaacaacatgttccaacttcaactttacatcaactgcttaaaggg

SEQ ID NO: 10931 - DNA, 331 bp, Gossypium hirsutum
  Clone ID: LIB3135-025-Q1-K1-D3
gttctagatcgcgagcggccacctttatcagatatcaaaaggagtgaacctcagattccggatcggaaaaaagaaaatggtgaagggacgccaaggggagcgagtcagactctatgtaagaggaaccatcttgggttacaagaggtcgaagtcaaaccaagatccgaacacttcattaatccaaattgagggagttaacaccaaagaggaagtagcttggtatgccggcaagcgtatggcttatatttacaaggctaacgcgaagaagaatggctctcattatcgctgcattttgggcaagcgtactagaccgcatggtaacagtgggtgt

SEQ ID NO: 10932 - DNA, 354 bp, Gossypium hirsutum
  Clone ID: LIB3135-025-Q1-K1-D4
cccacgcgttcgtccacgcgttcgccttaacttcctcaccaacctaccaagagcaaatgaggggctgaaaatcttcacagccaatcttaatgatcccgagagttttggtactgacatcgagggatgcaaaggagttttccatgttgctgctcccatggatttgcaggacaacgaacccgtagcaggtgtgacccaaaggttaatcgatggaacattacgcatcttgaatacatgcttgacatctaacacagtgaaaaaagttgtatacacttctagtattaccgctgtatatttcaacaagatcaagaatgtcgagatcattgacgatagttattggagtgatgtggatttcat

SEQ ID NO: 10933 - DNA, 322 bp, Gossypium hirsutum
  Clone ID: LIB3135-025-Q1-K1-D5
aaggcccgagccagaccgacgcgtccgcccacgcgtacagacaactacacagcctattccctctcatgccttatcaggacccgggtagggtgataaaaactctgggggcactcttttcatctcagatactgactgatcatacacctaataatttgtatctctatacaacctttgttggaggaaaccgaaataaggagctggcaaaagtctcaacagatgaattgaagcatattgttacttccgaccttcaacacttgttgggagtggagggagaaccaacattcttcaatcatttctataggagcaaggcattttccttata

SEQ ID NO: 10934 - DNA, 288 bp, Gossypium hirsutum
  Clone ID: LIB3135-025-Q1-K1-D6
ccggaattgaattcccgacccaacccacccgtccgaaaaacaacaaatcgtatctctttatttcaatcaaaaacctaccagaaaaacatatggggggggcctgattttgacagccaagcttagccaccctgacattcgacgtactagcttttctatagtgacacctaacttcacttgattgtcctgcgctttacatcgaagacaccgctacaaccatggctgtaaccaacttaatactctttttaaaaattccccttttttatacttgcataacatctaacaacctca

SEQ ID NO: 10935 - DNA, 355 bp, Gossypium hirsutum
  Clone ID: LIB3135-025-Q1-K1-D7
gttatacatcactaccctcctcctatattttttttgcagaggaaaccccctcacccaatggagatgtagatttaaaagactgactgccatcccacgtggtcgacggagcttaagtgattaacatttcaaatgcacaaggatctaattctactcaaaacagttaaatctttttgtgaaatagctgtgggggaactggagctccaactaaagtacgacacaggttctccggaaaaagtaagcaaccccctatatgagtccacaaaggacctcctgcatagtgctctccgaaagggcataaccaaaattttggaaaaacaaaactttgcgctccccgagaaaatgacccattctgagc

SEQ ID NO: 10936 - DNA, 330 bp, Gossypium hirsutum
  Clone ID: LIB3135-025-Q1-K1-D8
gagcgacccgtcacacgtccggtaggaattagcaacaaatttggtgtcttaacagataaaatgactaggtgaggggcatgtgttcatgacgaattagatgactgtacatgaaagatggcaaatcctggttctgataagatgaagttcaagcgatgtcgaattgctaatattgaaataactgatgctcacaaaaaacaaatacttaacattatattagatgctactactcttgatgtttttgagcctgcaacatatgaagacgaatactgacgaggatacgtcatagagctattataagaatgtaagttcggcagaaaactatgcaacaat

SEQ ID NO: 10937 - DNA, 175 bp, Gossypium hirsutum
  Clone ID: LIB3135-025-Q1-K1-D9
ttagaatcatgggtgttgtcacttataactatgagtctacctctccagtcgcccctgccaggctggtcaaggctttttctcttgaagctgacaaggtttggcccaaggctgctcctcaggcagtcaagagtgttgaggttgaagctaatcctggccctggaagtatcgtaaagat

SEQ ID NO: 10938 - DNA, 369 bp, Gossypium hirsutum
  Clone ID: LIB3135-025-Q1-K1-E1
tacataccttagtcccctcctcccatatttttgttgcggggaaaacccccgcgcccaatatgaagagagatttaaaagactgactgccatcgcaggtggtcggcggagcttaagtgattagcatttcaaatgcacaaggatctaattctactcaaaacagttaaatctttttgtgaaatagctgtgggggaactggagctccaactaaagtacgacacaggttctccggaaaaagtaagcaaccccctatatgagtccacaaaggacctcctgcatagtgctctccgaaaggtcatagccaaaaattttgaaaaacagaactttggcgctccccgagataatgacccattctgagctagttgataaatt

SEQ ID NO: 10939 - DNA, 449 bp, Gossypium hirsutum
  Clone ID: LIB3135-025-Q1-K1-E10
acctcatcggttcaaccaatcaagtgttttcgctggttttcgcggttatacttctcattggattagctagtccgttggcggtcccgatatatgcttttgtaaagagttggcgcttggtcgggttcgaagctgacatggagcgacaacaaccgttgctgaaagaggaaactacgtcgccgccgtcggagacaaaggacatcattaccgaagtggcagcagcagcttcggcggatgacgcgacggtgttagtggaaaagacaaaaccggtgataggagaggagcacacgataatggaggcgatgcagacatgggacttttgggtatcgctcatatcgttcctttgtggggtgggaacaggtatggcggtgataaacaacatggcacagatcgggttagccttgggtcacgccgacgtttcaatattcatttcattgaccagtatttggggc

SEQ ID NO: 10940 - DNA, 368 bp, Gossypium hirsutum
  Clone ID: LIB3135-025-Q1-K1-E11
tcgagcacgcgtccgcttgaattaagagatttggggtcaagcattgaattggttttgataaccggattgaataagggctggatgctatatgaagttattagcattcttgaacaagaaggggctgaagttgtaagttccaccttttccactgcggggggcaagacttttcatacccttcatgctcaggctaaactttctagagttggtgtagagactacaagggtgtgtcagagactgcaagaactgattaagagttattaatacaaagaagtgctttcatttggtctgctatttgtactttgcttatcgttggagggggatctccaattttacagaactaaaagggttctgagaactttatcaaatcg

SEQ ID NO: 10941 - DNA, 359 bp, Gossypium hirsutum
  Clone ID: LIB3135-025-Q1-K1-E2
gccacgcgtacgggtggagttagcatggtattggaggtcttaacagataaaataactcggtcaggggcagctgttatggaggtagtcaaggactgtggaggaaagatggcagatcctggttctgttatgttcaagttcaggcgtgttctgagttgttaatataaaagtcactgatgctgacaaagaccagctccttaacattgcattagatgctggtgctgaggatgttattgagcctccaacatatgaagacgatactgacgaggataggtcagagagctattataagattgtaagttcggcagaaaactatgcaacaattcttttaaagctacgtgatgaaaggaataatttcgaga

SEQ ID NO: 10942 - DNA, 198 bp, Gossypium hirsutum
  Clone ID: LIB3135-025-Q1-K1-E4
aggagcattattgaatacgatcctcgtcttgttgctcctacttgcttatatttggcatcagagggggaagaaagcacggtgcatgctagacttcttgtattttacattaaaaaattatcttctgatgaaaagaatagatatgaaattcaaagacatacttgtaatggaaattaagatcttacaagcacttaactatta

SEQ ID NO: 10943 - DNA, 285 bp, Gossypium hirsutum
  Clone ID: LIB3135-025-Q1-K1-E5
actaacttacacagctattctgatataagtgattgagaaaatatcgccggctgcgattggtcgggtcaattccaatactggctgccatcttaagaaagggcaaaagactcgagaaaagtttgagaaaaccctgtctgtgctcatgggagctcttgactttgaaatgcttttgtgatgtagacatggtcatccatgctgctatccataatgtgctactcaagctacacatttttagcgatcttgagaaatactgtgcaccacattgcatacttgcatagtaacact

SEQ ID NO: 10944 - DNA, 362 bp, Gossypium hirsutum
  Clone ID: LIB3135-025-Q1-K1-E6
gcttatgtatcaaactattgtagcaaaattgctacttgccttttaaccttttatttcatgtagcggtgcaatttcactgtaaaatatcttggcacttaatttatagctgatatatatataatgtgacaaaatttttgaacatgctgcatttcttgtctgtatgtacatagcaatgacatttatttcaacttttgatcaataaaaatgaagggtgaaatcatgttattgagcctccaacatatgaagacgatactgacgaggataggtcaaagagctattataagattgtaagttcggcagaaaactatgcaacaattctttcaaagctacgtgatgaagggataaatttcgagacggataac

SEQ ID NO: 10945 - DNA, 356 bp, Gossypium hirsutum
  unsure (1)..(356): unsure at all n locations; Clone ID: LIB3135-025-Q1-K1-E7
cccacgcgttcggctggttcttgatggcatatttctttgttgcatatcttggagtggtaaggagaaaggagtggcctcactttttcacatttcatgtggtgatgggaatgctattggaaattgccttacaggtgattgggactgtgagccgctggatgccacttgcaatatactggggtaagattggtatgcacttttggacagctgtggcatttgcctacttatttactgttttggagtgcattcggtgtgctcttgctggtatgtatgctgacattccttttgcctgtgatgctgcatacatccaaattccatatgactaanggtggaatgtagtgaaaatggtttgggattca

SEQ ID NO: 10946 - DNA, 362 bp, Gossypium hirsutum
  Clone ID: LIB3135-025-Q1-K1-E8
cccactcgtccgctcagtatctccattggtcaaggcttaccgaatatcgatatttcgagagcggttgggttgccggagctactgacattgcggagaacattcatcaagttaacaggacaaacacgtttgagtggacgaccttcctcttccgattccagcagtgcaaagaggatgttcgtagactatctgaattgagaacttggaactattgcttgaaaaagggtaatactactaatacttacctagttttataccttgaacagtgttgtcaaaagtcactaatttattttttacttttactttctccaaagatccattttagattgtctcatacatatctttaaaccttgcattgagagtca

SEQ ID NO: 10947 - DNA, 327 bp, Gossypium hirsutum
  Clone ID: LIB3135-025-Q1-K1-E9
acgcgtcacactgcccataacatttccaggcgcgaagctcactggcacacctcgttctctttgcagcaggaggggggggtactgaatatacactttactcatcactcattgaggcggataacggctggggctgatcttaaccactagcgccatatgagaagaacatcttatcaagaccactactttcatgcccactttccctgtccgacatgctcaacacctgcgaaggaaaaaaatgctgaagagccctgattctttgcgagatcagcgacgaaaggagatgcaacacgggggactatggactagtgctctatttggctaaaagaa

SEQ ID NO: 10948 - DNA, 271 bp, Gossypium hirsutum
  Clone ID: LIB3135-025-Q1-K1-F1
agtgagcatgacatacggggtgaagctggggacaccgaaagagtactacaatgaggagcagggggggacacatttcctggagttcatcaacttggaagaaggtgatactgtacaaggagatcgaaaggatacttttacttaaatacctaaatctgtttttaccaaagactccaaatactacaatgtatgaaatgaacgaaaaagaatatttgcattgcatactcactttattgctgaacccgcaacatttatagaggaggcttaaagcttg

SEQ ID NO: 10949 - DNA, 463 bp, Gossypium hirsutum
  Clone ID: LIB3135-025-Q1-K1-F10
gtcgtatgtagtcgtaggatcagctgagcagtgtggaaggcaagcaggtggtgctctttgccccggtggtctatgttgtagccaatttggctggtgtggcattactgctgactactgcacagttcctggttgccaaagtcagtgcagcggtattggccctgcccctgggcctggtgggctaaccaatcttatatcaagagagacgtttaatcggatgcttttgcataggaacgatggggcttgtcctgcccgtggcttctatacatatgatgctttcattgctgctgcccgttcctttcctgcatttgctacaactggtgaccaagctactcgcaagagggaaatagctgccttcttagcccaaactttccatgaaactactggtggggcagggtgggctgcaccggatggtccttatgcatggggatactgctacaatagggaattgaatcccccttcatct

SEQ ID NO: 10950 - DNA, 244 bp, Gossypium hirsutum
  Clone ID: LIB3135-025-Q1-K1-F11
tgattgatggatggactgtcactgttgcatccgtgggtgattctcggtgtatattagacacccaagggggcatagtttctctcctgactgtacatcataggctagaagagaatgcaaaagaaagggagcgtgtcactgccagcgggcgtgaaataataaggcttaatgttttcttagacaacgacgttcgtccactttcttgcttgcctcgggggtaatgcctctataagtcaatccgtgacac

SEQ ID NO: 10951 - DNA, 395 bp, Gossypium hirsutum
  unsure (1)..(395): unsure at all n locations; Clone ID: LIB3135-025-Q1-K1-F12
gtgcaactatccgtctgtacatcgagcaatatgaaaaggatccatcaaaaataggaagagagtcccaagaagctcttgcccctcttgtggaagttgctctaaaactttcgaagatgcaggagttcaccggccgatccgcaccaactgttatcacatagattcattctgctacacgttaaggtgtgtttgatttaattttgagcaaaagaaaacataaataaagtcctcataagatacgctatatatatatctatgtcagtgtgcatccttgccatgagtacttgagaatggcaaaaggcaataatgcttactcatcaaaatttttgacaatattatttgaggatttattntggtgacccaaaaaacgaacaaataagcgtgtttagatcccttgt

SEQ ID NO: 10952 - DNA, 300 bp, Gossypium hirsutum
  Clone ID: LIB3135-025-Q1-K1-F2
gattagctttgcagctgccgaggatgttggtttcatctacaacggattccggtcggctaagctaaaccttgatggcattgcagaactcacttccaatggactcctaaagctcaccaataaaaccgtgcaagaaacaggtcatgctttctaccctcaccccgttgatttcaagaactctaccaacggctctgttttttccttctcttgcacctttgtcttcgccatacttacggagtatccaactctcagcggccatggaatcgctttcgtgattgcaccaaccaaaagcctccccggatc

SEQ ID NO: 10953 - DNA, 298 bp, Gossypium hirsutum
  Clone ID: LIB3135-025-Q1-K1-F3
gcgacccgtagcttaagaacaaacctaaaaaactttaaagtgtctttcaagctcgcatcaatctagtggggaggaccttttgtagcaaatgactgcactgactacaattttcgagattgaataaactttcgtttgttgtcatgggctgtacacagctgaaagagaagcaaacaattacatggttattaagatccaagtgttcttgctgctgaaacaccttttacagttaaagaaaataaagtccctggaggagctttatttgaaactaaccacttcgataattgcagatggacttatt

SEQ ID NO: 10954 - DNA, 121 bp, Gossypium hirsutum
  Clone ID: LIB3135-025-Q1-K1-F4
cccacgcgtccgtgcgttttagacctttatttttattgtatagatttttatttccttgtctagttagtagaacaattaagatatcatctaatgctcatgtataaaagatattttctatgtt

SEQ ID NO: 10955 - DNA, 395 bp, Gossypium hirsutum
  unsure (1)..(395): unsure at all n locations; Clone ID: LIB3135-025-Q1-K1-F5
cccacgcgtccgcaagatcacctaatagtgccactagtccacaatttacacatcaggtacaggaccatcaccatggctattcatatcaaccacaagtgtccgattatccgtcttcgccgatgcttagtcccggcggcacaatgatgaacgtgccggatccagtgacccgaatattcggtgaaatggtatacgcaagggtatttggggagtcaattacgaacttatatgcgtatccgaattcatacaatcttaccgggagcacccctaggatcagaaggcacctaaagcaagcggataaggcactaaacagaataagctttttcctcttctgttgcttaatcatatgccttctttcattttgatctattcggntaaccgaccattatgtatatata

SEQ ID NO: 10956 - DNA, 192 bp, Gossypium hirsutum
  Clone ID: LIB3135-025-Q1-K1-F7
gaggtcggaaagttacgaagaaaaaactgtacttgccgttcgttatgaatccaacggcaagagaaagataattgattgcaacaaaataaaattaagtggaaaagagaaagcatgctaatgtttgatgagttccagaaggaacaatgatgcgtctgttttgatgcaaattaatgaattttgtgttttctctta

SEQ ID NO: 10957 - DNA, 276 bp, Gossypium hirsutum
  Clone ID: LIB3135-025-Q1-K1-F8
cccacgcgtacgcctagctcgcaacagataaacttgtgcaacaataaactcaccgggattggtccgaagtcgcttttaaggttccctagtttgatgttagaaggtaacaatgtttcttttgaaagaatgcctcctcatacgtcaccatttggtgcaccctatggcgaaccgtatacgacatccaagaagtccatgaggctcggagaaactgcattgtcgagaataataattgcttgttgcattctagcgcttgtggcgttggtgtctttcgaaatt

SEQ ID NO: 10958 - DNA, 308 bp, Gossypium hirsutum
  Clone ID: LIB3135-025-Q1-K1-G1
cgtccggaaatcttcaacttaataacaaaaaacttactctcaccaatcactatgaatcctacagccaggaggagatcattagattccatcacaaagcctaaaaatttacagagaaagcctactaatgtttgatgaatatcaaaacccacaacaacccctatacttacatttacaacattaaaaaccatattttttcttatgataaacttactgacaagctcgaatccgaataaaaagagaaagttgcaaccgctgttaaagaatccctctattggctgcatgactaccacaatgtcgatcttgtatac

SEQ ID NO: 10959 - DNA, 440 bp, Gossypium hirsutum
  unsure (1)..(440): unsure at all n locations; Clone ID: LIB3135-025-Q1-K1-G10
cccacgcgtccgcccacgcgtncggtctggacatggtaccattggtatgtatgctggcggaggcgggccgacttgccctgttggtatttagctttctatgctgaggaagactgaaggtataaatcaaacacaaaatttcacatcggagatcagatatctatagagagccaccaccaccaccgcactacaatcagaaccaccactcaaccgttactcgtaatcatcgtcaatactatacttactaccatacaaaatgcgtacataaaaagcagtgaaggaagtgggtcagccattcctttattttgttgtaatattgttatctattgtttcagtagtttggaccacaggtaaaagcatagaagaagaaagaaaaaaaaaggatcacacagtcaatgtgtagttgtaactccccttggaactggaatttctttccttatttt

SEQ ID NO: 10960 - DNA, 437 bp, Gossypium hirsutum
  Clone ID: LIB3135-025-Q1-K1-G11
cccacgcgtccgcgagtacttggtctactacgataagaccatcaccggaaaactgggttgtggttccattactgatttgaaaggtattcaggtgaagcgattcttgttttggctcgatgtcgatgagatcaccgtcgatttgccaccttccggttctatctatttccaagttgggtttatcaacaagaagctcgacgttgaccagttccagaccgtccattcttgccgtgatggggttactggctcttgtaaatattcttggaaatcagttcttcagcttccgatgccaacgaacgatattcagatgctaattactgagtagctgccagccacagagtactgttgctgtatgtgaaaccgataggagtaagcttttatctatcacttgtgtataaaaggaatgggagtgaagtacttgatggttgcagactcaaaaa

SEQ ID NO: 10961 - DNA, 458 bp, Gossypium hirsutum
  Clone ID: LIB3135-025-Q1-K1-G12
cccacgcgtccgcttgttttgatgatgaataaagagagagtgcaaactagaggtgttaaggttgatgagagtgtaaagactgggtgtacttatatgaaggttaagtttgatgagaatgggaagttgaagatggagactgttaaggaatctgctgaggactctcttcttagctctgaattgaatcttgctgttctcaaagaggctaggattttccacttcaattcagaggttttaacttccccttccatgcgatctacactttttaaagcaattgcatggtccaagaagtttggggggctcatatttttcgatttgaacttaccattacctttgtggagatcacgtgacaaaacaagggaggtgatcaagaaagcctggaacaaagcagacatcattgaggtatcaaggcaggagctggagtttctactggatgaagagtattatgagaggaagagaaa

SEQ ID NO: 10962 - DNA, 328 bp, Gossypium hirsutum
  Clone ID: LIB3135-025-Q1-K1-G2
cccacgcgtccgcccacgcgtccgcttttttatttagttctatccattcttagtttctgcggcttggttgtttcgaattacatattagaataatgagggaaacaagtaggaaaaacaaaattaagaaatatcaaatataaattacaaaaattaattcgagattagaggattcaaatgcaaacatacatgcaactaagctgaatacagaatataaattaacatctatttaactttttttttaattacagaacttgcttattcggtggtcgtgaccgaaaaatgtgatgtctatagttttggagtgttggcattggaaatattgatggga

SEQ ID NO: 10963 - DNA, 286 bp, Gossypium hirsutum
  Clone ID: LIB3135-025-Q1-K1-G4
tctttactttggaattccagtttactaaataacaagcaagggaggtaatccttgtaaacgaagagagcctagtatttccattgctcgctttacaattatggataggtcagaaacacattattattattattattattattattattcagtactaataaaggacttgcctcttaaaaaaaaaaaaacaaaaaaaaaaaaaaaaaagggagaacaataacaaaagaaaaaaaataacgcccgccgtctttaaaacaacaaaaatttttttaatatttaaaaatcaagg

SEQ ID NO: 10964 - DNA, 371 bp, Gossypium hirsutum
  unsure (1)..(371): unsure at all n locations; Clone ID: LIB3135-025-Q1-K1-G5
cggaatggaaggnccgagccgagcgacgcgtccgcaaaggcacaggtaaatcagagaaaatcacaatcaccaacgacaagggtcgtttgaggcaggaggagatcgagagaatggttcgtgaggccgaaaaatttgcggaggaggacaagaaggttaaggaaaagatcgatgcccgcaacagcctcgagacttacgtttacaacatgaaaaaccagattaatgacaaggataagcttgctgacaagctcgaatccgatgagaaggagaaagttgaaacggctgttaaagaagccctcgagtggctggatgacaaccagaatgccgaaaaagaagacttttgggagaaactcaaagaaaatgaggctgtttgc

SEQ ID NO: 10965 - DNA, 200 bp, Gossypium hirsutum
  Clone ID: LIB3135-025-Q1-K1-G6
accacgcgttcgttaatataaacatacaagggaagatcacaatcaccaccaatcgagggcggaagatatattgccccagctaaccatgctaatacatgacaatctctaagcacaacttacatggattgctcaacagagagtagaagactttattcgcgttatgccgtggaggttctacccaaacctaatagtctgtatct

SEQ ID NO: 10966 - DNA, 185 bp, Gossypium hirsutum
  unsure (1)..(185): unsure at all n locations; Clone ID: LIB3135-025-Q1-K1-G7
ccgaacgaatncccagctcagacccacgcgtacgtccacacgtccttacactcattcattcacgctttcacccactcttccactcacgcgtgctgctacgttttcgaaaaaaaaaaatatatataatttaaaagaaaaaaaaaacaaaaataaaaaattttgacttatttacagtattttacttt

SEQ ID NO: 10967 - DNA, 268 bp, Gossypium hirsutum
  Clone ID: LIB3135-025-Q1-K1-G8
aaaaaacatgcttctggcgagaagccagtgcggtatgctttgtatgtttcatgtataggcgatattttgttggttttcaagtttcctcaagaggttcttgtttattctccccgaaactaccttcgcacctgatgctatctttccatttgacatttacgaatatttatgatctgggtgaagcttaggggtaggtgtgccattctattttgtacgtatacgagtatttattttgtgtttatatcagtgtgtttagtttttatttttattg

SEQ ID NO: 10968 - DNA, 441 bp, Gossypium hirsutum
  Clone ID: LIB3135-025-Q1-K1-G9
atcatagaagaacttgattcaaaaatacctataggtgaaattaaaggaggcggctattccgtgtgggtgaggtaaagaatttggtttatctccatggagcattgtgtgaggcattaaggttgtatccaccagcccctttcaatcataaggaacctgtcaaaccagacatacttccaagcgggcatccagttcatccaaagacaaaaatcttgtttagtgtgtattcaatgggaagaatgaagtcaatctggggagaagattgctatgaattcaagcctgagagatggattaatgagagaggagagatcaaacatgagtcatcgtacaagttcttatcttttggtgcagggccaaggatatgtttggggaaagaaacatcatttattcagatgaaagccgtggcatctgctctaatttacaattatcgcattcatgtaatgg

SEQ ID NO: 10969 - DNA, 279 bp, Gossypium hirsutum
  Clone ID: LIB3135-025-Q1-K1-H11
aatttatctatccttccggcccttttaaaaaaaactcaaccaccttatatccaacaaaacttcacatctttaatcttttactttctttttctcacctaagctatatcctaattctatactcttcactttatcttctaatcctttcaaatattactaaaccactttacatttcaaaaccttaccaatttaaaatcttatcttcataatctataatctaaatctaaactcttaaaatcattactctcctctctataatctttttcataaaacaattactta

SEQ ID NO: 10970 - DNA, 451 bp, Gossypium hirsutum
  Clone ID: LIB3135-025-Q1-K1-H12
acgccacgcgtccgcttctttccacacttgaaaatcttcatggttagcttctgcaagagggagttgcaagattctttgggcaatttctgtttgaaagatcacatttcctcttccaactctccaacaaagtccatctcgaagaagaccctttgctacccaaatactcttccaggtaaatgaagatgcagatctccaccttggctatctttcttcaaactgtaggagacaaatgtgcaagatgcgccgacttcaagcaatagaaaacaaaaaacagcagaaaaacctagaactcttgccagagacgacagacaataacgtgctggggtagcaaactttctttttatatttataataaaatttacaatactataaatacatgaaaaaaaaagtagaaaatttccaatttctttcttttcccattgttttggttttcccacttcctttctttctc

SEQ ID NO: 10971 - DNA, 343 bp, Gossypium hirsutum
  Clone ID: LIB3135-025-Q1-K1-H2
cccacgcgtccgatttaacttctttgctttctttgtatttgcagcttctgtaggggaaaaaaaaagatgaagagggtttcctttgttgccttgtgtgtggtggcactgtcggtggtgctgttttcgggtgaaagtcgcatggcggaggcagtgacatgtaatcccacggagctttccccctgcttgtcggcattcacgtcgtcctcgcctccatcagccgcttgttgcagcaagctgaaggcgcagaagccatgcctctgtggatacattaagaacccatctctttaacagtatgtcaacagtcctaacgcttaaaacgttgcttcgacttgtggagtcacat

SEQ ID NO: 10972 - DNA, 440 bp, Gossypium hirsutum
  Clone ID: LIB3135-025-Q1-K1-H3
ggaaggcccgggccgaccgacgcgtccgccgacccgacaactcacacgtggcttacgttaacaagatgactcatataaggtgcagcaaggctaaagagcttcaagcaaagaacgactgtatatagaacatgggtgatacaccgtaccgacttagacaatccgtgaaggagctcatccatatgcaacgagctggatgttagggttacatgttgcacatgaacaacgtgcagacatgggtcaccgctgcactgaccgatgagaatacttgccttgatggctttgcaggcagagtcatggatggaaacgtcaaagttgcagtgaggcgcaaggttgtccatgtcgctcaagttactagcatgctcttgcattagtgaatcgctatgctgcaagacaccgagctgctatacctactgaaaaaccttaattttaaactttaaaaa

SEQ ID NO: 10973 - DNA, 289 bp, Gossypium hirsutum
  Clone ID: LIB3135-025-Q1-K1-H4
cgctcacccaggcacacaccgagcttataaactatggttttccgatcggtcttcttccgggctcggtgacgaagtacactcttaaccaaacatccggtaacttcgccattgatctcggtggcacgtgcaagatcacgctcccgcctgacaactacctggctacttactcgaagcgggtaacggggaagattgaaaacggaaagatagcggaactcgatggcatcagggtacgggctctgttcaaatggtggtccataaccgggattcgatccagcggggataatttggt

SEQ ID NO: 10974 - DNA, 392 bp, Gossypium hirsutum
  unsure (1)..(392): unsure at all n locations; Clone ID: LIB3135-025-Q1-K1-H5
gaattggaaggncccggcccagaccgacgcgtaacgtctaatagactattcggtgcttgattgggtataacgacagtgaataatcccatatcgggtgctggacttgttatggataaaacaccacattcttatatgctcttagcccgcgcctaagagtttgcgagtaaactacgtttgtagtctgtggacaatgaatatttcattacataagacaatgtggggatgcttaaggtagcaaaagaagcaaactcaatgctgttctattaccgcattctaacccttaccagctgtggcttatgcgcatacagagaaaatcaatcacaaatgaacgacttaccaatcagtctatacgccctagaaacagtacgtttcgttgtagttgacaaacaagg

SEQ ID NO: 10975 - DNA, 387 bp, Gossypium hirsutum
  Clone ID: LIB3135-025-Q1-K1-H7
cggacgcgtgggcggacgcgtgggttacgttgccaagatgactcatgtaaggggcatcaagcctagagagcgtcaagcagtgaaagactgtatagagaacatgggtgatacagtggaccgacttagccaatcagtgaaggagctcagccatatgggacgagctggaggtgagggtttcatgttgcacatgagcaacgtgcagacatgggtcagcgctgcacttaccgatgagaatacttgccttgatggcttcgcaggcagagtcatggatggaaacgtcaaagttgcagtgaggcgcagggttgtccatgtcgctcaagttactagcatgctcttgcattagtgaatcgctatgctgcaagacaccgagctgctatacctactgag

SEQ ID NO: 10976 - DNA, 273 bp, Gossypium hirsutum
  Clone ID: LIB3135-025-Q1-K1-H8
cccacgcgtccggcaatttagaaaataatagaaagaaacgggaaaaacgcattcgcgcctgtgggtggatgccttgactaaggaaaacacatggccgctggagctgccgatggacttatctggtcgctttactaagggtgcatatccggcaacgaaatcagcatcgagcgccagacgtaccacaagaactgtcgctgcgcactccacgataagtcacgagggaactgccctcgctcaatcgctaaaagcaagaacctatcagatgctattagg

SEQ ID NO: 10977 - DNA, 455 bp, Gossypium hirsutum
  Clone ID: LIB3135-025-Q1-K1-H9
caagattatacctgaagaccttcattttgtgctaagaatgaggcatacctttgaatctcgtgggtatcaatctggtttctatctgtcccagttgttttcatccaacagaaacggtccgtctttatcgacgatttcttcaaagcaggctgccgttccaacccgtccacctccactcttcaactggaaccagagaccacttccgccagcaactaatccgatgcttgcttcacctaattttcagaacccggctagacttggatttccacaacccaaagacgaaacccacatgtttctactacctcgttcgtctgaaacccgaatggaagacatgatggttgagcatgaaaacgacatcaaatggcctaatggcttgagcttcttcagtgctctcaccggacgaaccgaagatgccaagcttttgttcaattccgagagtttaggaaacaaatcagaaa

SEQ ID NO: 10978 - DNA, 318 bp, Gossypium hirsutum
  Clone ID: LIB3135-026-Q1-K1-A1
gcctcccccatgtgcgccctcagcatgcacgactcccgatgacgactccttcaccgaggttgcaccaaaatggcaatggtttctgcccgttgactcctcatgacctgcaaaatagacgaaaacaacatccaatagacagaaacagagatagcagaaataaacagtagcacaaaagatgtatttggctatataagcccaaaaaccaaacaaatgtagggggattttcttttatgctttttctttctttctttcgaaaagccgaatatgctgtaaaagggggattgaacaaagagaatagtaaagagcagaggttatttc

SEQ ID NO: 10979 - DNA, 424 bp, Gossypium hirsutum
  Clone ID: LIB3135-026-Q1-K1-A10
ctcagttggacatccccgagtccatcctcccccacgcctacaatcccttctatcaagtttatacggacgttaacccaagattatttggtgcttgagcagcctgcttttttcaaggcacttatgacgttggaacttgtttaccaactccctctcgctttgcttaacatctatgggttgttatactctaagccctggttcaacaccacctgcctcctctttggtgcctctatcgttgcctctacgacagctatggtgggagacattctcaattcccagaaggcatcatccaatttgatggccatgtattatccaccgtttcttccattaggggttctggctatagtgcgaggggtggttggacaatcgagcaaggctgctccatccattggcaatggaccttcgtcggctgtgaaaaagagggctt

SEQ ID NO: 10980 - DNA, 383 bp, Gossypium hirsutum
  Clone ID: LIB3135-026-Q1-K1-A11
cacaaaccagataagaaatttgggatgagaaatgtcatgtgcgttttgacgatcaaagatgcggtggagcatgcttgtgcacgggcatgttcatgggctgatatctgctctgttattgctagagatggcgttgtatagctcgtaggaccactcgttggaacaaacaccgatctgaaagacagccggagagattacctgtgaaaggtcgattataccatacacaatcacattgattaactcgatgatgcgctgtaacgcttgctatcaatctgcatatacaccgacagaatagcacctggattaggagctcaatccggaggtcacgttgattgtgtagacctttgacacaaactattccacacagtttatccgacattggaccc

SEQ ID NO: 10981 - DNA, 319 bp, Gossypium hirsutum
  Clone ID: LIB3135-026-Q1-K1-A12
aaagaacattgtatagttgtgtgatcgctaggggaaactgaatagccaatggcacacttccaaatgtcaggaataacacctcttgttttttcccctgttttacaaaaaaaaaaaaaaaaaaaaaaaaaaaaaaaaaaaaaaaaaaaaaaaaaaaaaaaaaaaaaaaaaaaaaaaaaaaaaaaaaaaaaaaaaaaaaaaaaaaaaaaaaaaaaaaaaaaaataaaaaaaagggggcggccgttttaaaaaatcaaaacttactaacccgtgcattgcaacgtaatagcttttttatagtgccaccaaaattaaattaact

SEQ ID NO: 10982 - DNA, 427 bp, Gossypium hirsutum
  Clone ID: LIB3135-026-Q1-K1-A2
gcgcaccgtcaagcttactgtccagaaccggcaagctaaagtcactgtagtcccatccgccgccgctttggtcatcaaggcgttgaaagagcctgaaagggatcgtaagaagacgaagaatattaagcataatggcaatattagccttgatgatgtgatcgagatcgcgaaagtcatgaagcctagatccatggctaaggacctgagaggaaccgtgaaggagattttgggaacttgtgtttccgttgggtgtacggttgatgggaaagatcccaaagatctgcagcaggagatctctgatggggaaattgatgttcccttggagtaaaaccaaatgaaagaaactgggtttttctcttttgctttacttaattgttttcttttcaaaaatttgtgttttataagttttttaagtagttggtaaaaa

SEQ ID NO: 10983 - DNA, 411 bp, Gossypium hirsutum
  Clone ID: LIB3135-026-Q1-K1-A3
aagttttcacttccaattcgatcaaaaaacccttcttttttccctcatcaatccatcatgggaggaggaaatggccaaaaatccaagatggcccgtgagaagaacttggaaaagcaaaaagctgctgccaaaggaagccagcttgagtctaacaagaaggccatgtccatccagtgcaaggtgtgtatgcaaacattcatgtgcaccacaacggaagtgaaatgtcgggagcacgctgaggcgaatcatccaaagtccgacgtgtacacgtgttttcctcatcttaaaaaataaacatcaaaactctacagaaagaacggggatgtcaagacagcttgtaatgcatatcatctatctatgttgtatcttggtactctacaatttatcttaaattctctttcacaagcctgt

SEQ ID NO: 10984 - DNA, 373 bp, Gossypium hirsutum
  Clone ID: LIB3135-026-Q1-K1-A4
cccacgcgtccggtggggagatggtcttcagactcgatctttcactttcattgatgaatgtgttgaaggtgtacttagattgacaaagtccgatttccgtgagcctgtgaacatcggaagtgatgagatggttagcatgaacgagatggcggagattgtgcttagctttgaagataaaaagcttccgatccaccatatccctggtccagagggtgtccgtggtcgtaattcagacaatacattgatcaaagaaaaacttggttgggcccctacaattgaggtgaaagatgggctgagaattacatatttctggatcaaagaacagattgagaaagagaaggctcaaggcattgatctatcttgttattgatca

SEQ ID NO: 10985 - DNA, 413 bp, Gossypium hirsutum
  Clone ID: LIB3135-026-Q1-K1-A6
aaaaagatgatcaagtggtgtccaggcccaggctgtgaaaacgctattgactttgtcgccgggagtgaaaatcttgatgtttcttgcctttgctcccattccttttgctggaattgtactcaagatgctcatcgtcccgtggactgtgaaaccgtgacgaaatggatgtcgaagaacagctcggagtctgagaatgtaaattacatactagcttttaccaagccttgtcccaaatgcaaaaggccaattgagaaaaacatgggatgttcgcatatgacatgtagggcgccttgcctttacgagttctgctggctctgccttggagattggaaaaaccatggcacttgcaatcgtttcaaggggaaccccgaggaggaaaaaagagaaaaggcgaagcaatatgtgatgaaata

SEQ ID NO: 10986 - DNA, 238 bp, Gossypium hirsutum
  Clone ID: LIB3135-026-Q1-K1-A7
ggtatttgcaatcccatcattgcaaagatgtatcaaggaggtgctggaggtgatgtgcgaaggggtggtggtgctgagatgcctaacggtggtgggtctggtgggtctggtgcggggcccaagattgaggaagtggattaagttccatggcttttcttctgcatattaaattacctgctgatgtctctgatcttttttttttgcgtgtaccttggtttggcttgtattacgtgatgga

SEQ ID NO: 10987 - DNA, 299 bp, Gossypium hirsutum
  Clone ID: LIB3135-026-Q1-K1-A8
ggactttggaactgaaggtcgaggtggatattttgatgaatacggcattatccgcgatattatccaaaatcacctgttgcaggtcctttgtcttgttgctatggagaagcctgtatctctcaaacctgagcgcattcgtgatgaaaaagtgaaggttcttcaatcggtacttccaattaaagacgaagaggttgtactcggacaatatgaaggttacagagatgatccgacagttcctgatcactcaaacaccccaacgtttgcaactgttattctccgtatacacaacgaaagatggg

SEQ ID NO: 10988 - DNA, 293 bp, Gossypium hirsutum
  Clone ID: LIB3135-026-Q1-K1-A9
caaagaaggaagaatgggaaattgatttggctaaacttgatataaggtatgttatagctcatgggacttatggcaccgtttaccgtggcgtttatgatacccaagatgttgcagtgaaggtattggactggggggaggatgggattgccacggttgctgaagctgctgctcttcgggcgtcattccgacaagaggttgctgtttggcataagcttgacaacccgaatgttacaaagtttatcggagcttcaatgggaacttccaaccttaaaatcccgacaaaagattgaact

SEQ ID NO: 10989 - DNA, 418 bp, Gossypium hirsutum
  Clone ID: LIB3135-026-Q1-K1-B1
attgattttgatatagagctcgggtcaactcaatactgggatgaccttgctcgttatctatgagcttacagtaataatggacgaaaggtgtatttaacagcagctccacagtgtccatttcccgatagtttcttagggactgcccttaatacaggtctctttgactacgtttgggttcagttttataacaatccaccatgccaatacacatcggggaacataaacaaccttgtcaactcatggaaccggtggacttcatctataaaagcagggaatatatttttagggttgccggcggcaccagcggcggccggtagtgggtatattccacctaatgtgttgacttctcagattcttcctgttatcaagaggtcatccaagtatggtgggattatgctttggtctaaattctttgatg

SEQ ID NO: 10990 - DNA, 142 bp, Gossypium hirsutum
  Clone ID: LIB3135-026-Q1-K1-B10
taaaatctctttctaatcatcacaaaccattctttatttataatcaaaaactactcatacacggatgagtctatttatctacctaacacatcatttcttactttcttaatatttaaatcaacatcttaatcccacaattata

SEQ ID NO: 10991 - DNA, 397 bp, Gossypium hirsutum
  Clone ID: LIB3135-026-Q1-K1-B11
cccacgcgttcggggacttacaaaggccgggaagggaaagttgttcatgccagtgcgcaaggacgacgaggtccaagtggttcgtgggacttacaaaggccgggaagggaaagttgttcaagtctaccgtcgcaaatgggtgatccacatcgagcgcatcacccgggagaaagttaacgggtcgaccgtcaacgttgggattaacccatccaaggttgtcattaccaagctgaggctggacaaggaccggaagtcgttgttggaccgtaaggctaagggacgggctgctgctgataaggataagggtactaagttctctgccgaggatatcatgcagagtgttgattaaggttgtcttggttttcattgctatgatatcctttgttatgttacaatt

SEQ ID NO: 10992 - DNA, 431 bp, Gossypium hirsutum
  Clone ID: LIB3135-026-Q1-K1-B12
ggattccttgcttggaattcgaattagaggagggattcgtgcaccgtaagtactcgagcttacccacgtactacgatggacgctactggaccatgtggaaactgcccatgttcgggtgcaccgactcggctcaggtgttgaaggagcttgaggaatgcaagaaggaataccccaatgcattcattagaatcattgggttcgacaacgttcgtcaagtgcagtgcattagtttcattgcctacaagcctgaaggctactaagttgtttacttccctcctaggaattccatttgtttcaaagttgtacttaaattaagcccctcaaacccccccccctttttctttttcttttttagttgagttatttggcttggggtctctctttgtttgtttttggatttccaatggaacggctgagaactaatgaataaa

SEQ ID NO: 10993 - DNA, 398 bp, Gossypium hirsutum
  Clone ID: LIB3135-026-Q1-K1-B2
attgctctcttcgtctgtattcccccagccctcatttttgagggtcctcaattgttgaagcatggtttcaatgatgctattgctaaagtgggtatgactaagttcatctcacatcttttctgggtgggaatgttttaccatctctataatcagttggctaccaatactctggagcgggtggcaccactgacccattcagtgggcaacgtgctgaaacgtgtatttgtcattggcttctcaatcattgtctttggaaacaagatttcaactcagactggtataggaacagtcattgcaattgctggagtggcagcctactctttcattaaggccaagatggaagaagagaaacgacaaatgaaagcagcatgagaagaaaaatggaggcaaggaaattg

SEQ ID NO: 10994 - DNA, 347 bp, Gossypium hirsutum
  Clone ID: LIB3135-026-Q1-K1-B3
aatattcgctgcgtatgtccgcaaagctgcaggagataaacgggaaagctagtctgaaaccgtggaggcaacttatgtacctgacgcagaaaaacggacagttgagtctgaaaagaacatggaagcccacaataagatacaagctgagggtccgaaagacgaacatctgaatcacagccataagtcattgaggagaatgatgaggatcatgatcaacaacgcatcggacacgaggacaatgactaataggaacgtccgctgtggataacataatcaacgttcgcagcgatagggctagatcaaaaccttatgctactgctttagaagattccataacattcttttag

SEQ ID NO: 10995 - DNA, 413 bp, Gossypium hirsutum
  Clone ID: LIB3135-026-Q1-K1-B4
gaaagctctttctttggcagtgaaaattgaaaatcgacggcgaaaatgttgaggctggcgtggaaacggttgcttgggctaacgtcaagggagatcccgtcacggtccgttcagattctgccacgtctttaccacgaaaacgtcatcgaacactacaacaatccccgtaacgtcggttccttcgataagaacgatccgaacgtcggcaccggtttggtcggagctcctgcttgtggcgatgttatgaagcttcaaatcaaaatcgacgaggaatcggggaagattgttgatgcttgctttaaaacattcggttgtggatcggcgattgcgtcttcttctgttgctactgaatgggtgaaggggaaaaagcatgacgaggttcttaccattaaaaacacggagattgcgaaaca

SEQ ID NO: 10996 - DNA, 429 bp, Gossypium hirsutum
  Clone ID: LIB3135-026-Q1-K1-B5
ggaacttttgcagatctccttcaaggtccatgtctcctttgccttctcgtcaaaaaggggggagcaagagtcccaaaagacgcagtgttagcaggagtccaagtgggagcaggagcatgagcaggatcaggagcaagagtgtatccgggtcttgatcttaagctcctctgttgtcttttcactggtgagatgctattgcggggtgtatcaggagctgaagatgcctatgaagcttttatgtttggataaaaattagcatggagtagtgcgtaacttattataatttgatcaactatgctggatttgatcttcattgctatattcataacattggacggtgtgtgtgttattttaactagactgttacattacctggttttggattctttttaaaatgattggattgtgggttgcaaaaagtagcatttt

SEQ ID NO: 10997 - DNA, 412 bp, Gossypium hirsutum
  Clone ID: LIB3135-026-Q1-K1-B8
cccacgcgtccgcccacgcgtccgcttggcacagatttaaactacaaccctctcataaagatccaatgaaaaaaaagaaaggtcaaaagaatgatttttgctttttaacagtttggggaatggaaactgaactacctttcggctctcctcgaaaacggcgttcgttttttgagcctatttttaaagaactaaaaaaaaaaataaaaaaatggaaaacgaaatgttttatagctttaacaattttaaaagaaaaaactaaattgtttcgaaaagcttcaaaagaaacaaaaaaatggatcactcaaagcattctatttctaaaaggaataataaaagaacttttaaaaataaatccaattccattttttgggttgagaagaccatatgaattgggcgaaacttaaaaggattc

SEQ ID NO: 10998 - DNA, 396 bp, Gossypium hirsutum
  unsure (1)..(396): unsure at all n locations; Clone ID: LIB3135-026-Q1-K1-B9
ccacgccacactacaacgtgtgcaacagcaaggtgatgaaactccaatggtgtgggaaatgcttctatacttttacatcctctattcaccagactggcactatcggagtacaatgcctactttcctgttcttttatggagtcggctttgcaatagcccatgctctcatccgcttcgaaattggcttcaaggtgcattacatcattctctgccttctctgcatccctcgaatgtacaaatactacatctacactaaagataactatgcaaagcggcttgcaaagctatatatagcaactttgttcctgggaagcatatgttggcttatggaccangtattgtgcaaggagatatctcattggtacttcacccctcaagtcatgctctatggcatgtc

SEQ ID NO: 10999 - DNA, 294 bp, Gossypium hirsutum
  Clone ID: LIB3135-026-Q1-K1-C1
gtcagtcagtcacaggctgtcatggagttatttctattttcgagttaaataaaaaaatttggcactaggctatgttttaatagggtcgatttgtagactgatttaaaatatgattggtaaataaaaaggtctggcaatggcataatctttgcgaggggggtccctaggcaaagcttattgtcagtgtcacttggatgccttcgtagcgttagagtcgaactttatgatttgattgtaaggactgatctgaattgaaatattagtataaatgtgatttgtcgttcattgttggag

SEQ ID NO: 11000 - DNA, 435 bp, Gossypium hirsutum
  Clone ID: LIB3135-026-Q1-K1-C11
caaccttacatctcaacacaaaccaaccaactatcccaaactttacaagaaacccaatgttgcaaacatcaaattaaaaccaaataattatttggatgcaaagaagaccagcttggctgttccaactgctgcccttctttccacttttgagctgccggcattagctgttacaggggtaaacaatgagccagatctcatcactgtgataattcaactaggaattattgcttttgggtacttcctcatcgtgcccccaatcatcatgaactggcttaggataagatggtatagaagaaatctgttggagatgtacttgcaattcatgtgtgtgttcttgatctttccggggctactgctctgggctccatttttgaacttcaggaaattcccaagggataaagtcctgaagtatccatgggacacacctaaagatcc

SEQ ID NO: 11001 - DNA, 368 bp, Gossypium hirsutum
  Clone ID: LIB3135-026-Q1-K1-C2
cccacgcgtgcggggagacccggaatacggatatgcagtgcatgaaccggatcgacactggtaagaagaagtataagttagagaaagctaaaattgcagctggaggtgggccaagtaagcggttctctttcgataagttggatcaacttattgttccgacggagaagactgttgataatgttgatacgaggcgattatggtggcagtgtgagaagcactgacatgttgtctaaagtgcctatggggatttctggtgacatccgatccagtttgaacccgcttcaagttttacagcttgacgaagagcgggaacaacaacaacaaaagcaaccgaggatgggtgcattaaaggatcagaataagatgca

SEQ ID NO: 11002 - DNA, 429 bp, Gossypium hirsutum
  Clone ID: LIB3135-026-Q1-K1-C3
attattttctccataccagcataaatcaacaatggcaaagctcgcagtttacttagccaccctggctctcattttgttccttgccaatgcttcaatcacatctgtgacggtcgaaagcgaggaaaaccgggatagctgtgaacagcagataaggaagcaagcccacctgaagcactgccagaagtacatggaggaagagtggggtggcgaaggcagcgacaatatagccggcgggtacattgactcatgttgccagcagctagagaagatggatacgcaatgcagatgtcaaggtctaagacatgcaacgatgcaacagatgcaacagatgcaagaacaaatggggagcaaacagatgcgagagatcatgcaaaaggttaccaagaatataatgtccgaatgtgagatggagcctgggaggtgtgacac

SEQ ID NO: 11003 - DNA, 167 bp, Gossypium hirsutum
  Clone ID: LIB3135-026-Q1-K1-C4
ggcttcttatcatcccctgttcaatcaaagcctaacaggatatcaaagggaaatagtaacgagagggctatcagatataaactactaagagatgtatggatgaactctgaataaaccatcgattacatgttcatgagcatatatgcaagtaaattttggtttgtatt

SEQ ID NO: 11004 - DNA, 412 bp, Gossypium hirsutum
  Clone ID: LIB3135-026-Q1-K1-C5
ttatgattgttgcttcgcctgagccaattacaactggatgccagtgggccaaatgtatctgaccagcaagtctcgagggtattgtattgagatgtgaagacacatcgaatactgatgccataactgtttagtagtatgtgcatcgtaagctcttttcataaacacaaatttattctattttttcccctttctattaaatatctggcgatgatggtggctgtggtaaggtcgactgatgagcatgagcccctctggtgtttattatcctttttaactgtgtatagcttttccgaggttttgttgtcaaccttttatcttgtaggtttgaagggtgtttttgctttagggtcgggttcatgcagcttacgtgttttgcgaaggattcgggatgatgttactaagaattaaaaac

SEQ ID NO: 11005 - DNA, 430 bp, Gossypium hirsutum
  Clone ID: LIB3135-026-Q1-K1-C6
tagagatcaattctataggcatgacgattatagctcattgttgatgtattatggatgatcggttgctggagttttaaaccgatgacagattggcttgggtgtgaagcagattggtcctacttacttaaattgttattaactggtgtttaaatgtgcagactttggttttatctagtaacaatattaaggactggccggttgcaattttgaagtcacttcccaatctttcttgtttgaagttggatagtaatccactaagacagattccatctgatggattccaagcaatctctatgatccaaatactagatataagtggtaatgccacttcattacctgagaatccagcattttccaacttaccacacttgaaggagctttatttgagacgaatgcagctacgagaagtcccatcagaaataatgagctt

SEQ ID NO: 11006 - DNA, 390 bp, Gossypium hirsutum
  Clone ID: LIB3135-026-Q1-K1-C8
cccacgcgtccgatcaggggacccagccagaagtttcccttatacagctgccctcgttgtggatactcctccatcctcagcagatgtggctgaaaaagttgtggaggcaggagggaagtcgccattgtctaggaatgcgtcagtggtacagaggaaagggtataccagtgacgaggaactggaggaattgaattctccactttcatcaataattgagaaatttccattgtcaccaacaattgttaccaatggaggagtgaatggaaaccatgaacatgcaggctatggtggtataaatgcaagatacaaactccttcacgaggtatggtccgtgtgagtgtttatggtaaaaccgtttgcgtatatctctcaatgtttggagccatggga

SEQ ID NO: 11007 - DNA, 350 bp, Gossypium hirsutum
  Clone ID: LIB3135-026-Q1-K1-C9
tcgcccacgcgtccgccggaagctaagcttttgttcatcattcgaattcgaggtattaatgccatgcacccaaggacaagaaagatcttgcagctcttgcgtctgagacagattttcaatggtgtttttcttaaagtgaacaaggcaacaatgaacatgcttcaccttgttgaaccttatgtgacttatggataccctaatctcaagagtgtgagggagttgatttacaaaagaagttttgggaagttgaacaagcagagaattgctcttaccgacaatgccattgttgagcaggctttgggcaagtttggcatcatctgtgtggaagatctcatccatgagatcatgac

SEQ ID NO: 11008 - DNA, 394 bp, Gossypium hirsutum
  Clone ID: LIB3135-026-Q1-K1-D1
cccacgcgtccgttaaatagttgtctacagtttttccgggtattttgaggggggttttaggggagttttaccgagttttgcttccaaaaatgttagagcatcgaaaacaaaccatgaatctgagtaagtccggcaaaaagcctaaaaaacccgaatcaacgatgagtgaagaagaaacccaaatgactaggaaagttcgagtcatcttccatgatccatatgcaaccgattcatcttcaagtgaagatgaatccgagggaagtgctgctagaaaggctccaaggggaaggcgttttgttcgtgaaattagagttcctgttttaggcttggctcctcatgtaaagcctcttgaatccgatacatcttcacaagacagttactctaaaacccctac

SEQ ID NO: 11009 - DNA, 333 bp, Gossypium hirsutum
  Clone ID: LIB3135-026-Q1-K1-D11
cgatgttgatatcctaatcaaccttgaactggggagtgccatgtgtatctctatcttgaaggtagatggaacctccttcgatgttgcagtgatgaattcagccacagtgaaagacttgaagctcgcaatcaagaagaaagtgatcgagttagagcaatccaagatgggtcatcgacacatttcatggatgcacgtttgggctaatttctgcctatcacaccacattgggaagctccttgatgatgacgcttcacttcacgattttggcgttcgaaataattatcaggttcattttttaccttatggtggctcaaaaggttctgggagacattc

SEQ ID NO: 11010 - DNA, 419 bp, Gossypium hirsutum
  Clone ID: LIB3135-026-Q1-K1-D2
gttgtgattgataggatcactgggcgcacaaaaggttatgggtttgtcaggtttggcgatgaggctgaatataatcgtgccatgactgagatgaatggtgctttttgttcaactaggcctatgcgcatagggccggctactaacaagaagactggtgctgcacagcaatatccagcagcttcatctcaagggactcagaacgagaatgatccaaataatacaactatatttgttggtaatttggattctaacgtgactgaagaccatttgagagaggtcttcagcccatatggtcagttggtgcatgtgaagattccacaaaacaagcgttgtggatttgttcaatttgctgataggagttgtgccgaagaatctctccgaatattgaacgggactcagttgggtggacaaagtattcg

SEQ ID NO: 11011 - DNA, 293 bp, Gossypium hirsutum
  unsure (1)..(293): unsure at all n locations; Clone ID: LIB3135-026-Q1-K1-D3
ccctactgatcttggcaacttgaagagccttatcagtttggacttatataacaacaacatctgcngcaccattcctccttcactcgggaaacttaagtctcttgtattcttgcggcttaatgacaacaggttaactggacctatccctagggagcttgttggtatttcaagcctcaaagttgtcgacgtctcaaacaatgatttgtgtggaacaattcctaccagtggtccatttgagcacattcctttgaacaagttcgaggaaaacccttgtctcgaaggcccggatttgt

SEQ ID NO: 11012 - DNA, 412 bp, Gossypium hirsutum
  Clone ID: LIB3135-026-Q1-K1-D4
cccacgcgtccgctcggctctcgcatcgatgaagaacgtagcgaaatgcgatacttggtgtgaggggcagaatcccgtgaaccatcgagtctttgaacgcaagttgcgccccaagtcctgtataccataggcgacaaagtcctgattatggtagagctcgtagtcctgtttatgaacgttataatggtcctgcttatgacagacgcaaaagtcctgattacgggaggcataggagtcctgaatatggcagataccgcagccgatcacctgttcgaaggtcccgaacatagaagggcatcagattaacggtgaaaagtatttcgtagctctatgcctagctttctatgtattttggtatgtactttaagaacctaatgttcatgttaatatatgtacttggctttggattaac

SEQ ID NO: 11013 - DNA, 339 bp, Gossypium hirsutum
  Clone ID: LIB3135-026-Q1-K1-D5
cccactcgtccgtccacgcgtccgattccagttgttaagacctctattgctggcaccagaatgatgggacgtctatgtgctggaaataagaatgggttacttgtaccccacaacacgaccgatcaagaacttcaacacttgcggaatagtctaccggatcaagtcgttgttcggcgcatagaggagaaactatctgctcttggcaactgtatagcttgcaatgaccatgttgctctgacacacactgatctatacaaggaaaccgaggagataatcgctgatgttctcggcgtaaaagttttcaggcagacaattgctggtaatattcttgtagggagc

SEQ ID NO: 11014 - DNA, 361 bp, Gossypium hirsutum
  Clone ID: LIB3135-026-Q1-K1-D6
taaaaaaaaaaaaaaaaaaaaaaaaaaaaaaatataaaaaaaaaaaaaaaaaaaaaaaaaaaaagaagaatttattattaaaaaaaaaaaaaaaaattatataacaattaatattaatataattaaattcgatcactttttctttattttttaattcttacacccttcttatttctcttcctttttctttttatattttctttttttttatcaaattctttttctctttttatttaactttttacttttttaaatccttttttattcccattttattttctttttatttcactttttttttttaattcttattttttatgctatcatttttttttttctttttttttttcactcaattttt

SEQ ID NO: 11015 - DNA, 349 bp, Gossypium hirsutum
  Clone ID: LIB3135-026-Q1-K1-D7
tgtcgttatttcaacaccgcaccgtgagacatcccggtatggtatgggaagtgaaacacgtatgctctctgcacgaactccattacatccttacatgactcctattagagatcctggagcaacacctatccatgatggcatgaggacacctatgcgtgacagggcctggaatccttatgcaccaatgagtccacctagggataattgggaagaatgaaaccctgcctcttgggggaccagtccacagtatcagccatgaagtcctccttcaagggcatatgaatcacctacacctggttcgggttgtgccaacactccttgcggtagttacagtgaggcttgaacacct

SEQ ID NO: 11016 - DNA, 429 bp, Gossypium hirsutum
  Clone ID: LIB3135-026-Q1-K1-D8
cccacgcgtccgcattaaaccaacaacaacaacaaaaaaccaaacacccagagttaacggggggagaaaatggtcaccaaagtctacattgtatactattccatgtacggacatgttgagaaactggcccaagagatgaagaaaggagctgaatctgttgagggagtagaagtcaaactttggcaggtagcagaaacactaccagaagaagttcttgggaaaatgggagcaccaccaaagacagatgcccctatcataacaccagatgagctgacggaggcagatggtgtgctatttgggtttccaactagatttgggatgatggctgcacagtttaaagcattcatggatgcaactggtggtctatggagaacacaagcccttgctggtaaacctgctggcattttctacagcactggctcccaaggt

SEQ ID NO: 11017 - DNA, 241 bp, Gossypium hirsutum
  unsure (1)..(241): unsure at all n locations; Clone ID: LIB3135-026-Q1-K1-D9
ctttgatcagttccataagaaagaaagaaagaaatcaaatatgggttccatttccaanaagttccttctccttgcccttttagctgctactgttcttctcatttcatcggaagtggcagctcgagaccttgcttaaaccaccactgaaaagaacaattgtgaggtggctactgaaacaaccgatgctgatgctcangtataagaggccaaatatggatattgttgataccggagcctttta

SEQ ID NO: 11018 - DNA, 413 bp, Gossypium hirsutum
  Clone ID: LIB3135-026-Q1-K1-E1
tcgcccacgcgttcgcccacgcgttcgcccacgcgtccgcgtgattttgatcgagaacgcgctgggggagaggctaaagtatggggtgagaattggagggagaaaaaacgagcaaacgccattggtagctttgacagtacaaatggctgatactaccaaatcctttaattcatgccgtttctctctttcgagctaagacatgtcttaacattctaaggataatcactcgcaaaaggtagctttgaagaacaccgtccgtcaccgtttcaaaccccggcaatcagagttcatccatgtatcagtaatccgtccaacttctataatcatccatgtagttcccggttgcttcaaaccttgtggttgaaggaagaaaacacagttaaaagaaggaatgaaagagtgacagattttgc

SEQ ID NO: 11019 - DNA, 172 bp, Gossypium hirsutum
  Clone ID: LIB3135-026-Q1-K1-E10
gcggaagttgtattacttgattcatcaaatttttaatatcctacttccattaatgtgacatgtcttacatgtcactatccacttattctacctttccatcaatatttcaaattccctccaaagccatcttatattcaaaggattacttatgatatacaaatccctccatatt

SEQ ID NO: 11020 - DNA, 218 bp, Gossypium hirsutum
  unsure (1)..(218): unsure at all n locations; Clone ID: LIB3135-026-Q1-K1-E11
aatttttgggggaatttgtaaaccccataatttcctgtaaaattccttagattcgntcggtaatacataatcagtaggatttaaagtatcctcttgtaatagtttataggcgctacgtacagaaaattcgccggataattctccattccaaaaaaaaaaaatataaaaaaataaaaaaaaatataaataataataataaatttaatattggtctggcc

SEQ ID NO: 11021 - DNA, 349 bp, Gossypium hirsutum
  Clone ID: LIB3135-026-Q1-K1-E12
atctgacattgacattgctgctgttatgggcatgggattcccaccttacaggggaggactgatgttttgggctgattctcttggttctaagtacatttattcgagacttgaggagtggtcgaatttatacggaggatttttcaagccttgcgctttcttggctgaaagagctgccaagggtgctccattgagtgcaccactggagatgggaaaatcaagactataaaactgctttgattgcggtgctcggagatggccattgatgttttggtttaccaatttgctgccattgatagaatgataaagctctcaagatgagcctttcaataatgtggtttcaaatccaaaa

SEQ ID NO: 11022 - DNA, 421 bp, Gossypium hirsutum
  Clone ID: LIB3135-026-Q1-K1-E2
cccacgcgtccgcccacgcgtccgaaggtccatatcaacggtgaatgttcaacttcttccgggggggacattgcgcttgacagtgtctcggaaacggtggaccagatgttggcgaactctttctgttggaaccgtacagactacgttagaattcaggcaaacggagtggagactgaaaatacggtggggccgaaaacggaggcgatactgaaggaaagaggggttgaatcgttaccgcttggcgggaaacggttactaacggagactaacggagagagaatcgagttctttgtgcaacgccttgttgctaccggcaaatccagccttcctccaagtccttgcaaggaatcagccgttagcccacttgccaacggccgctagttactcttttcttcaaaattacctttttgtgctttatttc

SEQ ID NO: 11023 - DNA, 416 bp, Gossypium hirsutum
  Clone ID: LIB3135-026-Q1-K1-E4
tcaacacaaaaaaggcctttgtttaaaggagctaaaagaagccgaaaccctggctcaaaagatcggaaaatccaatatgcgccctgtcgccccatctaaatctatggtttacgccgatgtcaacgttattctccctaaaaattattggaactacaacctcctaactgttcaatgggccgaacaagatgattactaggttgtgaggaaagtcgggcgagggaaatacagttaggttttcgagggggttcatattactgataacgagaaatgtgttatcaagattctcaaaccggtcaataagaataagattaagagggtaattaaaatactgcataatcttttctgatggcccaatattgtgaagttgctgtatatagtttgtgatcatcattctaagactccaattcttatatttt

SEQ ID NO: 11024 - DNA, 392 bp, Gossypium hirsutum
  Clone ID: LIB3135-026-Q1-K1-E5
tcaacacataaaattcctttttttaattcatctattataatcctaaaccctacctcaaaacagccgattattcaatatgcgccctccctccccatctaaatctaaattttactcctatttcaactttattcttcctaaataatattttaatctctatctcctctttttaaattttatctaacatttttattactatttttattccatttactttttcttatcaaattccattttttttttcttatttctattctatatttctcatattccttttattgcctttattcatttatctttttctttctttatttattattttatttttcattatattctatttatatataattatttcttaaaaatttttctataaaatatccttaaatatattt

SEQ ID NO: 11025 - DNA, 148 bp, Gossypium hirsutum
  Clone ID: LIB3135-026-Q1-K1-E6
caaccacaagctgtaggcggtgctctttcttttttttttttgagaagatcagttccaagcggccggctgctgataaaaagaagattgaggatgcaattgagcaagcacttcactggtgcgatggaaaccagctggctgaggcggatga

SEQ ID NO: 11026 - DNA, 417 bp, Gossypium hirsutum
  Clone ID: LIB3135-026-Q1-K1-E7
cccacgcgtccgctaaaaattctccttttcttctactagaactgcttttggatgaaaggggggcaaattaacctgtcttctcccccaaacgtttttcccctctgttggttccctaaatgttctttcccctctgctggtgaaattggagctttatacccgatttcttttccccattttcggctttcaaagctctattttctgttctttgttcctcttccgcagcagattttatggaatacgaagatattaactgggcatatgagaatattattgattcagaaaatgtgcattgtccagaaagtgatgatgatgacgaccaccacgatggtgattattacgattaatcaaacaatttcagtggttttaaaatggaattaacaagagatgttatagcttctactttaatgaattcacttt

SEQ ID NO: 11027 - DNA, 404 bp, Gossypium hirsutum
  Clone ID: LIB3135-026-Q1-K1-F1
ggaaagggtaattcgtttcccttgttactgttcagtggaatgaaaaggaattgtgggtgctgctcaaagttgcttcatcatcacagcaacactaccaccatggttcattaatggtggtgtttttttatgggttttcagtcttcttcttcttctttttcccatatatatacatcagctgtgatcagttttctttgatcattttttgactgatcatagcaaatccagttccaacaaaaatatatatattttggatcttgattgatcttggcttttattaattaattggtttattttctccttaccaaacatgatattttatttaaatgcaatgttattgtgattttaagaagttatttttttggttctttttttttctcttttttttttattctgaatattctttt

SEQ ID NO: 11028 - DNA, 431 bp, Gossypium hirsutum
  Clone ID: LIB3135-026-Q1-K1-F11
accagctaggaatcttgcaggaaatgtaccttcctacacaactcgccaagtggagagaacctatgcatccgcagttgcgtcttcagccatagagccatcggaggatgctgttgctacgctggtgtctatgggctttgatcagaactcagctaggcaggcacttgtgcatgctagaaatgacatcaatgctgccacaaacattcttcttgaagcacagtcccactaattgaaacatagaattgctggcgaaaagtggatgccgggatgttatttcatcggtataaatgcataatcacacatatagtggatggcaaccgatttgcttgcctcctggggttatgtggcattccaagatttcactatggagtagtattttcttcccattttgcctcacgtatttctggtagtagcagtaatcatacaccaatgca

SEQ ID NO: 11029 - DNA, 402 bp, Gossypium hirsutum
  Clone ID: LIB3135-026-Q1-K1-F12
ctaagccagctcctgttatagaaaccttttgttctgatgaactggtttcaccttatgtggggctggatggagttgtaactttagttgactcgaagcatgctatgaagcatttgaatgaagttaaaccaagatttgttgtgaatgaggcagttgaacaggttgcttatgctgaccgtataatcatgaacaagatagatttggtcactgagggtgacttggagaaactgactgataaaatcaagcatattaatagcatggctcaaatcaagagagcgaaatttggagtcgttgacatggactttgttttgggagttggaggatatgatcttgacagaattgattctgcagttaaagtagatgattctcactgtggaaaccatcaccatgactcacatggacacc

SEQ ID NO: 11030 - DNA, 285 bp, Gossypium hirsutum
  Clone ID: LIB3135-026-Q1-K1-F2
tcccactcgtccgttggacaggtttgattccattcttcccccatgccatgtagctatcggtgggtgttgtagcatcaaagccaactgctataactaatgcttagggattcttcaccgcgaaaaacaaaatgctggtgaatgttactgctgaccaccaaattatctatcgtgctgatttgacttccttacttcaaaccttctcaaagattgttgacaacgctgaaagccatactttgtatatgattctcaggtttatgcaatgaattcacacctagtcttctaatt

SEQ ID NO: 11031 - DNA, 357 bp, Gossypium hirsutum
  Clone ID: LIB3135-026-Q1-K1-F3
cccacgcgttcgaaaatgtttatgtatagcagtgtagcatccattttgactatatgtatgtggcatgctccggaatgttttaattccttccaaatgaagctgaattttactgtattgcatcttaaggatctaaagaccctgcttctttccaacattcatagggagttatgccgacacatcacacgtctactctcaacatgcttacataatacctcgtggacccggactgtctataccttcttaaaagtcgtagtgagctgaacacgctttaattacttgtacgccgcgacagtagattttgtacgatatcctccagtccctcatctgctgttttctgctaggaagcaacttattgac

SEQ ID NO: 11032 - DNA, 287 bp, Gossypium hirsutum
  Clone ID: LIB3135-026-Q1-K1-F4
cggatcccgttctacccacgcgtccgaaataattatataaatctccaattgcaaagtatatcaaaaaaatatattattaaaaaataaagagacaatttatacatattacacaccatatataatcattactataattccatctattctaaaattatacatcttcaatcattcctatttatactcattcttctcttgtcatttattttttcttacctcctattcttaattcttaatctcacaattttctctttcatctttattgttctattatcttttcttttattcta

SEQ ID NO: 11033 - DNA, 298 bp, Gossypium hirsutum
  Clone ID: LIB3135-026-Q1-K1-F5
ggactggtctgcggcttgtcctgcatggctgaaaagtggtcgtgctgactggggggtccttaaattaactgcacaactgccatgtgatcacatgctaacagcttctaggtgaatggagacgtatagatagcctgtggacttgatgcacagtatttctcaactgctcatcttgggagggatgcacatctgaatgagccatatgctcatgagcatgcatgtgacgtcgattctaacatagcgcaatacgttgtcgctggttatccggtttggagaaagcttacttgctggattgacacag

SEQ ID NO: 11034 - DNA, 415 bp, Gossypium hirsutum
  Clone ID: LIB3135-026-Q1-K1-F6
cccactcgtccttccactcgtccgaacgcctatattcatccatatgatctcggtgcctacgatggtctaacaacggtattgggttcaaatatcatttgctggatatgccctacatcaaagcacataggtaatggtcttcgtttccgaacggactatgatggcttaccagtcacatcaacatcaaaatgaattttgcgtgttacttgtggtaacatgagggcttcaaatatccccagttttcaagttgtagcctataataccgtcacctcctggtagtccaggacaaagaagccccgttggcgccagcaagtgataatggaggaggatctgaaaaaggacctatagcaaggctgtttcaaaaagtaatttagaaataggattaatggggttttttactaatatgtcataacaatgt

SEQ ID NO: 11035 - DNA, 426 bp, Gossypium hirsutum
  Clone ID: LIB3135-026-Q1-K1-F7
aagaaatactgttcttgttgatgcaatatcacgaaggatacctcttgtcagtgaccgtccaactataatttttggcgctgatgttacccatcctcaccctggggaggattcaagcccttctattgcagctgttgttgcctctcaagattggccagaggttacaaagtatgctggcctggtttgtgctcaagctcatcgtcaggagctcatccaagatttattcaagacatggcaggatcccgtaagggggactgtttctggtggcatgattaaggagctcctaatatctttccgacgagccactggacagaagccacagcgcattatattctacagggatggtgtcagcgaatgccagttctatcaagttctgttatatgaacttgatgctattcgtaaggcatgtgcctcgttggagccaaatta

SEQ ID NO: 11036 - DNA, 398 bp, Gossypium hirsutum
  Clone ID: LIB3135-026-Q1-K1-F9
gcgcccacgcgtccgctgaatacgcaaagctattcttgcgttttactttcttctccaacattcaccctgtctttatgcatattactaccatttgtaagcattgcttaattgcatttatgctaaaattatactttttcgatcatttctatttatactttttcttcttttgtcaaacatttttttctttttttttttttgaagtgtgggttttacaatggactcttgtagctttaatgtaatattatccatacatttatgctaaatctatactttttcgatcatacgtgtgcaggatgattttgctagtaaactctctggtcacaagtcagaggtttgtgggctgaagtggtcttatgacaaccgtgaactagcatcaggcggaaatgacaacaaacttt

SEQ ID NO: 11037 - DNA, 400 bp, Gossypium hirsutum
  Clone ID: LIB3135-026-Q1-K1-G1
gaaacaaaagtaactaatactgcaattgtaccactatcccaatatctattggatcctcaaacgccaagctcagcaggcaaggcttttggcaacattggctcttggtgacctttttcagaatgaggcacttgctcgaagtgctgatgctgtttcagcttgtcgtgctcttgttaatgtgcttgaagaccaaccaacagaagaaatgaaagtggtagccatatgtgctctgcagaatcttgtaatgtatatccgatcaaataagagagcagttgctgaggctggtggtgttcaagttgtattggatctaataggttcaagtgatccagatacatccattcaagctgctatgtttgttaaacttctattttctaacaataccattcaagagtatgcttctagt

SEQ ID NO: 11038 - DNA, 418 bp, Gossypium hirsutum
  Clone ID: LIB3135-026-Q1-K1-G11
gccaaacaagccggagcagagggcggattcaccgcaacgggaactggtgcttacaaagcagctgggactcactcttattccaccactggggaacgtggacaatccactggagctcatcagatgtcggcgttgcctggacatgggagtgggcagcctgcagggcaagtggttgagggtactgctgctgcccatcctattgggtcaaatcctggtgtgggaggggccaaatcacataatactcgaggggagggaaatccccatggatatggtactggagggacttacagttaatcccttttttcttgttttgtttgaggaaataagtaatgcaaaagatgatgcagttatgttatgatagaaatcaaatattgagcttagtactgtgaaacgaggtttttgcatggaagctgagcttaat

SEQ ID NO: 11039 - DNA, 415 bp, Gossypium hirsutum
  Clone ID: LIB3135-026-Q1-K1-G12
cggacgcgtgggtggtggcctctctgagaaacatcatggattgtccaacttctgggggggggatcgaattaatgagatagattcggaggcattgcagatagtaaacatatgctacgagcgagccaaagagatcttacagcagaaccgaaagctgatggatgcagtggttgatgaactggttgagaaaaagagtttaacaaaacaagaattctttggacttgtggaattgcatgggtcacttcagccaatgccacccagtatagttgacattagggttgccaagcgaactcagttccaagaaatgatgatgaaccccaatgtgaaggttacagggagtagttcttcataaaccaccacctatctactttctattcacatgtataaactttgcatcaatcactttcaggtcatacca

SEQ ID NO: 11040 - DNA, 411 bp, Gossypium hirsutum
  Clone ID: LIB3135-026-Q1-K1-G2
gccaggaacaaccacaaaggcctggggctagtcaggaacccatcaagtatggtgatgtcgtgaacgtcaccggtgaactggcttcaaaacctattggaccaaaagatgccgccgccatgcagtcagctgagaacaagatccttggagaaacaccaaaaggtggtgcagcagctgccatgcaatctgcagccatcgccaatgaaagagcaggcgtcgttagtcacaaccaatctgacgttgctggagaccaaggcgtcgccgtcattaagtctgacgcagatggcgatgttatgatcacagaagccgttgctggacagattgtggggcaatacaggcaaccagatgtttcagcggtgactactccagcaatgttggttgatccaggatcaattacgattggagaggctttag

SEQ ID NO: 11041 - DNA, 416 bp, Gossypium hirsutum
  Clone ID: LIB3135-026-Q1-K1-G4
gcccctgcctctccattctcttttgctctcaaaatccggccatagtgactgtcgggctcatggggcaccaacgacggcgtaaccgtccgtggtgatcttaaaacgcccattttcgagccctcttggagatgaaatcttcggcctttacgaggagagtgaggaaggggggttttctttgaaaaccgtcgtatcatcaagccccgaatcggaccccacagtgttttgggtctcggcgccggaaaggtagaccgacggaggaagacgaaacgcttccggagtagttggcggtggagcaggtggccaccagtggcggtgacagagtcttggggctaggttcgacgccgaataggcaataggggctaggtttttttgttttttgaaaatgtcgggaatgggcttgtaattgggtagtgggc

SEQ ID NO: 11042 - DNA, 420 bp, Gossypium hirsutum
  Clone ID: LIB3135-026-Q1-K1-G5
ccagtagactctgtccgtagtcatgataatctgactgcttgttcatcatatccatttgcaactagtcatatacctgagatgaagctgcaaaatttgtcagaccaagatgaacttaaaatcccttcagaccttatttcgcaatgtgtagccaccttgctcatgatacagaaatgtacagaaagacagttcccaccaggagatgttgcagaggtgctagattcagcagttacaagtttgaagccatgttgttcacaaaatctaccgatttacacagagatacagaaatgtatgggaattattaggaatcagatattggcattagttcccacatcatgaaatcaggtatgttgtaattcctccattgttgttgtaaaaacaatccaacactcttcttatccaattttatttactccttttttt

SEQ ID NO: 11043 - DNA, 435 bp, Gossypium hirsutum
  Clone ID: LIB3135-026-Q1-K1-G6
atctcaaccaaaaccttctcagcaaattgtttaatccctggcaattcctcccttgttccgccattaaagatctatactttaaatcccctaagcttttgtttcaccttttttaactctttttttctctctcgaaatcccatcaaaactcaagaagaaggaaaaacagataaacttcaatggctatcagaaaacctggtttgattgctttatttgatgttgatggcactcttacagctccaagaaaggtggctacacccaagatgttggagttcatgaaggaactgaaaaaggttgttactgttggagtggtgggcggatctgatctcagtaagatatctgagcaacttgggaaatcagttgtcaatgactatgattatgtattttctgaaaatgggcttgttgctcataaagatggaaaactcattggcacccaga

SEQ ID NO: 11044 - DNA, 457 bp, Gossypium hirsutum
  Clone ID: LIB3135-026-Q1-K1-G7
acccgtacttaattgctcgaccgacgcatgcgtccaccatcacccctcaagcatccttacaagttcaagtccccacccccaccgtcaccacccgaggacccctacaagtacaagtcacccccaccacccccaccatcaccccccaagcacccttacaagtacaagtctccaccacctccttctccagtttacaaatacaagtctcctccaccaccaccaccccattatgtctacgcttcaccccctcctcctcaccactactaagccacggctttgaccgtgctccaatccaagtcgtttgcaggaaaagataatgctgtgatgcaaataaagctacaaaaagatagtttgaaaaggatatatctagagagataaagcaaaagattgggagcctagactagtctccgcgtgtgaactgaagaacaataatgatgtagacaaattgcatttcaatgct

SEQ ID NO: 11045 - DNA, 430 bp, Gossypium hirsutum
  Clone ID: LIB3135-026-Q1-K1-G8
ggagtttgggtctaagcctactcaacgaaacttgttgatttcgggtcagtttctccataaggagcttcctattagaattgcccgaagagcaattgagcttgagagcctcccttatggtctttccgagaagcctgctgttttgaaggtgagggactggtatttggattcctttcgtgacttaagatcttttcccgagatcaaggataccaatgatgagagggaatttacacaaatgattaaggctatcaaggtgagacacaacaatgtggtccctatgatggctttgggggttcaacagttgaagaaaggcatggatccaaagatcatttatgaggatcttgatgagattcatcagtttctagatagattttacatgtcaagaattggaatccgtatgcttattgggcagcatgtggagctgcataaccct

SEQ ID NO: 11046 - DNA, 425 bp, Gossypium hirsutum
  Clone ID: LIB3135-026-Q1-K1-G9
gaaaggagccgctgagatgtacgagagtgggacgttcgtcacagtcgatcttcagttcttggtggatgctcacatctgcgtctttgaagatgtttcatcctacggtcgatatctatgcttcaatcacgccattactaaccatgaagatgctattcacctcgcccgtttgcttacaccttctgctccttcccctcctcccagttatgaagaagctaacatgatcatccaacaaagattaagcaacaagaaattgaacaaagtgatggtggattttgagagtgagctgcttttggaggattgatccattcaggctgagggggaaggtccttatgaaacaacagcagaaagaaaatcaattagtttttctttccttccttcctcatccagaagcaaaaattattacagtttgtcttataattaatggg

SEQ ID NO: 11047 - DNA, 118 bp, Gossypium hirsutum
  Clone ID: LIB3135-026-Q1-K1-H1
cccacgcgtccgtttccttgctttccttttttgattataagggataactcttaaacctgaggctttcaaggtaaatggattcatgaaaaaaaaatcccacctcccatacgaaagacca

SEQ ID NO: 11048 - DNA, 335 bp, Gossypium hirsutum
  Clone ID: LIB3135-026-Q1-K1-H11
cccactcgtccgctcgtcaccgggtgaggtttccttgtattcaaatcatcaagacaggtgccatcccagcaaaactttgcaagagggacagcaccaagcagttccacaactccaaaatcaaattcccactggtatccaagaaggtcaggccaccaactaggaagctcaagacgacatacaaggcaaccaaacccaacttgtttatgtagttgtctttcatggctggtggtgataggtctaatgccttatagtttgattacttcccttgttagattgagaggggttatcaaattttgaacactctatattaacttttatagttcttttatgtttcg

SEQ ID NO: 11049 - DNA, 72 bp, Gossypium hirsutum
  Clone ID: LIB3135-026-Q1-K1-H12
accggtattgaatggccggaccgacgcatgcgagaaaatagaagaggaaagatcactctcacattcttaggg

SEQ ID NO: 11050 - DNA, 431 bp, Gossypium hirsutum
  Clone ID: LIB3135-026-Q1-K1-H2
tcgcccactctttcttccacgcgtcctgtttgtttaatttctttgggatattatactttcaatgttagattccaatttataaatgttgcacccaatatccaaatcaattcctttgtgatccaaactttccttttgtcccctttctcatatttaaaattattaaattaacttatttctttatattttcctacttttccacttatttttattatttttgtctattttttatttataatattttaattcctctctttttggctttttttttttaattaattttagtttcccttttttatttttaattatttttttttaattgtgcttgtcaaaaaaattaaattctgttctctaatcaaaattaatatttttttttttataaaccttttttttttcccctcatcttttattatatttccttttcttcccccttt

SEQ ID NO: 11051 - DNA, 264 bp, Gossypium hirsutum
  Clone ID: LIB3135-026-Q1-K1-H3
tcttcaatcaaaaaatttaaagttctataattctttattttgataaaaattaaagccgaagcatctttctcattctgttctccccccaatccttccaatctgtttcactcaatgctgctttatccgatttcatttcattgcttattttttttttctccccttaaatctcttacatagctttcaacaattttaccttctattgcttctttacactctcatttttattttcttcatcatattactcactccttgtcgttttttaat

SEQ ID NO: 11052 - DNA, 403 bp, Gossypium hirsutum
  Clone ID: LIB3135-026-Q1-K1-H4
cttactaacaacaaaaaccctgaaatgtcggacgacgatcatcatttcgaatccaaggctgatgccggcgcctccaaaaaaaaaaaaaaaaaaaaaaaaaaaaaaaaaaaaaaaaaaaaaaaaaaaaaaaaaaaaaaaaaaaaaaaaaaaaaaaaaaaaaaaaaaaaaaaaaaaaaaaaaaaaaaaaaaaaaaaaaaaaaaaaaaaaaaaaaaaccaaaaaacaaaaaaaaaaaaaaggggggggcccttttaaaaaaaaaaaattatcttcccggtgatagaaaataaaaattttttttaaagggcaacaaaaaaaaaataaagggccccggttttaaaaacgttaaacgggaaaaacccttggtttaccaaaattaaaagctttggaaaaaaatccccttt

SEQ ID NO: 11053 - DNA, 362 bp, Gossypium hirsutum
  Clone ID: LIB3135-026-Q1-K1-H5
cttcagtatgtgattcggagctcgggtctccaccacatagctgaagtttataaatccagaggtggaagaggataggatcatatagttgcaataagtgtagactggattaatagcagcagaaccgtgtgttgtgaatatacgaaagaaagggtatggatagattagtgtacggattgtgaattggtaggagtcggacaggtgactgacttttgtgggtgttcgcatggaaatgatgttatttgccattgcggagagggagaaaagaagaaaccagtttgaaaattgtgtttaacttgtttttgtgtggtgttacatgtactgataatattgatagtagtagtattactggatttttttgcttg

SEQ ID NO: 11054 - DNA, 424 bp, Gossypium hirsutum
  Clone ID: LIB3135-026-Q1-K1-H6
ccggaactgaatggccggatcgacgcgtgcgagaaaatggaagaggaaagatcactctcacttcttcagtggcatgggttaagcgagtagctgggcgacgtcggcttcctaaacaagacatagctgctagtagtgctaccttattaacatatggctcttatggccttggggttcatggttcaaagttagacatcgatcctttttgtatcggtccttactttgccactatggtagatgatttctttattgttctatataacatgcttaagagcagacctgaggtatctgagattcattatgtgaaggacgcaaaagtcctactaatgcgttttgagttcgatggaatctcgataaatcttccctttgtgcagcttaaagttttagttgttctaaagggtgctcgcaaacacaaggatttgtcgca

SEQ ID NO: 11055 - DNA, 352 bp, Gossypium hirsutum
  Clone ID: LIB3135-026-Q1-K1-H7
accacacgttctgtcacgcgtgcgcatggaatgggtgcagattctattgcatatagaatacgaggggaaagaggcatatgccccatccactagtgggtatccaggatcagctcatggtgctttttctggatccaaaaagccttcttcttatatggaatctcatgccggattcgcacaacctgtgaagcacaatgaccaatatctcacagaatgtatcgcacctgcttttcatcatcaaaggcaagcttatgcagggtatcttaagctagatcactatgaaagacaacctcctgctaagtacttcaaacctgctattgggaatgatgccctacctcatgcaggatttcttgag

SEQ ID NO: 11056 - DNA, 360 bp, Gossypium hirsutum
  Clone ID: LIB3135-026-Q1-K1-H9
cgtttttgcaggtacggggtgtgcgtggcgcgagtacgggggctgtgtgctggcgtaaggaggcgcgcgtggcggtcgtacggagcgagggctggggcttggctgcggcgcgaggaagagaaccctagggtttctattgctaaggaattttgggccttgaacctttgggtctagatttgggcttgtagtaggtttgggctagggtattaatttgggtattgggttagtgatttgaatttaatgtttaggtttggtttggtttaagcctaaatatttgtaaacgaacattggacttttgatttttaatttatgtttctgggttcatttcgagccaggcaaaaatgggacattacacattat

SEQ ID NO: 11057 - DNA, 340 bp, Gossypium hirsutum
  Clone ID: LIB3135-027-Q1-K1-A10
cccacgcgtccgggagtttccttcatggtttttaactgctctaccccttctcaactcagagccgtgtaatttgccccacgctccgatacatcctaacctcacatctttcatccctgttcattagaacactcccatacaaccaataactaataagcttcttcctctcatacccaatacaagctgccatcaacaaataatctctatttataccaacatccgacatttgattgaccatcgatgccgcttttgtgctacatccgtcgcgtcagtccgcctttggtgtactgtacatcttaaatctggaatgagcaactatatctatagtttgattgagtcagaa

SEQ ID NO: 11058 - DNA, 387 bp, Gossypium hirsutum
  Clone ID: LIB3135-027-Q1-K1-A12
gcgccacgcgtgcgcaaagaatgaagaactacactatttatgcagcttcaatcaccatccgtatggagggtggattcatgtttattgccttgatatggaagttccactttgcacccttcatggttttaattatcgccattctgaacgatggtacaatcatgacaatttcaaaggacagagtgaaaccatctccacagccagacagctggaaactcaaggagattttctttaccggcattgtgcttggaggttacttaccactaatgactgtgatattcttctgggcaatgaaagacaccaatttcttctaaaacacattcaatgttatatcactgaggcataataatattgatggtgagaaaaaaatgatggcagctttataccttc

SEQ ID NO: 11059 - DNA, 346 bp, Gossypium hirsutum
  unsure (1)..(346): unsure at all n locations; Clone ID: LIB3135-027-Q1-K1-A9
acgcgtccgcggacgcgtgggggagggccttggaggaggttatatgctctgccttcatcttgattaggtgggtgatatgatgaggtctcgctgcancacattctatacatgacagcggattggacatgtgaagaaagagaaatgtttagaaacaaggttccaaagactggtcttaatacgccatttcgagatgggttattgtggcacattgcgtaagatgttctaaagttggccaatgatggtttggataggaagggctttaagtaatcccggttcttgtatgaagtggcagatgtgtgttttacagggtgtaacaccaagctgataagcttttttgaattgtatt

SEQ ID NO: 11060 - DNA, 371 bp, Gossypium hirsutum
  unsure (1)..(371): unsure at all n locations; Clone ID: LIB3135-027-Q1-K1-B10
cacgcggncgcaaaccgntagctaggcctaggcagcttcctcaatctgatcccaccattcattcaaaacaccgaaagggttactatcaaagtaatcaattttctttttctagttgatccacatcccagtcaaaactctcacgaagaagaaacatgagtggtgacgagaaaaacccggctgtagttgtagatcaccagcatcatcaatatgggactttccaaggagtatccaactaccctcctccacctcctcctcagcaccatggcccggctattgggtttcctcagcctgttccgccgcctggcctccatgagccctctgctcctccttctcagtattacccccaaggttatcaaaccgttccaggttat

SEQ ID NO: 11061 - DNA, 437 bp, Gossypium hirsutum
  Clone ID: LIB3135-027-Q1-K1-B11
caggaatactggtggtgtactgagagagcccttgattggggtcctactggtggacctgatctgatcgtcgatgatggtggtgatgctactttgttgatccacgaaggtgttaaagctgaggaagtttatgagaaaactgggcaactcccagatccggcttcgactgataacgctgagtttcagattgttctaaccattatcagagatgggttgaaagcagatcccaagaagtatagaaggatgaaggagagattggtaggtgtttctgaagaaactacaactggagtaaagaggctttatcagatgcaggccaatggtaccttgttgttccctgccattaatgtcaacgactctgttactaagagcaagttcgataacttgtatggatgccgtcactcactttccgatggtttgatgagagctactgatgtgatgat

SEQ ID NO: 11062 - DNA, 408 bp, Gossypium hirsutum
  Clone ID: LIB3135-027-Q1-K1-B12
tttgatttttcattgctttacactatttgatcaatcagaagctcaaccctaaaagtttcattagaaggaacagtgttaacctttctcatcaatatcctcgaacatcaagctttacttgtcttaactcttgcttgacagaacactggggtgatttgcccttaaaagtcgatgactctgaggatatgatcatctacaattcccttcatgaagctcttaacttcggttggtcaccgacgacgacgggttcaacggcggcaactacaattaaacctgagccgaaagatgaatcagcagagatcatggaaaacgcgaagccaatggagttgactcaaaaagtggtgaaagggagacattaccgtggagttaggcaaaggccgtgggggaaatttgcggcggagattatggact

SEQ ID NO: 11063 - DNA, 333 bp, Gossypium hirsutum
  Clone ID: LIB3135-027-Q1-K1-C11
cccaaatactaaccccaatattaacgcgaattctcactcccagtacagggtaattttggtggggacagctccgtatcggcttatgggactaggattttaagagggtttgaggatctgcccgagaaaacggcagcatcagggaagagggaaagggaaagagttttctgtttcatagatggtgacagctatttaggtgttttgagatgggttcgcaaggatggatcatattaagacgcatatggccagggagatttagtcgatcaggatgtagatggagatctattggcccctgatgtttttttttgttcagtttttcatattttaaatcattat

SEQ ID NO: 11064 - DNA, 458 bp, Gossypium hirsutum
  Clone ID: LIB3135-027-Q1-K1-C12
agcaatcccaccagctaaaatgtttaaggcttgtatccttgatggtgacactctcattccccagatgcttcctcaggcttttaagagtgttgagtacattgaaggcaatggtgaggccggtagcatcaagaaggtcacttttggagaaggaagccaattcaaatacgtgaagcagaaggttgaagcagtagacaaagacaaatttgtgtatatttacagtgtgatcgaaggtgatgcattgatggataagcttgagaagatctcttacgagacgaagttagagacctctccggatgggggatcagtatgcaagactactagtaagtattacaccattgttgagtttgagctcaaggaagagggaatcaaggcaggcaaagaaaaagcattgggaatgttcaaagccattgaagcgtacctgctggcaaattcttacacctattgtaatgatccccata

SEQ ID NO: 11065 - DNA, 388 bp, Gossypium hirsutum
  unsure (1)..(388): unsure at all n locations; Clone ID: LIB3135-027-Q1-K1-C9
nccacgcgttcgggagcttatcaagggattaaacgatggtcaaatctccaccagtcaacacctgggggagctttcaatttttatatacacatcaatgcacaaaatgctcatatatatgctttataccatgaaactgcgttgtggccttatttttctgatggaactcacactctttattctaaaatgccttgaagacttaaaaatatatgttcaacttcaaggtcctattgcacattccaaaatgaaaatatgatggttcagtgcatgcatccttccatggatttgtaagattaaacagtatgttacttaacaatatgctaactagaaacactatatatgttacttgaaaccctatgtccaatgtatcaaaaatgctatcttgcataac

SEQ ID NO: 11066 - DNA, 413 bp, Gossypium hirsutum
  Clone ID: LIB3135-027-Q1-K1-D10
gagatagtgcaaaaagctcttgcttcaaggtttgatttcaacagatggctcatccagacgatggtttggttcatagccaaacctgacataggtttaatattgtcttaaacgaaattactaataaatatattgattgaaggtaactggaaaattttctacggaacgagataaaatggcttttttagattaaccatagttataagaaattacctgcactaaattatattcataaacatgctggcgtgttcttaagacagggtcaatacaattgatgagatttgaccgcataaatattccctactccctactgatccttaccaaagagccatcggtaggttttggggagattttgttgacaagaagatatatcggttacagagtgggaaagtattgaccacatatggggaataaca

SEQ ID NO: 11067 - DNA, 56 bp, Gossypium hirsutum
  Clone ID: LIB3135-027-Q1-K1-D11
ctatcaaatttgcttctactgcggagctacttttccactctcggtctcgcaatatc

SEQ ID NO: 11068 - DNA, 325 bp, Gossypium hirsutum
  unsure (1)..(325): unsure at all n locations; Clone ID: LIB3135-027-Q1-K1-D12
cccacgccgtgccgcnnaagtgttgctcggttcttaagaagtaactttcggagggatttggataaccaannnactcaacatnaaacttaactacgtcggttgatnctctttgagggggaaacctgtcgaagaacttttatgtaaacaacagaacgaaatannagctattgagcatacgngtagcttgatgccttgtgaagacacagtcacctcgttctcaagaaaagcagacacagtatttgtaaagcaccattatctgggaaaagctttatcacgttggccattggatgccttaannaagctttgtgccttcttggtgcgttgc

SEQ ID NO: 11069 - DNA, 467 bp, Gossypium hirsutum
  Clone ID: LIB3135-027-Q1-K1-D9
cggttatgatgccctggttattcctggcggccggttctcggagcacttcagcgttgacgagagggtcgtgagcattgttaaagcgtttgctgaatcatgaaagcctattgtcaccacttgccataaccaactcattttggcggcggcagggcttttgaaaggcaagaaatgcactgcctttgcaagcatgaaaccagtgattgagctggcgggtggtatttggtgggagcaacctggaatcacatcaccttttgacattactgcttgtctcaaagatggaaacatcttgagttccataggatggccagcgcatgctgaaattctcaaaactttgtttgaatccatgggagctcgaattcatacaaccaaggctaactcagtgcttttcctttgtggggactatgtagaagattatgaatttaatgtcccatttcgtgcgcttcaaacattatggtgcaaaggtgatt

SEQ ID NO: 11070 - DNA, 405 bp, Gossypium hirsutum
  Clone ID: LIB3135-027-Q1-K1-E10
gcaagcatccgttccgtgtgtgaaccaagatcagggacctcgccaaccgcaagatgtttggctcagggctcacagatagatggcatgcctatacgaaaacctacctagctaaggcgcctgaacctatatccccacaggatggacatgatcgttacatatcttaaacacaaataccataacatgccaatggtgcttacctcaaacggataccgagaggtgatcaaagcacactccaccattgatcaactcttacactatgaagaacgaatagacttcatggatagacacttagatgcactgtccacaactgtccaaagaagagcacatgtaaaggggtactttgcctggtcgatgctagacaactttgaacaggactcttgttatacacttaagctcggggtttag

SEQ ID NO: 11071 - DNA, 295 bp, Gossypium hirsutum
  Clone ID: LIB3135-027-Q1-K1-E11
aaaaaaaaaaaaaaataataaaaaaaaaaaattttttaactaatataaaaaaaaaaaaattaagtaggcattcataaaaaaaaaaaaaatcttttataaaataaacaaaaaataaaattactaaccttaattttacaacttcaaaactaaaaatcccctttctgccctctaattattccatttcttgccccttaattttttcaccttattcttttttttttggtagcccttcataattttcccttgccaacatttttatactttaattttcaaaaaaccctccctttaaaccctt

SEQ ID NO: 11072 - DNA, 288 bp, Gossypium hirsutum
  Clone ID: LIB3135-027-Q1-K1-E12
cgtgaatttgcctaatttcatttcaatgagtcgattgctttctggagctttgcttggatggatgattgtaaatgaaatgtttggtcttgcatttgtgggattggctatctctggtgcaactgattgggtctctaattggatgtgtggctttgtcaagggcacatccccatcttttgcacactgctctttctggctctttgtgtttttagatatttgcccttttagtgctgctttgtaccaaaaagcccccttccctggtttgcagtggaaaaaatggctagatttctt

SEQ ID NO: 11073 - DNA, 429 bp, Gossypium hirsutum
  Clone ID: LIB3135-027-Q1-K1-E9
gaagaattcaagcaaatcctctaaaaatggcgctaagagctcagatggtgaaaaagggaatggtttggcaccatatttgggtaaattcaagtctatgaggacggtttccaaagagggttatgcttcgtttatggactataagatacttgaaaaagctacaaacaagttccatcatggtaacattctgggtgagggtggatttggatgtgtttacaaggctcaattcaatgatagttcttatgctgctgttaagaagttggactgtgcaagccaagatgctgaaaaagaatatgagaatgaggtgggtttgctatgtagatttaagcattccaatataatttcactgttgggttatagcagtgataacgatacaaggtttattgtttatgagttgatggaaaatgggtctttggaaactcaattacatgg

SEQ ID NO: 11074 - DNA, 105 bp, Gossypium hirsutum
  unsure (1)..(105): unsure at all n locations; Clone ID: LIB3135-027-Q1-K1-F10
accacgcgtccnggaacgcgaaaggaaacgcgaagagccaaacgaaaacgaagacacnacagggcagggagacaaaaggcaaacgcgaggcggaaagcacaaacg

SEQ ID NO: 11075 - DNA, 352 bp, Gossypium hirsutum
  Clone ID: LIB3135-027-Q1-K1-F11
aacaaacatacgttccctgaaaataccaatattaaactccttaccaacctaaaactgtactgagctgggttactttgaacgatctcatacctttatataaacacaacacaacccttatctaatcccactatttaccaacaaaatgaaataaaaccactcccttcgcactcatcaactccctttcatacctaataaacttccaacatactctttctcattatgctcacaaattacacttcaccattttccaacttttcctccgcgttcatccaaacaactccatgcctccactcgaacatcctctcttaacctctttccagattccaccactcgtcaaagtttaactaccctc

SEQ ID NO: 11076 - DNA, 397 bp, Gossypium hirsutum
  Clone ID: LIB3135-027-Q1-K1-F12
gttcgaagagatttatccttttgtattcatttttgaagaggaacctttcgaagaaagtgatggtctttgtctcttcatgcaactcagtcaagtttcatgctgagcttcttagatatattcatgtggattgccttgatatccatggaaagcagaagcagcaaaagcgaaccactaccttcttcgacttttgtaaagcagaaaagggcattttgctctgcactgatgttgcggcccgtggacttgatattcctgctgtggattggattgtgcagtatgatcctcctgatgaacccaaggaatatattcatagggttggtcgaactgcccgtggagaaggtgcaaaaggaaatgcgcttcttttcctgatcccagaggaactgcagtttctacgctattt

SEQ ID NO: 11077 - DNA, 423 bp, Gossypium hirsutum
  Clone ID: LIB3135-027-Q1-K1-F9
cccacgcgtccgcccacgcgtccgcccacgcgtccgcgcagacagcttcaattctacagaaaagtatatccacagaatgccaaggaatgacggtgatcacaatcgcacaccgtatttcaacagttttgaatatggacaatgtatttgttctcaatcaaggaactctggtggaggaaggtaacccaaatgcgcttctacaagatgaatcctccatattttcaagctttgctaaagcgtctacaatgtaatagatggttgatctccaaactcactaaaactaccactccaaatgtaagttttaagcgtttggaaacttgaaagcagctagcacaacttgttttggtagattagttcttcaatcttctgtaacatcaagttggaaaggagagtggaagagagaactacaatcgaatgtttttgttg

SEQ ID NO: 11078 - DNA, 316 bp, Gossypium hirsutum
  Clone ID: LIB3135-027-Q1-K1-G11
ctttggccttcagccgatgaggccaggaaacagatattatccatctgggataaggccgatatgatgaaggtcagcgatgttgagctagagttcctcaccggtagcaacaaaatcgacgatgaaactgctatgaaactttggcgccccaacttgacactactcttgatcaccctcggtgaaaagggtagcatgtattataccaagtacttccatgggtcagtggatgcattccatgtgaatacagtggatacaactggcgccggggactcttttgttggtgctttactatgcaagatcgtggaagacccaaccatac

SEQ ID NO: 11079 - DNA, 370 bp, Gossypium hirsutum
  Clone ID: LIB3135-027-Q1-K1-G9
cacgcgttcgtttaaaatgatacttatatcacctttacttgccctgttgtctcccaaatgcatggtttaattttttccctttctctcacctcatatataaatgtttcttagtattagccaataataataaaccaatcatctcttgttctagttaaactactacttgcatctattatttaaaaaaataatatattcttcctaattttattaaacacttgaacctacttcctctattttacatattatccatttaataatattgagtatttttaacatcacataccgtgacatgtagcaataatctttaatcaatttttccaactcataaattctcatttataaacgatatattgactcatattatcttttt

SEQ ID NO: 11080 - DNA, 369 bp, Gossypium hirsutum
  unsure (1)..(369): unsure at all n locations; Clone ID: LIB3135-027-Q1-K1-H10
ggcgaccangcgtccgccacgcgtccggtgccggttaaggcaactagctgagtactgcgaaaatgaaggctatactgggcggcgagacaatggacattccttgtggagttagcataaaagtcaaggctaacgcgatcgacgatgtacgtacaaggtggaagcttacccaccacttctagcacctcaaccttgtttcacatctaatgaaagaccaacagaccggtacgcataagctcacgatcgagacttggcttgtcttcaagatgaccaccgccgtcatccttacagcttttaggcacgatgagaacatcaatcattcggcgtccttaaagataccttttcaagatgagggtcacttaccctcacttt

SEQ ID NO: 11081 - DNA, 458 bp, Gossypium hirsutum
  Clone ID: LIB3135-027-Q1-K1-H11
gctgaagctgttctgtgataaagattatccagagaagccaccaagcgtccgttttcattcaagaatgaacatgacttgtgttaaccacgaaactggagtggtggaaccaaagaagtttggacttcttgcaaattggcagagggagtataccatggaggatttactgacacagctgaaaaaggagatggcagcaccacataaccgaaagctggttcaacctcccgagggtacctacttctagctctcaagattatcggacatcctggatctaagtgcatttctggtatgcaatatatagtttgtaatgcttgttgatctttaaagaaaatagtggggaatgccccaaaaagcttctacaattactttcccctggtttcatcttaactatacttttcttatcaaactctggttaaggaatgctgtttaattaatgggactttatacgcatgtcccttatt

SEQ ID NO: 11082 - DNA, 312 bp, Gossypium hirsutum
  Clone ID: LIB3135-027-Q1-K1-H12
aaatggcggcgtccaactctgaaaactatttaaaaaccgaagtttcaagctcgggtgaatcagaacagcctcagactcaatctattcgaatgccaagcatggagtaaatccctgcccatgaagtttggaataactttgccgttcgtagtgtacccagtcgagtaatgggtggcattcttggattcataatgggtatggttctagctgccttgtataatcctgaacttcatgatctaatgattggaacgccacaattactctttaatttgaagcaaatgggttcaataaacttgagatctgcaaaaacatttt

SEQ ID NO: 11083 - DNA, 433 bp, Gossypium hirsutum
  Clone ID: LIB3135-028-Q1-K1-A10
cccacgcgtccgggagtttccttcatggttgataactgctctaccacagcacgattgggatccaggaaatgggccccacggtttgattacatcctaacccaacaggctttggtggctgtcgacaagggcactcccatcaaccaagatcttctcagcaacttcttgtcagacccagtgcatggtgccatcgaagtctgtgctcaattgaggccgacggttgacatttcagtgacccccgatgctgattttgtgcgaccggagttgcgtcaatctggcaattgagtcggtagaatctcagaactggaatgagcaactatatttatagtgtgtttgagccagaacttgctcgtcatgtatgtagtgatgtagtttttgcaatgtcttggggctggctgtctttttatgtttcatttttaaatgttttatataattg

SEQ ID NO: 11084 - DNA, 445 bp, Gossypium hirsutum
  Clone ID: LIB3135-028-Q1-K1-A11
gtgagcctgcatgggatgggagtgaactaagatatgctggaaatccattttgcgatcgggatggggttcatgtgcacctgcgacatgattctaccattcttgtccttactttcttaacttcaatcatgatacttaggtgagacattaactttaagcacctgcttgatgaacccattgctatgaacaattcaactcgggtgttagtttgagtcgacggttgacatttcagtgacccccgatgctgattttgtgcgaccggagttgcgtcaatctggcaattgagtctatagaattctcataactggaatgggccgctatatttatagtagtgaatgatccagaacttgctcggcatgtatgtagttgatgaatttgttgcaatgacttgaggctggctgccgtttttatgaatcatttttaaatggtttaccttttggtaggacca

SEQ ID NO: 11085 - DNA, 257 bp, Gossypium hirsutum
  Clone ID: LIB3135-028-Q1-K1-A12
cacgcttcctttaatttccttcatattttttaactgctctaccacatcactatttggatcgatttatattttccccactttcttcattacatcctaacccaacaatcttttctgtcttactacaatgtcactcccatcaaccatgatcttctcagcaacttcttgtcatacccacgtcatcatgccatctaattctgttcttattttagaccttccttttacatttcatcaacctcctatacttattttttgcgacc

SEQ ID NO: 11086 - DNA, 342 bp, Gossypium hirsutum
  Clone ID: LIB3135-028-Q1-K1-A3
gttgcgtgcttcattcatgcggcttttctcctttggaagtgatgggaatctctagtatcctccctatgctatgggcgcttcttctactggaaggttggttagctggatccggataacaggaataagtagaaaggctggatggctgtacctgctttagtgacggaataaggcggcgacctttttctcatcttgagtcgatgcttaagacatgatagttgaaggctttcttcctgctttcaggggcttttcgcctgaaccaaatgaacggggcgctcttacgtaccgtaggttgtgtgaagaccgggaatttaatccagtaattcaatttttcccgagacctac

SEQ ID NO: 11087 - DNA, 386 bp, Gossypium hirsutum
  Clone ID: LIB3135-028-Q1-K1-A4
cccacgcgtccgaaaagattggaccaaacaagcctttatcagaagattagagaatcgaaaaacgacacattgagctgacgctggagagggcgtgacacccagagaccctaatctgcttgcttgccttaaaaaaaacgaatttttaattaaaaaaggagaaaagtttgtggatttcgaggtgtcgtgcagataaaggatgagtacactggatgcaactagagcagaacttgctcttgtagttttgtatttgaataaggctgaagcaagggataagatatgcagggctatacaatatggctcgaaattcctaagtgatgggcagcctggcacagcacaaaatgttgacaaatcaaccagcttggcacggaaaagttttccgtcttttt

SEQ ID NO: 11088 - DNA, 411 bp, Gossypium hirsutum
  Clone ID: LIB3135-028-Q1-K1-A5
ggaagaacaaccttgttcgacttccgatattaaacgcccggagctaactttcaagctcggcaaggggaaaacttgctcctcttgtcgcacatcagaaactcttgctcataataccaaggcgccaacgctgtcaaacttgtgtaccacttgccctccgaaattagctttacaattcaaaaaccttgtggaggattgggttatgcctacactgcaaagggagataaccagttctggcgatgactggctgcatcagaagaagcaaaacctcaacaccgacgttaaaacccacaaagatggaaatcttaactctaaccaaatgagctcggcaacttggccacgtgcttgcttcttgcccgaggccgatatatacgcagtaccattcacggaaccgctctgaactatatattgcat

SEQ ID NO: 11089 - DNA, 257 bp, Gossypium hirsutum
  Clone ID: LIB3135-028-Q1-K1-A6
ctacaatttacaagtataagtttccaccacctacacctccgtcaccacccaaggggccttacaagtgcaagtgcccaccacctttaccgtcaccacccaagcacccctacaatgacaagtcacctacaccaccaccatcatcaccccctaagcattcttacatgtacaagtccccaccaccaccgttaccacccaagcaccattacaagtacacgtaacctgcacctcccccactatttttccttaagcacccttac

SEQ ID NO: 11090 - DNA, 382 bp, Gossypium hirsutum
  Clone ID: LIB3135-028-Q1-K1-A7
cagaaaacggttacttccttgcgactgctgctcatgatggtgttaagttgtgggatctacgcaggtggaagaactttcgatcttttgaattatatgatcaagacacaccaaccaactcagtggatttcgaccatagtgggagttaccttgcaattgctggctcagatataagagttttccaagttggcagcgtaaaagctgaatggaattgcatcaaaactttacctgatctgtccggcacaggtaaatcaacttgtgtcaaatttggtccagatgcaaagtacttggcagtgggatcaatggatcgcaaccttcgcatatttggccttcccgaaggtgatgatgctttaacagaatcattaaaaggaaccccttctgttct

SEQ ID NO: 11091 - DNA, 356 bp, Gossypium hirsutum
  Clone ID: LIB3135-028-Q1-K1-A8
aaaagaatggaccatacaagcctttatcagaagattatagaatcgaaaaacgacggcattgaggggacgctggagagggcgttacacccatataccctaatctgcttgcttgccttaaaaaaaacgaatttttaattaaaaaatgagaaaagtttgtggattttgaggtgtcgtgcaaataaaggatgagtgcactggatgcaactagagcaaaacttgctcttggagttttgtattttaataaggcttgagcatgggataagatatgcagggctatacaatatgggtcgaaatttctaaatgatgggcagcctggcacatcacagaatgttgacaaataaaccagcttggcacgg

SEQ ID NO: 11092 - DNA, 457 bp, Gossypium hirsutum
  Clone ID: LIB3135-028-Q1-K1-A9
cggacgcgtgggggagggccttggaggaggttatgtgctctgcctgcattttgggtaggtgggttatatgatgaggtctcgctccagagtattctagacatgacagcggattggacatgtgaagaaagagaaatgttgagaaacaaggttccaaagactggtcttaagacgccatttcgagatgggttattgtggcacattgcggaagatgttctaaagttggccaaggatggtttggaaagaaggggcttcaaggaatccgggttcttgaatgaggtggcagaggtggttcgtacaggtgtaacaccagctgagaagcttttggaattgtatcatgggaagtggggacaatctgttgaccctgttttcgaagaactcctctactgagggattttatatattttcagggctctttttgagtagggaatcaaattcttaaaatcttagtgatttcatg

SEQ ID NO: 11093 - DNA, 417 bp, Gossypium hirsutum
  Clone ID: LIB3135-028-Q1-K1-B10
ctcacgcgtacgatagttacattgatggttgataactgctctaccacagcacgattgggatggaggaaatgggccccacggcttgatttcatgctaacccaacaggctttgaaggctgtcgacaaggtcactcccatcaaccaatatcttcgaagcaacttcttgtcaaacccaatgcatggtgccatagaattctgtgctcaattgaagccgacggtcgacatttaagagactcacgatgctgattttgtgcgaccagcgttacgtctatatgtcaatataattcatagaatctcataactggaatgagcaactatatttatagtgctgtagagccagaactggctcgtcatgtatgtagtgaagcactttttgcaatgtcttgaggctggctgtcttttcaagaatcatttttaa

SEQ ID NO: 11094 - DNA, 326 bp, Gossypium hirsutum
  Clone ID: LIB3135-028-Q1-K1-B11
cccacgcgtccgaaaattaaattgatgtttgtatacatgctctaccacagtactatatgggatgggggatatggacacggggcggtcgttttcatggtatcccacctagcttcgcttgctttcgacaatgtcactcctatataccaaggtcttcgtggtatctattggccagacttattccatgttgccattgaaataaccgttcatttgacgaactcaattgccatttaagatacccccgtttctgattttgtgctactagcgtagcgtcaatctcccattgtagttcatagaatttgtgaactctaattagcaactatatttat

SEQ ID NO: 11095 - DNA, 369 bp, Gossypium hirsutum
  unsure (1)..(369): unsure at all n locations; Clone ID: LIB3135-028-Q1-K1-B12
cgcgtncgagaaggttcacatcaaccttgttgtcattggccatgtcgactctggcaagtcgaccactacgggtcatttgatctacaagctaggtggtattgacaagcgtgtgattgagaggttcgagaaggaggctgctgaaatgaacaaaaggtcattcaagtatgcttgggtgcttgacaagcttaaggctgagcgtgaacgtggtatcaccattgatattgccctgtggaagtttgagaccaccaaatactattgcaccgttattgatgcacctggacaccgtgactttatcaagaacatgattaccggtacctcacaggctgactgtgctgttctcattattgactcaaccactggtggttttga

SEQ ID NO: 11096 - DNA, 310 bp, Gossypium hirsutum
  Clone ID: LIB3135-028-Q1-K1-B2
gaaagaggctgagaaacacatgcctgaggaatgcattgagccagaatcagagtttcaccctaatgtagtgaacagagattcatacatggtgagcatgatgcttcaggtagcaacatttgcagtgaactacatgggtcatcctttcaaccagagcatgcctgaaaacaaaccattcttgtatgctcttggagctgatgctaggttctctgtgggtataactattgatatatatagggatttgaatgattggttgagcttggttactttgcctgtgggattgagggatcagctcttgatatgggctctacta

SEQ ID NO: 11097 - DNA, 324 bp, Gossypium hirsutum
  Clone ID: LIB3135-028-Q1-K1-B3
actgagggaaaaaaaaaaaaccatcatggcttaaacactgttgcatccgctgctcttcttcgaccttgaagtggttgttctttactttggatagctctacctacgtgccttgcccaccaccaccaaatagccacaagcctacccacaaaagcccaccctcggcacctgaacagccaggcacttgccccagagatgcactgaaactaggcgtttgtgctgattagttgggctcattgcgcgttagttgttgaccgtcgaggatcaaatgctgctctttcatttcgggttttggatgatctccatgctgcttgttgcctttgcact

SEQ ID NO: 11098 - DNA, 472 bp, Gossypium hirsutum
  unsure (1)..(472): unsure at all n locations; Clone ID: LIB3135-028-Q1-K1-B4
cgaagatttagtctcaactgacttcatcggagacaacaggtcaagcatttttgatgccaaggctggaattgctttgaatgacaactttgttaagcttgtgacttggtatgacaacgaatggggttacagttcccgtgttatcgacttgatccgacacatgtctaaggcttaagtgagtgagtgattgtgcttggtgtatccaagctttagcaattttaatttagaagagatgttatgagagaataaacgaattgtacggagcatatttttgtgtgaagaagggttgtttcagttttattacccaagtacttgaatgtttcaagtttcattgcagttgtttttctactttaatgcatacgtggtgattatggtttctctacttaaaaaaaaanaaattttnnnnnaaaaaaaaaaaaaaaaaataataataaatattttaataatttttttttttttttattttttttttaat

SEQ ID NO: 11099 - DNA, 328 bp, Gossypium hirsutum
  Clone ID: LIB3135-028-Q1-K1-B5
cgcacgcgtacgccgacgcgttcgcgcacgcgtacgtgcgaatatcacacacaggcactttccaggtctaacatgcacttcgtgggatgggatcatatgcttttgctacatagttgcatggctgccagaaagtgtctctcttgtgtaccaggagccttacacaatgtacctcaagacatcacaatccattaggaagtgtgaactactgctacatggcttatgcatgcaacacagctaggttatgacatcttgtattagaatataaatagcttcatctgcgcggtcaataccgacacagtgatgatttataactttctcaaaccgaact

SEQ ID NO: 11100 - DNA, 457 bp, Gossypium hirsutum
  Clone ID: LIB3135-028-Q1-K1-B6
tttccattactacaaccaacttactgccatctacgcaaaagatcgagcgactgggaaagatggtgcaaacaaccgctgatgttattgaagaaataaatgttcaggatgtacctactacagatattaatgaagaaagaaacgaattctatgactgtgaagctgatgtctctttggatgacatggatgtttctgctacagaaccgcaactagatagtcaccaagggggttccacatcttcaaagaagaaaaaaaagaattctgatgcaagtgatcatatttcttcttcatttcattatgctgccactatattggcagaaaacattgcggcccattgccaaccaaatcagtaggagtattgcttccgatgtggtacttcaacataagtcagaagaattccagatcattcaagaaaaagctataaattatgtccaacattatgtgaaatagaagtttacct

SEQ ID NO: 11101 - DNA, 460 bp, Gossypium hirsutum
  Clone ID: LIB3135-028-Q1-K1-B7
gatcaatacattcttttttggctttatagccgaactttaaaagaaaaataaatgtctaaaaatagaatattttttcttgctttttgctgctttgtatgtcttggttgattgcaggtacggggtacagggcgtgtgctagcacttggcgtgaggcgtacggaggcgcgggcgtggatgtggcgccaggaggccgtatgaggcttggaggctggaggttactgttgcggcacaaaggggggtgacctatggtttctgaaactgtttaagtttttgggccgtttgggcccttattaggtttgggctatgggttttaaattaaggttttgggtctaggtaattgtgtcaaggtctgtaaatggacatttaatggactattaataattgggcttttttattctttatatggccttgatgtggaccccggcaaattggcctgtttacaaggggttcaataaccttg

SEQ ID NO: 11102 - DNA, 330 bp, Gossypium hirsutum
  Clone ID: LIB3135-028-Q1-K1-B8
agaaaacgtaaaccaggtagtggtccatatgttgttattgataatagaaccaagggctcagctagtacccaggaaacatcaagtgatgatggagacagtgacactgaagaaccatctggagctgaggatgctgatgcttcaaacaaggatgaactgaaaaccgtaaagagtgatacagtacaggatccagaaaactctgtaccagctgcaaatgaacagttggaaaggactattgatgaaggtgctcaagcttgctctactttattcatagcaaatctaagtccaaattgcactgaatatgaactgaagcaagttctatccaagtattct

SEQ ID NO: 11103 - DNA, 442 bp, Gossypium hirsutum
  Clone ID: LIB3135-028-Q1-K1-B9
acgtgttatcacaatatgtacaaagaataccgttacacaacccttaatggtgctgtagaacagatgtacaccgagatggcgtctcgtcatagggtgaggtttccttgtattcaaatcatcaagacagctaccatcccagcaaaactttgcaagagggacagcaccaagcagttccacaactccaaaatcaaattcccactggtattcaagaaggtcaggccaccaactaggaagctcaagacgacatacaaggcaaccaaacccaacttgtttatgtagttatttttcatggctggtggtggtaggtctaatgcctaatagtttgattacttcacttgttagattgagaggggttatcaaattttgaacactctatgtttacttttatagctcttttatgtttcgaagattgtgttttgatgactttactttttaatttaat

SEQ ID NO: 11104 - DNA, 280 bp, Gossypium hirsutum
  Clone ID: LIB3135-028-Q1-K1-C1
ggaagaccactataaattttcattccccccgcccccccttcttttttaaaatttgatgaaccaggttagctgcgaggttgcatggcatgattaagagatgtagaggtttgatgtatttttatataaacttgctaaaatcttaaactatgctaaaaaaattgatgctatgtaataaagagaatatttaatacaaaaaaaaaaaaaaaagatataataacattaagaatttgtcacgcattaaaatgattggaagaactcgatttctaagccttaaagattt

SEQ ID NO: 11105 - DNA, 391 bp, Gossypium hirsutum
  unsure (1)..(391): unsure at all n locations; Clone ID: LIB3135-028-Q1-K1-C10
cacgcgtncgaacgaacgtaacaaagttgtactacttttacagattgcaaggttcataatgaagaccgggtcgcggctgtggtctggaaagaagcctttcataacaatacctcacatgggaccatcagaacacctgttgccatgccgttgtgaagttgaaagggctaacgattggctaaagcctaatgtaatattggacgcattctatgctagggctactacgatgtcaggcacctgtgcaaaacaccttaacaattttgcaaatcaagaacagcgtcatgctcaactctcaactgatttgtcctaagctgtagtcggtcacgttcagttaattattgcttacaagttacatttgaaattgcaacaagacattcccggaaagggagtaaaa

SEQ ID NO: 11106 - DNA, 347 bp, Gossypium hirsutum
  Clone ID: LIB3135-028-Q1-K1-C11
ctcaagttcagattgttactcgacgaggatgttcaagtcgaaacaaattcccaaaatagattcgattttgtaaactagcaaactcaaaatttgtagttaaatgttgatccttaactttgaaagtaatttaatgaaattttgaaaataatttaatgaaaaaaaaaaaaaaaaaaaaaaaaaaaaaaaaaaaaaaaaaaaaaaaaaaaaaaaaaaaaaaaaaaaaaaaaaaaaaaaaaaaaaaaaaaaaaaaaaaaaaaaaaaggttttgggttttggtagaaataaatttccattccttcttttcccccgttttggctttttaattcctcatttaaactaagtttatt

SEQ ID NO: 11107 - DNA, 162 bp, Gossypium hirsutum
  Clone ID: LIB3135-028-Q1-K1-C2
cccacacgttcgctgacacgtccgtccacacgtcctctagaatcttttagccctttactctggtggtttgacctgagatgtgtacattgacttcgtgcttgttcatgtttcaacactcatctaatacaataattcacatcttctgttgaatatcatttctta

SEQ ID NO: 11108 - DNA, 461 bp, Gossypium hirsutum
  unsure (1)..(461): unsure at all n locations; Clone ID: LIB3135-028-Q1-K1-C3
aacgtgcctaaggctagctgtgacggcatccgttccctgaacaacatggctcgaaccacccctggccgccaaaccgtgtgtgggcgcttgcaagctgccgctaaggctgtcaaaattaaaggcaacttggctgagacccttccagccaaatgtagtgtcaacatcccttacaagatcagcactttcactaactgcaaaaatgtgaagtgagatggatgaagagagggttttgcagcagcttgcaggagataaaatatatgattaaaaagacgaagaagaagaatgaatagggattttgggatggaatattcaaaatccaaacatagtctccactttagtgtagtgaggctatgtttattttggtgtatgatttggaccctgcatgttggctctaattttatatcctctatgtatnggctcatttaacgttttaatgaattaaaagttatgctttggcaatc

SEQ ID NO: 11109 - DNA, 434 bp, Gossypium hirsutum
  Clone ID: LIB3135-028-Q1-K1-C4
gcatgattaagtaactgacagatatgcgacaactggtcaagcttttttgaagctacgctgggatacttggatgacaactcttgaagcttgcgactatgctgacaactaatagggatacagtttccgactcatccactcgattcgacacatgtcataacgcttaagagagtgagttactgtgcttgcagaattcaaactttagcaattttaatagagaatagatcttatgatagaataaactaaattttctgatcatatttatgaataataaaagtgtattttcatttttattacccaattacttaaaatgaaacatggttcattagtagtaggtattgaaccttaatgcatatctggtgatgatggggtccctgctttgtagctctaaatttttatcccctaagtaattggctatttaaatggtttaatgaatt

SEQ ID NO: 11110 - DNA, 427 bp, Gossypium hirsutum
  Clone ID: LIB3135-028-Q1-K1-C5
tcgaacgatgccccggctcttaataaggctgcaatctgttttgctgttccggatgggactgacacggcgaggagtgcttccgatattgtccttactgagccaggtcttaacgtcattatcagcgccgacctcaccagcagatgcatcttccagaggatgaagaactacaccatctatgcagtttccatcacaatccgtatagggctcggatttatgctcattgcgttgatctggcaatacgatttctctcccttcatggttcttatcattgccattctcaatgacggttctatcatgaccatctttaaggacagagttaagccatctccgttgcccgacagttggaaactgaaggaaaatcttgttacgggcatcgtgcttgaaagctaccttgctctgataactggcattttcttctgggctatgc

SEQ ID NO: 11111 - DNA, 378 bp, Gossypium hirsutum
  unsure (1)..(378): unsure at all n locations; Clone ID: LIB3135-028-Q1-K1-C6
ttcaacaagcatgtttagagtgcctggaaggatttgaatcaagagtttctgaagccaacataaaggccaacataagttttaaatcgtatcctaaaccttgcaagggtgatggatgtactttacagggaaggagatggatatacatatgttggaaaagcggctaagggtggaatcacttcattgctcattgaaccaattgcactttaaaattatgttaatttttcctctccaagcttgtttcctaagaaatagttattaagttctaattaataattgtttataatattcatatattataaaagaaagttcaaatctattgtctttgtacttatnggcttatattaattcaataaagttctttccaaacttttcattgtg

SEQ ID NO: 11112 - DNA, 351 bp, Gossypium hirsutum
  Clone ID: LIB3135-028-Q1-K1-C7
cttaacattattattcttaccacccctgggctccaaaccgcgagtttacactttcaatctgcccctaaagctttcaaattaaaaggcttcttttctcatacccttccagccaattctactgccaacataccttacaatattatcactttcactaactgcaaaaattccaattgaaaattattaatatacttctttttcttcatcttgcaatacataaaatttatctttataaagaataatataaacaatgtatattaattttttaatttaattatcaaaatccaaaattattcttcactttactttactgaacccttttttattttttgttatcttttgtaccccccattt

SEQ ID NO: 11113 - DNA, 389 bp, Gossypium hirsutum
  unsure (1)..(389): unsure at all n locations; Clone ID: LIB3135-028-Q1-K1-C9
tatgaaggtgacaatgttgtgctacttttacaggttgcaaggtttctaatgaagaccgtttggcagctggggtctggaaagaagcctgtcgggacaatagcttacatgggacgatcagaacacctcttgcaatgccgttgtgaagttgaaagggctgaggattggctaaagcctaatgtaatattggaggcatttgaagcgagggctgctaggatgtcagtcacctgtgcaaaaaaccttaacaattttccaaatcaagaagagggttttgctcaactcgcaactgatttggccgaggctgcagtcgctcatgttcaggtaattatcgctcncaagntcattgagaaattgcaacaagacatacccggaagggagtaaaagacagtgga

SEQ ID NO: 11114 - DNA, 347 bp, Gossypium hirsutum
  Clone ID: LIB3135-028-Q1-K1-D1
gaagggaatagtaatggatcttggattacttgaggggagatattgacatacatcacggtgaaaagaatacatgtatgcatgtatgtatgtatggtcatcttgtcaaatcatctattcgctatatttggttgcttttttttttttcttttaagaataccggaagataacaaatattttacaacagaggttaaatatttcatcacctcgtatccatctgtgggtggaatgcacaaccatcctcctttcaattccaaaatcatgtattctatgcaagatgtagtagtttacaagacaactatgcagcaaatgtttttgctttaagtttgaagtggctgaaactttttgct

SEQ ID NO: 11115 - DNA, 399 bp, Gossypium hirsutum
  Clone ID: LIB3135-028-Q1-K1-D10
cccacgcgtccgggtttatcctccatgcatttaaaactgcgtttgtggtcgagcatgattttggaatggcgacttacctcgcagatagagttattgtctacgaggggaagccttcagtggattgtattgcaaacgctcctcagtccttgttaactggcatgaatctgttcctatctcatctggacatcacttttaggcgggacccaaccaattaccgaccgagaatcaacaaactggactcaaccaaggatagagagcaaaagtctgctgggtcatattattacctagatgattgatcgacacatctactggcagttgtcaattgtgatgagatgaacaacaagacgtgaatgttgggtattcccgggatctctgagtggagcagtgatggtatgttga

SEQ ID NO: 11116 - DNA, 395 bp, Gossypium hirsutum
  Clone ID: LIB3135-028-Q1-K1-D11
cccacgcgtccgggtttatcctccatgcatagaaaactgcgtttgtggtcgagcatgagttgggaatggcgacttacctcgcagatagagttattgtctacgaggggaagccttcagtggattgtattgcaaacgctcctcagtccttgttaactggcatgaatctgttcctatctcatctggacatcacttttaggcgggacccaaccaattaccgaccgagaatcaacaaactggactcaaccaaggatagagagcaaaagtctgctgggtcatattattacctagatgattgatcgacacatctactggcagttgtcaattgtgatgagatgaacaacaagacgtgaatgttgggtattcccgggatctctgagtggagcagtgattgtatg

SEQ ID NO: 11117 - DNA, 67 bp, Gossypium hirsutum
  Clone ID: LIB3135-028-Q1-K1-D12
gacgccacgcgtccgcccacgcgttcttaaaaaaccttcattttttttaactccacaaccaaaacac

SEQ ID NO: 11118 - DNA, 422 bp, Gossypium hirsutum
  Clone ID: LIB3135-028-Q1-K1-D2
ggatatggtgagattaccgagcccattgtgaaggagaaaatcatgggttctgctccgaaacgtggaagacatctgaaaagtattggtttgcagaagcagaagatgccaataagcgcagagcttgataaatctgcacatgataagcaactgatcactgaaattgttgatgttggaacccctgctgattgggtgaagatcaatgtccgtgaaactcatgattgctttgaggtatatgctctggtccctgggcttctgcgtgaggaggtacgagttcaatcagatcccgctggacgtgtggttatcactggccaaccagagcaagttgacaatccttggggtatcacgccctttaagaaggtagtgaacttaccatcgagaattgatccgcttctgacaactgctgttgtgagcttgcatggtcg

SEQ ID NO: 11119 - DNA, 234 bp, Gossypium hirsutum
  Clone ID: LIB3135-028-Q1-K1-D3
ggatcaggtaagatgacctacccccttctggatgtcaaaaccacgacttcttcttcaaagcctgacatacatggggcgagtctacgattgcaaacgcaccacactgctataaagcccgagctagctatatctgcgcatgataaacagcggggcgctgcaaatgttgatgttcggacccgtgcttattgtgctacgaataatacgccctaaactaagactggctccaagggttct

SEQ ID NO: 11120 - DNA, 304 bp, Gossypium hirsutum
  Clone ID: LIB3135-028-Q1-K1-D4
caattgcttctctgcatttgccttggcagatccgggcgtgagatcgaaaccacactattttccagatctgggactggtaatatttgtgtggaaaagtctgttttgcccaaaggtgattcgcttcaaattcaagaagtttggaacgattatctggaagaagagttcgttttgatcctgaaaatagttgatgcttacaactatgatgctatcgatactgagatcccatgagttgttctacgccccgttggaactttcaagaacgtaagtgcttatagctaccaaactttgaaggataatgaggata

SEQ ID NO: 11121 - DNA, 265 bp, Gossypium hirsutum
  Clone ID: LIB3135-028-Q1-K1-D5
gccacgcgtcctttcacagatctcttctttttttttacctacctttataattcataccttccccggttcttccaagtggttttttcaacctcctctccacccttactattacaccattaattatttcatttttatccacatctaacaatcctttattcacaaacttttatttttcttttatctttacttcctataacaataaaatcacgctgacgattatatacccagttacaataccattatatgacgtgattattcttttaac

SEQ ID NO: 11122 - DNA, 362 bp, Gossypium hirsutum
  Clone ID: LIB3135-028-Q1-K1-D6
ggaaaaatggcatccatcaccattacaacatcattccttagcaccactaacctggcaaagggttgtgcaagaattacccagcggagactagtggttgccaatgctgctaagggagctcaagtggagagtgtccagatgagcggtgagaggaaaacagagggcaacaatggcaggagggagatgatgtttgcagctgcagctgctgctatttgctcggttgcgggggttgcaacggcggagcctaaacgtggtagcgcagaggccaagaaggcgtatgctcctgtttgtgttaactatgccaactgctacgatctggcgcaactgaggcagggccactgcacattgcttgagtgccatgagac

SEQ ID NO: 11123 - DNA, 263 bp, Gossypium hirsutum
  Clone ID: LIB3135-028-Q1-K1-D7
ggaaaaattacattcatcaccattacaacatcattccttatcaccactaacctgagaaatgtttggcgaataattacccagcggagactactgcttgccaaagctgctaagggagctcaagtggatagtgtccagatgagcggttagaggaaaacagagggcaacaattgcttgatttagattatgtttagcagctgcagctgctgctatttgctcggttgcagtgatcagcatcttcagatgcctaaacgtggtatctcata

SEQ ID NO: 11124 - DNA, 409 bp, Gossypium hirsutum
  Clone ID: LIB3135-028-Q1-K1-D9
cccacgcgtccgaaccaaaccaaactagtgagccgctgcttctcttcttctgtatcccaaggtggttgcttttaggtttcatcaataccaagtggtgggcagaggccttcctacagaagcagatgagcatcccaagatttaccgtatgaagctttgggccactaacgaagtccgtgccaaatccaagttttggtattttttgaggaagctgaagaaggtgaagaaaagcaatggacaagttttggctatcaatgacatctttgagaaaagccctaccaagatcaagaactatggcatttggctgcgatatcaaagtcgaactggttatcacaatatgtacaaggaataccgagacacaaccctcaatggtgctgtagaacagatgtacaccgagatggcgtctcgtcat

SEQ ID NO: 11125 - DNA, 476 bp, Gossypium hirsutum
  Clone ID: LIB3135-028-Q1-K1-E1
gcagcttgtgtagggggaaaaaattatgaagagggtttcctttgttgccttgtgtgtggtggcactcgcggtggtgctgttttcgggtgaaagtcgcacggcggaggcagtgacatgtaatcccgtggagcttgccccctgctcgccggcgcttacgtcgtcctcgcctccatcaagcgcttgttgcagcaagctgaaggcgcagcagccatgcctctgtggatacattaagaacccatctcttaaacagtatgtcaacagtcctaacgctaaaaaggttgcttcgacttgtggagtcccatatcctaagtgttaaatgttgcttaatggtgtatctactatctactggcagcaaataagtgattctttttgctgtcaagtactgttctgaataaaagaataatgataaaatattagataaaattaaggtaatattttacttatgttggaagaaatgataaattagtatggcttac

SEQ ID NO: 11126 - DNA, 256 bp, Gossypium hirsutum
  Clone ID: LIB3135-028-Q1-K1-E10
cccacgcgtccgcttaggctcattacgattataaattatatatacaggtaaataatctaccgggacagcgtggactttgtctgggtcgtatgatgtgtgattgactgtgccattgtccataagaagctctggtgaatatgacacaattattgtactatataataaatactatcctgggggcatttatcattccagcaggtttattcatagaaaggatcaaggtccgtaaagatgagattcttcctgtaagaggcct

SEQ ID NO: 11127 - DNA, 434 bp, Gossypium hirsutum
  Clone ID: LIB3135-028-Q1-K1-E11
cccacgcgtccgcccacgcgtccggggcttcatttgctataacatgagcgtagacattgtttgccttaggaataaaatgaaagtcgatctcttggaatctgtcttttttgctttgtatgtctctgataattgctccaatgaccgatttgtctgtatcaatactttggcatttcttaatgatagttttcgaatctcccactacttctattttgtttaaccccatagaaatccccttttattgcctgtaatattgcatatacttctgccgtgaacggagttgctatctcggagtgcatgactgccttcggtgcgaggatctccccctcctcgttccgtacgagcaaacctgtagtccatctggacgatagtcggttgaaggctgcgtcaaaataaactgtgatccttccccttctacgcatttgttgagtattttc

SEQ ID NO: 11128 - DNA, 219 bp, Gossypium hirsutum
  Clone ID: LIB3135-028-Q1-K1-E2
gttactagtgaaatgacgtgtcccatctagacattcacactcagatcgacggagtgccttcgggaatcacgtatggagagaacacctgggctgatgcgaaggcttacaatgaacccctagctagattgacttggctattctagacgaacgatcagacctttactagttacaagaacgcgagagacttcaagtagacacaagaaatcctgaactctggtt

SEQ ID NO: 11129 - DNA, 309 bp, Gossypium hirsutum
  Clone ID: LIB3135-028-Q1-K1-E3
cgctaatgcatttagaggtagtgattctggcttttatcatacactccttcctatcccagatgatagccactctgctaggaacacctttggctgtttgcttttcttcggactcacctgggggaggacatcttcctcttccgagtccaggcccttacgctccagcaagctccaataattctgatgctgattctttcagcaataatgttatattgcagagctggccaacaaccgaacgcgcaagacagtcgccagcctcagcagaaacgggcacgttggtgaataagccataatctggacgtgtgccgactg

SEQ ID NO: 11130 - DNA, 148 bp, Gossypium hirsutum
  Clone ID: LIB3135-028-Q1-K1-E4
agtacacatcgagagcggtgcggcttatagttatttttatagctagcttgtagtgctgtgggaaggactatcgggtgagcaaaccattgctcctctaatacccataggacgacgccgttaacataggggtggacaaatcagagtagga

SEQ ID NO: 11131 - DNA, 379 bp, Gossypium hirsutum
  Clone ID: LIB3135-028-Q1-K1-E5
caaagaccaatgggagtggttatgggtgtggaccaatatgctaactcatcagatgtgtaactcaggggtttcggcaactgagtcagtgggaacgaataggaccaacaactcccaaactgcaattggagatgacaagatcaacatgcacttcattgattgccttggagttggagcttcttaaaacacccaccattagttcttttttttttcttaattactttttgtgtttttttttctttttgttaaacttgaaagtagagaaatccagcttgaaacagaagagggaaagaggagcatattgagtccattgtgcaaaaacaaaaaatgttatgcttctgcagttgattcatcatttttataatttttgtatatacagttt

SEQ ID NO: 11132 - DNA, 268 bp, Gossypium hirsutum
  Clone ID: LIB3135-028-Q1-K1-E6
gaaagaacgtcgtcactgaccattactacatacttccttagcacctctttccctggaaacgtttggccaagaattactgagcggagactaacgcataccaataacccctacgaagactaagttgcgagtgtccagatcaacatgcactggattgcttatgtcaacattggcgcgtgttagaacatgcacgatgatgccgctgctcctgtttactcacttgctgtgtttgccactctacaggctaaacttgatagtagagaagcccata

SEQ ID NO: 11133 - DNA, 87 bp, Gossypium hirsutum
  Clone ID: LIB3135-028-Q1-K1-E7
cccactcgttcgattacgcttttttgaatggacaacttttatcccctgtccaacagcgtcatagtgctcttttcatttgtaggaaac

SEQ ID NO: 11134 - DNA, 346 bp, Gossypium hirsutum
  Clone ID: LIB3135-028-Q1-K1-E8
atcactctctggcttccgctttgtttttcctacttcctttctttcttgttgattgggctcatagagctcagtgagttggtgcgaagatgattcgtggggcagcaccgggacccaaggggaagaagaaaggggccttctttaccatcgactgttctaagccggttgaagataacatcatggacatagcctctctagaaaagttcctccaggaaaggatcaaggtcggtggaaaagcgggtgctctcggagattccgtcactgtcacccacgacaagagcaaaatcactgtcttcctccgactccaacttctctaagcggtatcttaagttcttgacttagaagtact

SEQ ID NO: 11135 - DNA, 442 bp, Gossypium hirsutum
  Clone ID: LIB3135-028-Q1-K1-E9
cccacgcgtccggagagtctgcatagtggttttagcttgtgtggcgggatcatcggcggcagggagtgctttcaatgtgagagctacttatcatctgtacaatcctcagaacataaactgaaacttgactgctgcaagtgctctatgcatcacatgggatgccaataagtccttagcatggcgtcaaacatatggatggactgctttttgaggtcctgctggtcctcaacgacaagctgcttgttgccgatgcttaatgttgaccaacacccacactggaactcaagcaatggtgagaatcgacgatcaatgcagcaatggaaggctcgatacggatacttacgtctttaaccaacttgacacaaatgggcatgggaatgctgaaagtcaccttgatgcgaactatgaatttgtaaactgtggtgacttaacccacaattta

SEQ ID NO: 11136 - DNA, 442 bp, Gossypium hirsutum
  Clone ID: LIB3135-028-Q1-K1-F1
cgaaaacgatcctgaattcaaaggataccacgatgggaattcagaacctattggctttgggcacattggcatcactgtggatgacatgtacaaggcatgcgagagatttgaaagtcttggagtagaatttgtcaaaaaaccaagcgatggttttgcattcatcaaggatcctgatggttattggatcgaaatctttgatttgaaaggaattagacaaatagttaacagtttagcttaagttaatgcttcaccaagttcaggaaattgatctgacaaactcaagtgaaatcttaattgaagcacatttcattctagttatgtttatgttttctttatgtttgatgtgtataacaagtaaggtgaaaataaagagttttgtaagagaaaattcaacctttgaatttactaaattctatttatattacatataaatttgtatgcc

SEQ ID NO: 11137 - DNA, 280 bp, Gossypium hirsutum
  Clone ID: LIB3135-028-Q1-K1-F10
cgtccgaccacgcgtccgtttaaaattacatcaattatctaattacgagaatgaactagacattgtatgtattaatttagcggtttgagattttattttatgtgcaaggatccttgatctattttggaggttgagagaagttttcattaaaattatgaaattagcaattatctactatcttattgtattaattaaattcataaattgtatatttaaaatttaattttataaaaatcaaaataaatggtcttcccctctataggatccattcttacattct

SEQ ID NO: 11138 - DNA, 378 bp, Gossypium hirsutum
  Clone ID: LIB3135-028-Q1-K1-F11
cccacgcgtccgctcaagatgatccttcgagcacctttacttgccctgctggttccaattacagggtcgtgttttgcccccgaggctcacctcatatagagatggtcggaagtaagagccaagaaaaataaagggatcatctcttggtctagttaatctgcgccttggaactaaaaaataaaaaagtcatttggtcttccaaatgatatcaaacacgtggttctacttggtttattttacatatgttttgtttaataatattgtgcagtttcaacagcacaagacgtcacaagttgctatcatctttcatcaaaatttccaactcataaatacccatataaaaaagttatatgaacttatattatttcttttatggga

SEQ ID NO: 11139 - DNA, 254 bp, Gossypium hirsutum
  Clone ID: LIB3135-028-Q1-K1-F2
ctcacgcgatcatagatgcgttgggtctcgcgatgggcatcgagaacgtattggcttcgggcgcagtgtcgtcactgtggatgacctgtgctgagcatgcgggatacttggaagtcctggagtaaatggttggactaaaccagacgatcgttgagcatttatctaggatcatgatggttatagacacgaagtttacagttggaatggtgagagacggatcgatctcattttatctggagctagggcttcaccaa

SEQ ID NO: 11140 - DNA, 193 bp, Gossypium hirsutum
  Clone ID: LIB3135-028-Q1-K1-F3
cgcacacgtccatgtattcgtacgttaacccgatgggaatcccgtacctattggcttacggcacagcggcatccggggggatgacatgatcagagcatgccacacatttcgaaatcctggagtacaattcttgaaaaaaccagacgattgttttgcatacatcaaagatcctgatagttattggatcgaaatc

SEQ ID NO: 11141 - DNA, 196 bp, Gossypium hirsutum
  Clone ID: LIB3135-028-Q1-K1-F4
cccacgcgtccggagtagtatgcggtactgatatccctatcggttacgggtttgcttatgtgaggggctcccttgcgttcagcaccttttgtccccaattcgcctactatgatgcactgattaatttatttgagatatgcggggtggtgttggtatcctccactccaaacatgagcttttacaactttaattttac

SEQ ID NO: 11142 - DNA, 476 bp, Gossypium hirsutum
  Clone ID: LIB3135-028-Q1-K1-F5
aggcacctctactttcagtgaatacactgttgtccatgtcggccaggttgccaagatcaatccggaggctccgcttgataaagtttgtgttctaagctgcggaatgtccacagggtttggtgccactgtgaatgtagctaaacccaaaaagggtcaatccgttgcaatatttggactaggtgctgtcggtcttgctgctgctgaaggagcaagagtttctggggcttccaggatcattggtgtcgatttgaaccctagcagattcgaactagccaagaacttcggtgttacggagtttgtgaatccgaaagatcacaacaaacctgttcaagaggtcattgctgagatgacgggtggaggagtcgaccgcagtgttgaatgtaccgggagcatccaggccatgatttctgcatttgaatgtgtccacgatggttggggagttgcagtgcttgtgggggttcccaacaaagacgatg

SEQ ID NO: 11143 - DNA, 341 bp, Gossypium hirsutum
  Clone ID: LIB3135-028-Q1-K1-F6
aagcacctttactttcaaggaatacactgctgttcatgtcgagcaggttgccaagagcaatccggaggctccgcttgataaagtttaatttctaaactacgaaacgctcacaaaatttggtgccactttcaatgtaactatacccaacaccggtcaatacgtggcaatattaaggactacgtgctgacactcttgttgctgctgattgagcaagagtctctatttcttacaaaatcattggcgtctatttgaaccctaaactattctaactatccacgaacttttatgaaactgagttaagttaattctaatgatcacgaggatccttgctaagaatttaa

SEQ ID NO: 11144 - DNA, 81 bp, Gossypium hirsutum
  Clone ID: LIB3135-028-Q1-K1-F7
atcaaactttactttcagctaattcattgctcttccttttatccaggattccttggtcacatacgacgctttgatttgtaa

SEQ ID NO: 11145 - DNA, 361 bp, Gossypium hirsutum
  Clone ID: LIB3135-028-Q1-K1-F8
ctcaccggccaaatcccgcctgaagttggcgaccttccgtaccttgaaaccctgggtttcagacgacctccctaacctcaatggaaccatacaacccgtcattgccaagctcaagaacctgaagacgcttcgcttgagctggaccaatctttgcggtccagtccttaattttcttagccaacttaagaacttgacttacttggacctttcatttaatacctgttcggaactaatccaaggttccttttaacaactccaaattttcaagctttgcatttggattgaaaccagtttactggttccattccaaaatcctttgggatggttcctaaccaaaacctggttttggtcattttgtctt

SEQ ID NO: 11146 - DNA, 170 bp, Gossypium hirsutum
  Clone ID: LIB3135-028-Q1-K1-F9
cccacgcgtccggtgaaaattacatcaatgagctaattaggagaatgaactagacattatatgtgttaatttagcggtttgagattttagtttatgtgcaaggatccttgatctattttggaggttgagagaagttttcattaaaattatgaaatttgcaattatctact

SEQ ID NO: 11147 - DNA, 328 bp, Gossypium hirsutum
  unsure (1)..(328): unsure at all n locations; Clone ID: LIB3135-028-Q1-K1-G1
agaacaccattttgttgcataacacatgcgaggtctccctgttggctgctcccatcatcctagaggtggttcttcgggctgagcttagcaccacaatccagcttaaagctgaaggagaggacatgatataatctatccaccctgtggctactatactgaggcacctaacccaggcgcatcttgttccaccaggtacaacccgtgtgaatgcactgtcaaagcaacgtgcaatgcttgagaacatactgaaggcctgtattggcttggccctgaaaacatcatgattttggagttcttgtgaaaatcnttgaaagaaaaaaatgaacaa

SEQ ID NO: 11148 - DNA, 346 bp, Gossypium hirsutum
  Clone ID: LIB3135-028-Q1-K1-G12
cacccacgcgttcagtaaaagtgagagcatattttttatgagctatgtaagcatttcatggatgcgatatattatctccctcacggataatttccagtaaaactattctcaggaggcttatagccaaaatctaagatttatgatattcaaagagtttctgaaaattttcaaagaacttttttgtaagccttgataccgcttgtttgtataaccctataggcggctgtatattccaatatccattctcttgaaaagtgtaaatcagcacaaacatgataatcatttcaaccaaacaaattctgaataacgattgatggtgtatattgcaaattcttctatcttccta

SEQ ID NO: 11149 - DNA, 356 bp, Gossypium hirsutum
  Clone ID: LIB3135-028-Q1-K1-G2
gcgacgcgtccatggcggagaaacctcaaccggtcgtcgttcaatactgtcacgtctgccgcttgcccgccgaagactgcgagttcggatccgaattcgataaatgcactccctggttgatccaaaacgcgcccgacctgtacgcggatctcctaaaagaagcgaatgctaaagaagctgatgaagcagctgatcaactacaattcactggcctctcttctgatgattcaggtagtagttcagaagctaagcccgaggaagttaaacgtcttcctggcgggaaaattgaaaagaaagagattaactaagtcgttatcgaaaaggttgtgcggaacaaactcacatgtataactact

SEQ ID NO: 11150 - DNA, 315 bp, Gossypium hirsutum
  Clone ID: LIB3135-028-Q1-K1-G3
gactcgaacccattgattcgacctataacactttctgataggactactggtggttatgggggtagatatcaaaccagtgatgatggtgaacatagtaccagatatgcaatgattgattgagtgaggtgttacgagacatatgggggagtctgttggattcgttatatcctaaaggatttattcatggctcagaactatttaaccgcaactaattctaccggggtcttatctagacgcgccgatgatgcaagatgcaactaggacatgcagtgatgataggtgaatttaatattatatgcacaactgtgacaggat

SEQ ID NO: 11151 - DNA, 389 bp, Gossypium hirsutum
  Clone ID: LIB3135-028-Q1-K1-G4
cttcactttccttcttctcttcttcccttttcctctcttctccttcccctaaactctcaacttcgctttccttcgctttcaaaccttcttcgaacccgtctctttccatttcttcccaactttccaatctccccattttgtccttcaccggcgaaaaaatcggcgaaacttatctcgacctcaaatcagcccctcccgaaaccgctagagccgtcgttcaccgagcaatcatcactgacttacaaaacaagcgtcgtggcacagcttctacactcactcgtggtaaagttcgtggtggagggaaaaagccttaccctcaaaagaaaaccgggcgtgctcgccgtgggtctgcgcgcaccccgctccgtccgggtggtggtgttatcttc

SEQ ID NO: 11152 - DNA, 475 bp, Gossypium hirsutum
  Clone ID: LIB3135-028-Q1-K1-G5
gggacagagagatcgtggaagggatcacttcttcaattccaggaaaggatacgagagacgaccagcatctccaccacttccaccaccacagcttccaccccgtggcagaccacgtgacatgagagaaaggagtagatcaccaatcaggggtgcacctccaccaaaggaataccgtcgcgatatctacatggagcgaggacgagaggatctacgaggaggtgccggacgagacagaataggaggcccgtattaaccaaatggcagaaaagcgtattgggatataaacttttgtatcgattattttaactaataaattcgggatttacagctttttttggttgggtttggcttttacactataaatgcagcttgttatcgttgtaaaccctttttcaagtgttatgaagacagctaagactttatttctcaatgctttggtaaaaacaatgattcacattgctttcctgcattcaaa

SEQ ID NO: 11153 - DNA, 414 bp, Gossypium hirsutum
  unsure (1)..(414): unsure at all n locations; Clone ID: LIB3135-028-Q1-K1-G6
tacagcttccattgtttttcagtagtgaagagctaaaaaagaagggaaatcaatggaggggaaagaagaagatgttagattgggagccaacaagttcccagagaggcaacctattgggacagcagctcagtcccaagatgataaggattacactgagccaccaccagcacccttgtttgagcctagtgagttgacctcatggtctttttaccgagccggaatcgctgagttcgttgctactttccttttcttgtatatctcggtattgactgtgatgggagttgttaaggacaaaaccaagtgtacaactgttgggattcaagggattgcttgggcttttggtggtatgatctntgcacttgtttactgcactgctgtatctcagtggtcatatcatccagcgggacatttggc

SEQ ID NO: 11154 - DNA, 402 bp, Gossypium hirsutum
  Clone ID: LIB3135-028-Q1-K1-G7
tacaactttcattgtttttaagtagtgatgagctaataacgaagggtgatcaatggaggggaaagaagaagatgttagattgggagccaacatgttcccagagaggcaacctattgggacagcagatcagtcccaatatgatatggattacactgagccaccaccagcacccttgtttgaacctagtgagttgacctcatgatctttttaccgagccggaatcgctgaatacgttgctactttcctttacttgtatatctcggtattgactgtgatgggagttgctaaggacaaaaccaagtgtacaactagtgggattcaaggcattgcttgtgcgtttggtgggatgatcattgcacttgtttactgcactgctggtatctcacgtggtcatatcaattc

SEQ ID NO: 11155 - DNA, 453 bp, Gossypium hirsutum
  Clone ID: LIB3135-028-Q1-K1-G8
agctattggaataggataattattcttgtagcttgatgtgagagtgataagagttttgttgaatgttcaatattgtaagtgtatggcttaagtcctgataatattccatggttctatgataattgcctttgtggtattttctttgataggtaacccttatatttcattttattctgcagcaacaaaggactttcatacagatgagaactgttctaaaagtagtggacaactcaggggcaaaaaaggtgatgtgtatacaagcattgaaggggaagaaaggggcaagattgggagacaccataattgcatctgtaaaggaagccatgcctaacggaaaggtgaagaaaggaaaggtggtatatggtgtggtgtgcgtgctgccatgcagcggagtcgttgtgatgggagtgaggtcaagttcgatgacaatgcagatgttcttgttgacaagca

SEQ ID NO: 11156 - DNA, 455 bp, Gossypium hirsutum
  unsure (1)..(455): unsure at all n locations; Clone ID: LIB3135-028-Q1-K1-G9
cccacgcgtccggatttttgaatcgtgatatgttgcaactgtcacaatactctgctgaagggcaagtgcagctctgctctagcaaacaaataattgggttgggttgggttgggtggtttggaattttgaaacacaaaagtgagtgtaaaaagtgtgacgatgattggatttagtaattaagaaaaatagaagatattgttgattggtgttttatgatggatctgggtcattctcttttctacaaaaggcaataatagaacaaggattcttgtgacaggaatgctggggtatgaaacagagttgatgattcagtcttgcaaattggatgttntaggtcttcagtggacccactgatgcttttatgtttggtactgctttgtttaaccccagcaatggcatcactgatgtaattaatttttgggaaatttcaaatggtgttttttttataccagctt

SEQ ID NO: 11157 - DNA, 381 bp, Gossypium hirsutum
  Clone ID: LIB3135-028-Q1-K1-H1
cccacgcgtccgcccacgcgtccgcccacgcgtccggcactgtccatgatgttgttcttgttggtggttccactagaattccaaaggtccaacaacttttacaagatttcttcaatgggaaggagctttgcaagagcatcaaccctgatgaggccgttgcatgtggtgctgcagtccaagctgctatattgagtggtgaaggtaatgagaaagtgcaagatctcttgctcttggatgtcactccattgtcttccggtttggaaaccgctggtggtgttatgaccgttttgattccaaggaacaccaccattccaaccaaaaaagaacaagtcttctcaacctactccgacaaccaacctggtgtgttgatccaagtttacg

SEQ ID NO: 11158 - DNA, 452 bp, Gossypium hirsutum
  Clone ID: LIB3135-028-Q1-K1-H10
gtcgcttggtcgtcttcgggttgccgtacgaagtaggaaaggtttcaaacccacatccaggggtaaacatggaaagaagcatggaaccaaggagttgcggtgaagagtggagaggttgaagacagagatggagaaaagaagcgaggaacagaaggatatcagggaaagacagagacaagtgaaagacaaatttacagcaattgaagccgaatgcgaggaattaaagagagaaactagattcattgttcagcaaactgccagaacccagatcaaactggggcttatgttccgcatattgaaagcaagggaaactggtcacttggatgaagccgcccttctcactcagatgctccgagaaattgtaagatttgagaatgaggaggagaaagaagggtgagggctgtatctcgacgataaactacctatgctctgctgcgaaataaacttgtttg

SEQ ID NO: 11159 - DNA, 426 bp, Gossypium hirsutum
  Clone ID: LIB3135-028-Q1-K1-H11
cgcaaacgcagccgcttttcatgcaaccgcagccgccgcccccgccggaagaaacgcaaacgctgttcatgcaatcgccgccacagaaagaaacgcaggcgcaagttacgcaaccgttgttcatgagaaggagccctagaaatactgataaagatgggaatgccgctttagaaggagaggagcagttgggattaaagaataaatcgccggagcaaaatcggccggctgagccaacatggaggaagcagatgagtcagatcggtttagctgggtcgagtcaggtgaatcggacaggatcggttggttcgagtcagattagtcaggcgagtgaggttaatcggcctcagccgattcgaatgagccagattaatcaaacaggaaccgatagctcgagtcactttaattgggatgagccaactcggacgg

SEQ ID NO: 11160 - DNA, 216 bp, Gossypium hirsutum
  Clone ID: LIB3135-028-Q1-K1-H2
gccaagcttgcattattactaccataaaccatttctttggtctgtaccaaaccgcataagggcgcggagcctcttggctattaaatcaactatacataaccctttattcctcgatgaatagaaagaattccaaaagactcgaccctgatttctttaattcatgtgatgcactagaaaatgctgttatattatgttgaaaaggaaacaataatgtct

SEQ ID NO: 11161 - DNA, 400 bp, Gossypium hirsutum
  Clone ID: LIB3135-028-Q1-K1-H3
aaagaaccctgaaaatccgtttcttccattagaccgaactgctaaaagaattcttgttgctggctgacatgctgacaatctcgggtaccagtgcggtggttggaccagtacctggtttggaggcagtggtagaataacaattggcaccaccatcttggatgccattagagaatctgcaggagacaaaacagaggtgatttatgatgaatacccctcaacaaacaccttagcagggcagtactcttttgccattgtagttgtaggtgaaccaccttatgccgaaaccttaggcgacaacaaagagcttgtaatcccctttaatgggagtgatataatcagttccgttgctgacaaaatccccacattggcaatcttgatatccggaagacccttggtttta

SEQ ID NO: 11162 - DNA, 359 bp, Gossypium hirsutum
  unsure (1)..(359): unsure at all n locations; Clone ID: LIB3135-028-Q1-K1-H4
cccggtcgacnacgcgtccgcccacgcgtccgaccacgcgtccggccatcctatcattgtttttgtccagaaattctttatctaggcatatgagggtcctagatagaggctgatgtgaaatcttgcagctgaatttacagcttcatttccctttttttggcccattcccatgtatagtatgcccttatcgaacttcatagttaaaacaaaatccaaaccctgcatgataagcttgtctcctccctcttatattcaacacttgaacctgcaggagcgagatggtcatgttgcatctggttgttcagtttcagtaggcactatattcttctcttcccttaaagaaaaccatgcaatctctt

SEQ ID NO: 11163 - DNA, 406 bp, Gossypium hirsutum
  Clone ID: LIB3135-028-Q1-K1-H5
aacgaaaagttgttgcatatgatggtgtatacagaacgacaaatactggtaacccacaactggtggaagtgcaaaacagccagcatcagcaacaatatgcgggttattctcagattcatcatgcatcacaatctgttgcacctacctccggcacagctgccacatatgcatatgaattcactgatccaactcatgctcaaatgtattacactcagcctatggcacccaacatgcctcctcagtaccaaaccatgactgcagtagtcttgccagatgcacccacgcaacttccgactgataacatcaagccacagatcagaacttcacagccaatatagatcagtcaagaaagaaagcgacaaaattttgaaaagaagggtttggttatatctttaaaattctgttt

SEQ ID NO: 11164 - DNA, 51 bp, Gossypium hirsutum
  Clone ID: LIB3135-028-Q1-K1-H7
aacgaaacgaatcctaataaatttttatatacctaattacaaatactcata

SEQ ID NO: 11165 - DNA, 460 bp, Gossypium hirsutum
  Clone ID: LIB3135-028-Q1-K1-H9
cccacgcgtccgattccaggttcttcctctccgccagtttggaagttggggaccagaaataactagcaaatttgatccaacaaaagatacatacgtcttatgtcaccatggcatgcggtcgttacaggttgccaagtggttacagactcagggatttaggaaaatatttaatatatcagggggaatacatgcgtatgcaaccaaggtggatccatcagttcctacttactgagatcctcacgtatccattgctcctattttcatgttttcttcacgtgtgtggtttcaggctccaaatttttgggtttgccctccgtggtattatagagtttaacatttcacaataattagcaagtccaaaacttgttattgcttaattatggtggttgtattgagtatctggaattaagtgtatttcgaaaaagttcattttaaattcaataaatatgttaattttatt

SEQ ID NO: 11166 - DNA, 388 bp, Gossypium hirsutum
  Clone ID: LIB3135-029-Q1-K1-A1
cacggtgtaggaaacaacagttttcagctaggttcccaaatatgtcagctggtgctgttgatttgctagaaaaaatgcttgtatttgaccccgaccgacgaattacagttgatgaggcacttagccacccatacttggcatctcttcatgatatcaacgacgaacctgtttgtgccaggccttttattttcgattttgagcaattatcatgcagtgaagatcacatcaaagagcttatttggagggaatctgtaaaattcaatccacatccaatccattaagagaaatcaatctcccatgtagaaatatactgggaaaggcttctttccgcagaattccctatgtgacattgttcttcattgttcatgggagtccttgtcagttgagt

SEQ ID NO: 11167 - DNA, 385 bp, Gossypium hirsutum
  Clone ID: LIB3135-029-Q1-K1-A10
ggtcgaccgacgcgtacgcccactcgttcgcccacgcgtccgttgtcctctcaattaatggacaaaataaaacagggtgtgaaggtgaagaaagtgacaaacgtgactttgaaagtgggattttgggttcttttcttttctttttttctttttctatacttttggggaaaaaaaaggcaagatttcaagaacaataactgaaaaaaaagggaaagagataaaagggaaaaaaactctctctctctcttttttttttttaaatattggaacattaataaagattgtgaagaaaaaaaaaacatatatatgatttgaatggatgcattaaagaaatgcactcactttacataccttatctttttatagggtttaattgtttgaaata

SEQ ID NO: 11168 - DNA, 362 bp, Gossypium hirsutum
  Clone ID: LIB3135-029-Q1-K1-A12
gttgctcaaaattttaatttttaacaaaaaggaaatcatcgcctttctctgtatatgattttctgttagtttagtacaatccaatatttgggtacctacaagaaaatggaggatgattaagaaggattttcgaggctatccttgagttgaatccctacaagactctttttcggcgcaggaaaaaaaaggaagcattgagatatacaaggtgtagaaggattataaagaagagtttgttatgaaaatgggggacaagcaaccaacgaagctagatgaggagcaaatggctcaactacgagaaatattttcttctttcgatcggaacaacgatggtagcttaacacagctggaactggggtcgc

SEQ ID NO: 11169 - DNA, 368 bp, Gossypium hirsutum
  Clone ID: LIB3135-029-Q1-K1-A2
ctgccaatcagtgtctacgctccggagacagtcgggtgcgtggtggttgacaagcaagggcgatgtgctgccgccacctccaccggtgggctcatgaacaagatgagtggaaggatcggtgactcgccactaataggatcggggacctacgcatctgagttatgcggggtgtcgtgcaccggcgaaggggaagcaatcatccggagcacactggcgagggaagtgtctgcagtgatggaatacaaagggttgaatctgcatgagtcggtggattatgtcataaagaatacgttagatgaaggcaaagcggggctgatcgcggtgttcaaagacggggaaatgggatgtgggtttaacaccaccgggat

SEQ ID NO: 11170 - DNA, 359 bp, Gossypium hirsutum
  Clone ID: LIB3135-029-Q1-K1-A3
ctgacacttactgtctaccctccggagacagtttggtgcgtggtggttgacaagcaagggggatgtgcggccgccaccttcaccggtgggctcatgaacaagatgagtggaaggatcggtgactcgacactaataggatcggggacctacacatctgagttatgcggggtgtcgtgcaccgtcgtatgggaagcaatcatccggagcacactggcgagggaagcgtctgcagtgatggaatacaaagggttgaatctgcatgagtcggtggattatgtcataaagaatatgttttatgaaggcaaagcggggctgatcgccgtgtccaaggacggtgaagtggcatgtgtgtttaacac

SEQ ID NO: 11171 - DNA, 432 bp, Gossypium hirsutum
  Clone ID: LIB3135-029-Q1-K1-A4
tgaaggtctaggaaagtttgatgctgcaaaattgaggaagctgcgaccaagtttcaaggataatggaggcactgttactgctggcaatgcctccagtattagtgatggtgctgctgctttaatcctagtcagtggagaaaaggcacttaagctgggattgcaagtgattgcaaagattgcaggatatgcagatgctgcgcaggcaccagagtttttcacaacagcgccagcccttgcaatacccaaagccatttcaaatgctggcttggatgcttctcaagttgattactaccaaatcaatggaaccctttgttgttgtgctttttccaaataaaaacttgttgaccttaatccagaaaaagttaatgtgaatggtggagctgtatccttggacatcctttgggttgcagtggagctcgtatcttggtcaca

SEQ ID NO: 11172 - DNA, 259 bp, Gossypium hirsutum
  Clone ID: LIB3135-029-Q1-K1-A6
tacaaccttgctctcgccatgtcatggcgtcatcccgacaatgtggagcttgagaaagtgggagttgtacacatactgcgctgcgggaactaagccttggaggtacacagggaaggatgctatcatgctaagagaagacattaagatgcttgttcagaaatggtgggacatttacaacgacgagtcacttgattaccgcaccagcgcgcctgaaggagggacagagaccgtgaacctgcaaccgatcctgttggcactc

SEQ ID NO: 11173 - DNA, 418 bp, Gossypium hirsutum
  Clone ID: LIB3135-029-Q1-K1-A7
cccacgcgtccgggagaagccccgactttgcgttaagaaatcagtgaatatcttaagcgggtgcttggcttacgttagctccggcaacaataacagtcggaataacatcatgtacgagattgaaggctcgtattcgcaacgaaattgcgctgctttcgatgataagaggcggttagtagccgaaatcaagcggaaagaagctgttggcggtgtcgcctttggaaccgacgtcttccgccttattgttcggtcgggatatatcacaacggactccgccatggctctacttatccttctcgatcaaatgttcggatcttctagacgataaaaactttctttttcttcaaccgaaaacatctttggtttctatgaactttctccggtcgtccccagtaaatcatttcacttttgtaagaat

SEQ ID NO: 11174 - DNA, 273 bp, Gossypium hirsutum
  Clone ID: LIB3135-029-Q1-K1-A8
atggaaactgacatattatgagaaatctatgtaattgtttgtcaaaaaaaaaaaaaaaagggaaaaataaaaaaataaaaaaaaaaaaaaaaaacaaaaaaaataacaataatgtacaaaatttaaagcatcaaattactaatgaaattgacaatctaaaataataattggaggcccttattaaaaaaaaacaatccgcacgcctctgttgtacaaatttggctattcaatagacgtcccaaatttaattctttggccgggatatataaaatc

SEQ ID NO: 11175 - DNA, 436 bp, Gossypium hirsutum
  Clone ID: LIB3135-029-Q1-K1-B1
caagcttctatttctatttcaagaatcaagattacagtatttgcaaggatgagttcaagtagcagagcatggattgttgcagctagtattggagctgtggaggcactgaaagaccaaggtatctgcagatggaactacacagtaaggtcagttgtgcagcatgccaagaaccatgtgaggtcagcttcacaggccaagaacctctcttctcaatcctcagctgcaatttcaaagggactgaacaagtctaaacaatcggaagagtctttgaggacagtcatgtacttgagttgttggggtcccaactgagccttaaatctgtcaaaatcgcttacaatttagaagaaacatcctttatttgggtgaatcattgactcgtgagtgcaagctttggacattcagaagagggttgacgacgactgagcaatcaaacaca

SEQ ID NO: 11176 - DNA, 373 bp, Gossypium hirsutum
  Clone ID: LIB3135-029-Q1-K1-B10
cccacgcgtccggcaagttctagcacagtgatgaaggcagagaatgggcagtcgagctcgagctcgagctcaagctctaagaagagggggagacgagcaacaacaatattaacgctaccacaaccgcgaccacatcagcctaaggagcggtcgccgttgaccatagccaccttacgattagtgaaagagaaggccgagaaaaggggtaaaaggacgtcacgggctgtctccgtccggcactttgataatactgatattaactattactggttgctccctggatgggttgcggaggagcgctatgttccgtctggccagaagggccttggtagggattataaatattactatgatcctcctgggcacatgtact

SEQ ID NO: 11177 - DNA, 285 bp, Gossypium hirsutum
  Clone ID: LIB3135-029-Q1-K1-B11
acgcgtccgactgattacacattctcatgggccgtcatgatactcgaccatatgacttatgcaggggggccgcataccgaatgtataccacagtggggccttgctgctgttcggggcatctttacttgcatgtcttgctattacgcattatccgacaccgtggtgtgagcaaaacctattttggacgctgctgtgtagccgacattcgagaactcggattacgagcgagacgtcgatggtataactgacgtgcatgatgaatggttcatgcgtgcaccattgacc

SEQ ID NO: 11178 - DNA, 377 bp, Gossypium hirsutum
  Clone ID: LIB3135-029-Q1-K1-B12
caaacaaaggcttccaagcttagctcaggaactgctcttaggcccaccccatttggggggggaaccaaaaatgcttaccctcttagagatggcgtctctttgggcactcccaaatatgcaatgggaaatgaactattgtatgggccagacagagtgacgtacttgggaccatcttcagctcagactccatcttacttgactggagaattccctgaagactatggttgggacactgctggtttgtcagccgaccctgatgcctttgccaggaatagggctctcgatgtcatccatggaagatgggcaatgttgggagcactatgctgcatcacaccagaagtacttgagaaatggcttaaggttgatttcaaggaacc

SEQ ID NO: 11179 - DNA, 292 bp, Gossypium hirsutum
  Clone ID: LIB3135-029-Q1-K1-B2
cccacgcgtacgtccacgcgtacaatcaacatcaatgctgttgctctgatgcattcttggagtatagcttgatttgctgcactacttgcaaaataacgagctgaacccgagctacaataacactagtgatttcaacactaaattaatgatagtcggcgcttggttcttttaaactctaaatataatggaggccaaacatgcctccttttagaaacctaatttggagggctgatgaggccactcattctgactccatgagagacaccttggctgaatgtctgtacactatcat

SEQ ID NO: 11180 - DNA, 398 bp, Gossypium hirsutum
  unsure (1)..(398): unsure at all n locations; Clone ID: LIB3135-029-Q1-K1-B3
cccacgcgtccgtaaagacccagatcgggtggaagcttttcacggccttgtaatggcttattcggagtcgggtcagaaattgaaagaactggaaaaaagaattgaaggggcaatggagaagtgcaagaatgagaagaagaataaagatttcagggatttcaagctattaattgctcaaattctggtcattgaagggagacattcataagctatgaaggtttatgaaggcttggttaaggaggaaccataggattttaggccatatttgtgtatggggattatctacacgttactgaagaagaaagctgaagctgagaaacagtttgaaaagttcaggaaacttgttactaagaatcacccttacaaggagtactcntgtgataacatgatacgcacta

SEQ ID NO: 11181 - DNA, 220 bp, Gossypium hirsutum
  Clone ID: LIB3135-029-Q1-K1-B4
gagaaagagaaacttcaagctagcagtggcagcgagaatgcaatgcagaacatcgcagacgcaccatgagataatactctaattcaactcccactattctgtaccacgaatcataggaatagtattcctaattcaatttctccttccatgtatcacaatccatgttcatctgtaaaaagagtacttaatggcattgttatgaaattaacaactttagatt

SEQ ID NO: 11182 - DNA, 408 bp, Gossypium hirsutum
  Clone ID: LIB3135-029-Q1-K1-B5
cccacgcgtacgcccacgcgttcgaccacgcgtccgcccacgcgttcggattgagcaaggggtcgaggttcaacgaaaatatgaagaactctagcagcaacttagagcagaggcagcagagagggaggcagcggcagcagcgagagaggcagcggtagtaacaaacgtggcagaggcacgagctaaggaggcagaggcagcagcgatggcagcagagcagagcaaaaagtatgatgacctccagctacagcttcagcagatgatgcagatgtttcagcaatcgcaaaagccaccatcttagacattagttttctcattgtaataatgtttttaattttgtcacgtataacattattgtaagaatattttaaattatactttattaagtaataatatcatataactttc

SEQ ID NO: 11183 - DNA, 125 bp, Gossypium hirsutum
  Clone ID: LIB3135-029-Q1-K1-B6
gtttttcttacgtttcaaccaaatacaaacatcaatacattaaatacgcatacgcgccctgctataattctatactacttctaccacaacttactaccaccaatcatacaaatactcttcttact

SEQ ID NO: 11184 - DNA, 450 bp, Gossypium hirsutum
  Clone ID: LIB3135-029-Q1-K1-B7
caatcatccacttctcctctttgaactcaaagtctgaattaacattaaaatcatgggtggtgtcagttatgattatgaaactacctccccagtccccccagctaggctcttcaaggcttttactgttgaagctccaaaggtttggcccacggctgctcctaatgcagtcaagagtattgaggttgaagctaatcctagctctggaagtatcgtaaaaatcaactttgttgaaggctttccattccaatatatgaagcaccagatcggaggacacgatgaaaataatttttcatacagttacagtttaattgaaggtgggcctttgggggataagcttgaaaagattagctatgagaacaagtttgaggcaactgcaggtggaggaagtatttgcaagagctcaatgaaattctacactgttggcgataatgttatcactgaagatgaaat

SEQ ID NO: 11185 - DNA, 355 bp, Gossypium hirsutum
  Clone ID: LIB3135-029-Q1-K1-B8
gagcaccacgatgacaatcctggacagcgcagtgggtgaagtctgacaattcatgcttgggggatattatagctataagagttcatcatctgcttgcgtagctagcttatgctgggcttttagaagagacctttctcaaggtatatgcacagatgtttgcagagcatcaagaaacattgatgatggatcttgcactagctcttgccgtacttatcaacctagctgtcatgattgatcctccttaggacatatgaatagacgattcggctgacacattgaagatggtcgctcatacctctaccgtgtaatggtaagtaagactgacaaggatcaggttgataggattagctatgag

SEQ ID NO: 11186 - DNA, 337 bp, Gossypium hirsutum
  Clone ID: LIB3135-029-Q1-K1-B9
cccacgcgttcgttttttttttaaacgtaggagcatcactaataaataaagattacgacacattatacatatcacatatgaaatacagttagaaagtacagcttctatttctttttctttccccgattatacatggaatttgctgaaaaacaacacaccagcacagcttatttaaccttagctagctactttatctagctgagctgaaaccttctcccactccttcttgcatatcatcatcatcaacctcactgcaccttgttgcagtcagtggaggggctgatgttgtaaggaagatggagaccacatttagcaggtaggccggctgcgagattga

SEQ ID NO: 11187 - DNA, 344 bp, Gossypium hirsutum
  Clone ID: LIB3135-029-Q1-K1-C1
accacgcgtacggaaggactcgccgttgctgttaaaagaagggcaaaccgcgttcaaattgtacgcgggtggacgaagatactgccagggattggtggcaacgattgagttaaagagcagacatgatctgatatctagattgagtaatttggtggtcccgtgtaaagatgaaattacttgttgagcttatatgaatgaccatacaattgatcacgtggtaatcgtgggtgcaaataagaaagcgctctacgggatgcaaaatgaggtgagagatttacagagattctgcgggttgatgccgactcctagtgaaagaaaaagtggtgaggatgaactatccgtca

SEQ ID NO: 11188 - DNA, 325 bp, Gossypium hirsutum
  Clone ID: LIB3135-029-Q1-K1-C10
tccacgcgtccgcagaattcaggtcaaatagctcctttggacaagatcatcagggggaaagagaagtatcgctctcgtgtcttattggatgagaccaactcatttggtgtacttggccgtactgtaaggtgtctgactgaatactgtggggctccgattgagaagatagacattgtctctgctgccatgggacattcatcgtcaacataaagaggattctgcactggaagtgctcgagtcattgatcatcaacggctgagcagttctggctacagactttactgcataatgacccccatatctggcgtagtgctgcaattactgc

SEQ ID NO: 11189 - DNA, 366 bp, Gossypium hirsutum
  Clone ID: LIB3135-029-Q1-K1-C11
ctttgctttctttgtattagcagcttgtgtagggggaaaaaattatgaagagggtttcctttgttgccttgtgtgtggtggcactcgcggtggtgctgttttcgggtgaaagtcgcacggcggaggcagtgacatgtaatcccgtggagcttgccccctgctcgccggcgcttacgtcgtcctcgcctccatcaagcgcttgttgcagcaagctgaaggcgcagcagccatgcctctgtggatacattaagaacccatctcttaaacagtatgtcaacagtcctaacgctaaaaaggttgcttcgacttgtggagtcccatatcctaagtgttaaatggtgcttaatggtgtatctactatctact

SEQ ID NO: 11190 - DNA, 414 bp, Gossypium hirsutum
  unsure (1)..(414): unsure at all n locations; Clone ID: LIB3135-029-Q1-K1-C12
gttttccactctatgcttttgtctaatgttgcttgttgtttgttcctagggagtgggcaacactctgaaaagacattatgagacttaccttttagagtatgaattggctcatgatgatgtcgatggggaatgctgtttgttgtgtcacagtagtgcagcaggtgactgggtaaactgtggagtttgtgatgagtgggcacactttggctgtgataggcggcagggtcttggagcctttaaggattatgcaaaaacagatgggctggagtacgtttgtccacactgtagcatctcaaatttcaagaagaaaccccacanaactgtgaatggttattgacaaacctttgactcactttagattccattctacacaacttagaaatatctctcttttagtttcacttttcaatcttt

SEQ ID NO: 11191 - DNA, 331 bp, Gossypium hirsutum
  Clone ID: LIB3135-029-Q1-K1-C2
actttattcgttgcccctgtcttattcaacctttagagacacgattttatatagccgcaagtctctcacagttaatgaggcttatgattctttaacctcatatgataagatgaaacatcttatggttaaaaccgactctcagggagagggtctcattgtttgtgggagacaagatcggaatgctgatgatgatcgtggaaggacacaggaacggaattctcgcggtaaatctaagggtatatcgaagtctttaaaatagaggtaaaacttataccttcttgcaaaaggaaatgacacattaaaatatgaaatgttataaagctaccagaac

SEQ ID NO: 11192 - DNA, 450 bp, Gossypium hirsutum
  unsure (1)..(450): unsure at all n locations; Clone ID: LIB3135-029-Q1-K1-C3
accatacgtcctgacgatagattactcaatctgaaaagacaacactttatatagacccaggtaatcgcgagtntaatgacgtatatgaatctttaacctcatatgataagatgaaacatattatggctgaaaccgcctctcagggagagggcctgattccttgtgggctacacgatcagattgctgatgatgatcggggcaggacacaggaacagaattctcgcggcaaatctaagggtctatccgagtcttcatatcgaggtcaaacttataccttctgcaagaagaaatgacacattaaatatgaatgttataagctacagaacaagatcaaaagggaggctacgaatcaaaagggaaaacaaccagaattctggtgaaactgatgttgtagaagactacagcgatgatgaatttctagtcttttctatcaacaattctaaagtgagc

SEQ ID NO: 11193 - DNA, 453 bp, Gossypium hirsutum
  unsure (1)..(453): unsure at all n locations; Clone ID: LIB3135-029-Q1-K1-C4
gggaggacgagctaagggtcgtcttcatagatgggactttgaaacagaagaggaatgggcgacgtacaatgagcagaaggaagcaatgccaaaggctgcattccagtttggtgtgaagatgcaagatggaaggaagacaaggaagcaaaacaaggaccagaagctcaacaacgagctacacaagattaacaaaatactggcaagaaagaagatggagaaagaatcaggtggtggtgaaggtggaagtcatagcgatgatgtacagcctggaaagaaacttaggatatcaggttaaaaagttccagttcctttaccagaaaggtaaagaaaagctactatttcttggagctgatgtgttaatttgtatgaaagtaggtcattggcaaagagtgcnaaaattcatgaaaaaatcttttttagaagcattgaatgccaacttaaggccggttttat

SEQ ID NO: 11194 - DNA, 419 bp, Gossypium hirsutum
  Clone ID: LIB3135-029-Q1-K1-C5
cccacgcgtccgcccacgcgtccgcccacgcgtccgcccacgcgtccgtgcaaacgatggctatcttttctacatcaatggctgctatgctccttcttctagggctcttcgctgcaaacttgtatcctactgctgcacagattggtgtttgctatgggatgcttggcaataatctcccaaatacatgggaagtcattcaactttacaaatcaaacaacatccggcgattgaggctctacgatccaaatcaacaagcattacaagctcttataggctccaacattgaagtaatgataggtgttcacaaatgatcaacttcaaaacctcgctgacccttccaaagcacgatcatgggttcaatcaaatgtcgtagcttactggccgagtgttacgctccgatacatagctgtcggtaatga

SEQ ID NO: 11195 - DNA, 316 bp, Gossypium hirsutum
  Clone ID: LIB3135-029-Q1-K1-C6
cccacgcgtacgcccactcgtccgtccacgcgtacgctcactcgtactttcaagcgacgggtatcttttgtacatctatggctcctatactccttcttatatggctatatcagttcaaacttgtatcctactgatgcacagatcgttgtctgctatgggatgctaggcattagtctccctagataatgggatgacattcaactggaccaatcatacagcatccgtcgactgaggctctacgatccatatcaacaatcattacacagctcttatgggctctaacattgaacataatgttatgatgttccaaatgatc

SEQ ID NO: 11196 - DNA, 463 bp, Gossypium hirsutum
  Clone ID: LIB3135-029-Q1-K1-C7
gcgattttgcgcaaaatctttgatgggattttcttatagtacttctttgctgaaacttgaaggctttgttttctctttcatcctacatgttgtggtttagtttcaagtattgaaacacaaagaatatgacttgttgcattatggatgtgagacttgggctcttattcctctttgtattgggtgcaagctgggtttgcgatgctagacaactagaagccgctccggtagtactctctggtgcatcagttgtgcagacaaaccaggggcaagatgaggaagtagtagaaaacattgtttggaaggacaatgtgtgcacattgtgtgaggaatttgctactgaggcaattaatttcctttcacaaaacaagacccagactgagatagttgaggtgcttcacaagagttgctctcgtattccttcttttgagcagcagtgcatcacactggtggactactatgttcc

SEQ ID NO: 11197 - DNA, 466 bp, Gossypium hirsutum
  Clone ID: LIB3135-029-Q1-K1-C8
attactcgcaaactctttcatgaaacaaactcatagtactgcctatgctcgaaagcggtgaaggcgttcgttttacactttcatacctacatgtcgtggaatagcatcaagtatgtaaacacaaagaatatgcattgctgcgttatgaaatgagatacatttacctcttacaaatcttttaattgcctgcaacctgcttttaacatgctagacaactttaagctcctccggtagtactatgtgtatcattagtaacgcacaccaaccagggacacgatgtagctgtaacctaaaaaaatagtttggaaggccaatgtgttcacatagggtaacgactctgctacttgaagaaattactccctttcacataacaggacccatactgagatcgctgaggtgctttacaagagttgctctcccattcctacttttgagcagcagtgcatcacactggtgtactactatg

SEQ ID NO: 11198 - DNA, 227 bp, Gossypium hirsutum
  Clone ID: LIB3135-029-Q1-K1-C9
gttaattctagctatcattcaacatcatttatctttcatactgacccttgcatgggccgcgtcgttcactgtacatgaatgcatctatgccaaaagatccatcatcagtttcgtgatgcagcaacaaaacctaaatctcatctatgatgcaaccactgatcattatcaaaccattttaatacaatacatgaacacacaactgagcccacagaatatcacccactcat

SEQ ID NO: 11199 - DNA, 376 bp, Gossypium hirsutum
  Clone ID: LIB3135-029-Q1-K1-D1
cccacgcgtccgaccacgcgtgcgggcggctgaatagtttattgtttacattgcttttcgttccccgctccactatctacagtgtgctgtgtcatggccagcgtgtgagacccaagagtggcagcggtacacacgagagtattggaggccatgcatgctaggaaggtctgcacgagtgtcctaatatgatttggaggtgatcccagtgcattcaaatggaactgggcttgaagctttctgagtatagcttccaatcattgttctcgttctgatagaaattccgtagtgcatgaatgaatgaatatcaatattttattttgttaagaatgaacgtgccttgggtgagaaacaagcctgttccgataattttattcta

SEQ ID NO: 11200 - DNA, 191 bp, Gossypium hirsutum
  Clone ID: LIB3135-029-Q1-K1-D10
cagacgcgtacgatgatgtgcaagtgcaatccaaagcatgattagtacattcctggctacctgacatatttgtgtgacacgtttctcaacgatacaatatctgttgttgctaccatcacatcgccttgcaccgagcagtgtgctgaccggcccccaacagatatctaccgcacaataaactatcatctccc

SEQ ID NO: 11201 - DNA, 307 bp, Gossypium hirsutum
  Clone ID: LIB3135-029-Q1-K1-D11
atgatagtgacgttcggaagaggatgaaagagatgagtgatcggagtaggaaggctttgatggacggtggatcttcacactccacgttatgtcgttttattgatgaagtcgtgggcaacatgccatgaaacttcagcacattgccattgctattattatttctaaaataatgtattcataatcaagatttagcttagcttatttaatatacttatattagaaatatataaatttggtacgctcattttgtgataaaatgtatatatgttgccatttctcctaatgcaggagaggggtttctttatag

SEQ ID NO: 11202 - DNA, 324 bp, Gossypium hirsutum
  Clone ID: LIB3135-029-Q1-K1-D12
cccacgcgtccgctgagttaatactgtagagaagagaatgatgatggcatgattgaatatcgagaaagattgttaggagagtattgcggaagtacggtaagcttgggttggttggacccatcgtcatccacaagctgacatgcgaacctccccaatgaagatatcgaccacacattgtcgtacgtacttccatgctgttgctggtgaatggtcagttgttctgtcttttattatatgagtgcattactaacaaaccacgataaaaaataacttatatccaaatcttaaaaataatattattggtggaattattatgagtttaga

SEQ ID NO: 11203 - DNA, 394 bp, Gossypium hirsutum
  Clone ID: LIB3135-029-Q1-K1-D2
cggacgcgtgggctgcgagacgcgtttgtgaaacagacacaggggttgccgagcgcgagtggggtggcgttgttcgacacgtgttacgacttgtcgtcgaagagcagcgtgaaggtgccaacggtgtcgctccatttcggggaagggaaatcacttgatttaccggctacaaattatttaatccccgtggactcctcgggaacgttttgcttcgcttttgctcctacgtcgtcgtctatgtctattattgggaacgtgcaacaacaagggacacgtgttagcttcgaccttgctaataatagggttggcttatcttctcataaatgttaacgacactaattaatttaataattaccctttttcttattgctgctgtaatatgagtaacgctttt

SEQ ID NO: 11204 - DNA, 285 bp, Gossypium hirsutum
  Clone ID: LIB3135-029-Q1-K1-D3
cccacgcgtgcgctgatacatacggaaccgtttctagagcatgccatggcactcacgtgtgagatgagaccggctttcactgtcctgcacgatattgcattaagcagagatcttaagacgtccctgtctgttattgctggattatgggtcttgcctattgtggcaagttcgagcaacttcatgactctgacctacataggcaccgtactacttcacactgtacctgtgctgtacgagaagtattaagacaaagcggatcccttcgccgagaacgcaatgcctgag

SEQ ID NO: 11205 - DNA, 375 bp, Gossypium hirsutum
  Clone ID: LIB3135-029-Q1-K1-D4
ggaagaccttggtaaggctctagagatagttgctgagaacaatccatgctttcaaccaacggcacaggaggtggatcttgatatatatacccagagtgaattaacgttgtggagattgaaggtttttgttcaagataaactaaaacttgctggaatgtgctctgaagctgtggtctgttacaacatatacaataatgagaataccatcaagatgcaactcgatacgaagaagagagatatctgacgcgcttacaaagaatgccataaagaggaataggaagctctctactaactcatgagcaagcactgttgcatgctagtattatactggatttgtccttaaacctgtgaagttgcccagatgctgactattat

SEQ ID NO: 11206 - DNA, 463 bp, Gossypium hirsutum
  Clone ID: LIB3135-029-Q1-K1-D5
ctggatttgagggaccatggactaccaaccctcttatcttcgacaactcttacttcaaggagctcttgactggagagaaggctggcctgttacagttgccaactgacaaagttctcctttccgaccctgttttccgtccattggttgacaaatatgcagctgatgaggatgctttctttgctgattacactgaagctcacctgaagctctctgagctaggatttgctgatgcataagctgatgatgattgcaaaaataggaagaagccaacgacacagatgttttaggttttgttttctctctaaagttggcttaaggaatgaatttggggaggtttccgagacaagcttttttcgataattttattctaaactcacattccccatcttgttgttcgtagctgttgcattttctttcttagtggatgctccatagatatgtttggtgaatgcattccttaaag

SEQ ID NO: 11207 - DNA, 234 bp, Gossypium hirsutum
  Clone ID: LIB3135-029-Q1-K1-D6
aaaaaactgaagtacacaacgtcgtgctattaatgatatctctgaggctctatacacagccgcggctcttaatacgacgatctattgacaatgacgtgctcggaaagaacccaataaaaatggggtgaagatatttttatctatggttggaatctgcatcgaatgacaagtatgtctcacgatgcagagacactgaatcctgaaaggtggcccttagatctaccgaatcctaat

SEQ ID NO: 11208 - DNA, 443 bp, Gossypium hirsutum
  Clone ID: LIB3135-029-Q1-K1-D7
tccacgcgtacgtacacacgtcctgcgagatctctaacactctcaaaagttctggcagggtgattgcatccgggaaagtaccatacccgggttcactgaatgcaagcgactcgactatgttggacgttgcattgaatgtaccgcatagcgtattggtaagcttgataaagtacattggttcaaactgggatatagactatgaattggaagtgggactcaccgtggatcttcctatctttggagacctgaccatccctctctcataaaaaggagagatcaagctgcctactttcaaagacctcttcttttgacttatatgcatccctcatgtattctttcttttccgaaacttgaatagtatgttaaaaatacgatatgtgctgtaggttgaatagattgatttacccgatcgaggtaatattgcatctttttttttaataaag

SEQ ID NO: 11209 - DNA, 455 bp, Gossypium hirsutum
  unsure (1)..(455): unsure at all n locations; Clone ID: LIB3135-029-Q1-K1-D8
ggggtagtaattgctactgagaagaaattgccttcaatcttggttgatgaaacctctgtgcagaaaatacagtgtctgacaccaaatattggagttgtttacagtggtatgggccctgattttcgagttttggttcggaaaagtagaaagcaggcagaacagtatcatagattgtataaggaaccaattccagtaacacagcttgtaagggaaactgcagctgtgatgcaggagttcactcagtctggtggtgtaaggccttttggtgtatctctactggttgctggatatgatgacaatggtccacaattgtatcaggtggatccatctggttcctatttctcatggaaagcctcagcaatggggaaaaatgtctcanatgcaaaaacatttcttgagaaaagatacactgatgatatggagcttgatgatgctgtgcatactgctattttgac

SEQ ID NO: 11210 - DNA, 441 bp, Gossypium hirsutum
  unsure (1)..(441): unsure at all n locations; Clone ID: LIB3135-029-Q1-K1-D9
cccacgcgtccgcccacgcgtccgcggacgcgtgggccttaatcatattatcaagtgcaaggaatatgaagtgtctcacaccagtatctgcgctagatgatgagtgcggattcctggcagctaacctttacgcgaagtgtgtttggggaggatgccttggtaaatttgagcgttgagaaacaagcagatgggaaacttagtgggtacatcaggataaggagcaagacccagggtattgctcttagtctcggggataagattactctaaaacaaaagggaggcggttgatctgtgggatgttgacatcatttgtttaaccaatactggtagtcattctggttttcgcttttgtcagctgctgcctgtctcaatctcctttgaaatgcanaaaattattactgatctaaaaatgcaggtactttgcctgcattttaaagatag

SEQ ID NO: 11211 - DNA, 113 bp, Gossypium hirsutum
  unsure (1)..(113): unsure at all n locations; Clone ID: LIB3135-029-Q1-K1-E10
gnaaaaaaaaagagaanngaaccgnnaaaaaaaaaacggaagccaagaaaaacaagaaaagggaaagggggnaaaaaagaaaaaaagccaaggaagcgaagaaaaagcggacc

SEQ ID NO: 11212 - DNA, 304 bp, Gossypium hirsutum
  Clone ID: LIB3135-029-Q1-K1-E11
ctttagttggtatagagagcatttgataccgtatcgagttttggttggtttgaaacattgttcacgtcaatttttttgcaacttgaacacttttagtttgcaatttcaatagattcatttctcatttaaaaaaaaaaaaaaaaaacaaaaaaaaaaaaaaaaaaaaaaaaaaaaaaaaaaaaaaaaaaaaaaaaaaaaaaaaaaaaaaaaaaaaaagggaaaacaaaaaaaaaaaaaaaaaaggggggggccgttttaagggacccaagtttacttccccgggcttgcgaagttttaatttttt

SEQ ID NO: 11213 - DNA, 401 bp, Gossypium hirsutum
  Clone ID: LIB3135-029-Q1-K1-E12
gaactcgcagagtggtcgagcggcgaaaatgactccgacgccgtcatcaacgtgtcgtgtgaggtggtgttattcgaacacttgctttggatgctagaaaatgctgaccctcatcagcccgagtctttggcggagcttgtcgagttttacgcttgttgatcatatgacagttcccatgtggtcgtttgcatggttcgcaacttgtacattatgtaaggatatttatttatataataatgcatgtgattaggcggtgtagattaagaaacaagaaatgattgtagagagatttaaccaagttcacgccggctaaaccaaaagccctgtcggaaatcatatttgtgtatcattgttgttcatttttgttatataataagaattgaagttcatttttcttatta

SEQ ID NO: 11214 - DNA, 379 bp, Gossypium hirsutum
  Clone ID: LIB3135-029-Q1-K1-E5
cacattgcccctaaaacgagcattgagtttatcagaacatctggtactgcaacgacttaccctagactttgtggcgaatgtctgttaacacaggctagcatgatccaaacaagaccgcaactcattggccatgcagccctaaacgtgaccctttcaaccgtcaagtcaacctacgccataatggtgaagcttgctacaagccatggattgaagcctacagaggtgggcgccatgcaagattgcgtggaggaatcgtaggacacgatcgatgagctgagatagtcaatcatcgggatgggtcagattaaaggctccaatttcggactaatgattagcgatttacagacatgggttagcgctgttttgacggatgagaaca

SEQ ID NO: 11215 - DNA, 291 bp, Gossypium hirsutum
  Clone ID: LIB3135-029-Q1-K1-E6
gcaatatgagttgacgctagcatttatcatacaacatcttgtggcacttcaaggacttgggcggaactttgatacgcatctctatttttataatacatcatcaatcaatcaagctgtcattttatgtaacacacaactataagcgtatcccttaccacagacaagtcaaactactaactgaacgttatgctcactacatgccaatgtttctatccaacagagataggcaccattcgctattgtgaggagtagtcctacgacacgacctatcacctcagatagttaatcata

SEQ ID NO: 11216 - DNA, 366 bp, Gossypium hirsutum
  Clone ID: LIB3135-029-Q1-K1-E7
taataatgaactagcaagcatatttactcatatatgaacgcgcaacctcaaaggcatgcagcaaaaatgagagcataaaaaccactattatacatgaacttgcttataacgagttttctgaacatgattcatattttcatgcccttgatcaacagctgaatcaagaagctgctatcctagactggaccaaatctagcggccacgctttaattggaatcagacactccgcgaactatgaaaaatattatgatgaagatggcacaaattatcagaacgttggtggaaatatgtcaactttgctggaaaatgcccgcgcgtcttctgtagctgctgcctttctacgaacgaagaaacactcctgccaat

SEQ ID NO: 11217 - DNA, 442 bp, Gossypium hirsutum
  Clone ID: LIB3135-029-Q1-K1-E8
cccacgcgtccgcccacgcgtccggatttttcttggttagcatatgtctcagaggcctagcgttccccactcttcttcaatagcttttggtctccattctcatctcctggtttccagtgagatgaaccctaattccaactggtcttaatagttccatctctttctttttcttctattgattttttgtttaaacttcttttatttcctttttgaaacaaagtaattgccttgttgatttgcaagcaaattttggtaaagttcttaagtatttgagtttagatcttctttgagagtgccgctatgggagtgaaggcgtttgttgaaggaggcatagcctcaatcgtgggccgggtgttcgacccacccgcttgatttgatcaaagttccgattgcacctccagggtgaaagccatgttcccaatcccgctgttcaaacactccg

SEQ ID NO: 11218 - DNA, 384 bp, Gossypium hirsutum
  Clone ID: LIB3135-029-Q1-K1-E9
caaaagcttcagaattgcaaatggagattctttctcaacgaccatcttctttctcaactttgaatcccaacgctccattgtttgttccgttagcgtatcggacggtggaggatttctctgatgagtggtgggctctcgtccaatcctccccgtgtttccgcgactactggcttcaagaacgtttccacgatccccaaaacgacgacgccgatcttctttttcccgacgatcttgatgccgtctttgacgattacgacgactttttcgttgaccctacctgtgaagggaaggaagaagatactcaaaaggaattggtacccgttggagcattcaaatggcggaaggggcgagttgtgagcgagtcaactaggtttcttgagaaag

SEQ ID NO: 11219 - DNA, 336 bp, Gossypium hirsutum
  Clone ID: LIB3135-029-Q1-K1-F1
ggctttaataagaatcatggagaagaaatatctctccgtcttcgaaccgatgacctcaaaggattcaggaaatatgagagcataaaaaaaactcttctacatgaacttgctcatatggtattttctgaacatgattcaaattttcatgcccttgataaacagttgaatgaagaagctgctagcctagactggaccaaatctaggggccacgctttaagtggaatcagacactcggagaactatgaagaatattatgttgaagatggcagaaattctcagaaggttggtggaaatatgtcaactttgctggaaaatgcccgtgcgtcttctgtagct

SEQ ID NO: 11220 - DNA, 354 bp, Gossypium hirsutum
  Clone ID: LIB3135-029-Q1-K1-F10
cgcgttcggccacgcgttcgggcaaagaaagaagaatggcgtctaatgcggcgggtccattctggcgtgcagccggcatgacttatataacctactcgaacatatgcgccaacctcgttaggaactgcttaaaggaaccttacaagactgaagcccttagtcgtgagaaaggtcatttctccatctccaagtggacggatggaaagcctgaaaagcctactcttcggtcagactcacctgaagaatgagatgcaagtttggtcatggaagcttctaaactggaaggattttattttatttttaagaatttctggtatggctgaaacataagaacagatttcaggctgagatgat

SEQ ID NO: 11221 - DNA, 342 bp, Gossypium hirsutum
  Clone ID: LIB3135-029-Q1-K1-F11
tcataagtctatctgtgagctagtatactgctatttgtggatggaccttgcgaaccacgggtatgggtagtttgtgcgcgtagccgaacggatgagaatgatgacgctatgatggccgcacctgaagctcatattcgatgtgttggaatagctcgccaatctgttgaggtttgactgatgcagcatatgggatgggaagaacgtgaatggcttgggaaagataaacaagggaatcaaagttacgttagaattaaaaacaaacaggacacaattggggttggattggaaaagcacgatccgtgggctttcgatacagctcagtttgatagtattctcaagaga

SEQ ID NO: 11222 - DNA, 336 bp, Gossypium hirsutum
  Clone ID: LIB3135-029-Q1-K1-F12
tcttaactctgtgtttaagcttgatttctgttatttaaagctgagccaaccgtaccacgggtctgcatcgttagtcctcgtagcgcaacggactataatgataaccctattatggccgcacctgaagctcctattcaatatgttagcatacctctccaatatagtgctttttgccttatgcaacaaatgggatgggaagaccgtgaatggctttgtaaagataaacaaggcatcaaaagttacgttagaattaaaaacaaacacgacacaattggggttggattggaaaagccgtatccaggggctttcgatacagctcattttgatagtattctc

SEQ ID NO: 11223 - DNA, 399 bp, Gossypium hirsutum
  Clone ID: LIB3135-029-Q1-K1-F2
cccacgcgtccgtggataatgaccgatggatttcatcgacagcttggaggtaaaaatcaggttcttgacgatccgtaccgaagatcatactctctcttcctacctccgatgctgatgaatcccaccgtaagagtattttcttcgcacgaccgtagccactattatccttagtactattcgccggcgactgcataactatctttcacgaatccaaaatagaaaatgtgacacttgcagaactatgattataattactcctttcctttataaatgctggagaaaggttgtagcaaaatgtaaataattaagtttgaagctccttcagcttctgaagctgctgcctttcgtcgtctgataaacactcctgccaatgtggacgcatctgaaacacatgatgag

SEQ ID NO: 11224 - DNA, 336 bp, Gossypium hirsutum
  Clone ID: LIB3135-029-Q1-K1-F3
gatccgcatccgggtccggatacggaagtgtgagtgggagtgggaatggaagtcgaggtggtataggtggatgagacagcatatcatactctcttttacataatcttactcatatgaaatttactgaacataaatcatattttcatgctcttgatcaacattttactgaagaatcttctagcctatactcatccatatctatcagccacgctttatatagaatcagacacttgcagaactatgaataatattactccttacattgctaaaatccttaaaaaagtttgtagcaatatgtcaaacttttctgtaagatctccctgcgtcttctgtaac

SEQ ID NO: 11225 - DNA, 451 bp, Gossypium hirsutum
  Clone ID: LIB3135-029-Q1-K1-F5
gcttaaaaccgcaaccgatatgatgaccaatatgccaacagaagggctccaaagaatgtgggaaatggcagcttctattaaaggaaaagattctatcccagcatcaacagctgtaaacggtagcaggctcgattcagatgctgagataacatatcccacatctcaaacatcatccatcaccagtgaaaatgttggtttcggtgaaactgcctcttctagttctagtcgttttccaaattcaaagaatcgtcagtcgagttttccaccaacatcaactgctgatctacaagaacagatgagaaatcaaatgaaagatccagccatgcggcagatgtttgcatcaatgatgaaaaacatgagtccggaaatgatggcaaacatgagcgagcaatttgaaatgaagctttctcgggaagatgctgcaaaagctcaacaagctatgtcatcctta

SEQ ID NO: 11226 - DNA, 232 bp, Gossypium hirsutum
  Clone ID: LIB3135-029-Q1-K1-F7
ttcgtattaaaaaacggcctggctagaacataggatcctcatgcatacatatgggagtacggacgtataacggtggtcaaaccatctattttcttaatacattactacgagagattataacgctgtttacattatgaagcttgctgagctaagcatacatgattatggaatgactaagacgtacataggatcattatcatagcccattgctggacctttaccattgtctacc

SEQ ID NO: 11227 - DNA, 372 bp, Gossypium hirsutum
  Clone ID: LIB3135-029-Q1-K1-F8
cccacgcgtccgcccacgcgtccgaaaaagaaaaaaagaagaggaaaatggaggcaccagagacgattcagcacgaaattggaggagtccagaacgacgcgctgcgattcggtctctacggcgttaagagcgacctcgtcggatctcaccctctccaatctgcttacgaatcagcaaagaaaacgcaggaagagatgaagaggaaagtcctggccaatacttatgggacagcaatgccactcaaaatggatctcgataggcaaattctctcgcggtttcagaggccattgctaccatcttcgatgctagggttggaagcgatgacaggaactttagaataatttggcttcgaggattatctgaatgatcctc

SEQ ID NO: 11228 - DNA, 344 bp, Gossypium hirsutum
  Clone ID: LIB3135-029-Q1-K1-G10
cccacgcgtccgcccacgcgtccgggcggttgaatagttaattgtttacattgcttttctgtcccctctccactatctacagtgtgctgtgtcatggccagcgtgtgagacccaagagtggcagcggtacacacgagagtattggtggccatgcatgcgaggaaggtctgcacgagtgtcctaatatgatttggaggtgttcccagtgcattcaaatggaactgggcttgaagctttctgagtatagcttccaatcattgttctcgttctgatagaaattttgtagtgcatgaatgaatgaatataaatattttattttgttagtaatgaacgtgcttgagggg

SEQ ID NO: 11229 - DNA, 328 bp, Gossypium hirsutum
  unsure (1)..(328): unsure at all n locations; Clone ID: LIB3135-029-Q1-K1-G11
attcnggattcgacgcgacgcctacgcgctacggtctgatgcacacaatctctacccttcattttacgccttgaccatacattttatggttggtttcaatacgaagttgcctactgatgaatatttcatctaggaaaaccaggaaaagctacgcttactactggatatatatgaggataggctgtcaaagaacaagtacttggccggcgatttcttaagccttgctgatctgaaccacctaccatttactcagttcttgtggcttcaaattgcaaggtaatacatgataaccagcacgaagcaaataagtgctttgttggattatatt

SEQ ID NO: 11230 - DNA, 300 bp, Gossypium hirsutum
  unsure (1)..(300): unsure at all n locations; Clone ID: LIB3135-029-Q1-K1-G12
gcncctggtcaagctccatcgtccaggtggttgctgttctctgtcccgtcccttaaggcgccccaaagggtaagagataacactttctattcttgtgtatgttgcctttagaaatgggcctgcgtttacattcttgtagaaacactttggattctgctgtagaagggttctttgattcagttaaacagtttgaatcgcactttgacaaagctatgaactggttgagaatacctggttggaatctcataatttctatttagttgcttattttatccaaaataatcttcacacctttgagac

SEQ ID NO: 11231 - DNA, 306 bp, Gossypium hirsutum
  Clone ID: LIB3135-029-Q1-K1-G2
gcctgagaaacttgatgattctaaaagggggttggcaaatttaattgttgcaaaacttcgccagtagagcaagagccgctgaaaagcccatctaatcttcaagagaacgggatcctataaaaataagcgtacggtcatccctggagctctcccgggccatatgactgtccgaatctaaggaacacttctgcgggtatagtgaagctaaaagaaaaaactgacagagcagtcaaaaagcaagtcttgctgcagcaaggtctcataactcggtgaagtctatgagaatgccaagacaaaatggagaga

SEQ ID NO: 11232 - DNA, 374 bp, Gossypium hirsutum
  Clone ID: LIB3135-029-Q1-K1-G3
cccacgcgtccgacgatgttaaactcaacatttctcctggttcttcgtgccattgtaatgaaccagggtggtttagggtttgtttcgctaacatgtcggaagatgcacatgaactcgccatgcaaaggttaaaatccttcgttggttccattaaaaaacataatcaccaagagtcggaaaagttaaggaaagaatcccacattgggaaatggattttcaggttatcgtttcagtccttcaatgaacaagatcaacgataaagtcattcaagccataacttttacctagtgtggacatgcatatatgtatttgataggagagcttagagatccaacccagactggtgtcaactgcattcggtgtgaacatattat

SEQ ID NO: 11233 - DNA, 313 bp, Gossypium hirsutum
  unsure (1)..(313): unsure at all n locations; Clone ID: LIB3135-029-Q1-K1-G4
ctgctttgatctttctttttattttatattagacggagaaagcatttctcaaacaccccagaggtgtttttaaggtgaactagcttcttccatgtctttattaattcttggttttgttgatttcatttttaaattattggtgtttttcgagatctgggttaaattagtgatggtttttttttctaaaaaaaagaatgcatctattacaaaatattttaaagttaataataaaaaccatttatngggtactttaaaggagaatgtccttgaattcatctgggttgttttgaatgaacaatgcttcttttttttc

SEQ ID NO: 11234 - DNA, 67 bp, Gossypium hirsutum
  Clone ID: LIB3135-029-Q1-K1-G5
gaaaatccattgacctgtttctgttaaaaaaaaaaaaacaaccaaaaaaaatggggcaaggggaaat

SEQ ID NO: 11235 - DNA, 304 bp, Gossypium hirsutum
  Clone ID: LIB3135-029-Q1-K1-G6
gcgatcggtttcgtagtgatgggattcgtcggattcttcgtcaagctcatctttattccgattaacaacatcatcgttggctccgcttaggaattgcaggctcgtagaaattggtgggggatatgaccagttggcgtagttgcagattctcatagaaaatgaatgttagaatgcagcagttgggggctgtccctcttcccttctcattttacattttattagttgaaccaatagtcttgaatctaaagtaaactctcttggaatttctttgagcaatttgtaatagattatggttaatttttgc

SEQ ID NO: 11236 - DNA, 457 bp, Gossypium hirsutum
  Clone ID: LIB3135-029-Q1-K1-G7
cccacgcgtccgcttaactcatccatccggaaatttcccaatgcctcattacacattctggagagcatcgtttgatgaattcttcactctcctcaccaaatactgtgtcaccaaatacgagtcgataatacaatcgatacacaaccagtctctaccaaccacagaagtaattggttcagaagctataagacgtgaaatgccttgcgagctcttacgtgctagtctccctcacaccaatgaagctcaaagaaagcttttaatggacttctcgcaatgttctgtcccggataacggatccaactcgcctgccggaagtaatagccaaataaactctgaatcagtaaggggctaacctaaaagaaaaaaacgttttagaggtcttttacactatgggttcttggttgaatggcacccctttttttattttttattatatcattttctttcttgtcctttt

SEQ ID NO: 11237 - DNA, 396 bp, Gossypium hirsutum
  unsure (1)..(396): unsure at all n locations; Clone ID: LIB3135-029-Q1-K1-G8
cccacgcgtncgttatagattcgtgctatgcccactgtcaagtacgaaagcagatacaagggtcaagcgatagttctacggttgtaatcaacatgaaaattgccaaggctgttggagactggtattatgagcggagccccatcaaaaagcttgactagccttatccttgcaaccctacctgcccaaaagatgactctgattcataaatcctatacatataattatggactacagcttatttattagatggatattagtccattgcttatgtctatgtatccatctataaatctgtctctgctgtttattttaataaaaaagccgatgatcttgtaaacaaataaagttgctcgagctagtatcattaccactagattgcaatggcacttttattta

SEQ ID NO: 11238 - DNA, 339 bp, Gossypium hirsutum
  Clone ID: LIB3135-029-Q1-K1-G9
cgaattcccggtcgccacgcgtccggcaaggggcagggaactggtacttgtctcgttgtaaccctctttaccgaggacccggaggatagcatcaatgcagcaatgctgaaggacggtcttgctaggttggagaagaggaagaaatgggaatcgaaggagagaaaagtgatgcttaataaattggaagagtgtcacgaggaagcgaaaactggtcggcgtggaatgtggcagtatggagatgtggagtcggatgatgaggatttacttccgccagttgcggctaagaaaaccggaggtcggcgttaggtattgtaatttttttatcaatcactttttggg

SEQ ID NO: 11239 - DNA, 389 bp, Gossypium hirsutum
  Clone ID: LIB3135-029-Q1-K1-H1
cccacgcgtccggaaagtttcaatggcaaccctcaaagttccagttcacgttccttctccgtctgaggatgctgagcaacttcggaaagcttttgaaggctggggtacgaacgagcaattgattatcgacatattggctcacaggaatgcagcacagcgcaattcaattcggaaagtttatggtgaagcttatggggaagatcttctcaagtgtttggagaaggaacttacaagtgatttcgagcgggctgtgctgctttttacgttggaccctgcagagcgagatgctcatctggctaatgaagctacaaagaagttcacatcaagcaattggattctcatggagatagcttgcagtaggtcttcgcatgaactactcaatgtgaaaa

SEQ ID NO: 11240 - DNA, 249 bp, Gossypium hirsutum
  Clone ID: LIB3135-029-Q1-K1-H10
cccacgcgtccggcatattccatttagtggaaaatttagtcgtttacttttatgtctatggttaattaatttagaaaataatttgttgtggtaaatatgtttatttttaattatttatttcattttggttaattgtgatgaacatggttggttttatagagtaatatgtaaatagagaaacagtagaattttccctaaggatttttcttaaaaaaaaaaaaaaaaaaaaaaaggcgaacaatctaaaaa

SEQ ID NO: 11241 - DNA, 401 bp, Gossypium hirsutum
  unsure (1)..(401): unsure at all n locations; Clone ID: LIB3135-029-Q1-K1-H11
caaataccaaccctcaggaaaaacataatttgtatatttcggaagctgaactgcagatgcatcaagctcagacaccattgtgggcaaaaccagagatatactttcaatcaatggtgatggatgacatcaacatggctgatgaaaatgcttttgttggggaagttgaaattgaaatgttgctaactcgcatgattggaacacggaaaaaaagcttagttccagtttttgattaccttcaaagctttaaattccagcaagcaagggttccaactgtagatagcaataacaatggatgcctgctgcatcagaggtcaggtctgtctgaaaatggccggctttcatgtagaagtatttctggctctcttaattgcatgaccgaaaatggtgatgcagntgatgaa

SEQ ID NO: 11242 - DNA, 229 bp, Gossypium hirsutum
  Clone ID: LIB3135-029-Q1-K1-H12
accatacattcagtttatcaaaaaaaatgttggacttcttaactgataaagacgttttgcctcatggcttcaccaaggcttacgccgcccatctcaagcgctcccactagatcgagcttgctttattgactgatgttgagaaaactgctcaactcaaggaacttccatcctacgagccacattggctctttattagaactgctttcatggcaacgaatacatactttaa

SEQ ID NO: 11243 - DNA, 338 bp, Gossypium hirsutum
  Clone ID: LIB3135-029-Q1-K1-H2
ataatattagctggatttgatgctgctcgtggtgatcctttaagatgctgtgatgtgactactgctggttatacacagatgacacacatgttgagtaccctctcgggtggaaagatgctagttgtacttgagggcggctacaacctacgttcgatatcatcttctgctactgcagtgaataaggtacttttgggtgaaagtcgcgagtgtgaaccatagaacatcgttccttctaaagctggcctgcttacggtggtggaagtcctgaagattcacatgaagtactggccaaatctaaattgaagcttctaacaactgcagttgcaacgggcaatgta

SEQ ID NO: 11244 - DNA, 229 bp, Gossypium hirsutum
  unsure (1)..(229): unsure at all n locations; Clone ID: LIB3135-029-Q1-K1-H4
cccacgcgtccgcccacgcgttcgcccacgcgttcgcccacgcgtncgagttactcattgagtgtaaccctatacccatcaatagatattaatttgttgtcatccattagtagtctaaattaatgcatataaataatgtcagattgtctaatgcacgcacgacagaatctatatcccattgcttcatgtgtttttgaaaaaagagttatttcgtttattttgccnnnnt

SEQ ID NO: 11245 - DNA, 390 bp, Gossypium hirsutum
  Clone ID: LIB3135-029-Q1-K1-H6
cccacgcgtccgcccacgcgtccgcttgaaaagtgatgaaagacctgagagaagaaaggagctctccaagaaactggaaggaaaatccaatggaagggaagctgaaaggaaaaatctccagacaaaatcaaaggctaacaaagacgcagagataaaaaagttaaggcagagccttaattttaaagctacaccattgcctgctttttatcatggacagagaacatcaaaaagtcctctcgataagataggtcccaagagtgacatccattggcaacctggcttcctcgggtaaatgaattgggcttcatctacaactagtaggaggaaatattaagaattttttaaaaatgaaaaacagtaggaaaagacggaagcataagaagtacacca

SEQ ID NO: 11246 - DNA, 216 bp, Gossypium hirsutum
  Clone ID: LIB3135-029-Q1-K1-H7
cccacgcgtccgcccacgcgtccgaatgaactctgtcaaagttttgttaaaaaaaaaaaggaaaaaaaaaaaaaaaaaaaaaaaaaaaaaaaaaaaaaaaaaaaaaaaaaaaaaaaaaaggcccgcaaataaaaaagtaaaaaaaatcacttacacaaaaaagataaagcagtaccccttctaaaaaggaaactaaattgaataaccattggcgat

SEQ ID NO: 11247 - DNA, 258 bp, Gossypium hirsutum
  Clone ID: LIB3135-029-Q1-K1-H8
tcttatccagaaaacactcctgcaagagttcagatcatgtaccatgctcatcggtgctgagagactcaatacagtggttggctgatatcgtgttctgttgcttgattctgacaaggttctgagaatatgatacgctagaagaactattgtcatatgaaggatgttgtttctccatgatggttcagatgccacgttgatgcttatgcacaatactcacgaagcctagcactcggatgtggagaggacagggtccgcaaa

SEQ ID NO: 11248 - DNA, 388 bp, Gossypium hirsutum
  Clone ID: LIB3135-029-Q1-K1-H9
acggaaattttctgcctctaccaatgaatggctatcaaaactacatgcaactgaagatttttgcacctggcagcgaatcattcgtttagacgccattcgtgccaatactgaatggatgccatactctgtttctcaggctgcagtatcagatcggagggcacgccgcttagctaaggctgttggattaaaggattatgatcacctggagccttacgtaattttacatgctgcacgtttgggtactatgcttgaagcttatgcgctttacgatcccgaaattgactactgccatggcatgagtgatcttctttgtccaataattgcagtcatgccagatgattatgaagctttttggtgctttgcaggtttcatgaagaaagctcgacat

SEQ ID NO: 11249 - DNA, 223 bp, Gossypium hirsutum
  Clone ID: LIB3135-031-Q1-K1-A10
gaaacttgaaattggagtagactcgtgctaatttgtccaatgctttgtatgtttgtgggctatttgcaaagcctaagctgcacttggttttgctcttgtcatagcaccaagttatgggctattcattgttttctttttcttcaattataaatcttgagagagtactctttaatgtaatttcaatcctgttttgaaatgaatcacaatattgcttttcaaaaat

SEQ ID NO: 11250 - DNA, 72 bp, Gossypium hirsutum
  Clone ID: LIB3135-031-Q1-K1-A11
aaacagaaaaaaaaaaagaacgggaaagaaagggaaaaaaagggggggggaaaaaaaaaggagagggggaag

SEQ ID NO: 11251 - DNA, 377 bp, Gossypium hirsutum
  Clone ID: LIB3135-031-Q1-K1-A12
gagagaaggaaaagagctaagagacttggagagatggcaaataaggctgttgagatagggggatcttcccacctccacatttcacggttaatccaagatatcaggcaaagggctaatgagaggaagcaacttagcacctgaaatgaagcggcaacctaaatctccatactccaaaagagcttagggagtcacttcatggtcacttatatgaatcgctatgtatgctttaccagagaaatataattgtaaaatgcaaatggcccaatctcaagataaatgaaaggagtacgagtcgcagcaaaaaaaaaaaaaataaaaaaaaaaaaattaatttttaataaataataattaaaaataaaataaaattattttatttt

SEQ ID NO: 11252 - DNA, 450 bp, Gossypium hirsutum
  unsure (1)..(450): unsure at all n locations; Clone ID: LIB3135-031-Q1-K1-A2
gtaccgaatcgcagtgtcgacccaggcgtacggagtttttgagaggagttgctaatccccttggaattaaggtgagcgataagatggatccgaatgaactagtaaagctgattgaaattttgaaccctcagaacaaagctggaaggattacagttatcacaagaatgggtgctgagaacatgagagtgaagcttccccatctaattagggcagtgcgtcgtgctgggcaaattgtcacttgggtcagtgaccctatgcatggaaacaccatcaaggctccttgtggtctcaaaactcgccccttcgattccataagggctgaagtgagagctttctttgacgtgcacgagcaagagggaagtcatcctggaggagttcatctagagatgactgcacagaatgtgacggaatgcatcggnggatcccggactgttacattccatgacttgg

SEQ ID NO: 11253 - DNA, 469 bp, Gossypium hirsutum
  Clone ID: LIB3135-031-Q1-K1-A4
aaagctttcaaatctgcagcaatggaaaaaagatgagatcgggatttgatttgaggggaaaaaaatctggttgccaatactcgacgattgttattattacaccttttttttttagtatgaaatggatcgtggttatgatgatggcgttagctgcgtcactgctggttttgccgctgcttctgccgtcgcttccgcctccgccgtcgatgcttcttttcgtaccggttctgatcatgattcttctcctctttttggccttatctccatcacaagcccctactgccatcaccactgcagtatgaaatctccagatttgtatgtatttgattgcaaggaatatgaatatctcatgtaagttgaattattttctctctttttttttccatttttgttgtttgaaatcgtaactgagcaagattagaaaacaaaatccttcgtctagattttcatttcttaaaattagttgtag

SEQ ID NO: 11254 - DNA, 397 bp, Gossypium hirsutum
  Clone ID: LIB3135-031-Q1-K1-A5
gctgggatgagcacgatgaccaatcaacccttacccgtcccctgagttgcttatactgcaagaccagacttatggagtcaactgccaccatcttcctgatgagctcccagttcgcggttttgacgaggcgggacactgtctggctcattttcgagaagctgtctctggcggatttggcacctgccagctgcgtatgcaaggacctggacgccgcctcttgcgaagacgatctggggggggagacagttcatgcttcttggcagctattagaggtgatggggaagcccaagtcgagaagtttctggagagataaggggatagggaagtttgctatttcccatggatttatatgctttgtgagacaatatgttatttgattgcatgtggattaatggat

SEQ ID NO: 11255 - DNA, 455 bp, Gossypium hirsutum
  Clone ID: LIB3135-031-Q1-K1-A6
ccatgagctacttaaccatttgccaaatctcctacctcctcttctttagcgtacttttcatttccgctcatgcagcgcgctttgaaatccgcaatgagtgctcctacaccgtctgggcagcaacctctcctggtggtggccgtcgcctagaccctcggcaaagatggaccatcgatgtgcctgctggcactgctatggctcgtatttggggtcgaaccaattgcaatttcgatgccagtggtaggggtcattgccaaaccggtgattgtggtggactccttcaatgcaaaagttggggtgtaccttcaaacaccctggctgaatatgcacttaaccaatttggaaacatggatttctacgacatttccttagttgatgggtttaacatccccatggtgtttgggccaacttatggcggttgtcacaacattcggtgcactgcaaacattaacgga

SEQ ID NO: 11256 - DNA, 396 bp, Gossypium hirsutum
  unsure (1)..(396): unsure at all n locations; Clone ID: LIB3135-031-Q1-K1-A7
gttcgcatgatgaatgaagctcagttccaaaaccgacccatggttttccctcaactcgtggcgaccgacttgtctcggttccaagttcagcctcattggcaaggtcttagccctcgagcacagccgagacagaagcaggattcacttcctccggatcttaatatcgggttccaatctccagggtcaccggtgaaacaatcggcaggtgttttggttgattcccagcagccagatctggctttgcagctntgagttgctgtgacggatttatctattttttctttcttggagctatgtatttattacaagtttaagaaagttttaattttgttttcaattgaaacttgaaantgattaggctgtgctttaattttaagctgctgccattttattttt

SEQ ID NO: 11257 - DNA, 407 bp, Gossypium hirsutum
  Clone ID: LIB3135-031-Q1-K1-A9
cccacgcgtccgcccacgcgtccgtatttatgttatatcaaaataccttcataatgggggaattggcttaatgacaaagttaatcactaacatttacatatttttgtcaaaatgatcataattgtattttttagctttttttggctattaatttttttttcaaactgttttttttttaaacagattcgatgaaagtaccattaaaaaaattaatgtggatgatgtggaatattttcaatgagatgtaatttattacttaggtgttcaataagatagttacatgtgaaaaataatgaaataaataaattatacattaaattaaaaaaataactcctaatttaaagataataaatgtaattatctaaaaaagttttaatttgaaaaatgcatgcctttgtttactaaga

SEQ ID NO: 11258 - DNA, 337 bp, Gossypium hirsutum
  Clone ID: LIB3135-031-Q1-K1-B1
cccacgcgtccgaggactctcagctgatcccgagaccttcgctcggaaccgcgagctcaaggtcatgccctgcatatgggccgtgttgggagctcttggctgtgttttccctgagctgttggctatgaacggcgtcaagttcggcgaagctgtatggttcaagggcggatctcatatctataaagcgggtggacttgactacttgggttacccaagcttgatccatggctcaagcatattggccatctgggctcgccaagatatcttgaggggagccgaccatggttaccgtgttgccggtggacccctcagagaagtgactgacccattgttccca

SEQ ID NO: 11259 - DNA, 428 bp, Gossypium hirsutum
  Clone ID: LIB3135-031-Q1-K1-B11
gttcctcgaagcctcttccccttccccattttttgccacctccatctagtccttgcggccagccagcaatgcttctcagcacctcgccggcgttcatatttcattttcctccttttcgcctttcattgtcgaaatctacactgcaccaatcgatgacagcatttatcttcctctctcgaaggttgcaggagccgctgttatttttgaggtacaaagaagctgtagatcagaagcaagaaaagaggagcgacgcatacaagaattggtgataaaataccacatctttattaagaagtgatgtctatggaggtggaaggatttgatgaccactttctttgtaatgtgattatcttgtgggtcgtgaatactagaccaacgttttcttagctaaaatgtcgaaacatagaaaattttggcttttaaatttt

SEQ ID NO: 11260 - DNA, 435 bp, Gossypium hirsutum
  Clone ID: LIB3135-031-Q1-K1-B12
gagaccagtatcggcgccaagtcgactagtctgtttgagagaggcaggttctacgaggagtactcggcgaggagaaacgagaggcttaagagaaggaaaggcgaaaccgggacggagtcaaagagtgggcaccatcatggacttggtgtaaacattgaatcatcaaagaaaagagagtcgaagaagctggagagctttaggaaatcggtgtctgctgcttattccgtggagaggaatgagagtcagactcccaggtatctgctccgaagcatgagcaaggctaatgagaataagtataagaagcctccccttgctgtcaataattacaactcgtctatgtctgtgacaggcactgcaagcaaaactactactagacgagttggtagaaaggtctgaaaattgaaaactggatttctattaagattttgttttttt

SEQ ID NO: 11261 - DNA, 374 bp, Gossypium hirsutum
  Clone ID: LIB3135-031-Q1-K1-B2
cccacgcgtccgcccacgcgtccgcccacgcgtccggcagagtgcatggtcacttgaattttgagcatgcagttgcaattgctgtaggctgtcttggtacccatatgatcttatcgcagaaggttgggtgacctacagaggttgcagatggtatcactgtaattaacacacgggagggtgaagaaatctccatctttgtgaaagatggttgagaatagaagaaggttatgattttctaatcacacgataccactgttttcttggtccctgcagatattatccagttgaggactcaactggaactgtaaatataaatgcagcggtgtggtcttgtttgctggactttagtttagggttagcactttgtgtataaa

SEQ ID NO: 11262 - DNA, 341 bp, Gossypium hirsutum
  Clone ID: LIB3135-031-Q1-K1-B3
ctacaactcatgtacatatatatttagtagggatttgaacctctagattatcctaacttcttaatccttctatttttggttatcaagtaattaattctacttagtggagtgacaaaaacccttggaagtttgacagtagcagatatttctaattgtattttgttttaaagctaactttgttagtaactttctaagccttttgctttacaatttagagagtttcgacttaccatacgaatctgattaaattaactcatttattattaaaaaataattaaattaatctaaatttaaaatattttggttggaattaaaatgttaattaaaaaaatttaatttta

SEQ ID NO: 11263 - DNA, 220 bp, Gossypium hirsutum
  Clone ID: LIB3135-031-Q1-K1-B4
gagctcgctcctcaataccgatgatttcgtggtttcttcgtccatgaaagagagtccaaatgtgttcggttggtagttaaacgtagctactattgaaataatgtgatgtttagtatgttgcaaataatgtgccatctatattgtgctttgaacttgatgttacgttgtaatgagttcagcttttgatggttcatcttttaataagggggggtggccttcc

SEQ ID NO: 11264 - DNA, 436 bp, Gossypium hirsutum
  Clone ID: LIB3135-031-Q1-K1-B5
cggacgcgtgggttctaaagaggtcatcgtaaattcgagtacaaagcgctaaccgagatgagagccaagtggaagaagaagcgtatgaggaggctgaagaggaagcgccgaaagatgagacagagatccaagtagatgcgccttggactgaattagttttgccctgacaatcccttgtcttcataattatcctgcatatgttgcatgaagttgtgaagattgaagggtattttcaggcaaccttatctgttttgtcttctatatctcggttaaagttttaagactgtttgagatgtttgtctagtactattagatattatgttggggatttgtggtttgatctgtgtaagcagttatcttaacatcctaaatgtttgaaaattgaaacttcgttcttcttatatggtctataatatgcgagatagattgtttcctt

SEQ ID NO: 11265 - DNA, 443 bp, Gossypium hirsutum
  Clone ID: LIB3135-031-Q1-K1-B6
ggctcacaccaatcaaaataaacccatcttcttcatttgcaggcaatcaaaaagccaaaaatgatggcactgagaatgagggcttctactactgccaatgccctcaaaatatcttgcgctaccaccaaagcccctgttttgtacctctccacatgctattgcactgtcttggatgggatgaaatatgctgtatcacatgaatgggtgaagcacgaaagaacagtagctaccattggcatcactgaccatgctcaggaccatttatgagaagtagtgtttgtcgagctgccaaaaccaagtggttcaatgagcaaaagactagggcttggagctgatgagagtgttaaagcaaccagagatggcaactcccctatctttggtgaaatcgttgagggtaacttcaagcttactgaaactcctggcctgatcaatatacgtccata

SEQ ID NO: 11266 - DNA, 176 bp, Gossypium hirsutum
  unsure (1)..(176): unsure at all n locations; Clone ID: LIB3135-031-Q1-K1-B7
gtccttttgtcgcgtgtacggaggtagtcataccttcgtattgtgatatgtgaatgtaagttaaatacataatcaaatgtttcaattaagcaatatcgttggtnaaaaaaaaaaaaaaaaaaaaaaaaaaaaaaaaaaaaaaaaaaaaaaaaaaaaaaaaaaaagggcggacgaat

SEQ ID NO: 11267 - DNA, 205 bp, Gossypium hirsutum
  Clone ID: LIB3135-031-Q1-K1-B8
gttggccgcccatctttttctgttcagataaacaacgttatcgagttctgatttttgggcgggcaacacctgctgttaaattgtatagatacaattgcagataaataaacaataccacgtgtgaatacccaaatgctacttgtgttaactacattaatctctgatccagcttttggggattaaaaaaaaataattaaaatttttt

SEQ ID NO: 11268 - DNA, 470 bp, Gossypium hirsutum
  Clone ID: LIB3135-031-Q1-K1-B9
cccacgcgtccgcccacgcgtccgaaattgtttttgtttttaaaatataaacttacgacatctacaaatggtgacctcagtgctacctagagtagaaagcttggcaagcagtgggattcaatcaatcccgaaagaatatatcaggcctcaagaagagcttacaagcataggtaacgtgtttgaagaagagaaaaaagaggaagggcctcaggttccgaccatcgatttgacagaaatcgagtcggaggacaaagaggtccgggaaagatgtcagcaagagctgaaaaaggctgccatggaatggggtgtgatgcaccttgttaaccatggcatctccgaggagctcatggatcgtgttaggaaagttgggcagaaattctttgaactccctgtggaggaaaaagagaagtatgccaacgaccaaagctctgggaatgttcaggctatggtagcaagcttgcttacaatgc

SEQ ID NO: 11269 - DNA, 293 bp, Gossypium hirsutum
  unsure (1)..(293): unsure at all n locations; Clone ID: LIB3135-031-Q1-K1-C1
cccacgcgtccgccctggttaatgattaaattagaggctatggaagaggatcgagccagactccgccaattgaggaaaaatagagtggtagccgtaacttgcataagaggggcactcctagaggctacgcctcggaggtttagttggatcatgaaattttaaagttttaaattcaaaattttaaataaggttgtaaagaaataaatttaaaagacgtatatggtggtatggtttaatgtgtatattaaacaatcgagaataaaataagatttgatttaaacatgttagccgnt

SEQ ID NO: 11270 - DNA, 340 bp, Gossypium hirsutum
  Clone ID: LIB3135-031-Q1-K1-C10
ctccaggatatgctgcagggcatcaaacaaaacatgttagtttggttacttgtgttgtggacatatgccaaagacaggagaagattatatgataatacctttggcagatagggatgttcttcatcatcgaaggccctcctaagaatccacttctcgatgcgtccttcatccttttttatctgattcatgaaatagagaagcatgtataatgaaccaagcaattccaagacaacaataaattgattgcttaccatctttgattcagggtctaaaaaaaaaaaaaaaattttattaataattaattttattttatattataattaataaaaatattttttaa

SEQ ID NO: 11271 - DNA, 466 bp, Gossypium hirsutum
  Clone ID: LIB3135-031-Q1-K1-C11
cccacgcgtccgagaaaatatcacaaatcttcttctccttctcagaaatcttagtatcatcactatggcctcaaatcccaaggtcttctttgacatgacgatcggtggtcagcccgctggtcggattgtgatggagcttttcgcagattgcactcctcgcactgcggagaacttccgtgccctctgtactggcgagaaaggcgtcggccgcagcggtaagcccctccactacaaaagctcttctttccatcgtgtgatccctaactttatgtgccaaggaggtgacttcaccgccggaaacggtaccggaggtgaatccatctacggatcaaagttcgctgacgagaacttcatcaagaagcacactggtcccggtattctctcaatggctaacgctggaccgggaactaacggatctcagttcttcatttgcacggctaagactgagtggctcgacggaaagcac

SEQ ID NO: 11272 - DNA, 454 bp, Gossypium hirsutum
  unsure (1)..(454): unsure at all n locations; Clone ID: LIB3135-031-Q1-K1-C12
cccacgcgtccgcccacgcgtccggtagagatgaggaaaatcatgggtgccaaagttcttttcttctttgctttgctttccttttcagctgtctcggcatttgcacaggatgaggaagaccaaggtcttgttatgaacttctacaaggattcttgtcctcaggctgaagacattatcaaggagcaagttaagctactgtacaagcgacacaaaaacactgctttttcttggctgagaaacattttccatgactgtgctgtccagtcatgtgatgcttcactgctgctggactccacaagaaggagcttgtctgagaaggagacagacaggagctntggcctaaggaatttcaggtacattgagaccatcaaagaagctgtagaaagggaatgtcctggagttgtttctcgtgctgatatccttgttctgtctgctagggaaggcatcgtttcgt

SEQ ID NO: 11273 - DNA, 349 bp, Gossypium hirsutum
  Clone ID: LIB3135-031-Q1-K1-C2
cggacgcgtgggttctgactcaattcaattctgcttctctgaaccgccacctttcccgcgcttatgctagtaacatgggtggctacaagaacgaagggttcgtcgaggttcttgctgctcagcagagtcctgagaacccgaactggttccaggggacagcggatgcggtgaggcagtatttgtggttgtttgaggagcataatgttttggaattcttggttcttgctggggaccatttatatagaatggattatgaaaggtttattcaggcgcacagagagactgatgccgacatcactgtagctgcattgccgatggatgaaaaacgggctactgcgtttggtttaat

SEQ ID NO: 11274 - DNA, 474 bp, Gossypium hirsutum
  Clone ID: LIB3135-031-Q1-K1-C3
attttgggcccgttgggtttatttaatattcttggttaacttcagataacatggcgtacaaatgggggtgaacctggtcgcttgcaaacacagcaaattctaggcactccaatcagttgcaaagagattgagttgcaaatcctggagattccatctctaatcaatttggataagtcctttttggtacatctaaatctccttaaccatacagacagagagttgggcccatttgatgtccggctatcacaaaatagcgcacatgaggagaagaatgttatgattaatgggcttcagactatcttattaccacaggtggaagcattcggtaccactgattttcatctgagcctgattgcaactaaacttggagtccagataataagtggaattacagtgtttgacacaaaagataagaaaacttatgacccattgccagatgtcgagatctttgtggagtctgattgatttatcaaa

SEQ ID NO: 11275 - DNA, 381 bp, Gossypium hirsutum
  Clone ID: LIB3135-031-Q1-K1-C6
atttgaccaattggggctctgaaatttacgttccttctttttttcttctcttttatacattcatgtgctccaattctgaatacccattgtctagtttgtttaaagatcagatctttgatacatcctctgaattttttgggtcttttttttttctatcagaacagagaagatcgaaagggagaaacatggctccacctacaagaatagggcttgctggtttggctgttatgggccaaaatcttgcacttaacattgctgagaaaggctttcccatttctgtttataacagaactacctctaaagtcgatgagactgttgaaagagctaaaaaggagggagatcttcctgtatatggtttccatgatcctgaatcttttgttc

SEQ ID NO: 11276 - DNA, 457 bp, Gossypium hirsutum
  Clone ID: LIB3135-031-Q1-K1-C7
gaaggtcgaggcaaagaatgcattggaaaactatgcatacaatatgaggaacacagtgaaggacgagaagattggtgctaaactcccagcagctgataaaaagaagattgaagatgctattgaacaagccattcaatggctagacagcaaccaactcgccgaagccgatgaatttgaagacaagatgaaggagttggagagtatttgcaaccccatcattgctaagatgtaccaaggtgccggcggtgacatgggtggtggcatggatgaggatgttccggctggtggaagtggtgctggtcctaagattgaggaagttgactaaatcattgattttcttcacctggcttctctattggtctcttatgttttttgggatttaaactggttggttttggtgtttggtttctaatcggattgaaatgaacttttataggggttggtccttttttgggat

SEQ ID NO: 11277 - DNA, 392 bp, Gossypium hirsutum
  Clone ID: LIB3135-031-Q1-K1-C8
actgtcgttcctggtggtgatcttgctaaggtccagagagccgtttgcatgatttccaactcaaccagcgttgctgaggtgttctcccgcattgaccacaagtttgatctcatgtatgccaagcgtgcctttgttcactggtacgtgggtgagggtatggaagaaggagaattctcggaagctcgtgaggaccttgctgcacttgagaaggattatgaagaagtcggtgctgagtcaggcgagggtgatgaggaaggtgaagatgagtactaaataagtaatgtttgagtggagggcttgcattttgctacccaatgatttgtttccttttatccggtgtttttgcttattctattgtgtgaacttcgactcttctaagctttgttcaagac

SEQ ID NO: 11278 - DNA, 459 bp, Gossypium hirsutum
  Clone ID: LIB3135-031-Q1-K1-C9
caaggcatggcaagtacatggcttgctgcctgatgtatcgaggagatgtggtgcccaagggtgtgaacgctgctgttgctaccatcaaaacgaagaggaccgtgcagtttgttgactggtgcccaactggtttcaaatgcggtattaactatcagcccccagctgttgtccctggaggagatcttgctaaggtgcagcgagctgtttgtatgataagcaataacacagcagtggcagaggtgtttgcacgcattgaccacaagtttgatctgatgtactcgaagagagcatttgtgcattggtatgttggagagggcatggaagaaggtgaattctcggaagcccgtgaggatctggctgctcttgagaaggattatgaagaagttggtgctgaaggtggagatgatgaagaggaaggtgaagaatattgatgctactatcgcaatatcatttattttt

SEQ ID NO: 11279 - DNA, 370 bp, Gossypium hirsutum
  Clone ID: LIB3135-031-Q1-K1-D1
aaagaagcaaacgcaaaacaaacaatggctgatttgtttataggcgtatcacagtcgtctcttcttcatcttcaaccaaagcttaaaagttttctaaggcttaccggtggcccaagatttgccgtagctagcaaccgtcagcttcatttcagacggttgactgtaactggggtcgtatcttctgattccaaagcacccacgactgttaccagcactgtgggttctgaaaaaggaggaatcgacatcgaagtagacacaggaaacggcggaggagataaatttgaccacagaagcggcggcggaagagaccgtggggataacaactgctgcggaagccatagtgagagataaggagaaggggagttttttg

SEQ ID NO: 11280 - DNA, 470 bp, Gossypium hirsutum
  unsure (1)..(470): unsure at all n locations; Clone ID: LIB3135-031-Q1-K1-D10
caacatatggaaggagcaactctgattttaacgaccacgaaaaccaagaaaatcagcttccccctatgaataaagtcgataaatcagagttgagcaagagtttcagtaaaggacataatttgcctgagaagcctaaagttgaaacaggtttcaaagaaaacatggttcctttgaaggaagaagttcataactggactgcaactgcggagtgtaatccacttttggggagtgaaaacaatgaacccaagccaccaatcaccatagaaggtgatcaccctttcaacaacaatgggaatcaagcttcttcaccgatgcttcgatgttgagaggtacactatgcagattctgttcttattatacactctntgagtgctatcttttaagcagctatatggtgttttgagcatcttatgcgcaagtaaaaaacttaattactngttcttgagattatatatatatatatataaact

SEQ ID NO: 11281 - DNA, 249 bp, Gossypium hirsutum
  Clone ID: LIB3135-031-Q1-K1-D11
gaaacaacggcccttttcttccctattgctttttctttccctgcctctacaatatggggttgctgtgaaatcactttgtgctttacagtgggatttagtgatcattttctttcttttcccccctactttttcaaggttttccagatttcaagtcttgcaagtgtaatctattgaacgaacttgagaacagattctgtttcttattaatctgatgttttacatgtttcactgcccacattaaaaataatt

SEQ ID NO: 11282 - DNA, 442 bp, Gossypium hirsutum
  Clone ID: LIB3135-031-Q1-K1-D12
cggacgcgtgggcagccacctccagggatgaaattcaagtgctacctgcagtgatagcagcccgggcagcactggcaaaaactgcttttgccaagagcctccgccctcaatccttgcccaccaaagtactggtgatagggatgttaggcatggcggcaaacgtaccgttggggatatggagagagcataccaaaaagttctcaccatcttggtttgtggctgtccatgcggctgttccattcatagccatgctccggaaatctgttttgatgccaaagacagctatggctttcacaattgcagcatccatactatgacaggttattggctctagggctgaacggtatcgattgaaagcagtatctgcaaaacaattacatatcagggaatcctctgtttctgttggtgctgcacaacaattggatgtcgtcagttttaagga

SEQ ID NO: 11283 - DNA, 383 bp, Gossypium hirsutum
  unsure (1)..(383): unsure at all n locations; Clone ID: LIB3135-031-Q1-K1-D2
cccacgcgttcgcccacgcgtncgatagctcaaaatgttgacactggagccatattaatgcaaggctttgtcaacagggatgcactagctacaactatcacttctaggaaggcaacgttcttcagtcgatcacgggcaacattgtggacaaaaggagaaacttccaacaatttcatcaacatttatgacatatttgttgattgtgatcgcgattctgttcgttctaaataactttctcattgacatcttattgattgcttaatttatgaagtttgacataattgaaacttgtcctttagataatttacctttgggaagcctgatgggcctacctgctacacaagggcagagacatgctatttcacatcaataggtgatttgtt

SEQ ID NO: 11284 - DNA, 415 bp, Gossypium hirsutum
  Clone ID: LIB3135-031-Q1-K1-D3
cggtaaaggtgtatcgaaggctgttgctaatgttaacacaatcatcggccctgcattgattggaaaggacccaaccgagcagactgcaattgacaatttcatggttcaacaactggatggaacccaaaatgagtggggttggtgcaaacaaaagctcggtgcaaatgccattcttgccgtgtcccttgctgtttgcaaagctggagctgaagtcaagaaacttcccctttacaagcacattgctaaccttgccggtaacagcaagttggttcttcctgtccctgctttcaatgtcatcaatggtggttcacatgcaggaaacaaacttgctatgcaggagttcatgattctttctgtaggagcatcatcctttaaggaggccatgaaaatgggtgttgaagtctatcaccatttg

SEQ ID NO: 11285 - DNA, 468 bp, Gossypium hirsutum
  Clone ID: LIB3135-031-Q1-K1-D4
cccacgcgtccgtccacgcgtccgcccaagcaccctttcacgtataagtctcccccaccacccacggcagtctacaaatataagtctcctccccctcctccttcagcttactattacaagtctccttctccaccaccaccccattatgtctactcatcaccacctcctcctcaccactactaagcaacggctttgaccgcaccaaggggaacaaaagagtgtgatccaataaagcgacagagaaagagagcagtgagaggtcgcctagtctccgcgtttcatgagaagaaaaagataacaagaatgatgtagacaagtagtagggtcaataaaaaacaaggggttcatcgttttcacatttgtattattcagtgggtctcgtatttcttgctgctttagtatacaacgtttcctaaattttatgggtttttcttttccgacccttttgcaaatcaggggtgatggggt

SEQ ID NO: 11286 - DNA, 453 bp, Gossypium hirsutum
  Clone ID: LIB3135-031-Q1-K1-D5
cggacgcgtgggcggacgcgtggggcgcgagcgagaaaatgaacatgaaaaagaaatgaaagaaaaagaagatgagtgggagatagagaaaaatcaaaggccttacgtggtgatcgactgccagacaaattttgggtaagaaaatagaatttaacttatgcttgtaaaatgtggtattttgttgagttaatcatctggtagtgtgttctttaaacccaattatgatgtattttcaacttccttaaggatgcaattgcaggggaatatcaaaacaattttttgttatccttttaatttgagtttaatatcttcttgcaatgatatggaaatggtaaccaagagcctccattggttactcttgaaggaatgagatgtctagcttaccactttttttttcttgtgtactgtaaaagacacttatgatgtttggagtacaaattcaatatgttcaat

SEQ ID NO: 11287 - DNA, 451 bp, Gossypium hirsutum
  Clone ID: LIB3135-031-Q1-K1-D7
accagcatctgtttcaaatgtttcccatgaaagtagccaaggaagggttgatgaccatccttcttttagaccccatttgccacctgaattctacaagaaacctactgtgaaagtctattgcaaagctgatcctaattttcatctcaccatcagagacggtaaagttattcttgctccatctgatccctctaatgaattccagcactggtacaaagatgagaagttcagcacaagtgtgaaagatgaagtgggtttcccaagcttttctctggttaataaagccactggtcaagccattaaacattccattggagcttcttatcctgtccaactggtaccttacaaaccagatcatcttgatgagtcaatgctattgagcgagagcaaggaagtccatgatgggtacagagctataagaatgattaataacattcgcctgaatgtcgatgct

SEQ ID NO: 11288 - DNA, 214 bp, Gossypium hirsutum
  Clone ID: LIB3135-031-Q1-K1-D8
gcttgtttcaaagttgggatatgcagagttatatgtaaacatgaagaactaagattagtttggtaacctttttaaagaagtgctagttttggtattttaatattacatgcccatctgattttatttttttatatatataacagatttgcttggctatgacacaacttcatttactcttgtacaattgatagattcactggtcgaatcttaattc

SEQ ID NO: 11289 - DNA, 150 bp, Gossypium hirsutum
  unsure (1)..(150): unsure at all n locations; Clone ID: LIB3135-031-Q1-K1-D9
caaattgtaggtatagttcttatatgtacaacaaattttctggattnttgaaaattaagcggaacccatttcttgttgtggatgttatcaaatcttacatgatggaaaattgttcatttaaccttaaaatgtttaaggttgttttgaatt

SEQ ID NO: 11290 - DNA, 326 bp, Gossypium hirsutum
  Clone ID: LIB3135-031-Q1-K1-E1
caaattgtaggtatagttcttatatgtacaacaaagctgctggatttttgaaaattaagcagaacccatttcttgttttggatgttatcaaagcttacaggatggaaaagtgttcagttaaccttaaaatgtttaaggttgttttgaatttgtgtaaagaagctaatattgccgatgaagctttgttgctattgaggaaaatgcctgaatttaatttacgtccggatactactgcttataatgtggttatcaggctgctttgtgagaaaggggatatggatatggctcataaattgatgaaagaaatttgcttgattgatctttat

SEQ ID NO: 11291 - DNA, 469 bp, Gossypium hirsutum
  unsure (1)..(469): unsure at all n locations; Clone ID: LIB3135-031-Q1-K1-E10
cccacgcgtccgaatagatataaatcttgcatttatgtatataaccaaatggtgtctggagcaagaaagaccgaactgttcagggggtgtacatataaagctggaaaggaaggttactgtaatggaccaggcacaatagagcttgcccctcacaacgctttgcacacatggatcgggagcagcttaaaccctggaagggaagatatgggtaagttttactctgcagcaaaggaccgtattttctacgcacaccatgcaaacatagatcgcctatgggaagtttggagggaagctcataaacaacaattggatatcaaagatccagattggctcgactctttcttttacttctatgatgagaatttgaagctcgtgagggttaaagtcggtgatgttgtggatacaatcaaactgtgttattcttatgaacaggttcaccgtccgtggttgaatatgcgntccaagcctt

SEQ ID NO: 11292 - DNA, 467 bp, Gossypium hirsutum
  Clone ID: LIB3135-031-Q1-K1-E11
catctctctcctttgttttcccttttgtctctctctctctttttccaaccctaaccctacctcaccaaccaggattcaacatgaagggaggaaaatccaagtcagatactaagagtgccaagctatccgtgaaatccaaagctggaaagaaatcggggaaggctgccaaggatccaaacaagccaaagaggcctgctagtgccttctttgttttcatggaggagttccgtgagcaatacaagaaggatcaccctaaaaacaaatccgttgcggctgtcggcaaagctggtggagataaatggaagagcttgtctgaagctgaaaaggcaccttatgtagctaaggcagaaaagcggaaggttgagtatgaaaagaacatgaaggcctacaataagagacaggctgagggtcccaaagacgaagatgttgagtctgacaaatcagtgtctgaggtgaatgatgaggat

SEQ ID NO: 11293 - DNA, 468 bp, Gossypium hirsutum
  Clone ID: LIB3135-031-Q1-K1-E12
cccacgcgtccgcccacgcgtccggacaagacaaatagggacctcaaaacgccctgagtgggacgcccccttcgggctgagatgctttccggacatgctattctttttatttatagaatacttcgctacacggcttagccgacctggagcggctgccttcgttgattccccacgaaggaactcgctacttccccttactgtcctaagcgggggagaaggattcaaaaccttgtgtgaaggaaaggctgtcaaagtcgttgaccattaatccggttgaaggacaaatggacagtgaatcaacagaatcgagttctttgcaggataaggattcggcagtcgagacatctatatccatttcattaagaaagaaaggaaaggttgcgcagcaataggttctttgtgaaagaaggttgcttgcaagttctcgaataagctctttgctttgacacagatattatctagatgcca

SEQ ID NO: 11294 - DNA, 422 bp, Gossypium hirsutum
  Clone ID: LIB3135-031-Q1-K1-E2
gcggcgactacaacagtatcaaaaccctaagctttcaacaatggcggatgtggaggcagatgtggcggcggccggagtgcctaagaagagaacattcaagaaatttagcttcagaggcgttgatttggatgctcttcttgatatgtccaccgatgagcttgtcaagctcttccccgcgcgtgctcgtagaaggttccaaaggggtctcaagagaaagcccatggcattaattaagaaactccgcaaggcgaaaagggaggccccaccgggtgagaaaccagaaccagtcagaacccacctgcggaatatgatcattgtacccgaaatgattggaagcattatcggtgtgtacaatggcaaggcattcaaccaggttgaaatcaagcctgaaatgatcagccattaccttgccgagttcttca

SEQ ID NO: 11295 - DNA, 480 bp, Gossypium hirsutum
  Clone ID: LIB3135-031-Q1-K1-E3
gtgaaacatgccacacgatcaaagcacttcattagtatgattgcctgagagctaacaaagcaacatcagcgtggggattggaggctcgagtacccttcttagacatagaatttatcaacgttgccatgtctatagaccctgaatcaaagatgatcaaaaaggatcaaggacgcatcgagaaatggattcttagaaaggcctttgacgatgaagagcgtccatatttgccaaagcacatcctctaccgacaaaaagaacaatttagcgatggcgttggttatagttggatcgatggtcttaaggcgcatgctgccaaaaatgttactgataagatgatgcttaatgcttcttacatatttcctcacaacacgccaacgacaaaagaagcatattactacaggatgatattcgagagattctttcctcagaactcggctagattgacagtccctggaggagctagcgtggcatgcaacactg

SEQ ID NO: 11296 - DNA, 459 bp, Gossypium hirsutum
  Clone ID: LIB3135-031-Q1-K1-E4
agggtttcaatttcaggtctcaatttttcaactcagggttttgtactgttttgtgaaggtggatatgggtgctgaggaggggacaagaaacggtgaaggagcagagattggggaggagattaagtgcttcaagagtgaaccagtgaataatgggtttgggtctttatttgtaaacgattctggtgatgggagctcaggagcaagtgagagtttgcgaacatataagagacggagacagttaaggtcaacttcaaatatcgaagtgcaagatggtgggagagcttctacagaccagatggaaagctctgcctggagactatcctatgagtatgagcagaaggtgtgactgggtcgttgggtgcataaaatacaatttcaagctactgtgttaagtctaaaactggtttgcataatatgagataaatatgtgattttttgatgtctagagatataatgaat

SEQ ID NO: 11297 - DNA, 469 bp, Gossypium hirsutum
  Clone ID: LIB3135-031-Q1-K1-E5
cccacgcgtccgggccagcaccagaggcagcttcaaaatggttcagcggctcacttaccgcacgcgtcacagctacgccaccaagtccaaccagcaccgcgtcgtcaaaaccccaggagggaagcttgtttatcaaacgacaaagaaaagagctagtggacctaaatgtcctgttaccggcaagaggattcaaggaattcctcatttgaggcctgctgagtataaaaggtctaggttgcctagaaaccgtaggactgtgaaccgtgcttatggtggagttctatctggaagtgctgttcgagaaaggatcataagggccttcttggtggaagagcaaaagattgtgaagaaggtactgaagattcagaagacaaaggaaaagcaatcatccaagtgagagctaggatttgctaatggattgatagtgaatcttggaatagtagtttgaggggatttaagatttggatta

SEQ ID NO: 11298 - DNA, 438 bp, Gossypium hirsutum
  Clone ID: LIB3135-031-Q1-K1-E6
cccacgcgtacgggaaatatgtcatggcgcatgctatcttaggagagcgctgcgttagctttgtcttgttttaaataatattgtgcagcaagtccgtggtcttataaacagatcgggaaaaggtgattcaacttctgaactgcatcggcaggcaacgcgtgatcttgagtccgctgtctctgcctggcactctagtttttgccgtttaatgaaatttcaacgggattttattcactccatccatggctggttcaagctcacccttcgtcctgtcagcaatgacaatgttgaccgcaatggtaaaacagatctctctgatgtatacgctatttgagatgagtgtgaacttgctcttgaacgtgtccctgacacagtagcttcttaagctttcaaaagtttcattaatggtcgccatgtgatattctgttaaacaaaaat

SEQ ID NO: 11299 - DNA, 422 bp, Gossypium hirsutum
  unsure (1)..(422): unsure at all n locations; Clone ID: LIB3135-031-Q1-K1-E7
cccacgcgtccgtttttatcatataaccaaaaatggaaagatagtcacgaagagttgtctatgaaagcttacgaagaagaggcggaggaattcaagatgaagtttatatattctcacatcgcttccacagaacgtgaggaaggagttgtgggcctgtggttgcattctctaaaccacagaaactatcccgatttacgagccggcagtggagactcagttgaagggaagaagagtcctaaggttgatgataaagcagacaccgttgaagaggacagtaatgtagtggagaaaaacggtgatactactgagatgcaaagtgccgaagagtagaatattatgatacgcatactcattgaacaaattaactattttacataatttttattaagttatagntggatggtcttcctgtttcatttgga

SEQ ID NO: 11300 - DNA, 201 bp, Gossypium hirsutum
  Clone ID: LIB3135-031-Q1-K1-E8
tgaaagaaaacccagactacagagaggatagttaagttaaaaagcaagaactcggccgctacttccatggttggtgattgtaatgtgacaccgtttttaaacaaagtttcgaactttattattatttttttcatgataaaagttttttaagtcagaacgactagatatgaaaatgttagttaaaccaggcaagctttcttt

SEQ ID NO: 11301 - DNA, 444 bp, Gossypium hirsutum
  Clone ID: LIB3135-031-Q1-K1-E9
cccacgcgtccgcgaaggtgctgatgaggatgaaggtgttgatgaccaagctgtgaaggttgttgacattgttgacactttcaggcttcaggagcaaccccctttcgacaagaagcagtttgtcgtgttcatcaagaagttcatcaagaacttgacaccaaaactggatgcggaaaagcaagagtccttcaagaaaaacattgagggagcaaccaagtttttgctttcaaaattgaaggaccttcaatttttcgtaggagagagcatgcatgatgatggatgcttggtgtttgcttactacaaggatggtgctgttgacccaacatttttgtactttgcatatgcattgaaggaggtcaagtgctgaggtttgaagcaaagaaaaaaaaagtggttgctgaagaatttagtcccttttattattgcttttggctcttgttttca

SEQ ID NO: 11302 - DNA, 385 bp, Gossypium hirsutum
  Clone ID: LIB3135-031-Q1-K1-F10
agaagtttcaggctcacgacccagataaccaattcaaagttggcgattatgtgcagcttgagaagagccggcctattagcaagaccaagactttcattgcggtggctgtaccaagtaggaatgggaagcaggagaaggaggaggcaggggagcttgggattccattggagtctaaacagactcaagagcagccgcaggcttagtgttaagcccttcgcgtgggctccttttgttgttggtaaatttgtgatcttttgcaagggatttcactgtttcaaaaactgcttttccttaatgtaataattgtcgtttttcaagggtctggattgttttttgagtttgtcatgacattcattctctgctctatttttgattggtttatttg

SEQ ID NO: 11303 - DNA, 452 bp, Gossypium hirsutum
  Clone ID: LIB3135-031-Q1-K1-F11
gtggttgtgatgtgggtgctagtggttggatttgggttcggtggatgggctagcatgaccaattttgtcaggcaaattgacactttcgggttgtttgcaaagtgctatcagtgcaagcctccaacaccagcagctgcacagcaccactagtcttactcatgaatccaaaccccaacaaaaaaaaattgaattctctctttttactccatgttttgtatcatacatagggagatagcaaaacctcccctacatgtgatgtgtgttagattttgccttttctcctttttatatatatatttatcccctcccccctctctaaattagttgttcaattaaaatagtgtgcttaatagtaatgattcctttttgtgtcatggcaaaggcctaaaattaatcataaaatagccttgtatgtttagcttcacttcattctcttcttttggttatatata

SEQ ID NO: 11304 - DNA, 462 bp, Gossypium hirsutum
  unsure (1)..(462): unsure at all n locations; Clone ID: LIB3135-031-Q1-K1-F2
ggttgacagaatactaagaccagaagggaaacttattgttcgagacaacgttgagaccatgaacgagctagagaatatgttaaagtctatgcagtgggaagtgcgtatgacatactcgaaggacaaggaaggcctgctctgcgtccagaaatccatgtggcgacctaaggaggtagagacgatcaaatatgccattgcttaggcaaatgctatctgttaattgatgatgtttgtcggcacgattagttattctttttgttaaggttttgctaattgaaattcatggtgcttgtatcatgttaaatagggcttttctttagtattgcatacgttgcttcttttgttttttattcccttatcttataagtttggtgtccaaatcttcatgtaatgtactgtagactnttaatttaattccttttggactcatttaaaacanaatttcatcgcctgttcaacttg

SEQ ID NO: 11305 - DNA, 432 bp, Gossypium hirsutum
  Clone ID: LIB3135-031-Q1-K1-F3
cttccgttcttgctggccttgacactaacttcaccgtcacttcaaaagcatcaaaccaagaatggggttttggtgaaccttacatggtcaaaagggcaacccttcttatcccaacaaccactctccttatcataaacttggtggggggtgttgcaagaatatcgtatgccaataatagtggctaccaatcatggggtcccctctttggtaagctattctttgccttctgggggatcatccatctctaccccttcttgaaaaggttgatgggacgccaaaaccgtacacctaccattgttgttgtatggtcaattctgcttgcctccattttctctttgttgtgggtgcggatcgatcccttcacaaccagagttaccgggccggatgtagaacagtgtggaataaactgttgagagagaacctataaagact

SEQ ID NO: 11306 - DNA, 435 bp, Gossypium hirsutum
  Clone ID: LIB3135-031-Q1-K1-F4
cccacgcgtccggtattgacacccctggagtcgttgccctcctaggagctcacagtgtcggcagaactcactgtgtgaagctggtgcatcggttgtacccagaggttgaccctgccctcagccccgaccatgttccacacatgctccataaatgccctgatcaaatcccagaccccaaggccgtccagtatgtgagaaacgatcgtgggacacccatggttttggacaacaactactacaggaacatactggacaacaagggtttgttgattgtggatcaccaactggcttacgacaaaaggaccagaccttatgtgaagaaaatggccaagagccaagactatttcttcaaggagttctcaagggccattactctcctctctgagaacaatcctctcactggtagcaagggtgagatcaggaagcaatgcaatc

SEQ ID NO: 11307 - DNA, 73 bp, Gossypium hirsutum
  unsure (1)..(73): unsure at all n locations; Clone ID: LIB3135-031-Q1-K1-F5
cccacgcgtccgntaaaaaaaaaaaaaaaattataattaaaaaaaaaaaaaaaaaaaaaaaaatatagaaaaa

SEQ ID NO: 11308 - DNA, 391 bp, Gossypium hirsutum
  Clone ID: LIB3135-031-Q1-K1-F6
cccatcgaaaacattgtgggtagatctgtatttcgctattggcctccatccaaagtttcagccactatatatgactcgaatgtggggaagaatgctgtagcagtttcttgacacctgaaataacttgaaagactttatgtgagtctgagctgcagcgaattcgcacctggatttattgccatggtgcatgttttattatggataatccattcatcatattcgttgtttttgtaaatttattgacggccaattgtaggccactcacaatttttcctgtaattagagtgtcaaattttctttgacaaggatttgggcatcccttttgtactgaactgaattgagaataatctgaggtcttaagctgagtaaaagcagagataggagattgttg

SEQ ID NO: 11309 - DNA, 421 bp, Gossypium hirsutum
  Clone ID: LIB3135-031-Q1-K1-F7
cacgattcaagtttcgcccaagagcgagggtagtggcagcgtagtgcactggactttggaatacgagaagctgcacggtgggattgagcatcctgagactctgctgcaattcgttcaagatgtctctaaagacattgacggccacctcacccaagcaagttaagcagtatcacatgatgctattgttgccgctacttgaagcactattcatctatttaatgaataaagtgacaacttcctttctcatgtattttgatctgaatatgtacgtttagatcaatatgcagtcacggggaggagctttgtattttcttgcatgtttgtctttttaattctgtatgaattcaatgtgtcctatgcttttatttgtgttctaaaaaaaaaaaaaaatataattaattattaataaaaaaaaaaatat

SEQ ID NO: 11310 - DNA, 440 bp, Gossypium hirsutum
  Clone ID: LIB3135-031-Q1-K1-F8
gttaacgccgatctggagggctttccgacacgctattgcttccgccccaaaggctgagggaactccttgatgaaccttcgtgcatgatataagaactgaaccctccttattgcgggccacaaccccaatagccgctttactttgtctaccgtcgtacgctgcatcgaaattgattttgactaccttgtccactggctttgtccatatttttacagatggcccatactgcaacacaaaagatttgatgctgatgagtcgagctttgtgagaaaacccacgacattcccggaagagatggtccatagtttcagttcctgaactacagcgaggacatactgacgtgttcgtcagtcttctaagtagcatattagctcacgtagttagaaaattccaagatatcttccaaactgtaattttaattcttgaaggaagatcaagta

SEQ ID NO: 11311 - DNA, 204 bp, Gossypium hirsutum
  unsure (1)..(204): unsure at all n locations; Clone ID: LIB3135-031-Q1-K1-F9
ccacgcgtncgaggggtgtataattaacttgcaaatggcctttaatggctgggtgtggatttcttaactttgccggcgggaccacccaattaaaatttccaccatggtttactttatctttttcccaaggtgtggtgagaaattgtggggtataaacttaatgtgggactttggttgagacactttaccccatttcttgcgcct

SEQ ID NO: 11312 - DNA, 327 bp, Gossypium hirsutum
  unsure (1)..(327): unsure at all n locations; Clone ID: LIB3135-031-Q1-K1-G1
acgctcacgcgtccgcccacacgatcgattgatggtgagttgcatcatttatataactggctctgaatgtactattatggtaaggtgattgagcacccagagagatccctaactgtactgcttgtaatcctgcatatgccttcgccatgaacggagacgatattgctgcatggagtactgattttaaggcaggaaactcatacatatnccccactaccattatactcgaagccgatcttgaatattctgctgcaaaggctgcataaacatacatagctgctgccgtacttcttagcatctgtctataacgtatgttatcacctaaag

SEQ ID NO: 11313 - DNA, 258 bp, Gossypium hirsutum
  Clone ID: LIB3135-031-Q1-K1-G10
ctcatcagacataaacaaccctcgaaactttattgccaagattgcacgctacaacagcgggggcaacattcacaagaggaggacaatctcggatgaactacagcctataaaaatcgagatggccaaaaggaacaagcaggggatctggaactatacaaaccctgggggtgaagccacaatgagatcctggagatgtataaaactaacattgacccaaacgctcagtgggcgaacatcacatcgaaagaacaagccaag

SEQ ID NO: 11314 - DNA, 448 bp, Gossypium hirsutum
  unsure (1)..(448): unsure at all n locations; Clone ID: LIB3135-031-Q1-K1-G11
atttgtgcccattgggtacacttttggtgctggtatgtttgagatggagaaagtgaaaggtggaagcccttatggtgctggaacatttgctggggatggttcaagacagccctctgagctagagttagggcaagctttccaccaaggcaagtattttgctggcattgcaaagaagctcaagggaacaacagcttgagagatttggcttatctaaataccagatatatatctatatatatatatagatattcagctttataaatatgtgtttgtttttcttgccttttcatttttactttgttcaagactctctccatagaataatctttgtatgctttggttgggattgtatttgttgtcacaaaacttacattgtttttcttccaagtctaaatcaaatggattngttatctcgattaaacttnnnnnnnnnntttnnttttttttt

SEQ ID NO: 11315 - DNA, 361 bp, Gossypium hirsutum
  unsure (1)..(361): unsure at all n locations; Clone ID: LIB3135-031-Q1-K1-G2
ccgatataaggcaggcgaagtccccgccaccctgcagatctcaatctagcgacggcnnagggaaaagaaaaaaaaaaaaaagaggaaaaaaaaaaaaaaaaaaaaaaaaaaaaaaaaaaaaaaaaaaaaaaaaaaaaaaaaaaaaaaaaaaaaaaaaaaaaaaaaaaaaaaaattaaaaaaatttatttttataaaattattttttattaaatataaaaaaaaaaaaaatggggggggcctttttttaaaacctaattttttttcccccgtcatataaataaataaattttttttaatggaaccaaatataaaataatgtggccttttttaaaaaaatttttaagggaaaaactctttttt

SEQ ID NO: 11316 - DNA, 438 bp, Gossypium hirsutum
  Clone ID: LIB3135-031-Q1-K1-G3
gccggaggacttacttcaaggttcctgactgcaaatctgccaagttgtatggtgatgcaaccttggttgaggaacggcatcggcatagatatgaggtcaatcctgatatgatatcacaacttgaagcagctggtctatcatttgttggcagagatgaaagtggtaggcggatggagattgtagaactaccaagtcatccatattttattggtgttcagttccatcctgaattcaagtccaggccgggaaaaccatctgcacttttctcagggcttatcgctgcatcatgtgggcaaatggacttgcttttaaacaaatctgatcatttgagcaatggaatggcaaatgggataaatgggaaagcaacttccaagccccgggcaaacggaaactgtttcaagtcatccaacggatcataaaatggtgtatacagcaatg

SEQ ID NO: 11317 - DNA, 460 bp, Gossypium hirsutum
  Clone ID: LIB3135-031-Q1-K1-G4
cccacgcgtccgcagaatttcaaactgaaagtggtgggacgcgcagaggtcaaagacgtacgctgcttaaagatttatacgacttaaatcctgtcgagtgtgtcaaagtaagtagaaatagttatggtcagcctgttggatctgaagctcaacttttagcaggctatttgggcattatatcacgaaatgccaatatgtttcccatcaactacgaatcatggtatcacatcctgatagcaataaaaatcaagctctggataatattaaggagagatttgctttagaggtctctgatgactatatcaagaaggcattgagaaaaaaatggagagaccataaaagcagtttgaaaaaactatattttaagaaagacataagccttgaggaaaaattgagagatgtcccaccgggaatgctgaggtaccaatgggaagatgcggttagattctggaattcaaag

SEQ ID NO: 11318 - DNA, 355 bp, Gossypium hirsutum
  Clone ID: LIB3135-031-Q1-K1-G5
acggcccggccccagtgaggggcttgggccatgcctgcaccctgccagtgaaacaatgatttgggatgtgatgaagcaatgcagtctcgagttatgtaaactggcaggagtgcaagcatagaagaccggggtgaactggaccataataatgaaggatacatggatcgatccactcccccgcagtcggtttatgttggagcttctataactctggtgaaggttggagtgttggagaagctcatttggtttgggcatattcactgccgttgatgatgatgatgaaaaatacaggagctaagaatgtaatcagtcatcaatgatgaagctattcgaggagccaaagagaaatgggaag

SEQ ID NO: 11319 - DNA, 349 bp, Gossypium hirsutum
  unsure (1)..(349): unsure at all n locations; Clone ID: LIB3135-031-Q1-K1-G6
ttgtcctggtgaatggattgacaagtggaatgaacagagggagaatggtactttcccgggtcctctgtgactgtgatcacatattggaaaggaggtgaagcattgcttctttggcatggaaaacttgtctgtagctagtttcaatggttattcttgaacatttcgaattaataagctacaaatggaaatttgtggccgatgagttgttaaaaaactggaatatgctctgatgttttaattcatgaacctgcttttttcagcnnaaaaaaaaaaaaaaaaatttttatttacttttaaatattaaaaatttttatagtattttttataataagttcttttataaaaatat

SEQ ID NO: 11320 - DNA, 385 bp, Gossypium hirsutum
  Clone ID: LIB3135-031-Q1-K1-G7
cggacgcgtgggtaagcgtcatgagatatgcaccaaatgatcatgaatttattttcagaaagataagacatcaaagggatggcctttgagatccttgtactcttatattgctgtccattgtaatatctagaattcatataactggatactcaccattgggttccccaggcaccggaaccatcaagaaagaagtcctcaagcatccagttctgaatatggtagcagagaaattgggcaagtctcctgctcaggtagctcttcgttgggggctacagatgggtcacagtgttttgcctaagagtacaaatgaaacaaggatcaaagagaactttgatgtttttgattggtccatacctgaagaattgttttccaagtttgctgaaat

SEQ ID NO: 11321 - DNA, 383 bp, Gossypium hirsutum
  Clone ID: LIB3135-031-Q1-K1-G8
caatgcgtgcgtcctctgtcattgctatggatactttgtgtcacagtgcacgtggtgactctatggaaagtgttgagaattatcgcggagatgttgacgatattcattttccctcatctagtacatatggccaccttgacatgaatgaaacatcagagttgaattatagtaatcaagctcagcagagtatttgtttccaaccagctgcagaggaagttccaggtgaaatgggcatcagcagtacaaatgacggggaggaaatattcaatgctgaacctgaaactgtgacagctcaagctagggatgggctttagtttggaattagtggggggagtgttggtatgtgtgccagccatgaagctgaaattcatggagcagatgtg

SEQ ID NO: 11322 - DNA, 472 bp, Gossypium hirsutum
  Clone ID: LIB3135-031-Q1-K1-G9
ctttcaagacagtgggaaggttgactttaatgtgtggcgacgggaccaatgatgttggagggcttaagcaggcccatgtaggtgttgctctattgaatgcagtgcctccaactaaaagtgagagctcatcgggaacatctaaagatgaaaacacaaaggcattgaagtcaaagaaatctaagcccactgtagaagcaacgggcaattcagaagcctcttcaaaaggaaaggtagtccccagatcagaatctagcaacaatgcaaccagtaaccggcatcttaatgctgcagagaagcatcgacagaagctgaagaagatgatggatgagctgaatgaggagggtgatggtcgctctgctcctattgtcaaactgggggatgcctcaatggcatcaccatttactgcaaagcatgcatcagttgccccaaccactgacataattcgtcaaggacgcagcacccttgtgactac

SEQ ID NO: 11323 - DNA, 474 bp, Gossypium hirsutum
  Clone ID: LIB3135-031-Q1-K1-H1
gcaccctggttctggatcatcagctcagacacagacagcaggagaatctgaagcacctgcaatcaccggagccacgccatccggtccactatcatctagagatgaggcttctccatttccttctagtcagaatacatcagcttctggatctactgtcagtcctctggatagacgaggattttcctttaataatcgaagcacttctagtaattcctcattgccaaatcaagaggaagcaggaccatcagagttgcagtcattttcggagtctataaaatccagacttaatgcagtgtccttgagatacagggagtcaatttcaaagagtacaagaggctggaaggagaggttgttctcacgtagttcttctatgtctgatatcgggaatgaagttcgtcgagaagtgagtgcaggaatagctagtgtatctcgtatgatggagcgtcttgaaatcaatggaaatagcagagaaca

SEQ ID NO: 11324 - DNA, 143 bp, Gossypium hirsutum
  Clone ID: LIB3135-031-Q1-K1-H10
gttttggacaatttgccgatttttgttcaccagaggttgtttttgaggtcaagttagacgattttaacatttatggatcctcaaatcgctctatatgtgatgtttatttactttgttttcttaaagatccctttttgcatctt

SEQ ID NO: 11325 - DNA, 259 bp, Gossypium hirsutum
  Clone ID: LIB3135-031-Q1-K1-H11
acgcccacgcgtccggagaaaaatgaaactgaatatgaatctgaagaacatgtgttagggaggagaaagagttgaaaagtgtcatctgtaaagaaggaatctgctggaaaagctaaaacgaagaaagtgtcgattcccaaaaagtctactccacagaaaagaaccccaaaaacatcagcatctaaaagttcaaaggcagatgatgatagtgacaaaagtccaaaggtgtcttcgaggaagaaaccggagaaggtcacta

SEQ ID NO: 11326 - DNA, 363 bp, Gossypium hirsutum
  unsure (1)..(363): unsure at all n locations; Clone ID: LIB3135-031-Q1-K1-H2
ctgcactttatcttgggcagcttcttgcactttttcaaagttgcgacgctatcagagctcaaagatgtagatatgacagaaagccctgggttaacaaatctgaaagcaacacctcttgaggttctcatcactccacgtcttgattccaagctttacgtgtgataggcaaagaattcatatatttagctgaaagaaaaaagtatacactgtgcgactactatggtgaaatagatgcatttttcaagcatcttgtagacctgcactctgttattattgttatgtacttatggctttcccacttgtctatgattcaatctgagtagcactccatctaacaatcnnnnnaaaaaaaaaaaaaaaata

SEQ ID NO: 11327 - DNA, 459 bp, Gossypium hirsutum
  Clone ID: LIB3135-031-Q1-K1-H3
cccacgcgtccgggcgatgtgacaagcaaagtggccggttgcttatcatacttgcagaacggagggaacgtgccgaaggcttgctgcgacgggatccggtccctgaacaacatggctcgaaccacccctgaccgccaaaccgtgtgtgggtgcttgcaagctgccgctaaggctgtcaaaattaaaggcaacttggctgagaccctcccagccaaatgtagtgtcaacatcccttacaagatcagcacttccactaactgcaaaaatgtgaagtgagatggatgaagagagggttttgcagcagcttgcaggagataaaatatatgatttaaaagaagaagaagaagaatgaataaggattttgggatggaattttcaaaatccaaaattagtctccactttagtgtagtgaggctttgtttattttggtttatgtttcggccctgcatgttggctcta

SEQ ID NO: 11328 - DNA, 377 bp, Gossypium hirsutum
  Clone ID: LIB3135-031-Q1-K1-H4
tgaaacaagattacaggggaataatcgtatcctcaaacaatgaactattgacacacaactttggtggctggaaaggatgttggagctgagcttgctgctaacttcactgagttatataacactgctggagacaacttaaggtttaaatgttaattgttatatatgacttccaaattaagttgagctcagaaaagtaattgctctagaatttgaggaaaagaattgcaggcaagttattatttttctgtcccataatgtgaaaacttggtgttatagattcttactactaacatgtttgaggtttgccttaaactaaacttgaaggttgacataatctaaaggccctttctggaaaaaaaaataatataatataatat

SEQ ID NO: 11329 - DNA, 447 bp, Gossypium hirsutum
  Clone ID: LIB3135-031-Q1-K1-H5
agaaggtgaaggcggagagaagaagaagaagtagaaaaaggagaagggaaagaaagaacaggacagtgcagtcccagtggagaagtgcgatgaggtagcaacagttcaccactcagagacgccggaaaagaagggtttcatggataagatcaaagacaaactcccaggacagcataagaaagatgaagaggacaccacccaaccaccagctgctgctgccccaattgagaacgaccaccatgaaggagagacaaaagagaagaagggatttttggtgaaaatcaaggagaaaattcctggttaccactccaaaacagaggacgagaaggaaaaagagaccactgctcccaattaatgaatcaatataatgcatttcaagtaaaagatgtgtagagattgtgtggtttatcaatttgttggaactgtctgttctctgtttttcttttg

SEQ ID NO: 11330 - DNA, 417 bp, Gossypium hirsutum
  Clone ID: LIB3135-031-Q1-K1-H6
cccacgcgtccgcccacgcgttcgcgaccagtatggacaagttgaagacttggttggatgagaaggaggctgatatcttcgtcaccacaaccggtaacaaggacatcatcatggttgatcacatgaggaagatgaagaacaatgccattgtttgcaacattggtcactttgacaatgaaatcgatatgctcggtcttgagacctatcctggtgttaaacgcatcaccattaagcctcaaaccgataggtgggtcttccctgaaaccaaaaccggcatcattgtgttggctgaaggacgtctgatgaacttgggatgtgccactggacacccaagttttgtcatgtcctgctcgttcactaaccaggtgattgcccagctcgaactatggaaggagaagggcactgggaaatatgaga

SEQ ID NO: 11331 - DNA, 474 bp, Gossypium hirsutum
  Clone ID: LIB3135-031-Q1-K1-H7
ctctaagcaaagaaagcaagccactattgttttaagagaagatcaaaatggcttcaaaaaaatcagcttccatggccttctttttagcactcaacattctcttcttttccctagtcagtgcttgtggctcttgctcttcacccacccctaaaccaaggccaaacccaaaccccaacacccccacccctactccatccgcacgaggcaggtgccctagagatgccctcaaattaggtgtatgtgccaatgtgcttaacttggtcaatgtcaccgttggttcacctccagtgatgccatgctgttcccttctcaatggccttgtcgacctcgaagctgctgcttgcctttgcactgctattagagctaacatcttaggcatcaaccttaacatccctgtttctcttagcttgctcctcaacgtttgttcaaggaatgttccaactgtgttccaatgctaattaagtcatcactttt

SEQ ID NO: 11332 - DNA, 417 bp, Gossypium hirsutum
  unsure (1)..(417): unsure at all n locations; Clone ID: LIB3135-031-Q1-K1-H8
tttcatgagatgttgaaagaagaaatttaagcgtgcggcggagagaaggcggtggactggagggggactatggagaggagctttgagagaatggataaggaagttcaaaaatggacggtggacgctaaggagcgttcaagttgccgatgcgaacttcaaactccacagtgcgacgccgttggctccaccgcagtggttgctgtcgttacgcctgatgagatcatcgntgctaactgtggtgattcgcgcgctgttttatgccggaacggcgtcgctttacctcttttcgacgatcacaagccggaccgacccgacgaaatgctccgaattcaagaagccggtggccgagtaatttactgggatggtcctcgtgttctttgcgtgttagccatgtccagagcaaatggggataattat

SEQ ID NO: 11333 - DNA, 435 bp, Gossypium hirsutum
  unsure (1)..(435): unsure at all n locations; Clone ID: LIB3135-031-Q1-K1-H9
catttgatgaagaggaaaccgctcagtttggagctcaagttccaatgaaaagacctgggcagcccancgaggttgcaccatgctttgtgttccttgcatgtaaccactgctcctcctacatgactggccaaaccctccatccaaatggtggtaccgttgtgaatggttgatatgcgccatacagagtttactcaagcttctgcttttcgtttctttttatgtttatataaatacggtgtgggtgttttgagttttgctgcatgcaagagtggcaatagtaaacggtcttatctatttccaactgtatgtataactccaggcaaggcagtctcaaggatactaggaggagcctaagcccaactagtgcggtttgtgtaaaaaacaactatgaactttgggtcttttataagaagcaagaaagtataataatgggac

SEQ ID NO: 11334 - DNA, 397 bp, Gossypium hirsutum
  Clone ID: LIB3135-032-Q1-K1-A1
cccacgcgttcggaaaatcaaaacagaaaagatctaattttcctatccccttcaatcggccggattcggcggttccttgccctcaaccgccaattcgccaccgtagttggcagatagcgtcaaatgaaggccgaacccgatcctattggaggctctatctctctaatcccccttttagcttcgattacaacgaagcaaatgaggaatcggaggcgttcttccaaaaagataaggcccttttttttgtttatatttctatacgagagaactatatggggggataaaaagaaaaaaagaaatgaatcgaaaacctaaagtaaatctgaaatgacccctttacctttcttctatattattttttggacttaaaactcaacaatctgtgtaaaaaaaacaa

SEQ ID NO: 11335 - DNA, 327 bp, Gossypium hirsutum
  Clone ID: LIB3135-032-Q1-K1-A10
cgcttttagcgattaccaatggatcgatgacactgtcggtctcatcctccattcatcccttctcgtcccgtacttttcttggaaatatagtcaccgtcgtcaccattccaacactggttcccttgaacgcgacgaagtatttgttccgaagaaacggagcagcattagatggtgggctaaatacctcaacaatccaccaggtcgtttcgtcacaatcaccattcagctcactctcggatggcctctttacttagcattcaatgtagcaggtagaccttacgaaggattcgcttgtcactacaacccatacggtcctatctacaacga

SEQ ID NO: 11336 - DNA, 233 bp, Gossypium hirsutum
  Clone ID: LIB3135-032-Q1-K1-A11
cgcctccgcgcatttatatatttccaatggatcaaggacactgatctgctcattctgacttcattccttggggaggcgcacttttcttgttaatatggggcccgaacttaccatcccaactctgggcccctttgaacgcgaataagtattggttgtggatcaaccgaccataataagattgtgggctaaatacgctatcaatacaacaagtcttttctggacaatcaccattc

SEQ ID NO: 11337 - DNA, 279 bp, Gossypium hirsutum
  Clone ID: LIB3135-032-Q1-K1-A12
gtaaaaatcaactttgttgaaggccttccattccaatatatgaagcaccagatcggaggacatgaaaagtaatttttcatacagttacgatttaatcgaaggtgggcctttgggggataagcttgaaaaaattagctatgagaacaagtttgaggcagctgcaggtggaggaagtatttgcaagagctcaatgaaattctacactgttggcgataatgttatcactgaagacgaaatcaaggctctcattaaagggagtgaaggagtttacaagcctgt

SEQ ID NO: 11338 - DNA, 365 bp, Gossypium hirsutum
  unsure (1)..(365): unsure at all n locations; Clone ID: LIB3135-032-Q1-K1-A2
aacaaaaatacccctgcgaaggggtctctgtacatttaatttcactctaagacggcaaaactcacccagtatttcagatctaagcacccctccaaaagtaacacctactgcatgtagcagatcttttttgtcaaactctggtaagtaaggcccagttttaatccaaaacggagatgaaacaagccttatttgatctctcgccattgatttactcaattgatcaaaaaggattaattgcttcctaaacaaccatggctgaccttccaggaccgtttctaaatcctcttctgattcaaacgatatcataaaaagatnttgtcctaccccttgaatcccaaattttttatttgtctttcaaatactcc

SEQ ID NO: 11339 - DNA, 354 bp, Gossypium hirsutum
  Clone ID: LIB3135-032-Q1-K1-A3
gacattatcacaagatgatgtgcgagagctattttatagagagatattagagtaccatccacagatgcttcagcagcaccttaaaggcaaagatcagattagcttcatgtatccaagtggagttgatcggtataggcaacaatttgcttgtcttgagggacaaggcaaaattgaaagaggcattctgctccaaaggaaacatacatccttgccaagggagcgagtctgcaatgatgatactgatcgcattgatgaatcaaaaaaacgtacagtggcttctgctggtcgtgcaacccttcagagccctacaaagttgcaagcatccgtggaaccagaatatgttaaccaaaatgt

SEQ ID NO: 11340 - DNA, 362 bp, Gossypium hirsutum
  Clone ID: LIB3135-032-Q1-K1-A4
caaaccttttacttctgaactctttcaaattcatcatgtctgacaagtgcggcaactgcgactgctctgacaagagccagtgcgtgaagaaaggaaatagctcggtcattgagactgaaaagagctacatcagcactgtagtggtcgaggctgtggcagacaacgatggcaagtgcaagtgtggagatagctgcagctgcacagactgctcatgtgggactcattaagcagacatagaaccatgatgttttagtccatagcaatattaagacctaaaaataatgaaattgagacgaataaaatggtgttttcgtgttgtactttgagacattgaatgcgttttcatgcctgtctgtcttatg

SEQ ID NO: 11341 - DNA, 271 bp, Gossypium hirsutum
  Clone ID: LIB3135-032-Q1-K1-A5
accacgcgtgcgcccacgcgtgcgttaaaacaacagatactcttgaaccgaacgattgtttgcgagattctgcctgccaagaagttctatcgtgcagaggaatattaccagcagaaccttgccaaaggaggtcgattcgggtttaaacaatcggctgagaaagggtgcaatgatcctatccgatgctacggctaaaatcccaatactctatatgcaacttttagcttatgatagcttacagatttttgctttagccattcactagcatatt

SEQ ID NO: 11342 - DNA, 305 bp, Gossypium hirsutum
  Clone ID: LIB3135-032-Q1-K1-A6
caaacatccatacttcttctatgcttctctttcttttaaacttagaaacaaaacaggtagtagcattagaatcatgggtgttgccagttatgagtttgaggtaacctccccaattgctccagccaggcctttcaaggctttttgttcttgaggctgccaagatttggcccacggctgccccttatgcaggcaagagtgattagctcgaaggtgatgctttgtcctggcagtattgtaaagatcacctttgttgaacgcctttcataccaatatattaagcaccttattggaggacatgactaaaa

SEQ ID NO: 11343 - DNA, 55 bp, Gossypium hirsutum
  Clone ID: LIB3135-032-Q1-K1-A7
cccacgcgtccgcccacgcgtccgtccacgcgtccggactagttctagatcgcga

SEQ ID NO: 11344 - DNA, 340 bp, Gossypium hirsutum
  Clone ID: LIB3135-032-Q1-K1-A8
tctagatcgcgagcgccgcccttttttttttttttttttttttttttttctgaacatttaaaattgccaatcctaggaatgcttcactcataaacttctaattcatgctgaatacatttgaaaaagaaaaagaaaaagaaaaaaacattttgaaatcaatcccaaaactgcaaaaatgccttgaaatatacaaagcagatgagatttaaaatgtttgaaaatttttatcattcctgactttatgaataaaaattcaagcgcttaatctacaagtcggcagatattattagatccttacttcaatgcctttcttcaacaagggtccttttacagactggat

SEQ ID NO: 11345 - DNA, 385 bp, Gossypium hirsutum
  Clone ID: LIB3135-032-Q1-K1-B1
cccacgcgtccgcccacgcgtccggttataatgttgctcttggaactgcaaggggaatcacataccttcatgaggagtgtagggactgcattgttcattgcgacataaagcctgagaacattctcttggatgaaaatttcaatgccaaagtgtcagatttcggacttgccaaacttataaatcccaaggaccatagataccgaacattgacaagtgttagggggacaaggggctatttggcacctgaatggcttgcaaaccttccaataacttcaaaatctgatgtttatagttatgggatggtcttgttggagatagtgagtggaagaaggaattttgatgtttcagcggacacaaataggaaaaagttctctgtgtgggctta

SEQ ID NO: 11346 - DNA, 262 bp, Gossypium hirsutum
  Clone ID: LIB3135-032-Q1-K1-B10
tccggagcccgaaaactttagccaagatgctaggaacagtaatctgtgttggtggagccatttccatggcattgctcaaaggcccgaagttaataaacacacaactattaccaccaaagtctttgttcagcccaggaggagaaaattggttgctgggttgtctatttctgcttggaagcagctttttctggtcactttggatggtcttccaggtcccaatttctgaaagctgtccagaccacttgtattcatctacttggat

SEQ ID NO: 11347 - DNA, 229 bp, Gossypium hirsutum
  Clone ID: LIB3135-032-Q1-K1-B11
tcgttcggagcccgaaaactttagccaagatgctatgaacagttatctgcgttggtggagccattggcatggcattgttcaaaggcccgaaggtaataaacacacaatctttaccaccaaagtctttggtcattccatgaggagaaaatgggttgcttgggaagtctatttctgtttgtaatcagctttttctggacacatttttatggttttccacgtcccaaatatt

SEQ ID NO: 11348 - DNA, 336 bp, Gossypium hirsutum
  Clone ID: LIB3135-032-Q1-K1-B12
gtctgggctttcaaaaagatgaaaatgcaaagggtaaagagaaagtcttttgaacaaccaacctgacataaggattctagctcgcccacttagagcagatggagattatcggacggggaaaagcggcactcgacatctattaaacaacaccaagaacaaagccataccatgccctcgggagaaagacgtgatgattgccatgaatgctgccttcgaggacgtgttgtacaagaaggtctttgccgattcctatcaacatggtgcacccctcagtagaggggcgtgaaaaggccgtggagactttgaccgaatgaatagggatcaattgatagacat

SEQ ID NO: 11349 - DNA, 365 bp, Gossypium hirsutum
  Clone ID: LIB3135-032-Q1-K1-B2
aaaaaaataaaaagaaagcagaacaccctctgctagggtttcatcattcgccctaaatcgccgcttgcctaccgttcaaaggcgcttcgggtctcagcccttcgccaggctcccgatttgagcgaagcgagtgtgggcttcaacggcgaagcttcaaaggtaaaacccctccctccttttctaattttatttgtaaaacacaatcataatagatcaaaaaaatgacgcgattcaccttccaattcctctgtattttcagtatttctttcctcttttcttcttcttttctttacagattaaaaatcggccatttatagccaagaagcacaaaaataaaataaaatcaaattataaaaactatttat

SEQ ID NO: 11350 - DNA, 296 bp, Gossypium hirsutum
  Clone ID: LIB3135-032-Q1-K1-B3
aaagaaatgaaatgaaagcagaacaccctctggtagggtttcatcattcgccctaaatcgccgcttgcgtaccgttcaaaggcgcttcgcatctaatcccttcgccaggctcccgatttgagcgaatcgagtgtgggtcttaacggcgaagcttcacaggtaaagcccctccctcctttgctgatcttatttgtaaaacacaatcattatacatcaaaacaaggacacgattcacctttcagtttctctgaaccttcaggattgctttcctcttttcttcgtcttttctctacaga

SEQ ID NO: 11351 - DNA, 414 bp, Gossypium hirsutum
  unsure (1)..(414): unsure at all n locations; Clone ID: LIB3135-032-Q1-K1-B4
caaactgatacaagtagctgcatcacagcttagtgaccagctcccagagtctcgtgaggctgctcgaacccttctattagagctgcaaactgtatatgagaaatccaatggactctcaacaacaatacctgaacaaccagagatgaactcttgggagcatttttgtcagtcaaaactctctcctttaagtgcacaagcagtgcttcgggtgacaaacatagctcgcgaaggcctcgttattggttcctaacagtgagttcttatatacatgtgtgtagcacgtaatgttcttttttattttcaatttacccacatatatgagatttagtgtgcagactgcagggtctacaatccacagtcaccttttattgcatggntttgggtttatcttttattttaatttttccttggaaa

SEQ ID NO: 11352 - DNA, 108 bp, Gossypium hirsutum
  Clone ID: LIB3135-032-Q1-K1-B6
tgacaatggaccgcgtaattacaatttcatgggagtgaagcataccgtgagcatgaaatacggggtgaacctggggactccggaagagtactacaatgacgagcttca

SEQ ID NO: 11353 - DNA, 412 bp, Gossypium hirsutum
  unsure (1)..(412): unsure at all n locations; Clone ID: LIB3135-032-Q1-K1-B7
agttaatatagagagttcatatcataaaatgtcgaaccatagatgaggctggaatttctaaaacaacatagtcataaggtaggcacggcacagcctccaagccatgaacaaaatatacgtaactagatcgctacacaactaataaaaggataaatcaacatcaactgttattcctatagtaaaatagtcctaccatacacgctgatgatgatctcctaattgtaggttgatgagaaccttaggactgctttggggagcatctaagcttgtgcccgttggttatggaattaagaaattgcaaattatgatgaccattgtggatgatttggtgtcagttgacactctcatcgaggaacatctgacggttgaaccaatcaatgagtnatgtcagaggtgtgacattgttgcattc

SEQ ID NO: 11354 - DNA, 305 bp, Gossypium hirsutum
  Clone ID: LIB3135-032-Q1-K1-B8
aggagttcgagactgaactgaaaaaggagcctgagtcaataacagagcaaccgagggagaatacctcagctgttagtgaagagaagaaacgagatcttgaggtctctagctcaaaggaaagtgtatgaattcctaaaaccatcgtcttgttggtaaaatttctcaattcgtatgtctgttgtatcgatgaacatcgaacaaataattttgaatgtagatcagttatgttagagattgctcaattaaatggtaagataatctttcagtaaaataaacttgtgcccgttgtaatatggaattaaaaa

SEQ ID NO: 11355 - DNA, 284 bp, Gossypium hirsutum
  Clone ID: LIB3135-032-Q1-K1-B9
caaatttgaccctagatatttactctgtgtccaaacgccccccaaaaaatcaacagcctatgaaagaccagtgttttagactcttttttaaaggtacatttgcctttcgtttacccgttggattttgtttcaaaggtcgaagaaagctatgagattttggagctttttgctcttgaagagaggcggcatggagagagggaggattttgtactgcttatatggatcgtgaaggaggtatccacggcggatcttgttattactcctttcttggcattcggactgat

SEQ ID NO: 11356 - DNA, 393 bp, Gossypium hirsutum
  unsure (1)..(393): unsure at all n locations; Clone ID: LIB3135-032-Q1-K1-C1
agattgttgaatgttctttttctcttaagagagttagtttgaaagcaaatgggttttttgctagtgttaatcaagctggaatgggttttgccatctcaccaaaccctcaaattccactccagagtactgcaaagttccattttgccagtcttgtttcaatctctgagcccgggtatctggttttggatgatgaacttgagattgctgagaggttagtggagaagaagaagaagaagaagagtgggtttaagtttagaattaagattgggaatgcgtcattaaggaagttgatgagtggngcagtcgcaggtgcggtatcaaggactgcagtggctccattggagaccattaaaacgcatttgatggtgggaagttgtgggaattccatggctg

SEQ ID NO: 11357 - DNA, 264 bp, Gossypium hirsutum
  Clone ID: LIB3135-032-Q1-K1-C10
aggggctaggagcaagcagacggccgtatagggttccaaacctatcttactaataataagaaaggggcaagccaaaacctactcctaacaagttgctggcttttcatccgttgcgcgctagcgcgcttctgttattcagaaagcttcttcaaatatcccaaaaaagtacgggttataactaacagtcgctagctggcgcgctagcgtttttccttactaggaaacgctcttgttgttgtagcgcgcagtgcactaatgaatagg

SEQ ID NO: 11358 - DNA, 426 bp, Gossypium hirsutum
  Clone ID: LIB3135-032-Q1-K1-C11
ttttcatcttcttcgcccctcctctctagtttcatcgtaaagaaatatgcctaggtatgatgaccgacgcggtggcactcgtttgtatgttggtcatttgtcttcaaggacaagatcacgtgatctagaggacatgtttagcagatatgggagagtacgtgatgtggatatgaagcgtgactatgcatttgttgaattcagtgatcctagagatgccgatgatgcaagatatgcattgaatggtcgagacatggatggaagccggatgattgttgaatttgccaaaggagtgccccgtggttcatgtggatctcgagattaccctggaagaggccccactcctgggtcaggacgctgctttaacttgggaatagatggtcattgtgctcgtgattgcaagcccgggattggaagaaaagtgttacc

SEQ ID NO: 11359 - DNA, 281 bp, Gossypium hirsutum
  unsure (1)..(281): unsure at all n locations; Clone ID: LIB3135-032-Q1-K1-C12
cccacgcgtccgcccacgcgttcgggctgccagaaggatttcctctctgttatcttcttctgcaacttctttgggaaggttttcaagttggggaagaagaattaaaagctntagtactgctgctgctgctgcgaatgatgaacctatacttccattttttcaaatagatcatactcagcttctcatcaatggacaatttgttgatgctgcatcaggaaaaagcttccctacagttgatcctaggacaggtgatgtaattgctcgagttgcagaaggagatc

SEQ ID NO: 11360 - DNA, 272 bp, Gossypium hirsutum
  Clone ID: LIB3135-032-Q1-K1-C2
cccacgcgtccggaaaaaaatccaaaagcttattcaactctgtgtttctttccaacttgtttggtcttcgtcttaaaactctcaaatggataaaagaggtccaaaatcaaagaacccagaaccaggaaatcaaggaaacgattatctcttatcggagtttagtgtgagcttcttcagcatcaggatttaactaaccagtttgcttctgtatattagaaatgcagtctactggattgacagaggaacctgttaccaaaggtgaaatgtcacat

SEQ ID NO: 11361 - DNA, 339 bp, Gossypium hirsutum
  Clone ID: LIB3135-032-Q1-K1-C3
cccacgcgtccggaaaaaaatccaaaagcttattcaactctgtgtttctttccaacttgttggttctggggcttaaaactctcaaatggagcaaagaggtccaaaatcaaagaacccagaaccaggaaatcaaggaaacgactatctcttatcggagtttagtgtgagcttcttcagcatcaggatttaactaaccagtttgcttctgtatattagaaatgcagtctactggattgacagaggaacctgttaccaaaggtgaaatgttacatggtcgaattattcaacaggacacatagacttccaagtccttccataaatgcataagctcctttttgg

SEQ ID NO: 11362 - DNA, 333 bp, Gossypium hirsutum
  Clone ID: LIB3135-032-Q1-K1-C4
cccacgcgtccgaaataagttaaaaaattacaacatacatcatatactataataaattatcataaattaaaagtgaattagaagtcactaatgtaattttaaaagtcatatactcttttgctcttatttaaagagtcatcatgatgctgatcctgatcatgatgctgatcctgatcatgatgctgatcctgtaagttttggcgtgtatatattttttaaattcaatttgcttaaaattggggtcagatctgattgtcttctggatataggttgctctgtatatgaatttgaaagactatggtggtggttttgagttctgtaatctgtcagatg

SEQ ID NO: 11363 - DNA, 396 bp, Gossypium hirsutum
  Clone ID: LIB3135-032-Q1-K1-C5
ccatggtcgtcgtaagggcaaaagggggcactcttacaagtagactgcgtgtatttaggttgtggtctcttaatgttgggaaatattagaggggctctaggtgatcatgttgggtatggagctgtggtgtcgcaattggaagtatttaatcttctcttacctctcaaggtccctggttttaatattattattattttttggggacggtgtggaattagaaaaagttaagaaccctagtgacgctacaaggttgaaatcttgagattcctagttgtaggagttgtgtattttatttatgttagtgtaactttattttattttgcttttctttctactggattcacaaacgaaacaaattaatctctgtttcagaaatcatcattatactttttgaga

SEQ ID NO: 11364 - DNA, 330 bp, Gossypium hirsutum
  Clone ID: LIB3135-032-Q1-K1-C6
cgcgtcgcgaccgacatagagacaggaggcaccgatacatgacgaccctcgtgaatatctggacgattaccatggtgaactatgaggctgtccaccacattatagtgagattcaggatcccatttagattacgaaaaagagaaaagccgaagctaggtcttcacgctgagagagttggaggtacctgtgtactgtatgttctcattgttgtcgacgttgtagagacatcgttcgtagaatatgaacatataagcttgggaactgttaacattgcatgcaccaccttatgtttggatgcatattttgttgaataaaatggaacttttaatt

SEQ ID NO: 11365 - DNA, 400 bp, Gossypium hirsutum
  Clone ID: LIB3135-032-Q1-K1-C8
cccacgcgtccggtatttcatactcatttagcccctttcattagcatcgaaatcactccagttttctttatcactgaaaaatgtcttgctgtggtggaaactgtggctgcggttctggctgcaagtgtggcagtggctgtggaggatgcaagatgtacccagacctgaacgttgccgagatgaccacaactgagactctggttcttggtgtagcaccccagaaagcacactttgagggagctgagatggaattcggggctgagaacggctgcaagtgtggagacaactgcacctgcaacccttgcaattgttaatgattagagaccaaagccaaagctccctggaagcagagacgcctttgtctttaagaaataaaaaggtttggttgttatgtggtttt

SEQ ID NO: 11366 - DNA, 421 bp, Gossypium hirsutum
  Clone ID: LIB3135-032-Q1-K1-C9
gtttagtggtaacgagtggagtgcataagcccctttagagagaggggcgagcagcaagcagacccttgtatagggttccaaacctatcttactaataataagaaaggggcaagccaaaacctactcctaacaagttgctggcttttcagccgttgcgcgctagcgcgcttctgtttttcagcaggcttcttcaaatatcccaaaaaagtaggggttataactaaaagtagctagctagcgcgctagcgttttcccttactagtaaaggcgctgctagttgtagcgcgcagtgtactagtgaataggaaaagcggattgatattactaatgacagatggaggttgaggatagaacatgttcggtgcctcgtccttgtctccttcgccggagactcaaaatgataggaatcctatcgataaag

SEQ ID NO: 11367 - DNA, 391 bp, Gossypium hirsutum
  Clone ID: LIB3135-032-Q1-K1-D1
cccacgcgtccggattccttgtgtggtcaacgtggtgagggcaatgagagtgaagcatctagacgtatcaaaaccgaacttctcgtgcagatgcagggtgtcggacatactgatcagaaagtcttagtgcttgcggcaacgaatactccctatgcactcgatcaggctattcgccggcgttttgataagcgtatttacattcctctcccagatttgaaggctcgacaacatatgttcaaagtgcatttaggtgatactcctcataacttgaccgaaagtgattttgagaacttagctcgccgaacagaggggttttcaggttcagacatatcagtttgtgttaaggatgttcttttcgaacccgttcgtaaaacccaggatgccatgtttt

SEQ ID NO: 11368 - DNA, 378 bp, Gossypium hirsutum
  Clone ID: LIB3135-032-Q1-K1-D10
gtcctgatttagaggatcacgttgctttctttttatgacgtagacatggatactagtgatggcagtgcgtgtaaagctgttgataaggagcaatccaaaagtatcacctataattcgaggtgaagagatatattttaattttagctgcgcttaggggtagaaatagaatattgactctgttttggtgggaaggaaatagggggctagaatcaaaagtttcatagcaagatgtgtttgtgtgttggtatatatagtgttggtaggataagcggcttctaaatatgcgaataagtttccctattctgctgtcaagaatttaaagtagagttggaggacaagattcacgatgagtgtacagctttcctttttttgtttttt

SEQ ID NO: 11369 - DNA, 446 bp, Gossypium hirsutum
  Clone ID: LIB3135-032-Q1-K1-D11
cttggaggctgggattggtcgagtcaaagccaatttgggaagccgggttaagaaagggcaaatgactcgagaaaagtttgagaaaaccatgtctctgctcaggggagttcttgactttgaaagctttcgggatgtggacatggtcatcgaggctgtaatcgagaatgtgtcattaaagcaacaaatttttgccgatcttgagaaatactgtccaccacattgcatacttgcaagtaacacttccactattgatttgaacttgattggtaaaaggaccaaatcccaggatcggattattggagctcatttctttagtccggctcatatcatgccgttattggaaattgttcgtactgagcatacatctccccaaataattgttgacttggttgatgttgggaagaaaataaagaagactccaatcatcgttggaaattgcacaggtt

SEQ ID NO: 11370 - DNA, 283 bp, Gossypium hirsutum
  Clone ID: LIB3135-032-Q1-K1-D12
gcttcgaatcattcatagagacttgaaagccagtaacatcttgttggacgttgaaatgaatccgaagatttcggactttggcatggctaggatctttgggggaaaccaaaatgaagcgattacaattcgagtagttggcacatatggatatatgtcgcctgaatatgcaatggaaggattattttcagtgaagtccgatgtgtacagctttggggtattactgttagaaattgttagtggccggagaaatactagctttcgttcatctgattacacaagtctt

SEQ ID NO: 11371 - DNA, 367 bp, Gossypium hirsutum
  Clone ID: LIB3135-032-Q1-K1-D2
gctggtgctcaggtgcttctgagccgattgagattgtttttgagtcctgggtatccatatgaggaaatattgagtacgtttcataatcaaaccagcataattatgtgctcattccttccggttttcactagctttaatagaacaaaaggaggtttgattcagttaaaccatggaaggcctcagccactgcaatacgtagtcaatgcagccttcttagccgccctatatagtgattatcttgatgctgctgatacacctggatggtattgtggtcccaatttctattcaactgatgtcctgcgtgaatttgccaaaacccagattgattatatcctttggcaaaaatcctcgaaaaatgagctatgtt

SEQ ID NO: 11372 - DNA, 297 bp, Gossypium hirsutum
  Clone ID: LIB3135-032-Q1-K1-D3
tgatgctggccctagcttcatgatgaatcctgatggaccatttagagggtttggtggtccaatgcgcccctttggtcggatgtttggaggactgccttatgatgattggggttatgcacttgggagcgggaggccatcgagagcagattggcggtacaggccatactaaaagatggagcggggacagttaaagcgtcactgttaaaacttaaattatctaaagattatttcgagaatcaattatcaatatcatctattcacagattatgaatcatatagtgtggagccttagatttc

SEQ ID NO: 11373 - DNA, 387 bp, Gossypium hirsutum
  Clone ID: LIB3135-032-Q1-K1-D4
gaataagttgaatggtatggaaacaagagttgaaaagaacttcgaagaacttgacaagttgtacgatgaagtaattgccgatcatgttgctccgacaagaactaaagctaaccatgaagacattgttgatgttcttcttcggttgcaaaaggatgcacgtcaacttatcactcttaacaatcagcaaatcaagggtgtcctcacggacatgttcatagcggggactgatacgacagcatcaagtctggtttggaccttcaccgaattgataagaaatccaccatcaatggagaaggtgaaatatgaggtacgaaaagttggcaatggaagagacaaaattgaagaaagtgacattcccaaactacattacttacactcagtcataaa

SEQ ID NO: 11374 - DNA, 342 bp, Gossypium hirsutum
  Clone ID: LIB3135-032-Q1-K1-D5
aagagagtgagaaaggttttattcctttgcctgattagagacatggagaagtggagttttatgctagttattgcattagttgttgctcacgctagtgcaagaaatgtgcccacaactacaactgtgcccactagcactactcgcagtagtgtaccaagtggtgctactggtgttggcgaccaaaagaacttcctcacttacggtggcgttgggggctactctggaattggctctaatggcttgccatttggtggagtggggggtctgggtgggattactcccctcggtggtgcacgtggacttggaggtggagtcgggggcattggtggagtacgtggactt

SEQ ID NO: 11375 - DNA, 442 bp, Gossypium hirsutum
  Clone ID: LIB3135-032-Q1-K1-D6
caaataaaattaagtttttacgaaagagccaaggtctcccctccaaaatcaactccagaaataagtttgtcccacccatctgatttcaaactttttccttgtcttccataaacttttcatatgagccctaaaactatctggattatataatttccctgcccaaaccgtacaaatcaatgttggtttggaacttggtaccaccagcgatcctttgactgatagttgaactaattcttcagcaagaagaccgatctcatcccctccctctctatcgtcgccaccgcttgcttccatccccagccacagtagttactgctatctctagggtttctcaaccaagcactcttgggagcagaagtctttagtttttaaatttaatatttatttcaaatttaatagtgtatttaaaaaagtttttttttcgcttagaaggtgaattatt

SEQ ID NO: 11376 - DNA, 288 bp, Gossypium hirsutum
  Clone ID: LIB3135-032-Q1-K1-D7
gcgctctaaattttgaacacacccaccaacactctatttacaacgatggagcaggagaggacacttctcacatcaaacgaagagctcgtatctacgatgaagcggaggaagaagggccgcaaccgaaacggatgcatacggtttttatttttataatgggccgaccggcgaagaagcaattactgtggtgaactacttaaccaacctcctattgatttttttttgttttacacattcataaggagaagtgcatccatcaatgggcgtggataagatgcttaaactttt

SEQ ID NO: 11377 - DNA, 309 bp, Gossypium hirsutum
  Clone ID: LIB3135-032-Q1-K1-D8
acgcccacgcgttcgctttcatccctttttgcataataagctgcctctatgaatgggggcgtaaaatccggggggttcacatcagggttatcaatgtttcctccagaaaagcgcccccaacttgagaaaccaatgcctgtatcagatgctttatacatcccaagcacaactcatttcaaccctttacagcagctggcaattaacaacatgccacttgcaccattaactggaatgcaaccaatgtctcaaggcaaccagatttcaagctccctttgcttctgctacaccttcccctttttttactgcaaa

SEQ ID NO: 11378 - DNA, 275 bp, Gossypium hirsutum
  Clone ID: LIB3135-032-Q1-K1-D9
caaaaattgggatgttgcggttaaacctatgtttaccaaattcggttaaaaaaggggtaaatatttgatcttagacttccattaaaacaaaaaggaaaaaaaggggaggaggtgaagaaactaatctcattgactgcatgatgggtgcttgtgttttacttcatgttttagtgcgtgaaatatagtattttcctataatttgatagttcttcttattggttaaaaaaaaaaataatattaattaatattattttttttatatttaaaaatatggg

SEQ ID NO: 11379 - DNA, 342 bp, Gossypium hirsutum
  Clone ID: LIB3135-032-Q1-K1-E1
cggtggtctataacaaaggcttgttgctgagtttcgaggacgagtcaggcaagtgttggtgtttccgttactcgtattggaatagtagccaaagctacgtgttgactaaaggatggagcagatacgttaaagagaagcaactcgatgcaggtgacattattttattccaacgacatcgtctcgatgctgagaggttgtttataggttggaggaggcgcggtgctgcactggatggcgggaacgccgagttgggaaataacagcggcggcgttcgcggtggtgacaatagttggtggagcagtaagagaggattgtatcaagggaatccttatcctgggcaca

SEQ ID NO: 11380 - DNA, 299 bp, Gossypium hirsutum
  Clone ID: LIB3135-032-Q1-K1-E10
cccacgcgtccggccacgcgttcggccgaactaagccaaactcctttggccatgggcccatcgcagcctacaacggacgccttcgtccgtcatgggcgatttacaaccctgcgatttctcctccaccttcgacttctacgagacgaggaagaaccaatggcggatttgcgaggtaaggtttcgcccttctctcttcttttatttgctttcggaataaaataagaaaaagtagaacaaaatacatagcatgagaatgaccacaaagagaaagcccgaagatttagatcgaaaaaatcacc

SEQ ID NO: 11381 - DNA, 114 bp, Gossypium hirsutum
  Clone ID: LIB3135-032-Q1-K1-E11
cactccctaggccagggatgacaaacaaaggcaatcgttagcacacaaggcacaggaagacgacagaacggtgaccggagaaagagcggagtgagctaaaggcgccaaaaccga

SEQ ID NO: 11382 - DNA, 376 bp, Gossypium hirsutum
  Clone ID: LIB3135-032-Q1-K1-E12
ccacgcgtccggatttagtttgttgcatgctggaaagcttattatgcctagaagaccaaggactcaattatgttgagtttcttgctgcaaaaggttggaattcaaacagagaagctagaaaatctgcgactttcaattgcaaaaggatctccaatgtgggagacacttgacttgtgcataaatgttgtagatggcaaatcattggagctgttggttccacgtcttgctaacttggttccatctggagttggcctcaatactatggttggtgttgccacctttatcaacttattatttcagaaagttgttgtgggtattaaaccctatatcaacatgctattgaggtcattgtttcctgttgtaaagaagagaaaag

SEQ ID NO: 11383 - DNA, 98 bp, Gossypium hirsutum
  Clone ID: LIB3135-032-Q1-K1-E2
gaaaaacacctgtgggaattatttcttgtattgggtgctatttgcccctcaattttttacagggattctttttatagccaggagttgcctcaaccatt

SEQ ID NO: 11384 - DNA, 200 bp, Gossypium hirsutum
  Clone ID: LIB3135-032-Q1-K1-E3
accacgcgtgcgccaaagcgtccaggtattgttgttactaactggatacctctgcgcctccgcgagcaggatgatgagcttgaagctgatggagctctttatctaacccgccatgatgtgaactctcagggagggccatgtcgataacaacactgccgctttgtacccattagaagatatggctacatctcaaacagcag

SEQ ID NO: 11385 - DNA, 431 bp, Gossypium hirsutum
  Clone ID: LIB3135-032-Q1-K1-E5
cagaaactgaagtatggaattcgggaaaatccacagttcttcaagttcttctgtcactccaggctcttgtgcttaatgagaagccatacttcaatgaggccggatatgataaacagttaggaagagccgagggggaaacaaactcggtgagctacaacgaaaatgctttcctcgtaacctgccagtctatgctttatatactccggcatccacccaagcattttgaggcacttgtcaaggagcactttagtagacgtgccaaaactattctctccgcttgcaatgcatacatggaaggagcacctgtaggatttgctcttgaatgtggcaaaaatgggcacaatgtaaatcttaaagaaaggtctactgggttcaaaatcatgctagccaaagcttttcccaaagctttggggatgcattttctgatcagg

SEQ ID NO: 11386 - DNA, 332 bp, Gossypium hirsutum
  Clone ID: LIB3135-032-Q1-K1-E6
acgcaaagactcccatgctttccgtttttcaacaaccaataaaagcaaactatattttgtcactactcgtacagggaaaatgaaggctctccttcttttggggggagcggagaatgaacagaatgaaagaaaaatgaccacggctattcaatattcaaaagaatcttttttaaaatgtttgtcttggccttgaccaaaaaccgctggttctgctacccctggttttgctatcgctggcttagctaccgctggctcttctaatgacctgtgggtgggggggcaaatggaaccaccccaaccacccatcgtgcccagcccccttgagcaatgtg

SEQ ID NO: 11387 - DNA, 320 bp, Gossypium hirsutum
  Clone ID: LIB3135-032-Q1-K1-E8
ggaagaaggcggctgtccctaaagctactccgaagaaggctgccgcgcctaaaaaggctccttcgaagagtgctaagccgaaaagtgtcaaatcaccggcgaagaaagctacgacgaggaggggaaagaaatgagaagggaggctagtcgaaataggggtagtattgtaaattggagtgatgtatagtgggtgtatatggatccacgtatacccacgagatataacattcacatctcttttttaatatttttatttgagttggttcttttttttttggtgagtttaaaagttgaaacagatgttagatgtaactttcact

SEQ ID NO: 11388 - DNA, 363 bp, Gossypium hirsutum
  Clone ID: LIB3135-032-Q1-K1-E9
cccacgcgtccggattgattatacaagacatccgtcagcagcttcatcagctctggtagaattaacaacccatctcgactttttcaaggaaaggcgttcccaactgatagaacagcttcacaaccttgatctgaactatggaacatcctctcaggagtttttatacaaaccatcatcatcacccccttggaactaaccggtgaatctggaggagcaacgttgtctcgtgttgttgtacatcctaatttgttgcatgtaatctcatttcttatcttttactctcgttttttcactttggtttgtgaaggtgatcggaagtgtaatcagaatgttttaatttttttatgggacattgtaaagaaa

SEQ ID NO: 11389 - DNA, 371 bp, Gossypium hirsutum
  Clone ID: LIB3135-032-Q1-K1-F1
ctttgcttctttactaactaaaaaggaaaatttttctttgtttaacgcttaagattcctttaacaacaatggctgcctcaatgtctactctaatggttgttctcgtcgctgtatgcgctctcatgggttccgccattgccgccgacgctccggctccgagccccacctctggtgccggctctatctctccttcatttgtctctgtttccgtcgccgccgccgctgtggctctgcttttcggatctagacttcggatctgaatgatgctatctctggtgttcagatgatgctctgctcttcttttatatatgtatttttttctttttgatttgattttgaatttggtttggaaattttagtagcctgtggta

SEQ ID NO: 11390 - DNA, 325 bp, Gossypium hirsutum
  Clone ID: LIB3135-032-Q1-K1-F11
gttcactactgtgctgcgggatctaagccttggaggtacacagggaaggaggctaacatgcaaagagaagacattaagatgcttgttcagaaatggtgggacatttacaacgacgagtcacttgattaccgtaccagcgcggctgaaggagggacagagaccgtgaacctgcaaccgttcctggtggcactctctgaagttggtgcagtccatttcgtggccgccccatctgcggcgtaaatatgttgtgtaacgacgataaataccagttcataggtgtaaagaaatattgtaagaatcgagaaaggggcgatcctatgtggaa

SEQ ID NO: 11391 - DNA, 369 bp, Gossypium hirsutum
  Clone ID: LIB3135-032-Q1-K1-F12
tcggccacgcgttcggccacgcgttcgaacactcgttcgttcacacgtgacggtttttttttttcagtgagaatggattctatggaaccagggcagtacctaacacaaacagaggcttactctcggcttcctcatttcattaatggctctatgcgccaagcgcgctagccggcttttcaagaagctaaagcctaaacataacaacttagcttccggcactccgagattctacgagccgaaatcgcctttgaaatcttcgctgagatcgccgatgccgaatcaatttttggcgacgataagccacaaagcgatcacgctggtgaaccggaaaaacataggcggcggaaacgggaaacacgtggaggagga

SEQ ID NO: 11392 - DNA, 435 bp, Gossypium hirsutum
  Clone ID: LIB3135-032-Q1-K1-F2
cggacgcgtgggcggacgcgtgggtttgcaggaaaaattgtagtcccaggctcattatcacggccgttatcggagctgtttttcgattttttgttggtgtttcctttccatctgtttccctttacaagattcgaaactttcctttaagcctcggaccgtcagttggtggagccacatctgaaagcaaacaattctatatggtcggatcttctgaatcatatcgagccaatatttataagatatatgatccaacaaatcctcatggtgcagaaacattaccaccagcaattgttgtaccagagaccgatctttacctgcgcagattatggggtgaacctagtcaggatctagagaagaaaccaaagtatctagtaacatttacagttggtattgatcagatgaataatactgataaatgtgtttaaaaagttttct

SEQ ID NO: 11393 - DNA, 62 bp, Gossypium hirsutum
  Clone ID: LIB3135-032-Q1-K1-F3
cccacgcgttcgcccacgcgtacaaccacacttatataattgttccaacacatcttattatc

SEQ ID NO: 11394 - DNA, 263 bp, Gossypium hirsutum
  Clone ID: LIB3135-032-Q1-K1-F4
gcagcataaagcgcaagaggtgactcaagggcaagcatcttgaatttagggttttaagaatgagggcgggtgtgtttgggtggtttgagatgttttatgctttgtttggttggtgtttctctttacatgcattcacagatcatatgttttaagctttgtaatttgtaagggatggttattagcatagaatattctggtttctttgtcaataaaaatggaagaagattgtaaaaccagcatcacttcaatcttccttctttttt

SEQ ID NO: 11395 - DNA, 367 bp, Gossypium hirsutum
  unsure (1)..(367): unsure at all n locations; Clone ID: LIB3135-032-Q1-K1-F5
cccaatcttaatctagcagctgtttgtctatctccagggtctgctggtgggcttgagggtccagaccgcatttttgtgggggggcttccatattactttactgaagcgcagatcagggagttgttagagtcttttggaccccttcgaggttttgatctagtaaaagatagagaaactggaaactcaaagggctatgccttctgcatatatcaagatctgtcagttacggacatcgcttgtgctgctttaaatggaattaaaatgggtgataaaactctcactgttaggcgagcaaaccaaggtgctacccactctaaacctgagcaagagagcatncttcagcatgcacagcatcagattgctttgc

SEQ ID NO: 11396 - DNA, 446 bp, Gossypium hirsutum
  Clone ID: LIB3135-032-Q1-K1-F6
cccacgcgtccgaaaataaagaaccgcagtaacagcttaatcagcaactttggtaccgacatccacttttttttgttctatactctccacttgatgtggaagtcttccaatcctagtagttgagatgaagaaaggacaggggaggaagtactttatattccccaatctgataaagctgagccagagactttatttaataatttatctttgtgattgaccttaaagtagattcttaagtagtttagattcattcctatccctcaacagaggaagttaggctaagaaagagtagaaggcagactaagctggatagctagctagattaatagacagtgaaagttacggctacagtaagcacttttctttctattgattcttttgattctgaaactcaatcttgaactcaagcaggcgagcaagggtagagaatttccagtggagctacg

SEQ ID NO: 11397 - DNA, 246 bp, Gossypium hirsutum
  Clone ID: LIB3135-032-Q1-K1-F9
gccaaagtttgagtccttgtagaggatgggttctttatttgctacttttgtttgagcccatacccactgaagaagcaaaagcctccattcctaaagacataaaatcttgtttcatgttattagactctttaaaatttgccagtccctgccttcagccttcatgctgcttattgactggtttcaaaactttaaattaattaaatttgatctccacattaatgtttgtttggtccaaatcaaataaaa

SEQ ID NO: 11398 - DNA, 379 bp, Gossypium hirsutum
  unsure (1)..(379): unsure at all n locations; Clone ID: LIB3135-032-Q1-K1-G1
cccacgcgtccggcacgtttcacaacatccgatcaagaggtgcaagcactttgagattggtggagacaagaaggggaaaggaacatctctttttaaacgtgttattcatggtatcttgttatgtttgctttactttatatggagtagtttgaacttacaagactgtaatggaattttgttaaatttgcttagtttcttctgatgatgttttgcagttttctaactgttaccaaatgtttcactggcaattttgagttcaatttgttttnnaaaaaaaaaaannnattaaccntaaaataatttattttttttcttattatattatattctttttatttctttttttatttctttactatcatttttttttttaaatttt

SEQ ID NO: 11399 - DNA, 430 bp, Gossypium hirsutum
  Clone ID: LIB3135-032-Q1-K1-G10
cccacgcgtccgaccatatgagaagaggattactgagcttctgaaagttggtaaggacaaacgagcgctcaaggtttctaaaagaaagttgggaactcacaaaagggcaaagaagaagcgtgaggacatgtctagtgtgctccgcaagatgagggctcaccctggaggtggagaaaagaagaagtgaagctctctggtgacaagtcaccttgatgatttcattagagaactttgtttagcatatgttttaacgtattggtttgagactgaaaactatgcactgaatctcgtttgtttaattttataatgtatgctaaatttttgtgtttagttgcatgtccttgacatgttgggtattgccttgttttcttagccgtatggatttggaagttcatcattgagtcaagagagcatctttcgtcgtttattt

SEQ ID NO: 11400 - DNA, 365 bp, Gossypium hirsutum
  Clone ID: LIB3135-032-Q1-K1-G12
atcatgagaacggaaaatctagagaaggaagttgcaagctctttggtattcctctcattagtaattctgttgcatcagagcccaccgtctctcctattaatgccacgaacaaggcagcaagtcatgtggaacctgcacctaaccaaggtcgtacatttacgtttgatcaaaagtccgagcagccaaaattctcaccgttggcagagaatctgtctatttttaatgagcaggagaaatcgtttcagctgggtcagcctcatacaagagaggttcaaagcaaatctcctagtgcttcaactaggagttgtacaaaggtcctaatgcaagggagtgctcttggtaggtccgtggaccttactaagttc

SEQ ID NO: 11401 - DNA, 99 bp, Gossypium hirsutum
  Clone ID: LIB3135-032-Q1-K1-G2
atcatttggtttttgaagagcccttaaaagagcaaattgatgggctctatcaaatctgttgtgatctcattctaaatggggccaacagtagctactttc

SEQ ID NO: 11402 - DNA, 274 bp, Gossypium hirsutum
  Clone ID: LIB3135-032-Q1-K1-G3
cccacgcgttcggcgacagagaaagagagcagtgagaggtcgcctagtctccgcgtttcaagagaagaaaaagaaaacaagaatgatgtacacaagtagtagggtcaataaaaaacaaggggttcatcgttttcacatttgtattattcagtggttctcgtatttcttgctgctttagtatacaatgtttcctagattttatgtgtttttcttttccgacctttttgcaaatgcaggggtgatgggtttgatctttaataaaataaaggttttt

SEQ ID NO: 11403 - DNA, 257 bp, Gossypium hirsutum
  Clone ID: LIB3135-032-Q1-K1-G4
gctttttcattaactgccataaataagataggctttatgaaggaaacacaattcaataagcctgttgttattgctgactgtggacagctttgaaaaagggcttattgaattgtgtttccttcataatatctggtctttttaggctccttttttttatgctatgctgcttctatggctactgggttttggtgttttttaagaagttgcttgatgtagctttttcattaactgccataaataagataggctttattttc

SEQ ID NO: 11404 - DNA, 248 bp, Gossypium hirsutum
  Clone ID: LIB3135-032-Q1-K1-G5
gcgtgcggttggcggtcggacggtggaaatcggcgaccccatacctttcgacggtggggggtgcaggtatcgatcatgtctgatctgccctggacaaagcttgccctcgtgacaactcatgtgccgatgttaaggcacttgctgctcaaacttctcgtttctttgggtggaggtacgacacaacaagttccgtaagggagaagggattgtctgactgcgcacctggaagggaccggatgaatccctac

SEQ ID NO: 11405 - DNA, 282 bp, Gossypium hirsutum
  Clone ID: LIB3135-032-Q1-K1-G6
aggcatttgattaactgacatacatcagatattgctttatgaaggggccactccagactggcgtggtggtcattgtgacctgtccacctatcctctacggatggcgttatacaagttaaagatctagctaatcctacaaacccatacatagaattggggcctgaattcaagaatgtagggctcctgttatatagattcaagtaaaaaccgagcatcattgagcttgatagccttaaggcgactggagatgttcggttatggtgctggcattgtgctcaaggg

SEQ ID NO: 11406 - DNA, 432 bp, Gossypium hirsutum
  Clone ID: LIB3135-032-Q1-K1-G8
cccacgcgtccggtttaatctctataatttgttgggggccccagacagccggttcttcgtgtacatgcaagctttaaatttggctttgaatgggaaagttgttgatcatattataccttcttttaaaaagattgactgtttcttgaaagagtggaatattggggtcaaggatcaaaggaaccttttccttaccattgcaaatgtacttaaagaaagcaaaagctccggaaagtattctttcaaattcttgaccaagtacttggcaactttcgctggtgaggactcgtatataattagtgaagccaaggaggaagctgttcgttctgtcatagaatttgtgaaggctccagacatgtttcagtgtgatctattagatattcctgctgtagcacaattggagaaggattctaaatacgcattggtctatcagct

SEQ ID NO: 11407 - DNA, 354 bp, Gossypium hirsutum
  Clone ID: LIB3135-032-Q1-K1-G9
gatgaagccagaagatgttgggcttagcaaaagtctgcagttcttcaagccaacgggtgctgtgaatgggactccaagggtcacttatactaccatttaccaatgtgaccagttctcgttgtgcattttctttcttccggaaacggctgttattcctctccataaccatccagagatgactgttttcagcaagcttttactggggaaaatgcatataaaatcatatgattgggtcgagcctaaagactcaataccaccctccaaattgaggttggcaaggttgaaagccaatagcgtgtacacgggcccatgcaacaccttggtgttgtatcctacaacaggaggcaatatgca

SEQ ID NO: 11408 - DNA, 260 bp, Gossypium hirsutum
  Clone ID: LIB3135-032-Q1-K1-H1
tgagttttgaatctagggatttgcgggtggagaagacgagagctcatctctctgcttcaaagctcctgtccaggtagaattctcttcttcctttgcgttgtgttctttgttgttcagtcgccatggcttcaaagcggattttgaaggaactcaaggatttgcagaaagatccacccacttcttgcagtgctggtccagtagctgaagacatgtttcattggcaagcaacaatcatgggaccctcagatagcccttatgct

SEQ ID NO: 11409 - DNA, 297 bp, Gossypium hirsutum
  Clone ID: LIB3135-032-Q1-K1-H11
cccacgcgtccgccgacactcacagggaattaataataatatctccctctggcgctgactatgctttccaaaggcattatggatgtgagacttgggctcttattcctctttgtattgggtgcaagctgggtttgcgatgctagacaactagaagccgctccggtagtactctctggtgcatcagttgtgcagacaaaccaggggcaagatgaggaagtagtagaaaacattgtttggaaggacaatgtgtgcacattgtgtgaggaatttgctactgaggcaattaatttcctttca

SEQ ID NO: 11410 - DNA, 449 bp, Gossypium hirsutum
  Clone ID: LIB3135-032-Q1-K1-H2
agcaaaagaaaatgcaggtgccaccattgcatgcagtaattgtgggaagtgacatgagtgcgcacacgaaacttgaaatggaattacgagcttatgtaacacagaagaaaattcaagatcgtgttcactttgtgaacaaaactctaacagtagctccatatttagctgccgtagatgttcttgttcagaattctcagggacggggagaatgctttggacggataacaatcgaagcaatggcatttcagttgcctgtgctgacagggaacagctgccgggggcacaacggaaatagtagtgaacggcacaacaggtttattgcaccctgctgggaaagaaggggtgacaactctggcgaaacatattgtgaaactagctacgcatgtagagaggaggcctacaataggaaagagagggtacgaaagggtgaaagaaagaattctagaaca

SEQ ID NO: 11411 - DNA, 335 bp, Gossypium hirsutum
  Clone ID: LIB3135-032-Q1-K1-H3
tctaggtaccatactggcctaaagccccagaagctcatgacgaaggatgccgttatgcaggcagctaaacaggctaaagaggctggtagtacacgcttttgcatgggtgcagcatggagagacacagtccgaaggaaaactaacttcaaccaaattcttgaatatgtaaaagaaattagggatatggggatggaggtgtgttgcactttgggcatgctggagaagcagcaagcacttgaacttaagaaggcaggtcttacagcttacaaccataatctcgatccttcaaaagaatattatccccaacattattacaacaaagaacctatgatgag

SEQ ID NO: 11412 - DNA, 297 bp, Gossypium hirsutum
  Clone ID: LIB3135-032-Q1-K1-H4
gaagctggtctcactagtctgatcacacactggaaacaagcactctttttgcaagagcacggacacaatcctattactaggtgtatacccacttacgaggatagacagacagcttgcaaaaccatgtcaaactcaaactcatcattgctgtcactccgcgatgccattaagctttactgggatgcaaggtcatgggttaaatattaagccaaaacagcgttctcgtgatgcaccagcaacaaggtgcgctacttgagactgacgactcctggctgatttagaaagagaactggacgc

SEQ ID NO: 11413 - DNA, 311 bp, Gossypium hirsutum
  Clone ID: LIB3135-032-Q1-K1-H6
agcaaaagaaaatgcaggtgccaccattgcatgcagtaattgtgggaagtgacatgagtggggcacgaaacttgaaatggaattacgagcctatgtaacacagaagaaaattcaagatcgtgttcactttgtgaacaaaactctaacagtagctccatatttagctgccgtagatgttcttgttcagaattctcagggacggggagaatgctttggacggataacaatcgaagcaatggcatttcagttgcctgtgctgacagggaacagctggcgggggcacaacggaaatagtcttgaacggcacaaca

SEQ ID NO: 11414 - DNA, 218 bp, Gossypium hirsutum
  Clone ID: LIB3135-032-Q1-K1-H7
tctaggtaccatactggcctaaagccccagaagctcatgacgaaagatgccgttatgcagggggctaaacacgctaaaaaggctgttaccccacgcttttgcatgggtgcagcaaggagagacacatttcgaaggaaaactaacttcaaccaaattcttgaatatgtaaaagaaattatggatattggggatggaggtgtgttttacttttggcatgc

SEQ ID NO: 11415 - DNA, 222 bp, Gossypium hirsutum
  Clone ID: LIB3135-032-Q1-K1-H9
cggacgcgtgggaaagccttatgttttgtttaaacgacaagaacaaattacaaggtgttattcaacttataatttaatgtgtgccaacataagcatcaacacacaagtcatttgtatatacagccaggaaatcgacatcttttggaagggtcctaaaaaaaaaaaaaaaatattaaaatgaataatattaataaaaaaaggccgttcatattatatataatt

SEQ ID NO: 11416 - DNA, 348 bp, Gossypium hirsutum
  Clone ID: LIB3135-033-Q1-K1-A10
gaaattttccagactgtaattttgagttttgaaggaacatgtaggttccatagttttctgtagaaagttttaatcttggcctataaattattaattactaggaactagtgtagccctttgtaatagtttgtaggcacttttaatggagaaattaccggatggttcccctccccatacttggaaatcgtcgtgcacagcccttgccaatggaatctgcatgatttttttaacaatctctatgtgaaagactagatagaaatgtgatcccccttcccgaccctccagtacaatcctttctccaaaagtcctttagatgcccacacacttttccagggctcctaccgcgca

SEQ ID NO: 11417 - DNA, 285 bp, Gossypium hirsutum
  Clone ID: LIB3135-033-Q1-K1-A11
cccacgcgtccgcttcagatgaataattgacctgaaaattgtgtagaaagccattactgaaagcttttaacctcttaccaagtaattgactgtttgccaaaaaaaaaaaaaaaaaaaaaaaaaaaaaaaaaaaaaaaaaaaaaaaaaaaaaaaaaaaaaaaaaaaaaagggcggccactttataaaaaacaaatttaaaaacccgcccacacgaaaaaatatgtcttttataaaactcccaaatttaaaaaattagagcgcattaacaaaaaatgcatagggaaa

SEQ ID NO: 11418 - DNA, 394 bp, Gossypium hirsutum
  unsure (1)..(394): unsure at all n locations; Clone ID: LIB3135-033-Q1-K1-A12
cgctatcactgctgctctgttcttaaaacagtttgttgatgaaaaagtacagtggatgcacatcgacttggctggccccgtctggaatgataagaagcgggtagcaacaggatttggcattgcgactttggtggaatgggttctgaaaaactcatcttaatgaaaagcttggagcatgctgtagtagtgacaaggaagatggaggaggaaacaggagaataaaacttttcccaagttgttggtctttgagatatgtttgatgaacaaaaatttatgttgtgattaagggaaaaaaggggagtgagatagttttgtttttgaggttgttgcanaaagtgagattataaaactattccatgctctttttattgtttaaaaaaaaaaagccccttta

SEQ ID NO: 11419 - DNA, 105 bp, Gossypium hirsutum
  Clone ID: LIB3135-033-Q1-K1-A2
attttattttatttttgttgaacgagggtggactcatttccctgagccacatttttttgtacgttaagatttccacagctatagaaaagggggagtaattttttt

SEQ ID NO: 11420 - DNA, 455 bp, Gossypium hirsutum
  Clone ID: LIB3135-033-Q1-K1-A3
gagagggggagaggacaggaagaaaagaatatggtgggggcttcgtctttgcaaccaagactcctctcttcttttgttggtgatcgtttagttcaatcgagacaaccacttgctcagctatttcattacaacccaggtcgtaagcatgtatcaatgcaattatccagaacgttttctggcttaaccaatcttttatttaatagaaggaacaatttggacgaagttccagatggcaagcgcaaacgtctgagacctgggaagttatctcctcgtcgacctgttccaaatcatataaaaaggccaccttatgtcaaaactcgtatggcacctggaattgctagtggccctgaagtgcatgatctaaagggcatagaacacatgagagcttctggaaggcttgcagctcaggttctcaattatgctgggaccttagtgaagccaggcataacaactga

SEQ ID NO: 11421 - DNA, 436 bp, Gossypium hirsutum
  Clone ID: LIB3135-033-Q1-K1-A4
gccggacatggggaaaccggatcggggtggtgggcttgatttatgcggggctggagagtggagtcgtggcggtgactgatcgtgatgatgtctggagcagcgtggctgcgggtctggccaccggagcggtttgtcgtgcggcgagaggtgtgaggtccgcggcggtggcgggtgctctgggtgggttggcggcgggagcagtggtcgctgggaagcaagttttgaagagatacgtgcccatttgaaaaaagagatgattttgcaataagttgaggccagcgggttatttaaaggatggaaaggagaagtgattgtatattcaccagagttatgttccgttgttgtttctgactctggggttttgttcttttctttaaagattgggaactttagtgacaccccccaaaaatttaaggataaggtgctagattttatt

SEQ ID NO: 11422 - DNA, 395 bp, Gossypium hirsutum
  unsure (1)..(395): unsure at all n locations; Clone ID: LIB3135-033-Q1-K1-A5
ccggaaaaccgggacgagccacgcgaccggagagggggagaggacaggaagaaaagaacatggcgggggacaacggcnnngcaaccaaaaggggagacagcacaggcgggcgagacgacagagcaaacgagacaaccacacgcggagaaacacaagacaaaccaaggcgaagcacgtataaatgcaagtaaacagaaagagtgatggcggaacaaagcttttatagaatagaaggaacaaattggacgaaaatccagaagggaagcgcaaacgcctgaaaacagagaagggatcaactcggcgacctgggccaaagcataaaaaaaggccaccttatggcaaaacacgtatgggacctggaaatgcgagagggcccgaaaaggaagatctaaagg

SEQ ID NO: 11423 - DNA, 390 bp, Gossypium hirsutum
  Clone ID: LIB3135-033-Q1-K1-A6
caaaagtcgttattgatgctaatactggtcgatcaaaaggttatggttttgtgaggtttggggatgagactgaaaggtcacaagccatgaatgaaatgaatggtgcatattgttcaagcaggccgatgcgcattggtgccgcgactccgaggaaatcctcagggtatcagcaacaatattctttgcaaggtgggtatgcatcaaatggtaactcaactcaatctgatggagattcttcaaacacaaccatatttgttggagggcttgacccaaacgtcactgagggagatctccgccaacctttctctcagtatggtgaaatagtctctgttaaaatacctgttggaaaaggatgtgggtttgtacaatatgccaagaggaataatgctg

SEQ ID NO: 11424 - DNA, 412 bp, Gossypium hirsutum
  Clone ID: LIB3135-033-Q1-K1-A7
gcgggggttggtggcggctgtacaatttgaatttagatcggcaatctaatggctgaggacaagtataacctcaagaatgcggcggtgaagaggatcttacaagacgttaaggaattgcaatccaatccttccgatgatttcatgagcctaccactcgaggagaatatatttgaatggcaattcgcaattaggggttcaagggattctgaatttgaaggagggatttatcatggaaggattcaattgcctgctgaggatccatttaagcccccttcatttatgttgctcaccccaaatggacgttttgaaaagcaaactaatatttgcttgagtatattgaatcaccacccggagcattggcaaccatcttggacagtgcggactgctctagtggcattgattgcattcatgc

SEQ ID NO: 11425 - DNA, 344 bp, Gossypium hirsutum
  Clone ID: LIB3135-033-Q1-K1-A9
cccacgcgtccgggaggttgtccatatgctaagggtgcttcaggaaatgttgccaccgaggatgtggtttacatgctcaatgggcttgggatagagacaaatgtccatctcgaaaaactcttggtggccggagattttatatgcaagcatttgaggcggccacctagttcgaagacagcacttgcgttgagcaatatgaaggctaactccaagctttaaggtacaaaccataaaatacttgtcatgctgtaaaaggccaagatatgcatctaatccttatacttcagtaaaattcgaaatttaatccttgtacttaaaatattaaaaattaacatttacttata

SEQ ID NO: 11426 - DNA, 333 bp, Gossypium hirsutum
  Clone ID: LIB3135-033-Q1-K1-B1
ccaaaacagcttccaagtcttcctctaattcaaaacttattagaaagagattttgccctgctgattgaatctcaaattttttctttgttttccatatacttttcatttgtgctataaaactgtcttgattattagaaaaaaaaaaaaaaaaaaaaaaaaaaaaaaaaaaaaaaaaaaaaaaaaaaaaaaaaaaagaaacaaaaaaaaataaagaaagaaagcgaaggcattaactcttctatagatgcacataaatacaatgtaatggccgtagttttataaaattttgtcggggaaaaccaaggggttacccaaattaataaccttgaatta

SEQ ID NO: 11427 - DNA, 249 bp, Gossypium hirsutum
  Clone ID: LIB3135-033-Q1-K1-B10
gggacgagccacgcggacgcccacgcgttcgatgcattcaagagtaacccttttgatgaagatgccttgagagcaatacagctttggtatgatgcatcactttgttatagaggctacactcctgacaatccagcacagcttagtggtaagatatatgacatgatgggaatggctcttgttggttaatggtcaaacgtttacagttatcattcattagcacagccgccccaaacagaaacattggaagct

SEQ ID NO: 11428 - DNA, 367 bp, Gossypium hirsutum
  Clone ID: LIB3135-033-Q1-K1-B11
cccacgcgtccgttctctcgaagaaaaacattaatcttgttctcccggaaaaaacacaccaccaacaacaagccaaacaaaacgtcgaaaatggacctggatgatttgggagagctcgacggttcaagtcaggccaatactcgaaccaccaaattcgcgcccaaatcttccaaattcgcacccaaactcaaatccacctctaagccaaaacctgaaccctcatccaaacaagagcctcaagactccgcgcccaaaccccaaccaccacctgtggaagcagtttccaaaaagaaagaaaacgatgaagaagatgtcaagccgccgatggttgctgaaccgaaagccgaacaatcgatatcaaatggcg

SEQ ID NO: 11429 - DNA, 456 bp, Gossypium hirsutum
  Clone ID: LIB3135-033-Q1-K1-B12
cacaaagttgcttttcgaaaaggagtgaaagcaggaaaaaaatcgattaagatatagaaagatggcggtgatgcagaagctgaaaatattcgtggtgcaagagccagttgtcgcagcttcttgcctcatcgctggttttggtctctttctaccagctgttgtaaggcccattctagattccttagaatcatcaaagcaagtccctcagcctgctttaagagatgtggttgctggtgtgactggtaaaaagcagggctaatgtgatttatgagttgggaagaagcagaaactcaaatgtagctagtaatcagcaacaaaataaacttgattttaaagttgaactcttgcgccttcaacttcatctttagcatgagaatttgagtgttaatttgtttttattttcagtggtggaggattactcaaaaatcatggataattcatatcagactggaattt

SEQ ID NO: 11430 - DNA, 454 bp, Gossypium hirsutum
  Clone ID: LIB3135-033-Q1-K1-B3
ctgcactgccggtccggaactgcgtttcgacccagagcgacccgtacgatggaactcactgtagcggactgatttgctaataaggagccagagctccttcccagtggagaaatgtctaaaccacctccgttgacagaaaatttggatggcttcaatgagaattcagagggctcaaatcgtatattcaatgcttgctgaactgatactgagcctgtagttggatgatcaaataatgaggaaacaaatgtcaacgtttcccgcgtattgaagtccaagaaggtggaagcagtttccaaaccaaaagagaggacacggcatggctagacgtgatagacaatacttgatatgctaatcaaacaatatataattcttacagtctaaattcgaagcacctgatgccggaaagcatagttctaaaaagcttaaaaggtgctttcaagcttaattttgttta

SEQ ID NO: 11431 - DNA, 393 bp, Gossypium hirsutum
  Clone ID: LIB3135-033-Q1-K1-B4
ctttttcagtatgtggggatattgtattttatttgaatcggagaactcgaaagccgcctccgaattgatacattaaacctcagttgaacttggaaacattgacatttgagcacttcatgtttgataaaaagaggaaatgggggattcttaacctttttaaaacacctatatgctctttcgtaaaagccccgaaccaatctaatctttaataaggaaggcttcaaacagcatataagataaaaaatcaaatgtataccactttgatatgcttaaattctttaccacaattcttttacaaaatcaatttgcttgtaatgagattggtaattactgtcaataaattcaataatagaatgagtattatacagggcgagcgtcagttaaaaagcttcg

SEQ ID NO: 11432 - DNA, 213 bp, Gossypium hirsutum
  Clone ID: LIB3135-033-Q1-K1-B5
caattcctcactcgaacggccttctttcagaagatggttcaggataccctaaacagtgaagaactttttatcaaacggttgctaacattttctatggatccccttagggatgtgtttgtggtcttgtaaaatataatgaatgcttggtggttttttactggctttagaattttattatagattttacagtaccatgggaccatcttcaagggg

SEQ ID NO: 11433 - DNA, 222 bp, Gossypium hirsutum
  Clone ID: LIB3135-033-Q1-K1-B6
ccggaccggtattgaatggtcgggtcgagcgacgcgtccgtattggctctcggcaccgggcggagatttatttttggtgcagaatatggctggtgcgggggaggtgcttaatgacaccgcatggtgtatgatttaaagcacggttataacagaacactcgggttgaacaaaaggttatgaacgcgttggggtctgatattgggcacagatacttaccatgta

SEQ ID NO: 11434 - DNA, 434 bp, Gossypium hirsutum
  Clone ID: LIB3135-033-Q1-K1-B7
gcgatggatggcagcccggccatgggaagtccgaagcacaactgataacaatgaccgtggctcagtcaagagtatgggtgctcgttcaatatctataagtgaaatcagcagagcttattctcgaagagatcttaacaatgataacaaaccaagtccaacacctcagaagtcaagtcgagttcctagccaccagtctccatcgactccaccttcaaaggcaccttcgatttcatcggtttctggtaaaacaagactgccaagtccgagatgaagtcaatggggagggtatgaagactcaaggagcatactcagtacccggtctgatcgttataggagacatagcattgcagggtcctcaatgagagacgatgagagccttacaagctcacctgcagttccgagttatatggcaccaacacagtccacaaaggcca

SEQ ID NO: 11435 - DNA, 423 bp, Gossypium hirsutum
  Clone ID: LIB3135-033-Q1-K1-B8
ctttctcagtatgtggggatattgtagctcagctgaatcgtagaactcgaaagcctcctccaaattgatacattaaacctcagttgaacttggaaacattgacatttgagtacttcatgtttgataaaatgaggaaatggggtattcttaacctttttaaaacacctttatgctcttttgtcaaagccccgaaccaatttaatctttaagaaggaaggcttcaaacagcaaataagataaaaaatcaaatgtataccactttgatatgcttaatttctttcccacaattcttttacaaaatcaatttgcttgtaatgagattggtaattactgtcaataaatttaataaaagaatgattattatacagggcgagcgtcagttaaagagctcgctccccaaaaaatatggcaccaacacacttt

SEQ ID NO: 11436 - DNA, 420 bp, Gossypium hirsutum
  Clone ID: LIB3135-033-Q1-K1-C11
tagtaaaaattataacagattacagaaccgaaacttcgcttagacatgggtgcaatgatattctcaaggctgattgtgttgatctgttggttaaatactacaaagaagcgagacgtgcagtttacttgagcaatgaagaagacgatactcgatccaagagggatgcaagtggagcctctttaccaatagagaaaacatctagcgtgagaaacatggtggttaagtctaaaactagagggggtggaagatgttgtttgtgtttcgatcctttctcgatacaaaatgtatcggtcattgtgttcttttgttgtcatgcttatcacactacttgcttgacggactctactgacagtaatagcaacaaaaaagggaccggaccgacttcacaagagccatacggttatgacaatgatgatgatg

SEQ ID NO: 11437 - DNA, 312 bp, Gossypium hirsutum
  Clone ID: LIB3135-033-Q1-K1-C2
ctttgatctcaaaggcaataggacggtaaaggttttttctggtagaaaactggattacgaacccaaacattgtgagaagcagaagaacgaaggtgactttatgactgctgttgaattttctgttgaacatccatacggaaaagctgttgcattgcttaacttgaaatctagatgcttgaaggcaaaggagggatggtttgttttgcccggattggtatcgatgtttatactttctcacattttgaagaaagaaggacgctttggcttcacttttgatggcaaaagtacgaaagagatagatggtgcaacacg

SEQ ID NO: 11438 - DNA, 377 bp, Gossypium hirsutum
  Clone ID: LIB3135-033-Q1-K1-C3
cccacgcgtccgggagatggttaaagtggtaaaggcaaggagaaattttgtgcttgtaaggaagaattcgaaacaagcacattatgattgatcttggcatcgataataataagattaactgggctctcaaggacaaacaggagttcagagacatcattgggactgtataccgtgaggcatggaaaggccgtggtttgaaagattactcgaaaaagtactgctattgagtattcttccaacatttagttgatcagaatgtaaattgtatgtagatatgtgtgtcatttgcaatgtttggttgcatgaatgtggaggataatccaatttgagatgaaactttgaaatatatattttatgtgctcttttgatgcttgttt

SEQ ID NO: 11439 - DNA, 368 bp, Gossypium hirsutum
  Clone ID: LIB3135-033-Q1-K1-C4
gccacacgtccgtccgagcaaatctggagttacccctatatcatcttatggatacaacccgcaagacgtctcatgcactggacgatcaacaagggtgacaaaaagtcgcctggtttaagaaaaaacgagatgtttcaaaggaatagacggtgttacagatttcgatatggctgggggcgcatgatccttgcaatatataatcatactgatactgtgagacaaaatttttaatcatctctgcagtcattatggaagaatatatgacgacaaccagtgactattacattttgaactttaagatgccaattgctctcaatggtgtaacatggatgttcacgtcttcatctctagcagtataatatgaacaa

SEQ ID NO: 11440 - DNA, 447 bp, Gossypium hirsutum
  Clone ID: LIB3135-033-Q1-K1-C5
cccacgcgtccggtttgttgctgtgctgactgcaatggcatggatggaggcttatggagggtttagctcagttcttatatggctgcttgttatgcacagtgctcagcgggaagtacgagagcgccaccattattctgtagattgtgttgttgccatctatgtgggtattcttctttggaagatgactggttttatctggtcggctaagggtggaactggagatagcagactcactaagcttgggaaaattcaaggtagactgctccaagcggccaaggattccgacatggatgaagtaagggagcttctcaaagatgttgagttggggaatcaagagagcccgaaacaagggccgagcaaggtcatgtggttgtttgctagcggaactattttcttctcacttaccattgttattttggccttcacatggacaagcgatggctaact

SEQ ID NO: 11441 - DNA, 169 bp, Gossypium hirsutum
  Clone ID: LIB3135-033-Q1-K1-C6
gacccgttcgatcacacatgcggtatgacggtgaacgttctttcttgttgagaactggggctcaaagggggacattgtgagaagcaaaataactaatgggacttcatagactgctgctgaattttctgttggacatcccatcggaaaaaacggtgggattgcttaactt

SEQ ID NO: 11442 - DNA, 423 bp, Gossypium hirsutum
  Clone ID: LIB3135-033-Q1-K1-C7
accacgcgtacggaaaaaagtgaggatcaagctatgatggaaaacatgggagttctggggaaggtggaggatgaccttttatagttatcattcttcagcatcacattaacagatcagttggacatccgcgagaccatacttccccaagcctacaatgacttctatcacgtatataccacgttaacccaagattattagatgcttgagcaacctgctcttttgaaggcacttatgacattggaacttgcataccaactacctcttgcttagcttaacatctatggcgaggtatactctaagcactggttcagcaccacctgcctgctatttgacgcctatatacatgcctctacgacagctatggtgcttggcattctcaattcccagaaggcatcagccaatttgatgggcatgggtgatcca

SEQ ID NO: 11443 - DNA, 218 bp, Gossypium hirsutum
  Clone ID: LIB3135-033-Q1-K1-C8
gtcagacaacatgagcgaaaggacgtgcagcttggtcttggaacaaggcactacattactagggggggtggaccacatcaatgagctcaaaagaaactcaaacaagacatgaacgactccactttaggatgcagacattattcttggaaatgaaactgatccagtctataatattgaaacccgtgcattgaaaactgttatgaataagagaattgtac

SEQ ID NO: 11444 - DNA, 448 bp, Gossypium hirsutum
  Clone ID: LIB3135-033-Q1-K1-D1
tcaacattcccatttccaatctccagctcccaaggtaaatatgccgatcagaaacatagcggttggccggcccgaagaggctactcaccccgatgctctcaaggctgctttggctgagttcatctcaaccttgatcttcgttttcgctggatcgggctcaggaatggcctttaacaagttgactgacaacggagcaaccaccccggctggtctcgtagccgccgctctagctcatggcttcggtcttttcgtcgctgtctccgttggcgccaacatctcaggtggccacgtcaaccctgccgtcaccttcggtgcttttgttggcgggaacatcactctcttgcgcggcattctttactggatcgcccaacttctaggctcaaccgtcgcttgcctgttgcttaagttcgctaccggcgacctggctgtacccgcttttgggttgtca

SEQ ID NO: 11445 - DNA, 169 bp, Gossypium hirsutum
  Clone ID: LIB3135-033-Q1-K1-D11
cccacgcgttctgggggcgctgccccgaagtttaactttggatagtttacatcccagtttggggaggggctcctctggcaattcgtttaggttcgtggcaatccgaacctcgccctgtttccctaatgaaaccatcgactagagagaccaacggcctttgaaaagacac

SEQ ID NO: 11446 - DNA, 274 bp, Gossypium hirsutum
  Clone ID: LIB3135-033-Q1-K1-D2
gcgagacaacctgatggagaggactaccaacttggtctgtgaccagggccctactttatttgagggtctggaccacatcaatgagcccaagaggacttcagacaagcctgtacgacttccactttaggatgcgtacattattgttggtattggaacttatccaggtggtcctgatgaaacccatgccttgacatctgtgatcgatagaacatttgaaacttatggtctaactacctggagtgacctaattcaaagtcaccatggaactcttaca

SEQ ID NO: 11447 - DNA, 439 bp, Gossypium hirsutum
  Clone ID: LIB3135-033-Q1-K1-D4
aacagcagaccctaaacccaccattatcaaatctcgtgagcaccatttcctcctacgaaggcaacgtcctgctggctgccatcatctcattgctcctcgtcatcctcttcgtcctgctcctccatctctacgccaagtggttcttggctcatgctcgccaaaggagccgatcttcctccactctctctcacgtcttcccccacgaccggttccgccatttccacgccttttccttcgacaacaacgcctccgactcctccccatccaagggtctcgatccttccctcatttcctccatccccttgttcgttttcaaactagatgaacacagcgacaacaacaacaacaacaacaagaagtatgggttacacaacttagactgtgtcgtgtgtttaagtccgttcgaggataacgatgttggaaggaacttgcccaagtg

SEQ ID NO: 11448 - DNA, 351 bp, Gossypium hirsutum
  Clone ID: LIB3135-033-Q1-K1-D6
acccgtccgacaaactctagcctacagaataccaagtttgttctgtaacactagccctgctcatatagggggccatgacgacagacatgctctctataagccttcatacaaacttgtcagaaaacaactcttggatgactacaggaaggtggggattgcatctcaaacaggatcgcgaaaagagaccggtgccttgacatgggattcgagaaccatgtgtaggaaccaatgctcagacctcaggagattatatctttcaaatgcaccacctacataagactgatgcacgttatgctagatatcgtcccgtggaagaaagaaacagggctgtaaacgttcataatctacaca

SEQ ID NO: 11449 - DNA, 455 bp, Gossypium hirsutum
  Clone ID: LIB3135-033-Q1-K1-D7
ctggataccacgatcaggatgttttcaatattatattgtttgatcctttaatctcagatatgggggtaaagattaaatttttggatactgcttatattggtggtctttgtgaacctattaaagatttgaatttagtatgcacaatgcatgcaaattgctgttatggtatggatagcaagctttatgatctcaaaattatgcttcaagattggagagctttcacgtcattgtcaccagatctgaagaatgaatctgttatcttctggagggtttctcagaaactggaggcttcaatcgttacgctattttgattcaacatttccagagattaatgtcgaacgagaggaaaaaaattgattggaattggacatatgtttatattattaaccggcacaagaaccttgagaggggtaagcttcgtttttcttcgggtgttgggatcctttttatttacg

SEQ ID NO: 11450 - DNA, 358 bp, Gossypium hirsutum
  unsure (1)..(358): unsure at all n locations; Clone ID: LIB3135-033-Q1-K1-D9
cggacgcgtgggcggacgcgtgggcgcaaggtatagatctcgcttttccctctttcttttgtttttaaatgcaatgatgaaaaaaaaatcgaatgaagtagataagaaaattcaacagaaaatttaagaaactaaaaaatagaaatcacctttttcagaattgcttttgaaatccttttttgatatttagtatgcataatcttttcaagtacaaacgatggctttttatagctggaaaaataagaattaaaattaaaagaaatctattttcttttcttttttgctatttttccattgtattctgttattgctgcttctcgtgaattctgntgcaggaataatcgtacggaggaagtcg

SEQ ID NO: 11451 - DNA, 453 bp, Gossypium hirsutum
  unsure (1)..(453): unsure at all n locations; Clone ID: LIB3135-033-Q1-K1-E1
ctggataccacgatcaggatgttttcaataagatcaagtttgatcctttaatctcagatatcggattaaagattaaatttttggatactgcttattttggtggtctttgtgaacctagtaaagatttgaatttagtatgcacaatgcatgcaaattgctgttatggtatggatagcaagcttcatgatctcaaaattatgcttcaagattggagagctttcacgtcattgccaccagatctgaagaatgaatctgttatctcctggagggttcctcagaactgcagtctccattcgttacgccattttgattcaccatctccagagataaatgttgaacgagaggaagaaaattgattggaattgtacatatgtttatattattaactgtcacaagaccttgagagggtaagctttcgttttccttcggnttttgtgatccttctcatttacg

SEQ ID NO: 11452 - DNA, 234 bp, Gossypium hirsutum
  unsure (1)..(234): unsure at all n locations; Clone ID: LIB3135-033-Q1-K1-E10
acgcatgggcgatagggttacactattaggtggttttacttttggagtgggacattgcttttttggctgggttcggataactaaattgcaggggacagggaaactctacccaagtgtggatgcgggttagggaactacgctgaaaggtattcatggtaatggatcgaaccctaatgcgtttgnngtccacagcacattttttaactcagataattatttttatacgcagattcg

SEQ ID NO: 11453 - DNA, 387 bp, Gossypium hirsutum
  Clone ID: LIB3135-033-Q1-K1-E11
tccacgcgttcggcgggggatgccccaaagaataagtggggaaagtttacagccaagtatgggtagcaactcctctggcaattctttacgtaatgttgcactccaaaattcgacccttctttcctaagtaaaccagcgactagaagaaccaatgtccttcaaaagacaatcctctaacgttctaccaaatccatcacttttagcctttatccttagtataccttattgcttttcatgtgctaagagaatatcattaaaatctcccccagccaaccaaggccatgaattatttctccgcaatcgggtaattaaatccgatgtgtatactttactaataacattcggcgcctcataagaacccatgaacaggcatcgatgtgtttcttt

SEQ ID NO: 11454 - DNA, 170 bp, Gossypium hirsutum
  Clone ID: LIB3135-033-Q1-K1-E12
acgtcttgctgagctccatggtgacaaaaggagcataacaatgacttctcttcaagaaactcgggagaagtggggcttctttcatgctgatagccatggtgttgattagaagttcatggagaaagtgaatgacatagggaatggtgtactatcatgagaatttgaaggaa

SEQ ID NO: 11455 - DNA, 353 bp, Gossypium hirsutum
  Clone ID: LIB3135-033-Q1-K1-E2
cttgcagtacaggtgatgctatggggatgaacatggtttccaagggagtgcaaaatgttttggatttccttcagactgatttccctgacatggatgtcattggcatctctggaaactattgttccgacaaaaaaccggctgcggtaaattggattgaaggacgaggcaaatctgttgtctgtgaagccaccattaatggtgatgtggttaggaaggtcttgaagacaagcgtggaatctctcgttgagcttaacatgctgaagaaccttactggatcagctatggctggagctctgggtggatttaacgctcacgccagcaacatcgatgctgcgatctacatagctaccggc

SEQ ID NO: 11456 - DNA, 349 bp, Gossypium hirsutum
  Clone ID: LIB3135-033-Q1-K1-E3
cttgactctccctctatgctttggggatgattttacatgtcaaggggaaggaaatagtaaagagttgccttaaagcagaattgccgcacacggcgttcattgagatcaccttgttactatagtgccaacatatagccttgtggggtgagttggaattagtgactacgtacccactgatgactttacaatacaaaataaagatggtttgtataggcgcgtgttgaatacaaccgtggaatatctcgatgagctgaacatgcttaagaaccttactggatcagctatggctggggctctcggtctatataacgctgactccagtcacatcgctgctgccatatacatattt

SEQ ID NO: 11457 - DNA, 181 bp, Gossypium hirsutum
  Clone ID: LIB3135-033-Q1-K1-E4
gtgctctctaagaacatgtaatcagtaaaacctttcccatgaccaccattttgatgtttgggtgctgttaggtaccgtatacttgcacagaagaaacaagatgctaactagctttttttgatgtattgacataaaccttctccttctgtgtcttaaatatatttctcgttcttttctaaaa

SEQ ID NO: 11458 - DNA, 288 bp, Gossypium hirsutum
  Clone ID: LIB3135-033-Q1-K1-E5
gcgtacaaaaaataaggacgtcttcaatattttatgtttgatcctttaatctcagatatgggattaaagattaaatttttggatactgcttattttggtggtctttgtgaacctagtaaaaaattagaatggagtgtgctcaatgcatgccaaatgttggtatggtgtggatggcaagcttcatgatcttaaaattatgcttcaagaatggagagcgtctacgttattgacaccagatctggagaaagacattgggatctcctgtaaggtggcttagaactgaagtct

SEQ ID NO: 11459 - DNA, 386 bp, Gossypium hirsutum
  Clone ID: LIB3135-033-Q1-K1-E6
cgttgcagtacaggtgatgctatggggatgaacttggtttccaagggagtgcaaaatgttttggaggtgcttcagactgatttgcctgacatggatgtcattggcatctctggaaactattgttccgacaaaaaaccggctgcggtaaattggattgaaggacgaggcaaatctgttgtctgtgaagccaccattaagggtgatgtggttaggaaggtcttgaagacaagtgtggaatctctcgttgagcttaacatgctgaagaaccttactggatcagctatggctggagctctgggtggatttaacgctcacgccaggaacatcgttgctgcaatctacatagctaccgggcaaaaaccggctcaaaaacgtcagagcttgca

SEQ ID NO: 11460 - DNA, 449 bp, Gossypium hirsutum
  Clone ID: LIB3135-033-Q1-K1-E7
cccacgcgtccgcccacgcgtccggaaggagctcaaggatctccagaaagatcctcctacctcttgcagcgctggccctgttgctgaagacatgtttcattggcaagcaactattatgggtcctccagatagcccgtatgccggtggggtgtttctagtcaccattcatttccctccggattatccatttaaaccacccaaggttgcattcaggacaaaggtatttcaccctaatattaacagcaacggtagcatttgccttgatattttaaaggaacagtggagccctgccctcaccatatccaaggtgttgctgtcaatctgctcactcctgacggatccaaatcctgatgaccctttggtgccggagattgcccacatgtacaagacggataggaacaagtatgagacaaccgctcggagctggacccaaaaatatgctatgggtt

SEQ ID NO: 11461 - DNA, 415 bp, Gossypium hirsutum
  Clone ID: LIB3135-033-Q1-K1-E8
cccacacggaagcccacgcgtccggattgagatcaaggatctccacaagagcctcagagtggaggactgcgagccctgaaacggaagacatatttacatcgcaagcaacgatgatgggtgctccggaggggccgtacgccacccagaggggagcttagtcaccaacccttggcctacacaacatgcatacaaaccactcaaggacgcatacaaaaaaaaagtatctgacgctagtgctaacagcaacaccagcacctgacaaaaaaaccaaaacgagcacatgaagcgacgcccacaccagatgcaatgagacgctggcaatctgctaactgctgaccgatccaaatactgaaggccctggactgccatacactgaccacatgtacttgatggatgggaacaaatgttaaacagc

SEQ ID NO: 11462 - DNA, 323 bp, Gossypium hirsutum
  Clone ID: LIB3135-033-Q1-K1-E9
aatggacgatatggttacacttttaggtggccatacagttggtgtggcacattgcttttttttctcgggtcggcttactaatttccaagggacagggaaacccgacccaagtatggatgcgggtttggtaactacgctgaaagggatttgtggtaatggatcgaaccctaaggcgtttctggaccagggcacgtcttttagttttgataatgagttttataggcagattcgggcgaagaaaggggtgatgaagatagatcaagagttggctgatgatagattatcgagtggaatcgtatcgagatttgcttcaaatgcgaatt

SEQ ID NO: 11463 - DNA, 345 bp, Gossypium hirsutum
  Clone ID: LIB3135-033-Q1-K1-F1
accacgcgtccggccacgcgtgcggaaggagctcaaggatctccagaaagatcctcctaccggttgcaacgctggccctgatgctgaagacaagtctcagaggcaagcaactatcaagggtcctacaaaaagcccgtatgccggcggggtggttctaggcaccattcacatccctccggattatccatttaaaccacccaaggtggcattcaggacaaaggaaactcaccctaaaattaacagcaacgggagcattcgccatgatattttaaaggaacagaggagccctgccctcaccatatgcaaggagatgctggcaaactgctcactcctgacggatccaaa

SEQ ID NO: 11464 - DNA, 426 bp, Gossypium hirsutum
  Clone ID: LIB3135-033-Q1-K1-F10
cccacgcgtccggcgggagatgccccagagaataagttggaaaagtttaaagccaagtatccgtagcaactcctctgtcaattctttccctaatgttccactccaaaattcgcccctttttcctaagtaaaccagggactagaaaaaccaatgtcctccaaaagacaatcctctaacgttctacgaaatccctcagttttagccttttcccttggtataccttattgcttttcatgtgcaaagagaatatcattaaaatctcccccaaccaaccaaggcaatgaattatttctccccaatcgtctaagtaaatcccatgtctctactttatttctaacatccggagccccataaaaacccgtaaacagccatcgatgttttcctttatcatcttgaatttccacatcaatgtgacttttgagagac

SEQ ID NO: 11465 - DNA, 450 bp, Gossypium hirsutum
  Clone ID: LIB3135-033-Q1-K1-F11
tgatagtccaaatacaggatcatccacaattgtagagggggatgttaggctagagaacaaggctggatatatttcttgtgatcaagttgaaccttcaagaagtgatcaagaaacaaacaagcccattgataagacacagagacgtctggcacaaaatcgagaagctgctcgtaaaagtcgtctacggaaaaaggcctatgttcaacaattagaatcaagtcgtttgcaactagctcaactggaacaagagctcgaaagaactaggcagcagggtatatacataagcagtccatcagatactggttattttggactgcctggaaccgtaaactcagggattactgcatttgagatggaatatggacactgggttgaggtgcaaaataaacagacttgtgaacttagaagtgcactccaggcacatatcactgatatagagctacaaatact

SEQ ID NO: 11466 - DNA, 413 bp, Gossypium hirsutum
  unsure (1)..(413): unsure at all n locations; Clone ID: LIB3135-033-Q1-K1-F12
aaatgtttgcccacaaaccgcaccatgtgcaccatacttgttatgacaagattcaaggatgcgatttacatgaaggtgaatgggggaaagtcggtaccattgtccattggagttatgtgcatgatggaaaggctaaaaaggcaaaggaagtagtggaagcagtagaccctgataagaatttggtcactttcagagtgatcgaaggagatctaatggaagagtataagagctttgtaatcacgattcaagtttcgcccaagagcgagggtagtggcagcgtantgcactggactttggaatacgagaagctgcacggtgggattgcgcatcctgagactctgctgcaattcgttcaagatatctctaaagacattgacgcccacctcacccaagcaagctaaacagtatcacat

SEQ ID NO: 11467 - DNA, 393 bp, Gossypium hirsutum
  Clone ID: LIB3135-033-Q1-K1-F2
gagggctccgatcgaagggctctatcgtctatgtgaggaacatggcttgtggaatgaatatgggggcatgaagccgagagcgacattgacgggctctgccgtgtactattaacggaagcatagctgccactgtcttggctattacaccagatagaggtctctgcactaccctctttataacataacaggcatacaactctttgctctttggatctgcacatgtactcaccagcacttcttttgttggctgcaagtagacctgtgacaaaaaccagatttttattattgaatacatgaacctatgttgacccgacacacatgcacctgaagaaaggtgatgcgtcttaaagaacacgggggagggaaagatatgcgctcaccacaccaattgct

SEQ ID NO: 11468 - DNA, 381 bp, Gossypium hirsutum
  Clone ID: LIB3135-033-Q1-K1-F3
gtaaagatgtccatgcttcctcgaaatgcttttttgttggtccatgcaacttccggaaaagatggatgccaacttcgtgcttattggactaaatctgatgggctctcaatcctaaagagatgtggttcaaattccaactttaggaacatcattgatctagagaaagcacggatgggttcaaattggttagacacattggaggggggaaagtttatggaacataccgagagaagcttcacttagccgtcggcttgctgacgatgaaaagagtgacaaaattctcgaagttgatacttggaaacctttcttgaccttccaacataactacaggaatggttaggtcattttaagcattttttaagctttgggattataccccag

SEQ ID NO: 11469 - DNA, 459 bp, Gossypium hirsutum
  Clone ID: LIB3135-033-Q1-K1-F4
atctccctattctcaatggcaatggcaaccctagccttcctcttcactccatcaaccctctgcaccccaaaatccggcgaccgcatcgccgccgtgttacggaaacaaccaccgttcctaaccgtccctagcttcaagtccccaaaaagcatcatcgccccacgcaccatcaaagcccaagcaaccgaagagaaagccgagacaaccgccacaaaggaagcaccagtcggtttcaccccaccagagctggacccaaacaccccatcaccgatcttcggcggcagcaccggcgggcttttacgcaaagcacaattggaagagttttacgtcatcacatgggagtcacccaaggaacaaatcttcgagatgccaacaggtggtgcagccatcatgagacaaggtccgaacctgctgaaattggctcgtaaagagcagagcttggctcttgggactaggctt

SEQ ID NO: 11470 - DNA, 153 bp, Gossypium hirsutum
  Clone ID: LIB3135-033-Q1-K1-F5
attgtgttttgtgcctttatgcactatttatttcaatttctgtttccagattctaatgtggcgtatgatgattcggtggacttgaaaaatattttttggcttgctgcattgccttgctattcatcactaggcttgattgctgcagggtggtct

SEQ ID NO: 11471 - DNA, 249 bp, Gossypium hirsutum
  Clone ID: LIB3135-033-Q1-K1-F6
cattgatgtctacgatgggcggccgcataaaaggaactgtcttgacatatcacagccttgcagagagctaggctctacccatgggatcacaaatcaaacacacagccctttgctttcaggagctgaaaatgtacaacacccgcactttccccgctttatgcgcgttgacctgagacaaaatccagatggttgttattgaatacaagagcctatgatgacccgacttacatagcactggacaaaggtgaa

SEQ ID NO: 11472 - DNA, 301 bp, Gossypium hirsutum
  Clone ID: LIB3135-033-Q1-K1-F7
gcccgctaagtaaagcggcgaacaaaattatgttaaagtgtgaacaaagtgagagtagggcgagcatatatgtggggggggaaagacgacaacttgccctacaacgggtgggacaagaatactcacaacttaaacggagacgaacccgaaaaaatgaacactcaggcatggtcagcaaaaaaaaaaaaagaaggcgatgggcacaaacttgccgctgaaaaaaagcagacatacccccgaaaagaccattgaccaaacatagatgcagttccaaaaacaaaaaaggggggggcgtctttga

SEQ ID NO: 11473 - DNA, 343 bp, Gossypium hirsutum
  Clone ID: LIB3135-033-Q1-K1-F8
gccccccaaaggtgtggcatgaattctatgtttctgagaagttggttgactgtttccacttttaaattgtgtattttgtaggccattgtattattgtgtgtttcttattgtaatgaactgcaaagatgatctattacttctcagacggagctctttctactgtgctctctatcatgttttccacagtgcaataaaaatatgtttatagtctaaaaaaaaaaaacaattacataactctatttaaacaatttaaaaaaaatcctcttttttttaaattgaacttatttttaaaaaattctatcaccaactaaaatttatattgggggggccctttttaagaatc

SEQ ID NO: 11474 - DNA, 403 bp, Gossypium hirsutum
  Clone ID: LIB3135-033-Q1-K1-F9
gtttggcggtctgggcgctggtggccttggtgtccccaaccaacccgatgttccccctgaagaactttacgctccacaattatcacaactccaagaaatgggtttctacgatacacaagagaatatcagagcattacgagctactgccggaaacgtccatgctgcagtcgagagacttctgggaaattccgggcagtagtaactccttgaaatttcatgttcttttttttttcttttttaaatttgaccaagaaaaactgtctcatgtaagattagttgatttgggttggtgccttagcaaaccacagatttatgttgcatatacattgttgattccttgtttttgccgcgtttaataagcaagtaaacacgataaatatatatacccgagaacttgttggtt

SEQ ID NO: 11475 - DNA, 451 bp, Gossypium hirsutum
  unsure (1)..(451): unsure at all n locations; Clone ID: LIB3135-033-Q1-K1-G1
cccacgcgtccgcccacgcgtccgatccaattcatgcaagagtgtgaacaaggtggtagcaaaaccaccatattttttgtatggaaatgttgtcaacttgccttacgacggttgggtcaagatttctcagttcttatacgggatcgagcctgaatttgtgaacactcagtctttctcggcttttaatagaaatgaaggctatgtacacaatcttcccgctgaaaataggtttcacatccttccgaagtcaccattgaccatacaggatgcaataccaaatacaaagaagtggtggccatcttgggatccaaggaaacaattgaattgcatggggtctgaagttctaggagcatcaaagctgtgtgctaggcttgggaacatgttagctgattctcgaggattactctcatcggatcaacanaaatatattcttcgtcaatgccaaatatca

SEQ ID NO: 11476 - DNA, 57 bp, Gossypium hirsutum
  unsure (1)..(57): unsure at all n locations; Clone ID: LIB3135-033-Q1-K1-G12
ccccggnctggttcaattcagggcgccccgcgaccggacgctgcgactacctctttt

SEQ ID NO: 11477 - DNA, 243 bp, Gossypium hirsutum
  Clone ID: LIB3135-033-Q1-K1-G2
cgtctcatcctgaatcctgcaactaggatatatgttgctttgaattctcattcttgcttttaaagagcggtcatttcttttaatggagggtcccatatattttctctttccttggaaaacctaaattgacttcttattctttacctaacagtggtggtgaaccaccttttctctttcaactaataacacaaaatagggcttttttcacaatcttccaaaaggaaaaaagccttgacattctcc

SEQ ID NO: 11478 - DNA, 447 bp, Gossypium hirsutum
  Clone ID: LIB3135-033-Q1-K1-G3
cccacgcgtccgcggacgcgtggggacaaactggcgtagaccaaagggtattgattctcgtgtcagaagaaagttcaagggatgtactttgatgcccaatattggctatggttcagacaagaagacccgacactatcttccaaatggctttaagaaatttgtcgtgcacaatgtcggagagcttgaactgttaatgatgcacaacaggacatattgtgccgagattgcccatgatgtttcaacaaagaagagaaaggagattgtggaacgggcagcccagcttgatgttgtcgttatgaacaagcttgctaggctgcgcagccaagaagatgaatgagattaagcttgtctcttatgtttatctttgagccttgtttgcgtttcttataaattttggtaattttgttgctttagatgtggcgataacattctcaaccgggatttgtt

SEQ ID NO: 11479 - DNA, 384 bp, Gossypium hirsutum
  Clone ID: LIB3135-033-Q1-K1-G4
ctgcctctacctcattagatccgttgcataatgatcgtgctattaatattactggtgagagggatgcaaaaaagtatgttcctgccatcggatactatattttgaaaaagaatccacaattgccggtttcactaagagtgaacttcaggggcgacactatttgtgctgttcttacgcatccggtcacccgtgtgacatctcatgcagacatttcttactattgaggtttaatcaactataggcaaaatggtgaacttgaggaagcacactggtaggctagtgagttgattaagattgggaactggggtgaggctactaatgctagaagtaaagtcttaagcaagctacacaacatttttgggttatcaccattgtttgactttt

SEQ ID NO: 11480 - DNA, 397 bp, Gossypium hirsutum
  unsure (1)..(397): unsure at all n locations; Clone ID: LIB3135-033-Q1-K1-G5
cccacgcgtncgcggacgcgtggggacaaactggcgtagaccaaagggtattgattctcgtgtgagaagaaagttcaagggatgtactttgatgcccaatattggctatggttcagacaagaagacccgacactatcttccaaatggctttaagaaatttgtcgtgcacaatgtcggagagcttgaactgttaatgatgcacaacaggacatattgtgccgagattgcccatgatgtttcaacaaagaagagaaaggagattgtggaacgggcagcccagcttgatgttgtcgttatgaacaagcttgctaggctgcgcagccaataagatgaatgagaataagcttggctcttatgtatatctttgagctttgtttgccgttcttataaaattttg

SEQ ID NO: 11481 - DNA, 421 bp, Gossypium hirsutum
  Clone ID: LIB3135-033-Q1-K1-G6
gctgaatctaagcaacttttggataagcttgttgtggtgaagtataatggagctttgggaaagaatatgggtttcggtggtcccaaaaagtatttggcatcgtttgaagcaaatggggtttcagtcactgtgcatgaatgcagtttgctaaaaagcttttccacttcattgacagtagcacacctgtatgtagttatatgtccctatattgaaggtgtagtggaggattcaatctcttcaagctggaaaacccaaggcttagcactttttcaagtagagtgttatttaatgttgcattccatggtcggttatcttagtcagaacttgaattatgtgttattgaaacagggttttgtagctaccttgtgtactagcttctttaatcatgattgttaattattacgtgttttgtagcttcttt

SEQ ID NO: 11482 - DNA, 448 bp, Gossypium hirsutum
  Clone ID: LIB3135-033-Q1-K1-G7
cccacgcgtccgcggacgcgtggggacaaactggcgtagaccaaagggtattgattctcgtgtgagaagaaagttcaagggatgtactctgatgcccaatattggctatggttcagacaagaagacccgacactatcttccaaatggctttaagaaatttgtcgtgcacaatgtcagagagcttgaactgttaatgatgcacaacaggacatattgtgccgagattgcccatgatgtttcaacaaagaagagaaaggagattgtggaacgggcagcccagcttgatgttgtcgttatgaacaagcttgctaggctgcgcagccaagaagatgaatgagattaagcttgtcttttatgtttatctttgagctttggttgcgtttcttataaatttttggtaattttgtcgctttagatgtggcgataacattctcaaccgggattttgt

SEQ ID NO: 11483 - DNA, 434 bp, Gossypium hirsutum
  unsure (1)..(434): unsure at all n locations; Clone ID: LIB3135-033-Q1-K1-H1
ggacatccccgatggggttagcattaaggtcaaggctaaggtgatcgaggttgaaggtccaaggggtaagcttacccgcaacttcaagcacctcaaccttgatttccatctcatcaaggacgaagagaccggcaagcgtaagctcaggatcgaggcttggtttggctccaggaagaccagcgccgccatccgtacagctcttagccacgttgagaacctcatcaccggtgtcactaaaggataccgttacaagatgaggttcgtctacgctcactttccgattaacgcctccatcactaatggcaacaagtcgatcgagatccgtaactttctttggcgagaagaaagtccgtaaggtggataatgtggaaggtgttttncattgttcgatccgagaagggtaaggatgagattgttttggatggtatgacatc

SEQ ID NO: 11484 - DNA, 396 bp, Gossypium hirsutum
  Clone ID: LIB3135-033-Q1-K1-H11
caatggcgggatcgatagcgaaaccgactacccctacactggtgtggatggcacatgtaacaccaccaaggaggaaaccaaggttgtatctattgatggctatcaagatgtagagcaatcagatagtgctcttttatgtgccgttgctcagcaacctgttagtgtgggaattgatggttccgccattgattttcaactttacactggtggaatttatgatgggagctgctcggatgatccagatgacattgatcatgctgttttaatagttggttatggttcagaaggcagtgaagagtattggatagtgaagaattcatggggaacaagttgggggatagatggatatttctatctaaaaagagacactgatttaccagtgcacccaccaacata

SEQ ID NO: 11485 - DNA, 334 bp, Gossypium hirsutum
  Clone ID: LIB3135-033-Q1-K1-H12
cccacgcgtccggctgcttgctacaaggctctaaatttccaccatgtcatgcttgagggtactcttttgaagcctaacatggtgacccttggttcggactcccctaaggttgccccagatgttattgctgagtatactgttcgtgccttgcaacgaaccgtccctgctgcagtcccagctattgtattcttgtcaggtgggcaaagtgaggaggaggctactcttaaccttaatgccatgaacaagctccagaccaagaaaccatggtcactctcattctcatttggacgtgcccttcagcagagcactctcaagacctgggccggtaaagagg

SEQ ID NO: 11486 - DNA, 446 bp, Gossypium hirsutum
  Clone ID: LIB3135-033-Q1-K1-H2
cccacgcgtccgcccacgcgtccgattgatttttcctgtgatccaaaaatttccttgaagctggttgatatggctttgaatgaaatattacgtcttcaagaggagggacctgcagatcaagatgttgaaaccatactcgaaatcgaacagagagcccatgaaaatggattgcaggagaactattactggcttaatctgattctcggcagttatcagtcacggatttattccggcgatatcggaacttctttcaagattctagatgaaacgcgttcaaaagttagaaaatcgctgacatcattaacgatgcaattggcgctacggcggataatgccttgcaacaatccgcacactgttgtgattctaatgccccaaacatcatggtttaagaggataaagtcattttcacaatggacccttcatgggatcgatatgaagattttagc

SEQ ID NO: 11487 - DNA, 359 bp, Gossypium hirsutum
  Clone ID: LIB3135-033-Q1-K1-H3
gattgatccaggtgatgaggtgatcctctttgctccattttatgattcttatgaagcgacattatccatggctggtgccaaagtaaaatgcatcacattgcgccctccggattttgctgttcctattgatgagcttaagtcaactatctcaaagaacactcgtgccattcttataaacactccacataatccaacggggaagatgtttactcgtgaggaacttaatacaattgcatcgctatgcattgagaatgatgttttggtttttactgatgaagtttatgataaattatcattcgaaaatcacatttcaatggcatcccttcctggaatgtatgagcgaacggtaactatgaact

SEQ ID NO: 11488 - DNA, 455 bp, Gossypium hirsutum
  Clone ID: LIB3135-033-Q1-K1-H4
ctacacccaaattgtttggaagaatacccgacgaattggctgcgctcgagtggtttgcgacactggagatgtgttcatgacttgcaattatgatccgccgggtaattatattggcgaaaggccatattgatatggttcaatattccaattctaaggggtacttcactatacttgttcaatattttcgaaaatttgttctcacgatgctatctcactacttcattaaagctaacaagttttccgaaaactagtgaacaagtatattaaggtactcaatagaaatatatatatatatatgaatttgatgtgaacattatagtaatgttgttaatatgtatgccatttgagtgtcgacatagctatatcatataggaggtaaggagtgcaggctaaattctgaactcgtcatctctatccatgagacgtgatgtgatggttactcatttcgtccctaa

SEQ ID NO: 11489 - DNA, 201 bp, Gossypium hirsutum
  Clone ID: LIB3135-033-Q1-K1-H6
attctcacgggattgttcacgtgtagattgtttcacgcagcaagattgtgccgggtctgaaagcccactgacttggtcctgaaaaccccgcggatctgtacctcttgatcaagacagccggtgccttctcaaaacatcacgtgaggagcatgctagactatgcttccatcaatcatgttgatctttgtcgagagcaaaatt

SEQ ID NO: 11490 - DNA, 105 bp, Gossypium hirsutum
  Clone ID: LIB3135-033-Q1-K1-H7
attttattttatttttgttgaacgagggtggactcatttccctgagccacatttttttgtacggtaagatttccacagctatagaaaagggggagtaattttttt

SEQ ID NO: 11491 - DNA, 373 bp, Gossypium hirsutum
  Clone ID: LIB3135-033-Q1-K1-H8
tcgctacacccaaattgtttggaagaatacccgacgaattgtctgcgctcgagtggtttgcgacactggagatgtgttcatgacttgcaattatgatccgccgggtaattatattggcgaaaggccatattgatatggttcaatattccaattctaaggggtacttcactatacttgttcaatattttcgaaaatttgttctcacgatgctatctcactacttcattaaagctaacaagttttccgaaaactagtgaacaagtatattaaggtactcaatagaaatatatatatatatatgaatttgatgtgaacattataataatgttgttaatatgtatgccatttgagtgtcgacatatctattttatat

SEQ ID NO: 11492 - DNA, 227 bp, Gossypium hirsutum
  unsure (1)..(227): unsure at all n locations; Clone ID: LIB3135-033-Q1-K1-H9
tcggttacggtttaccctattgcttagatgccaatttaattttttttatgaagcactatagcatataagatggtaagtgaaggggtttgtaattggtttacgtttgtatatttatcggttctggtaagctgtctaaaaccagatggaggaatgcgntgccaatgttgactttcagctatcatngataacaattttaagatgctatcttggtttgatcattctttgga

SEQ ID NO: 11493 - DNA, 155 bp, Gossypium hirsutum
  Clone ID: LIB3135-034-Q1-K1-A1
atttttatcctgtgcggttggcaaatgtgcaatgaattgggggtcgatggcggacctgcagcataggaggcgataccaaagcgtgatcttgctaagaaacatatatcatctaaactgcatggaaagttgccagagatcgaagttagacaatcagt

SEQ ID NO: 11494 - DNA, 283 bp, Gossypium hirsutum
  Clone ID: LIB3135-034-Q1-K1-A10
catcatcggccctaagagctttacagcccaaaatcttgtttttcgggaaactccaccgataatcgacgaactctctctcgatctcacctaagattcgccgataatcgaaaatttaaaaataacccgacaacaacaaagatgaagaaagaagacacagtgaaactcattagcgctgaaggaatggaattcgttatcgacaaagaagctgctatggtttctcaaacaaattcgaacatgcttacttctccaggtgggttcgctgaagcggagcatggggaagtga

SEQ ID NO: 11495 - DNA, 293 bp, Gossypium hirsutum
  Clone ID: LIB3135-034-Q1-K1-A11
ttctggccttgcagttggaatgcgagttacgaaagtttactcggaaacaacaaaccattccctcaacctatgcctctccctgaaatgatcgattttctggtcgacatctgggaacaggaaggattatatgactgagcatacagtacagcatagcacattcgggaaaaaaaaaaaaagggggttagatattaatacccttattgttgaaacattttactagcttcattatgaaaaaggcattagagcattttaaactggtatgtattgttaccggaacggtctttggtcttgtt

SEQ ID NO: 11496 - DNA, 378 bp, Gossypium hirsutum
  Clone ID: LIB3135-034-Q1-K1-A12
atttttatggcgttttgcctcttttttgtgtgtcaaaatcatttgaactccagctagtcttgtgcaataactgaaaggtaagaagttaagttatggaatcatgcttaagccaaaatcattgaggtttttgttgaaccatgcagaaattctggagcatttatagtctcttaagtttgtcctaaagtattgagtttctgcaggtttctggcaactcatgaaagctatgcccaccccacgtacaagctgaaactgattgaatacgataaaaccgagtattacagatgtcttttgcagagcaaggtggtctggtgcaccacaccgtgttcttgaaacacccttctttctgtgattggaaaatgcctttagtgcttcaagaaa

SEQ ID NO: 11497 - DNA, 254 bp, Gossypium hirsutum
  Clone ID: LIB3135-034-Q1-K1-A2
cccacgcgtccggtggtgccagtgggtgcagtttattttggatataggtatgtggttgataagtacaactttctgtttgtgtatagagtccggggatttcctgctggcaatgatggaaggctgatggatactgtgttgagtatcatgcggttctgcctcgacttgttcctcatctcgatgcttttgttcttctcagtcaaaggagactcctcaaagctgtaagccatatttactcttgggtttgctagtaattt

SEQ ID NO: 11498 - DNA, 235 bp, Gossypium hirsutum
  Clone ID: LIB3135-034-Q1-K1-A3
ggaaaaacagctggcggaggtggagaacaacttgagggagctgctgcaacaagatccaagcctcgctcgtcagataatgtcgatgagcgtgtaacttctttaactctttcttattggaaaaatacttctcacgttatcttgtgtttgtggttgctttaaaaatttatcttagtactggataagaatacgcattttggtttaatgatatgcgtttttggtatatatctatggagct

SEQ ID NO: 11499 - DNA, 300 bp, Gossypium hirsutum
  Clone ID: LIB3135-034-Q1-K1-A4
cccacgcgtccggcctcatcatgggctatatctgtgtaccatgcctaccaacgtacatggaaaccttttaatcctattattggggaaacatatgagatggttaatcatggagggattacattcatttctgaacaggtcagtcatcatcctccaatgagtgctgggcatgctgaaaatgaacattttacttatgatgtcacatcaaagttaaagacaaaatttttaggaaattctcttgatgtttatcctgctggaagaacacgtgttactcttaaaaaaaatgggggtcggtttaaattt

SEQ ID NO: 11500 - DNA, 212 bp, Gossypium hirsutum
  Clone ID: LIB3135-034-Q1-K1-A5
gtcgcgcgaggccaaagcattaacgaaagctatcacaaaaccctagtgtctaactacttgtttggtttgcctaagccatgtcgaggagaaaggctagagagcccaaggaggagaatactaacctacgacctgctgttcgagagggcgagcatgtttttggggtggctcacatctttgcttcatttaatgacacattcattcatgtgactgat

SEQ ID NO: 11501 - DNA, 283 bp, Gossypium hirsutum
  Clone ID: LIB3135-034-Q1-K1-A6
cccacgcgtccgtggagcaggtggattgttgccacattttggtaatgttttcccttcccttgctattattacaatctgattagggtggatatcttggatattggtaatggatttagttatttaatagatacaataagaagcattttgtctttcaatttttgccatttccttgttaatctgtatctgtaggcggtttagcatacatttcagtatgctcgatattgcagaaagtagtatctttttgtatacatataatggtttcaaaataaaccccatatctttg

SEQ ID NO: 11502 - DNA, 284 bp, Gossypium hirsutum
  Clone ID: LIB3135-034-Q1-K1-A7
cccacgcgtccgaatggaaggggacaacatattagagaatcgttgggtttacaggtttttgcttcctctgtatgctggtcttggaaaggctgatgaagtagaaagaatttggaagatctgtgattcaaaaccccgctttgaagagtatctggctggtattgaagcttggggaaagttatgtaaaattgaaaaatcagaggaaaatttcaaaggctgtaaaaacataaaaaagcttctgcagatatataccattcttgaggtaactaaaccatagatgcctaaaa

SEQ ID NO: 11503 - DNA, 289 bp, Gossypium hirsutum
  Clone ID: LIB3135-034-Q1-K1-A8
ccgcgttctacaactatgtagttatcatgtttgctgttaatggtattacactgtttgcttctggtcttgctgctattggaataggctttagcatttggtaggttctgcttttttcctcttgcgattgaagcatttgatgcctagtgattgtcaattatgtttcttgaagcaccagtatattcaggtatgggcatggggatatgaccttcagatagacctgttaattttaatctgaaagcaaaaacacaaatccatctacctaagccgaaactcaattttgtcttaaaaa

SEQ ID NO: 11504 - DNA, 246 bp, Gossypium hirsutum
  Clone ID: LIB3135-034-Q1-K1-B1
gttctcacttaacccgtttgcctccggcatcttccctcatggcttcggagaaagaagctgcccttgctgctgcaccctctgattctcctaccatatttgacaaaatcatcaactaggaaatcccagctaccgtggtgtatgaagatgataaggtcttagcttttatggacatagcttcccaggctcctacgcacattttaattattccaaaatcaaaggatggcctaactggtttgtctaatgctg

SEQ ID NO: 11505 - DNA, 285 bp, Gossypium hirsutum
  Clone ID: LIB3135-034-Q1-K1-B10
tcgcccactcgttcgcccacgcgtacggtaccacgtacacacccttggaccgaaccaatgttgttccgcggtgtgtcaacttatcgaagcctcaatcgagacggcttggtccttggttcgcagattcgataacccttaagcttacaaaaattttctcaagagttgccacgttatagtcggggactgtgacgtgggaaccctccgcaaagtccacgtgatatccggccttcccgccgtttttatcacagagaggcttgagatccttgatgaagaacgtcacgtgct

SEQ ID NO: 11506 - DNA, 250 bp, Gossypium hirsutum
  Clone ID: LIB3135-034-Q1-K1-B11
cccacgcgtccgcccacgcgtccgctcaatgagactgaaacacaggacccttgcttgctctgctgatgttatcaacccacgaggtggtcgcatcaccacagttaacagtatcaatcatcccattctccaataccttcaacttagcgcctagaggggagtcctttacaatatatgctatctactctcctcactggaacatgaatgctcacagcattgtttacttacaaggggaaatggaaggattcaaatt

SEQ ID NO: 11507 - DNA, 272 bp, Gossypium hirsutum
  Clone ID: LIB3135-034-Q1-K1-B12
gggaaccctataagaaggggaaatgccatgaataaagggaccctctgattattcacatgaacccccacgccatccttctcttcaaatcaactccaaggtgccctttaatgccgagccgccgcgttctgctttagcttcctcttatgtgactcctgttgatttgttctacaagagaaatcatggaccaatccccgtagtcgatgacatataaagatattgtgttgatatatgcggtttaattggaactccaaaaaagctgtatatgatagatg

SEQ ID NO: 11508 - DNA, 363 bp, Gossypium hirsutum
  Clone ID: LIB3135-034-Q1-K1-B2
agaagcacatcccctcagtcgccgatattgtaggttactgaaagtaggaagaaaattgcgtgaaacacgccaagctgtaatctttattttagagggtagatctaagttccatagctttttgtaaaattgtttgtaatttgtctttaagtcattttgatcattgtgtaagagaagtttatggtcactccgcaccgaatattcctcagtcggcttaccccgtcagataataaggtcatcattctcgtacaacgacagaggtatgcatagaattcgcttctgcttctgctctgaaaagatgtatgctgaacttgggaattctcattcccaaggatccatgcgtcttttcaaaatggagacatgttt

SEQ ID NO: 11509 - DNA, 265 bp, Gossypium hirsutum
  Clone ID: LIB3135-034-Q1-K1-B4
cccacgcgtccgcccacgcgtccgaaaaaaggagttaaaaatggcttgtcctccaactcacaaagtggtaaaaggtgagcttaagaatggttctgatgactgccttgcgagcttgatgtattcgaattaccaaggtgctccggtaacgattaaaaaagattcattacccactccatttgcgcagaatatgatggtcgacggtctgtacggaggcctggtgtatgatggtgttagggttaagtggattattctttggaccactgat

SEQ ID NO: 11510 - DNA, 313 bp, Gossypium hirsutum
  Clone ID: LIB3135-034-Q1-K1-B5
gttgcagcactcttcattttgtctaaaaaagaaaaatgccaggcctcaccattggagacacagtgcccaaccttgaagttgaaaccacccacgggacattcaagcttcatgactacttcaacaatgggtggaccatcattttctctcattcttctgatttcacgcctgtgtgtacgacggaactggtgaagatggcggcttacctgccggagtttgaaaaacgaggggttaagcttctaagtttctcttgcgatgatgtgcagtcacacaaggagtggatcaaagatggtgaaacctacacgcctgggtgcaa

SEQ ID NO: 11511 - DNA, 354 bp, Gossypium hirsutum
  Clone ID: LIB3135-034-Q1-K1-B6
gtccctctcaatttctgtggtgggattttcaattaacaatggcctacaaagcaagcagctccctcttccaaagcctgagacgctacatcaagaagccatgggagataactggaccctgcgccgacccagagtacaaaaacgcagtgcccaaagccacggagtatcgtgttcgctgccccgccaccactttgcataagcccatcgtccctaccttcgaccctgaaaccgtcttcgacatcaaatactacagccgtgatcaacgccggaaccgccctccgatccgtcgtaccatcttgaagaaagatgacgtggtgatgatgatgagagagaaaactttttgatggtaacggattt

SEQ ID NO: 11512 - DNA, 278 bp, Gossypium hirsutum
  Clone ID: LIB3135-034-Q1-K1-B7
tcgcccacgcgtccgactgaatgaaccgtgacctaacggctcacttttactgtgtctacgatggacatggagggtgtcaggttgcgaactattgtcgagaacgtatgcatttggctttagccgaggagtatagaaagggcgaaatcatgtattcgcgagggaaatatcaagcacgattggcaggagctatggaagaaagcgttctccatttgtttcatcaaaggcgatgctgatatcggaggagtttgtaacggtgtgaatgattcctataacaaacc

SEQ ID NO: 11513 - DNA, 399 bp, Gossypium hirsutum
  Clone ID: LIB3135-034-Q1-K1-B8
ccacgcgtccgcccacgcgtccgcccacgcgtacgtgcctcttctcctgagagcagtttagactcgccagatattcatccatttcgggtctcctcatcgggagctgaagaatcaagaaggctaacaagtttatcttctgtcaatatggctgttccaaagggatttcctttatcaaggtctactagtgacgggtatgaagcatcaggtggggaagacagtgatcgagttccttcgagaattatcgagacatcaacaaactggagcaacgttcttttcgattccgaacaggatgatagtatcgttaaactaaaagcaccatcttcatccaaccaggctaacattagaatgcttgtgactgatcatgatcgatgaaattagctcaattttggtctgaagctc

SEQ ID NO: 11514 - DNA, 340 bp, Gossypium hirsutum
  Clone ID: LIB3135-034-Q1-K1-B9
cttccttaaatgaaccctagttgccgccatcttagctccaatcaagcaccatcaaaacactcctttccgccacttctcttcaaatcgtcgattagttttccaagaatccgacccaagtttgatgaaacaaaggtcaaagctttgatctctttctatcttcgatctcccttttacaccgtcagattctatgatatgtggtacatcatgtcatgattcgccttaccatcgttggaatcgccgaacgaagatctggagtttcaaaccctgatcttgatcagataagtccttcgacgtacctatctatttttgcttctcttttaattatttattggttttttgg

SEQ ID NO: 11515 - DNA, 385 bp, Gossypium hirsutum
  Clone ID: LIB3135-034-Q1-K1-C1
cgagaatcagattacggggttaattcccagatgctttgggtacttgaaatctcttgtttttcttgacctaagcagaaacaagtttagaggtccggttcctgaagggctccatcagttgaagtacctcaaacatctctccttggcaagcaacaacctgactggttctattccttctagctttgcacagcttcgttcccttgaagtgttggacctttcatcaaattcgctatctggtgagattccacatggtcttcttgatctgagaaacctaacttctcttcagctcaataataataaattctcaggggaaattccttctggtttctcgaacttgaagtctctttctatgcttgaagtattattcaacgacctgtctggaacatta

SEQ ID NO: 11516 - DNA, 404 bp, Gossypium hirsutum
  Clone ID: LIB3135-034-Q1-K1-C11
cccacgcgtccgcccacgcgtccgaccacctgtgctatatccaccacccccggcacagcaaacatgccccattgacactctcaagctaggcgcatgtgttgatgtgttaggtggcttagtgcacattggtatcggcagcagcgccaaggacacatgttgcccagtgcttcaagggttgctagacttggatgctgctatctgtctttgtaccacaatcaaggccaagcttttaaacatcaatattataataccaattggccttcaggtcctcatcgactgtggcaagactccacctccaggattccagtgtccagcataaggatagtacctcttttggacaataacaatattgtcatctcatgacaagaaattaatattgtctaaaattatcaggtttcccgtaa

SEQ ID NO: 11517 - DNA, 444 bp, Gossypium hirsutum
  unsure (1)..(444): unsure at all n locations; Clone ID: LIB3135-034-Q1-K1-C12
caaaaacctattcatctattttattgaggctttccttccttatttcctcttctctgaccgtgctcaatttggttcttgcaccctatcggttttcttttggttttcgatatatccaggacgcttttaaccagttgccttcgataatgttctccggccactgcatttcgattcctatttggactgcttttcgacatgcaaacgtttcaacagtgaaagccgatgccacctctngatgaatttttgaacaagataagaggatgatcggttcattatttctggccacaatccccgaagtcgattggaaatgatgcccattctatgcttcgtcaaatatgatttttaccgactcacaggctacttttcttatcatgcattctagcattcctttcttcctaaatgggccataacacatagtaaaaaagtttgctttgaaaatggggattt

SEQ ID NO: 11518 - DNA, 178 bp, Gossypium hirsutum
  Clone ID: LIB3135-034-Q1-K1-C2
tcggtgagaacaatgaactgagagggcctgtaatcatttgagccaaacacccccaagagtcagcaccttctctctcttttagttgcagtcgttcatcgcataaaccaagaacaggcgcttagagaacttgcggatactacacatgaagacagaactggcgaggctgcatccgcgccaa

SEQ ID NO: 11519 - DNA, 225 bp, Gossypium hirsutum
  Clone ID: LIB3135-034-Q1-K1-C4
cggacgcgtgcgttcctctcttcgtaaactcttactttaagagttcagtctcattcaagcgttttcattggcagccaacatggggaagactcgcggtatgggagctgctctcttgctgagaacccaccgtagaatgcatatgtggtccgtcaggtcatatatgaagtcaaatctcggatatgaatggaagaaaccctttgctggatcatgacatgcccagggcat

SEQ ID NO: 11520 - DNA, 264 bp, Gossypium hirsutum
  Clone ID: LIB3135-034-Q1-K1-C5
ccacgcgtccgagcgaactcgaaagaacatttacagaggaatcaggcaaaggccatgggggaaatgggcggctgagataagagatcctcacagaggtgtccgagtctggctcggtacatacaacacggctgaagaagcggctcgagcctacgatgaagccgccaagcgcatccgtggggagaaagccaagctcaactttccttaaactccacacctaactcagccttctgctaagaaaaggtgtatgatggctcctgagttgac

SEQ ID NO: 11521 - DNA, 212 bp, Gossypium hirsutum
  Clone ID: LIB3135-034-Q1-K1-C6
cagcagccgcttgtatttggaagaatggtgagggtgagcgttttgaatgatgcactcaagagcatgtacaatgcatagaagaggggcaaacgacaggtcatgatccgaccgtcctcgaaggtgatcattaagtaccttttggtcatgcagaaacatggttatattggggagtttgagtatcttgatgatcatagatctgttaaaattgtggt

SEQ ID NO: 11522 - DNA, 212 bp, Gossypium hirsutum
  Clone ID: LIB3135-034-Q1-K1-C7
tccttttctcgttagtgcccattgatcaatgcgcttttgtcaccagtgaattgctctttttctctattaatttcttggtgaggtcgtgtttataataaactaatacggatgagctctctattatctcttttgtcatctcttcaagttattgtgaatatggaacttatctcttgatctttaatcaagtcttttgtgtttgaaaaatgtaacat

SEQ ID NO: 11523 - DNA, 437 bp, Gossypium hirsutum
  Clone ID: LIB3135-034-Q1-K1-C8
aggctatctaaatcaatgaaaaagttggaaaagaatcttaaggacagtgataagtacaagagtgaggaatactgtgccaagctccaaaaatcaaatgagaggactctagctcttgttaaagcaggactggatatagtggtagcagttggccttcttcaattggcacctaagaaagtcacccctcgtgtaacaggggctcttggatttgctacgtctctcatctcctgttatcagttgcttccgtcaccatccaagtccaaggtaaactgaagtgggaagcctgttttgctcatcaagctcgagtatcatcatctaaataaattcaacttgtgcgtttaaagtttgaagaatttgtcaacttgggggtgaacttggacttactctttctatttatagcaccactgttgttgcatattttttaggctttcaacaaaaat

SEQ ID NO: 11524 - DNA, 238 bp, Gossypium hirsutum
  Clone ID: LIB3135-034-Q1-K1-C9
ctgaaatttggctctgcctcaatatttctcttttaaattcttattgggaatcttttttccttttaaaatcctataaatataatgccttttaagatctcattaaccctctgagattctcccaaattttaactcttttgattttttttgagagtgctcaaagaacaaaaaaggctccctgtgtattcttttgggtatgatttagcccttatagcctcgagtatcacttctctttattaac

SEQ ID NO: 11525 - DNA, 436 bp, Gossypium hirsutum
  Clone ID: LIB3135-034-Q1-K1-D1
ataccaggaacttttgaaagcactgattggttttatagatgttgctggactttattttgccttaacacagttgactcacaggaacatctctcaaaatcataaatttcaagctgttggacttggatgggcttttgctgattctgtgctacatagattggcaccactttgggtgggagcaaggggactagaattcacttgggattacattctgcaaggcctagaagcaaatgcaaatttggtgttgagtatatctcttgcagcattgggatctttgatttggctcaaaaagaacaagcccaagactttgattcccataatatatgcctgcgctggaatttgtgcaaccatgccatccattacaagctacctaaagcgaggattgggatggcacttttcaaaggtggtaggcctttgaattattcacaattttggtgat

SEQ ID NO: 11526 - DNA, 224 bp, Gossypium hirsutum
  Clone ID: LIB3135-034-Q1-K1-D10
gcaggaacggcgtacggaggccagctggagtcgcggggaggcactgcatgcgtcgagagtggttctgcacgcgcggaggatggccttggtggctgcggcgctggaagctgcagctgctagggtttctttgaaactgctttgggcttgaattgggctaacggttatggtagtttaggttaaatgatctgatgttattgcgctaggctagcgagctaaaacgatat

SEQ ID NO: 11527 - DNA, 282 bp, Gossypium hirsutum
  Clone ID: LIB3135-034-Q1-K1-D11
aactgggaagctgccagaaagatggtggctggaaggtttataaattcttactctacgaaagattggatgcttggagttgctttccgtgcaagtttattgacaaatggattagccggattacaaccagttgatgtgcaagggattgagaatgtaagtcatgccagttataatttttttcacctagctgttcatcgtgctaattccttaaaattctcttcagggtgacgtaacaaatacgatcgaaggtcacttatcctattttgggtcttaaaggaaaaattt

SEQ ID NO: 11528 - DNA, 221 bp, Gossypium hirsutum
  Clone ID: LIB3135-034-Q1-K1-D12
cccacgcgtccgcgtttatattgtagagctaatttgataataggcttcaatattgtgaggactccttttattttgcatcttatcctatccttatttaaactgttaaaaaaaaaaaaaaaaaaacaaaataaaaatattactataaaatatattttaaaaaataaatatcaccatctttatttcttccctctttatatattcccatcttcctctcctttcct

SEQ ID NO: 11529 - DNA, 381 bp, Gossypium hirsutum
  Clone ID: LIB3135-034-Q1-K1-D2
cccacgcgtccgataataatttgtttgcaaggtgacgaggaaaggcgttaggcaagaaaaagcctaactcgttcgagtgaactcgctcctttgcaggctcagtcctttaatctttgcaagtaatatcgtcgacattacaattttcaaagaggaaccagatccgacgttgtttcatcctccgatctccattctttcttgaggattcaatatagaaaagttaattcctctattctgcggagatttgaaaattcgggaaccctttttgtgtttttgttttcaattattgattgtatctaattgagctggtgaatttgttttcttcaacaatgagtttccgttttcgagggtcaagaatcggattagagagtggattttcagtgc

SEQ ID NO: 11530 - DNA, 447 bp, Gossypium hirsutum
  unsure (1)..(447): unsure at all n locations; Clone ID: LIB3135-034-Q1-K1-D3
ccacgcgttctgccacgcgttcgcccacgcgttcgcccacgcgtncgcgctcattaaattccaaaaaggaaaacttcccgatcccgtctccggcgacatgttgccggccgttttgactcaggtggccaccggcttaagcgttttagctggtgccgtcttagtcaaatccgtcatggatcaaaaacccatggccggtccgtttcaaagatgcccgacttgtaacggcacgggtcgcatcacgtgcatttgcaatcgttggtccgatggaaattccggttgtcggacttgcgccgggtcccggtcggatggcgtgtagcagttgtggtgggtctggtaccggtagaccgattcctggtcagatttctgacgtcaccgaccaatcggaactcttaattttcgggtttggactttttaaactcttataaatttttatagctcctttttttg

SEQ ID NO: 11531 - DNA, 313 bp, Gossypium hirsutum
  Clone ID: LIB3135-034-Q1-K1-D4
cccacgcgtccgcccacgcgttcggctaaattcaagagcaaaaaaaaaaaaaatcttaaataaaaaaaattcatcatgacaacccaaatgaaagagcttgaagatccaatggctctaatcacccaaatgtacccttgcatatacactcaagttgcaccacaacaaggggaaatatcgaagcctcgacgacgacagaagaagaacaagggaggggaaagcggggcggcaaccgcggcggagacagctaagaaaaggaagcttagccaagaacaagttgatcttcttgaacttaactttgggaatgaacataaac

SEQ ID NO: 11532 - DNA, 419 bp, Gossypium hirsutum
  Clone ID: LIB3135-034-Q1-K1-D5
gggagtacaaatttttcaggtactctaacagatagagctttttctgcggcatattgagagccatatagtctcccgccaatcaaaaaccccctaacattatcaggtaggcccaggatctctaactgcgaatcgaatcaaagcgttctccaataaaggcatcatgagatgtagcggtatctctcctcagtctatggtctcgattgtgggtgggaaaatggatgctactatgctactctttcttcaaatgcttcagcttgagcttgagaacccaaactggcagaaaaaaaaaaaaaccccttggcggaaactgactaccaatatatacccgtaaccgacacgttgggatagacctacagccatcaaattataccccgcttttggaaccataaaagagctactttttattttaatgacccttg

SEQ ID NO: 11533 - DNA, 373 bp, Gossypium hirsutum
  Clone ID: LIB3135-034-Q1-K1-D7
cgtttcaatcactctcagctcttctatggcgagcagtcacacgagcaaggaaacttccggctagcaaaacgacgacgtttagaatggcggtgaattgccgtcacaggttgaacccaaaaatggatcctttatatttcggaaacgcaattcaaagcattccgacttacgcatcggccggtgacgtcacgtcacgtgacatacggtggtgcgccgagcaattgaacgaaagcgtgaaagctcatgacgacgagacagttcgtctgtttatttgtaattgggaaaaggatccgcggtgttttccgttgggaaatttcgatggtgcttcgatgacgatggggagttcatcgaggttttcgatgttcgacaatgattt

SEQ ID NO: 11534 - DNA, 375 bp, Gossypium hirsutum
  Clone ID: LIB3135-034-Q1-K1-D8
cccacgcgtccggggcagagaaggaaggaaagaaagaaagaaagaaagaaaaagaaaaagggaaatttaaggttttaaggttccaagctcaattgatcaagaagaacgaaattcgggagtagatcggggaaaagaaaaagtaaaggactaaattgtaaagtttagtcacattttgtatcaagtacttatctagccacttggggatcgaaggaaacgtcggaggccgatcacactatcaaagaaataactcggtataattagacgttttgttttgtgtatggcatgtatagaaacttagctacttttggtataatatgaacaatgagtgatgtgtaagtagttgatgaagtattgttattaaaatgattaaggatg

SEQ ID NO: 11535 - DNA, 324 bp, Gossypium hirsutum
  Clone ID: LIB3135-034-Q1-K1-D9
cccacgcgtccgcccacgcgtccgactctaccccacagttgatccgacattggaacctgactatgccgagtaccttaaagggaggtgtccgacacccgaccctgatccggaggcggtgttgtactcgagaaacgaccgggaaacgccgatgattcttgacaatatgtactacaagaacttgttgaagcacaaggggttgctggtgatcgaccagcaactgacctctgatcccactacttccccttttgtggagaaaatggctgctgataatggatatttccatgacccagttgccagagctgtgctgttgttgtcagaaaataa

SEQ ID NO: 11536 - DNA, 90 bp, Gossypium hirsutum
  Clone ID: LIB3135-034-Q1-K1-E1
cggacgcgtgggaaaaaaaaaaaaaaagaaagagaactaaaaaaaggcaataggaaagaaagggccgtacgaataagaatgaactatctc

SEQ ID NO: 11537 - DNA, 262 bp, Gossypium hirsutum
  Clone ID: LIB3135-034-Q1-K1-E10
cccacgcgttcggcctgcatgataaccctacgacaagcattttgcgacgctgctttaacaatttctatgtgcttttatcgctttacggatgactatatagcccatacaagtacccaaaaaaagagaatcaatggttttagtatatatattttgaattgtcataccgctactttgtggtattggagtcattcgcaaggctgttgtgaatattgtcgttttccacatttaataaataacatggatgatgcttctgaaccttctt

SEQ ID NO: 11538 - DNA, 262 bp, Gossypium hirsutum
  Clone ID: LIB3135-034-Q1-K1-E11
gtcagggtgtttctagagcactggttgagaactcaagaacattaagattgcctacatatttgcatgaaagattgggattaatccgaaatgcaaaatataggctggaggagaaaggaataacaccgactattgataggattgctgagagtctgaacatgtctcagaagaaagttaggaatgccacagaggcagtcagtaaggtcttctcccttgacagggatgctttccccgctttgaatggtcttcctggagagactcacca

SEQ ID NO: 11539 - DNA, 241 bp, Gossypium hirsutum
  Clone ID: LIB3135-034-Q1-K1-E12
gtggccaagattatacatccaccaaagaaagagaagcctgagcccaaaccaccagtatatgaacccccaaagaaggaaaagcctgaacctaagccaccagtttatacaccaccaaagaaagagaagcctgagcccaaaccaccagtgtatggaccaccaaagaaggagaagccaccggcttataagcctccaaagaagccaccagtgtatgagcctaagccaccaaagccaccggtttaca

SEQ ID NO: 11540 - DNA, 187 bp, Gossypium hirsutum
  Clone ID: LIB3135-034-Q1-K1-E2
ctcgcgctacggatattatttcagtcgatcgtggatctgaacgccctgctgtcttccagacgctgatgttcgtcgcttgtgggcgaacattgaactcctgagaacggtgccgtggggctgttgcggaacggacactgccacgtttgccaagcggcggtggcaaccgttctgcgaggaggatctctac

SEQ ID NO: 11541 - DNA, 347 bp, Gossypium hirsutum
  Clone ID: LIB3135-034-Q1-K1-E3
cgacgaacccttgaggcaactacttcatcaatcctgctcaaaatcttccaaacctgctgccgcaggaatcatttccaaacgaaaacttgacgcttcttgctgatacagatgctgggggatgcatttttggtctcatgattaagtgattccatagttttcaacctaatgaatactataatgtacgatcaatggcaaatgttagtgataaatatatgaaaccgcaaaataatgattgctatatatataattgagacgagccctcagtatttttgtactatgagagacacagagaaagagaggagatcattatattagaaatttttgttaaagaaagaaaagatccaagt

SEQ ID NO: 11542 - DNA, 253 bp, Gossypium hirsutum
  Clone ID: LIB3135-034-Q1-K1-E4
gttcaaaaacagggatcagatgtttatatgtacattactagaaatccttgtactctttcctccttaggtaggtggaagcttcatgaagatgaagcttccgtgttcctgtatgttgagtttagcaaaatcgcgtatctgacttagttattggtaatggctaagactcatgagagactgtgaattccatagttttcaactcatatttgtaggataattttatgtcttaattttttttggtttttatttgatctat

SEQ ID NO: 11543 - DNA, 313 bp, Gossypium hirsutum
  Clone ID: LIB3135-034-Q1-K1-E5
ggaagcttggtgaaagagattgatataaagggagtgaagaaaatgattgaggaagggaaggtaggcggtgggatgattcccaaagtgaattgttgtattcgatcgcttgctcaaggggttaccactgctagcattattgacggtcgtgttgagcactctgtgcttcatgagattatgaccgatgagggcgctggcacaatgatcaccggttaaactatagcctactcttaccttttggtagttttaatattggagctcttctatttatcgcagttattgaatgcattgctaccaaacttaatgcttttttttt

SEQ ID NO: 11544 - DNA, 189 bp, Gossypium hirsutum
  Clone ID: LIB3135-034-Q1-K1-E6
aatccggtcatcgacaactggcacctgctctcactcgatttgttgtctgacccggtacgacccgttgcatccatcggcgccctcatccttgtgagaccaacaaattgtacagatcttcaattagctctatgtaacccttttactaggcaatttaggtaccttccaatgtcaaatatcaggagaacgaat

SEQ ID NO: 11545 - DNA, 430 bp, Gossypium hirsutum
  Clone ID: LIB3135-034-Q1-K1-E7
cgcagattgtttcatctgatctgaaactccgtcgcccaattccccaaacaaagcaaatcgatggcgtcttctcctggaccatactccggcaccagcactctcgctctcgtggctcgtgcatctgctttctcttttggactcgtttatggtagcattaagctcaagtatctcaaggccaaggcaaggtctcaaaggaaagctgaagcaaaggctcaccactgaagcaggggtggtttttgttcatagttggtttgcatgagtgaattgagtttggtgtaggaataaagcatatcaatggtattgtaccagattttcatttcgggctaaagcttttacggacaatgacatttttgttcccaaattttttaggtatactaacttggcatttcaaggtttaatttttcggttggcaatggcactactgatgttt

SEQ ID NO: 11546 - DNA, 407 bp, Gossypium hirsutum
  Clone ID: LIB3135-034-Q1-K1-E8
ggaagagtgagctctgaagcacaagaaagtgattacgtggaaacaggttcctgtgtagatactgaaagcaatgagttaataccacaaaaagaatgtatcgagggtacatatcggccaaaaacacttggaagcagttttgatgttgttaaaattgagccggaaagaaggcatatcccatcagcttcatcagcactggttattggtggcatccttggtctccttcaagccttattcctgatttctggagcaaaacctctattgaacttcatgggaatcagttcagattctcccattgctaaccctgcacaacagtacttgactttaaggtcactaagggcctcctgcccgtcttctttccttaaccattgcaggtgtcttttgaggatttaaagacacaaaaacttctt

SEQ ID NO: 11547 - DNA, 313 bp, Gossypium hirsutum
  Clone ID: LIB3135-034-Q1-K1-E9
gctgaattatatatataacaattgtctatatgttcaaaaatttgtgcattcattacagaataacagtcaatgactcaattatacctaagggttctttttttttttttgtggggggggggggaatgcttttagcttgaacaaaataaatatggttgcaggatgctattgaagaatgccggaaattatgtggtggtcatggttatctttctaacaatgggctccctgagttatttgcagtttatatacctacctgtacctatgaaggagacaatgttgtgctgctcttacaggttgcaagatttctaatgaaaac

SEQ ID NO: 11548 - DNA, 207 bp, Gossypium hirsutum
  Clone ID: LIB3135-034-Q1-K1-F1
ctcgctcgttcgagcttaaggactgggacgtgattggagatcactccgctatggtgcgtcgttataatgaacaaaactaggcgttggagaacaacgtctcaacgttagatcacgagatgcatgtttgagcataggaggtgaaagacactggcgtgacgagtgaccagggccctgatattgatatacatcacggttgtaaccctatat

SEQ ID NO: 11549 - DNA, 295 bp, Gossypium hirsutum
  unsure (1)..(295): unsure at all n locations; Clone ID: LIB3135-034-Q1-K1-F10
atcacccttaagagctcagacggcgaatcattcgaggttgatgaagcggtggcgttggagtcgcagacgattaagcatatgatcgaggacgattgcgctgataacgggataccgttgcctaatgttacgagcaagatcttagcgaaggtgatcgagtactgcaagaaacacgtcgaggctcctaagacagacgatcgatccgccgatgactagctcaagagttgggacgctgactttgtcaaggtcgatcaagctactctctntgatctcattctggcagcgaactatttgaaca

SEQ ID NO: 11550 - DNA, 246 bp, Gossypium hirsutum
  Clone ID: LIB3135-034-Q1-K1-F11
ttccaatacaaagcttcatattatcttttttagttccgacaaaagaaaacgaaaaaaatagaagaaatacaatcgttttctttttgaagtcgggttttagtttttggggagaaaaaaatgttgggagtatttagcagtgcgatagtgtcttcgccggacgagctggtggcggccggttgcgcaactccatcacctaagataacggcggatgctctggtgaaacggttccttgagacgaactccttc

SEQ ID NO: 11551 - DNA, 91 bp, Gossypium hirsutum
  Clone ID: LIB3135-034-Q1-K1-F12
gaggaaacttgtttgtgtcaaatcgttggacttgtttgggtttgctttttgacccttggctttattttcaatgaagttttggttgctgctc

SEQ ID NO: 11552 - DNA, 300 bp, Gossypium hirsutum
  Clone ID: LIB3135-034-Q1-K1-F2
gaagtcggcaaaatttgagggactggatggcaattatgggcaagagagcaatgatgggtatttgttgtagtcaccaaaaaagggtcaagaatatggtataatcggttcaacccgacttagaaaattgagcattgttgtttgatgttttggggttttctcttgttttgatgaacttttactatgggggggatgtctccgtggctttatatatactttcaatagcccaaggatgtttcttagtttattatgtgtgtcttttatccatttagtcttcaagttttaaatttttcagcatttggg

SEQ ID NO: 11553 - DNA, 110 bp, Gossypium hirsutum
  Clone ID: LIB3135-034-Q1-K1-F3
tgcattcgatagtcatgcagtggattgaatgatctgacagggctgtcatggatactttgtatgacaacgacgatcgtcttaatgcggtggctgctggacatgaaagaatc

SEQ ID NO: 11554 - DNA, 259 bp, Gossypium hirsutum
  Clone ID: LIB3135-034-Q1-K1-F4
cactctcttccgaaggataaatatacccaaaaagagaaaccgcaaaaacaaagctcggaaatcctggttttttttttattcaaagttaaaacccagttttcattttggtctgtttcagcttcctctttacctaatggctatggaaccaaacttctttgaacaagaatcacatttcgagtctgatggagatatttcactgaagaacaaatggaatccaataccagaaccaacataagaccttaaaaaagattccagctgc

SEQ ID NO: 11555 - DNA, 323 bp, Gossypium hirsutum
  Clone ID: LIB3135-034-Q1-K1-F5
gaaatgacaattgagaaactatagtaaagacatacaaatttgttcaactgggtccaacttgtttaagaggtgaccataatatgtgtttgttgttagttaattaaatagatttagttgattttcatgtgtctttgctcaatttttcccaattttaagatgaatttagagaagcaatggaggtacccatttttctctttgaaatttcatgcacctataaaaaaaaaagggaaaatctggaaagcttataatttgaaaattattctagtgtttgtgttggtttaattaaataagcatattttgtaaccattaaatgctttgttatt

SEQ ID NO: 11556 - DNA, 336 bp, Gossypium hirsutum
  Clone ID: LIB3135-034-Q1-K1-F7
cccacgcgttcgtggacgcgtgggcggacgcttgggcaaaaattgtatacaagccaggtgctgaaaaaaatgcaacgaatagtgattccgcggatgccaagaaataggctaagggagataacgaagctgttccagagaagaaagcacctgaaaaagaagcatctgataaagacaaagaactcagtgtctgtttactgaatatacaggttggtcttatacgtaaagcatggaaacattcatctgctgatagcttactggtataggagatatatgtcggagaggcctaagtacgaccggttgttagtggattggccatgtttttctgtccattattac

SEQ ID NO: 11557 - DNA, 463 bp, Gossypium hirsutum
  Clone ID: LIB3135-034-Q1-K1-F9
gtgcagcagttcaatccgtttgaagagtctggggtcgggtggacatttgacagtgcggatgcaagcaagttgatacatgcattacgtaactgtttgttgacatatcggcagtataaaacaagttgggaagggttgcaaatacggggaatgaagcaagatttgagctgggacaatgcagctgataagtatgaggaagtgcttgttgcagccaaatatcagtggtgagagctctgcttggtctgattgaaccctcttatcacctttttaccgcaaaatttgggtcttgttttaaaatgttggattaatgttggattcctagataattgctctctttttggagggcatgtattgaacttacattgccaagggtcataattaattcataatgtcatgtttacttgtcttaatatttcaaaaattattaaaaatggtattttattttattaaattatgtgtatatatt

SEQ ID NO: 11558 - DNA, 377 bp, Gossypium hirsutum
  Clone ID: LIB3135-034-Q1-K1-G1
caagtatgaggttgtgcttaaggctgagccatttgcctatgctccaaagaccccttacaaggagtgtgagaagccaaagccaaagcctactccagctccttactattacacctctccaccaccaccatcgcctacttatgcttacaagtcaccacctcctccaccatactattacaagtccccgccaccaccaagccctacctatgtttataagtcaccaccaccaccaccatactactacaaatctccttctcccccatcgccatctcctccttctccttactactacaaaactccaccaccttcatcttcattaccaccaccaccatactactacaaaatctcaactcctccaatccctttaaccccctccccat

SEQ ID NO: 11559 - DNA, 360 bp, Gossypium hirsutum
  Clone ID: LIB3135-034-Q1-K1-G10
gcagcccaaaaatacttaggtcttgtttttgggggaagggttgagacatgctagtgtggatcgtgactctcgcgggctgcgcccttttcaaagtgttggatgaagggaagctaaacaaagttgaggacttgtcaaaagaattcttggctgcagattcagcaggaaaggttgtctctgtgcaagccttttccaagttcgaaaacacagcaaaagcattggaagcagcaacgaaacttacttgaagcacgcccagcaaaggtttaaacatgttttttcctcctcattgtgaaagtgaaacactaatgagttgttgatttaaaactttgaaaatgtcatttaatggaaaactgtaaaattgat

SEQ ID NO: 11560 - DNA, 413 bp, Gossypium hirsutum
  Clone ID: LIB3135-034-Q1-K1-G11
cccacgcgtccggcctcatcatgggctatatctgtgtaccatgcctaccaacgtacatggaaaccttttaatcctattattggggaaacatatgagatggttaatcatggagggattacattcatttctgaacaggtcagtcatcatcctccaatgagtgctgggcatgctgaaaatgaacattttacttatgatgtcacatcaaagttaaagacaaaatttttaggaaattctcttgatgtttatcctgttggaagaacacgtgttactcttaaaagagatgggggtcgtttaaatttggtgccctctcctacaaaaggtaaccattctaattttggaacaacttggggtgattcaacaggagagatgatcatgaccaattttacttcttgggaccaagttgtgctttattt

SEQ ID NO: 11561 - DNA, 346 bp, Gossypium hirsutum
  Clone ID: LIB3135-034-Q1-K1-G12
aaaagattctacattgctcattcgtcccttgattgaaaaccaaaggtacaatcagaagacatggttactgtctccttcaccttgatggcatctaatacactgatcctcaaccattactcttctcatcttcagattagaaaaaagtggggatggaattccacaaaattttccacattgtaattttgaatttcgaaggcatgtataggttccgcactttcttgtaaaaatttttagtatcggcctgtatttaattactagggatcaatgtagtattcctggaatagtttatagggcactttcttacttggaccgttttctaaatggacttcccctcttcaacaccctg

SEQ ID NO: 11562 - DNA, 460 bp, Gossypium hirsutum
  Clone ID: LIB3135-034-Q1-K1-G2
ggacaatttgcagtccagcttgcagaactggcaggaaacaaagttgttgccacttgtggaggaaaagagaaggccaggcttttgaaagatttgggggttgatcgagtcatagactacaaaactgaagacatcaaaaccgttctgaaaaacgagtttcctaaaggagttgacattgtctacgaatctgttggtggtgacatgtttgatttgtgtttgaatgctttggctatccgtggacggctcattgtgataggaatgatctctcaatatcaaagagagcatgggtggaagccaaaaaattatcctggtcttgtcgagaagcttttaaccaaaaaccaaatctgtggctggcttttttctggcacaatattacctatttatggaaagaacaccttgctagacaatttgatctttactctttggggaagcttaatggtgcaataaattcaaaaagattttt

SEQ ID NO: 11563 - DNA, 362 bp, Gossypium hirsutum
  Clone ID: LIB3135-034-Q1-K1-G3
gtgattggagcaagaagggcatcgtggcggatactgtcttcgatcgaacagaaggaggaagctaagggtaatgaacaaaatgtgaagaggataaaggagtatcggcagagggttgaagatgagcttgcaaagatctgtgatgatatactatccgtcattgataagcatctcattccatcttcctcgacaggggaatcaactgttttctattacaagatgaaaggagattattttcggtatttggcagaatttaaagccggagaggaacgtaaagaaactgctgatcagtcacttaaagcttaccagggctgcaccactaccggaaattcagatttgccggcaaactcacccaaataagactt

SEQ ID NO: 11564 - DNA, 382 bp, Gossypium hirsutum
  Clone ID: LIB3135-034-Q1-K1-G4
cgtgaaacattcataggtgaaatcataggtgcaatattcatgggtggagatcatcacaatctgaaacctaccattgaagaaatgccaatcaaagtgattgctgaaggtgatgaatccatggatggacagattttgatcgacaacaagcaagagaaatcagtaaaagtattgaaaaatggtgacactatggcttatcaccatctatttgcagatctaatgggtcatcaaaaccagtctgctggcttaggaagcctatgatgaacaaaaaaaaatggtgagttcacccccaaatgaaatggaatgcgaaataactttggtaatttgtgaaaacaaaagttaattatttcaagattattaaacctttttaatagactttgtttaa

SEQ ID NO: 11565 - DNA, 317 bp, Gossypium hirsutum
  Clone ID: LIB3135-034-Q1-K1-G5
cccacgcgtgggctgaatcaaagatgataaaaagggatgaaggacgcattgagaagtggattcttaggagggccttcgatgatgaagagcatccctatctgccaaagcatatcctttacagacagaaagaacagtttagtgatggtgtgggttatagttggatagatggtctcaaagcacatgcttgccaacatgtaaccaataagatgatgcgtaacgcatctaacatctttcctcacaacacaccaatgacaaaagaagcttactactacaggatgaatttcgagagaatctttccttaaaaatcggcaagattg

SEQ ID NO: 11566 - DNA, 395 bp, Gossypium hirsutum
  Clone ID: LIB3135-034-Q1-K1-G6
ccattttagtgccattttctcccttctttgcttttgggtttttctttttagggtgcttggtatacatgcttcgcgcggttcaagaagacattagcttatgttttacttgccaatggaaaatgtttagttttccctatagtcattccccaaacagtcttcgggtcactatgtacaacagaagtgtagataaagtttgagggatatataatgaagtatatatagtagctttttcatatgatgtaccatatgtcaggttttatgtattgttggtttcaaatataaaaaataacatgggagggcattccgctttaatagatatttatttatttctttctattttacttttttataataatctttactttgttgccctaataaattaatcctattttaat

SEQ ID NO: 11567 - DNA, 287 bp, Gossypium hirsutum
  Clone ID: LIB3135-034-Q1-K1-G7
cacaaagcctcagttcattaacacaagaaagaacagaaaaaaaggaacaaaagatgggtgaggagcagcagggaattcagattcccagaatcaaactgggaactgaaggacttgaggtttcaaagttggggtttggctgtatgggtctcactggaggttacagttgtccagtctctgaagaagttgggatatcgattatcaagcatgcattccacagaggaatcactttctttgatacatctgatatctatggacccaaaactaatgaaattttgggtggaaaggca

SEQ ID NO: 11568 - DNA, 266 bp, Gossypium hirsutum
  Clone ID: LIB3135-034-Q1-K1-G8
cccacgcgtccgcccacgcgtccgaatcggaacaaaaatcagataggagttttgggatgagaaatttcaagtacgttaagacaattaaagatgctctggagcaagaatgtccaaggacagtttcctgcgctgatatcgtctctctttctgctagagatggcattgtcttgcttggaggaccacgcattgagatgaaaaccggtcggaaagatagcaagagaagttacctttcagaggtagaaaataccatccccaaccacaatgat

SEQ ID NO: 11569 - DNA, 275 bp, Gossypium hirsutum
  Clone ID: LIB3135-034-Q1-K1-G9
tgggatttggattgcctgctgctattggagctgctgctgcaaacccggaggcagttggtgtagacatcgacggtgatggaagttttatcatgaatgtgcaagagttggcgactatccgtgtggaaaaacttccggttaagatattattgttgaataatcagcatttgggtatggttgttcaatgggaggaccggttttacaaggcaaacagggctcatacatacttggtgagacctatccaacgagtcggaaatatttccaaatatgttgaaatt

SEQ ID NO: 11570 - DNA, 209 bp, Gossypium hirsutum
  Clone ID: LIB3135-034-Q1-K1-H1
gtggatctctcatctgctataacaaccttcattatggtcgtgttgttttgttttgttttgcaagagtccttgtcttgtaggtttttccctgtatttatgaaactgcaactactttgttattatcaataaagcttgatattttactctaaaaaaaaaaaataaattattaaataaatatttaataaataattattattatattaaaatgg

SEQ ID NO: 11571 - DNA, 262 bp, Gossypium hirsutum
  Clone ID: LIB3135-034-Q1-K1-H10
cgtccgggctgaaagagctgccaagggtgctccattgagtgcaccactggagatgggaaaatcaagactataaaactgctttgattgcggtgctcggagatggccattgatgttttggttttaccaatttgctgccattgatagaatgataaagctctcaagatgagctttcaataatgttgtttcaaatccaaaaaaggatatgagatagggaagcagataagctaaagaatgaaacatgaataataaatgtaatatgaca

SEQ ID NO: 11572 - DNA, 158 bp, Gossypium hirsutum
  Clone ID: LIB3135-034-Q1-K1-H12
tcgagctcaagcacaaagagggagaaagagaacgctcccaacttccgattttttagatgaggagattgagacactgcttgtgcgatgtctccgctttttagacatagaaaacgttctttcacgtcagggctcctgcactatacagcttatggcgtctt

SEQ ID NO: 11573 - DNA, 191 bp, Gossypium hirsutum
  Clone ID: LIB3135-034-Q1-K1-H2
cccacgcgtacgtcgaggtctgtgggaaaaggtccacctaatactgcttagcatagtggtggatagagaatatgacaagcttacgtgcatacaatagtgcgcaagtcctctgaggctgcacaatctaacggtggaacatctagcgaagtcaatggcgaccgtatacagcatgccgcagcggaaagctcctg

SEQ ID NO: 11574 - DNA, 241 bp, Gossypium hirsutum
  Clone ID: LIB3135-034-Q1-K1-H4
cccacgcgtccgaatgttgatcataggacgcattcttcttggtgcaagcatctaaatgtgtttggtattttaggtatccaacatttattgatgcacttagagatttggatgatccttttacaatgctgcacctgtttgcaatgttaactttgaatctttgaatctttgaatctttagatttaggatttgtttgaattatccttctaattagttactttttctcattttctacttggataga

SEQ ID NO: 11575 - DNA, 247 bp, Gossypium hirsutum
  Clone ID: LIB3135-034-Q1-K1-H5
cccacgcgtccgggtgctcctttaggaaatagctggaggacaactaacgacatatccgataattgggaaagtatgatctctagagctgaccagaatgaaatttatgctgaatatgcaaggcccggtggttggaatgatccggacatgctcgaggtggggaatggagggatgacaaaagatgaatacatagtacatttcagcttgtgggctatttcaaaggcacctcttcttcttggttgtgatataa

SEQ ID NO: 11576 - DNA, 262 bp, Gossypium hirsutum
  Clone ID: LIB3135-034-Q1-K1-H6
cccacgcgtccgcggaaccatacggtattgggatggggtatggaggttatggtcatagcttgaggagcccgagttttaaaagtgtaagcggatcgcaattcggattggaacgacaatctaactattcatcttgttgtactgagagccttggtggtgaaatgtcaccatcttcaactagtgatctaagaaggtggttgaggtgatcccatcaatgtagctgttggtttttactagttttatagtgggtttccattgttgattt

SEQ ID NO: 11577 - DNA, 286 bp, Gossypium hirsutum
  Clone ID: LIB3135-034-Q1-K1-H7
cccacgcgtccggcacttccactaactgcaaaaatgtgaagtgagatggatgaagagagggttttgcagcagcttgcaggagataaaatatatgattaaaaagaagaagaagaagaatgaataaggattttgggatggaattttcaaaatccaaaattagtctccactttagtgtagtgaggctttgcttattttgttttatgttttggtccctgcatgttggctctaattttatatcctatgtattggctattttaatgtttaaatgaattaaagtttatgcttt

SEQ ID NO: 11578 - DNA, 222 bp, Gossypium hirsutum
  Clone ID: LIB3135-034-Q1-K1-H8
gagggctcttggtgcaaagctgcgaggtaagaagtaaggcgagttgggtcttttttccttttgtggtgtaaatgaatgttctctaccattatggttttgcttgtaagaacagtgttttggactttgtggtgaccatgaaatgaagtgtgttcttcaaaaattttatattatatataataattgtatctattatttttgttttatgatattttgttatttttt

SEQ ID NO: 11579 - DNA, 286 bp, Gossypium hirsutum
  Clone ID: LIB3135-034-Q1-K1-H9
ctttcaaaacacttctccagtgacccaaaaaagcttcattgtctcttctattgaaaaccccatggctgctcttaagctagtttgtgctctagtgttgtgcatgttggtggttgagcccattgccacaaccgccataacatgcggtgatgtgacaagcaaagtggccggttgcttatcatacttgcagaacggagggaacgtgccgaatgcttgctgcgacgggatccggtccctgaacatgatggctcgaaccacccctgactcgcaaaccgtgtgtgggttgctt

SEQ ID NO: 11580 - DNA, 177 bp, Gossypium hirsutum
  Clone ID: LIB3135-035-Q1-K1-A1
gaagatcatgttgacgctcggtgattcacggtcctccagctggatgtggatggtgatttgcggatacattcatggatagaggttccacaaacgtggggatcagcttggcgagcggttgtaaatcaatgtctggactttgcaactcgtgatcaacgaggcatctgcgcatttaatgcc

SEQ ID NO: 11581 - DNA, 112 bp, Gossypium hirsutum
  Clone ID: LIB3135-035-Q1-K1-A10
ctttagcaaaaccacattctcaagttaaacaaaggggaaaaaaaatgcatttcgcaggggaagagagatcagtaaagaaaattaaatgtctgttggatactgattttcgagc

SEQ ID NO: 11582 - DNA, 373 bp, Gossypium hirsutum
  Clone ID: LIB3135-035-Q1-K1-A2
acgcgtacgcgtacgatatcatgctatgatctgtgcgtctcatatgaatctcaaatgaagaagaaaaaaaaatgacagcaaacaaggaagagaatgtaccaataatatcacaccaatcaaggctaagccagtgttgttgcatgtgtggagattctggtctcactcatgagctttttcaatgcacagtttgccatttcagatctcagcacagatactgtagcaatctgtatccaaaagccgactcttatgaagtttgtaattggtgtttgaatcaaaaggcggattccaagtctcagaattcttctaattcatccccgtcgtgtaaagataacagcgaagacgatggaaagaaccaaaaaaagggtgatcaaaa

SEQ ID NO: 11583 - DNA, 216 bp, Gossypium hirsutum
  Clone ID: LIB3135-035-Q1-K1-A3
acgcgcacgcgttggatgtcctgctgggttctctgagtgttacacgcacttcatgcgaagatggaacagaaacgacagacatcattgatgagaatgcaccaataatatggcacctatcaaggctattccagtgttggtgcgtgtgtagagaccatgctttcacttatgagcctttacaatgcacgagttgtcatatcagatctgaacaaagatact

SEQ ID NO: 11584 - DNA, 314 bp, Gossypium hirsutum
  Clone ID: LIB3135-035-Q1-K1-A4
tcgatcgcgagcgccgcccttttttttttttttttctatgataagtaatcctgcagtttgcatgtggaatatatctgttgaaatcaggatattgctcattgagaaacaagaagacataaaaaaagcattccaatgagtactgccattggcattctcgctggtaaaagaaaacattacaagatgacatacaagaaaatggaacatgagtaggaagcaactcttattgtatagatactaatttttctatatagccatagtagctcacttcttgggatggctagccgatgggatctctctattgaggcttccccaat

SEQ ID NO: 11585 - DNA, 423 bp, Gossypium hirsutum
  Clone ID: LIB3135-035-Q1-K1-A5
cgtccggttttggtggcagcgtactatcgtctcttttcattcaacgtagcatttctgttggtgcctctggtgcatcttcctgccggtgctcgtgttacatctaagcataaggcataccaatacctatttttggtgatagctatggttttactcattgttggtggggttggtaatgctgtttagagaagagaatggacatgaccattgcagctggtgccattacctgagctgtgttcctacatcaaaatggtactgtgggaactaagcagacctttattacatatcgttcactgattcttttatggtttcctttacattttttacatttggtaatttattggtgttgttacgtgcctatgtgtatatatattcatacattcattcgttcatgggtaggttttaaaaaaaaaaatatattttttt

SEQ ID NO: 11586 - DNA, 380 bp, Gossypium hirsutum
  Clone ID: LIB3135-035-Q1-K1-A6
aaaatggctttcgaatatttcctattcaatctgcgtgtttagtatgggtaacccccatacaatgagaatgtttatggctttatagccgaaaataaaaaaggaaaatacaaagaatttttgttgttttttctctttgttgtgttgtcctttttgcatctgtgcgtaggtaggaaggtacggagctcggtggttgaacggcgctgtgctggagatgaggacgaggagttgcagtgcctattatctagggttttcgcccttcagctgaagcttgtttcagttttgggccgtttgggccaggggtatttttgggctacttgggttaattccggttttgggttttaaatttgggtttgggtttgtaatgttttgagtttaaaaat

SEQ ID NO: 11587 - DNA, 414 bp, Gossypium hirsutum
  Clone ID: LIB3135-035-Q1-K1-A7
gttcgcccacgcgttcgccatggtgtttggtccaactaatggcggttgtcacaacattcggtgcactgcagacatcaacggacaatgcccgaatgagttaagagctcctggtgggtgcaataacccatgcacggtgtttaagaccaatgaatattgttgcactcaagggtacgggacctgtggtccgacccgttattcaaggtttttcaaggaccggtgccgtgattcatacagttatcctcaagatgatccttcgagcacctttacttgccctgctggttccaattacaggtcgtgttttgccccgaggctcacctcatatagagatggtccggaagtaagagccaagaaaaataagggatcatctcttggtctagtaatcttgcgcctggaactaaaaataaaaagtatttg

SEQ ID NO: 11588 - DNA, 331 bp, Gossypium hirsutum
  Clone ID: LIB3135-035-Q1-K1-A9
ctttagcaaaaccacattctcaagagaaacaaaggggaaaaaaaaagcagaacgcaagtgaagagagatcaggaaagaaaattaaagtcgggttggttacgggttttcgagctttgttcgtaaaattttgtgtataagtaacgcaatgactagcattatggatgcagaacatgacaagtatagcatgattaatttcgaagagacggagttacgtttaggattacccacaggcattgaaaatgataatgaaaccgccaaaaataatgggaaaagagggtattcggatatggttgatttgaagcttaaccttttaacaacaaaagaaagcatc

SEQ ID NO: 11589 - DNA, 343 bp, Gossypium hirsutum
  Clone ID: LIB3135-035-Q1-K1-B1
ggtcaacgtatgggccatttctcgagaccctaacgagtgggacatcccgcttgagtttcggcccgagaggttcttgcccggctgcgaaaggccgaacgctgatgttaggggcaatgattttgaggtcataccgatcggcgccgggcgtagaatctgtgccggaatgagcttgggattgcgcatggttcaactgttgacagcgacgttagcgcatgctttcgagtgggagttggctgatggattaatgcctgatatgctggacatggaggaagcttatgggttgactttacaacgtgcggcaccattgatggtgcatccaatgccaatgctatcaaagcatgct

SEQ ID NO: 11590 - DNA, 415 bp, Gossypium hirsutum
  Clone ID: LIB3135-035-Q1-K1-B10
ctcagcttccttgagcaaaatccccgcatcttccccattaaactccccatcttcaatctcctttacaccctcatcctctccatcttctctttcttcgctatcggtaccatcacttacagcgttttccacggcttttacggtcgacccctcaaccttttatcctcttttaaggcagcatccacttccttcttccctctcctctcgacttcccttgtaacccagtttatcgcttatggaatcagcttagttcttggtttggtcttttttgcattaatcaaagcaacccaattttactcttcacctactttcatcgtacttatccttgtctatgtgatcattttcacgtctactataacttatctccaactgaactggatatttgctcatgctgtcgtagtagttgaatcaagctggg

SEQ ID NO: 11591 - DNA, 302 bp, Gossypium hirsutum
  Clone ID: LIB3135-035-Q1-K1-B11
cccactcgtccggatcacgtcaagcgctggtcgtcgggtctaccttgactatatcaagaagtacgaaacgtctgagaggcggcattaacacatacacggtcatattatagcatgcttccgtgtgatggaaggggatcatgtgattattgggccccgcattccgttaggcaggaccgtgtagctcaatgtcttgatcgcgatctcaagaagatctttccatggtgatacgaaagcgttgaccagaatgcatgctcttatatggaagtacataggcttaggaaccattgataggaatgctgata

SEQ ID NO: 11592 - DNA, 173 bp, Gossypium hirsutum
  Clone ID: LIB3135-035-Q1-K1-B12
ccaaaaaaaaaaaaaagaataaaatttttatttataaactataaagcaaaataaaagagagcggcagaaaaagattaagaaaagatctgacatcataacaaattatacaacaaacaggggcggcgcttctgaagaacccaattttcctttcacgggaacgccacgtaatacct

SEQ ID NO: 11593 - DNA, 80 bp, Gossypium hirsutum
  Clone ID: LIB3135-035-Q1-K1-B2
atctcgatgcatgtttcccgaggggttctctgtgtgtgtgtgtgtgttagtatcaatggggagacaggaaatctggattt

SEQ ID NO: 11594 - DNA, 338 bp, Gossypium hirsutum
  Clone ID: LIB3135-035-Q1-K1-B4
ttgtcactgggtcaccctatgtgaaagcatttctacgcgagctttgcttgaacactcgcggttccgagtggctcttatggttcgcgaagcctatggtcttaatcagtcgccagagcgggccctaatgctttggaatcagcatagcgtaatgcagaactcacagaagagtatgtggcggaataagtggctgtagctcacactttagcgatatatgcttatcgaactggcaagattgtacaaggacatagttgctgcctcaggtgaacaatcccaatcctagggctgggtcactggacgagggtgaccaacagaattggccaaataccttgagagagcat

SEQ ID NO: 11595 - DNA, 411 bp, Gossypium hirsutum
  Clone ID: LIB3135-035-Q1-K1-B5
tcgtccacgcgttcgtccacgcgttcggccacgcgtccgcaacaatgaatatggaaatgacataaacaaggacttgaaggctgatcctaaggatgagttccttgcactactaaggtccacagtgaagtgcttggtctatccggaaaagtattttgagaaggttcttcgcctagcaatcaatagacgaggaacggatgaaggagctcttactagagttgtttgcactagggctgaggttgatctaaagatcatagcagatgagtaccagcgaaggaacagtgtcccactgactcgtgccattgtcaaggacactcatggagactatgaaaaattgctgctggtacttgcaggacatgtggagaattgaatctgatatcttgagacaatttcctggtgaataaatgtttatga

SEQ ID NO: 11596 - DNA, 356 bp, Gossypium hirsutum
  Clone ID: LIB3135-035-Q1-K1-B6
cccacgcgtccggcaagccattaaggttttgagaaaagatcaaaatggattcaaaaagatcagcttccacagccctccttttagccctcaacattctcttcttttccctagtcagtgctaattgtggatcttgttcttcttctggctctaacccaaggccaactcccacccctactccatctgcacgaggtaggtgccctagggatgccctcaaattaggtgtatgtgccaatgtgcttaacttagtcaatgtcaccgttggttcacccccggtgatgccatgttgttcccttctcaacggtcttgtggacctcgaagccgctgcttgcctttgcaccgctatcagagctaacatc

SEQ ID NO: 11597 - DNA, 142 bp, Gossypium hirsutum
  Clone ID: LIB3135-035-Q1-K1-B8
caaggatatggttacggctatggcgctgccccacaagaccccaacatgtactatggagggtatcctgggtatggaaattatcaacagccacagcaacagcaacaagtcggatatagctaagtgctgatattaaccatctttc

SEQ ID NO: 11598 - DNA, 414 bp, Gossypium hirsutum
  Clone ID: LIB3135-035-Q1-K1-B9
tcggccaacccgttcggccaacccgtcggccaacccgtccgaaacctcaaagaacctggattaggggacatattttcctggacagacagctctctacttggcaagctgaaaggtgaatctacagtgcagaagccagatgctgatttgtttcagagaaatattggtgacaatgacataaaggatattgaaactgggttactcgagccattattacatcccagtgtggaagtgccaccttcgtctcaaacaataacagaaactgaacatagaggtagtgatgctggtgaagttcgtgaatgggaaattctgaaaagtatcgtctatggtggattaattgaatcaatcacaagtttaggggttgtgtcttctgcagcccgtgcttgtgccgatacattgaatgttttggctttggga

SEQ ID NO: 11599 - DNA, 234 bp, Gossypium hirsutum
  Clone ID: LIB3135-035-Q1-K1-C1
gcttgaaggtggggggaaaacaccaatactagctccgcttgaactcgaagaaattggatataaacttgtggcatatccgctttccttgatcggggtatccattcgagcaatgcaggattcactgactgctctcaatggtgggcggattacaccttcaggaagcatgccctcctttgaggaaatcaaggaaatcttaagtttcaataattactacgaataagaaaaaagatatgc

SEQ ID NO: 11600 - DNA, 378 bp, Gossypium hirsutum
  Clone ID: LIB3135-035-Q1-K1-C10
atcttcgctaattgtttatgcccattctgctctcccataaaaaccgttagagatattcctagggtttgcatttgcggtttggggtatagggttttagacaacgccaaatcttggatttgaggaatggcgactgcgacgggacaggtgaacgcgaatagaaagccggtgttcgtgaaagtggaggatttgaagcccggtactagtgggcacactttgatcgtcaaagtggtggagatgaccccagtcaagacttccgtcaggcccaacatgttccgtgctctcctttctcgacctgtcccttcggtccggatcgctgagtgcgtcgttggggacgagactggcaccatcatctttaccgacgcaacgaacaagttgatc

SEQ ID NO: 11601 - DNA, 391 bp, Gossypium hirsutum
  unsure (1)..(391): unsure at all n locations; Clone ID: LIB3135-035-Q1-K1-C11
gctgaagcgaagcaaatgccctgtaagcatctttatcacaaggactgcatacttccgtggctggaattgcataattcctgccctgtttgtcgtcacgagctgcctaccgatgatcctgattatgagaggagggttcgtggggcgcaggctactggtggagataatgacggcgatagtagtggcggtgataatgagcagaggtctggggataatcggacggcggagaggagttttaggatatcgctgccctggccgtttcgggctcgtgggtcgggttcaggatcaggatcaggtgataatccgcagaccaggcaagaagatttggattgaagactccttgaagtgctgcaaaatatcangcatttctatcatgagacatggtaatagatcg

SEQ ID NO: 11602 - DNA, 405 bp, Gossypium hirsutum
  Clone ID: LIB3135-035-Q1-K1-C12
agtcgaactggatcgtaatatccggggtgtcccacgcgtacgtttgctcacctctattttttgacgcgtcatatgcagaacgattgctccgatttgtcgggggcccctagttttaacagctactactccgattagaaacttggtgacatcgccgccacggtttgccgagaaagcaccggcgtttcggatgatgaagaattcgagttctctattgaactatgggagagtccagaaacgtcgttgttttcagtcttaaatcgccatctcttatcgagccggtgagggaggagggaaagatgatgaggtgaaagaggctgttcggattccggtgaggaatctgttcatcagcggtggagatcttccatcgtcatcgtcgtcgtcggaggtggacgagcttgaagcact

SEQ ID NO: 11603 - DNA, 395 bp, Gossypium hirsutum
  Clone ID: LIB3135-035-Q1-K1-C2
ggaggaactgccaaagaagtcatatgcgtctattttaaaggttttgaaagagaatgcaggccctgtatcggcacctacacatccccctgtgaagcctgcagttaagagccaggagcatcctcgaattgctgcaccaccttctgctccaatgcctgcctctgatgctcaggtttctagcaacaatgttactgaaaatgggaataatcaagatgcagaggctgagggtccctctgtctatgtcaaaggtctgcccttgaatgctacgcctggcatgctggagaatgaatttaagaagtttggacctattaagagtggtggtattcaagttcgaagtcagaaggggttctgttttggttttgtggaatttgaaatggcaagttctgtgcaaagtgcta

SEQ ID NO: 11604 - DNA, 196 bp, Gossypium hirsutum
  Clone ID: LIB3135-035-Q1-K1-C3
gtgaaaggttattatgctaagcttggtgaaggtgctatacatcatcaagattactattcaggcttgtgacaagacaaacctctagaagtaattcacggagcattaatgagacgacttcagtcaggactctactcgtgatgccattgctgaactggcagtttatgccgaattcacaaattggatgattgagcatact

SEQ ID NO: 11605 - DNA, 237 bp, Gossypium hirsutum
  Clone ID: LIB3135-035-Q1-K1-C5
aaggctatatgttctggctacagtttttgttctttctacggatatccaagtcaataagagggaggtgggtccctgcaccactctgcattggggatcgattatctcacaccttcccatagaagacactggtttttggatatgaaccaactaactttttctaaaagacatatttagagaatgagcactgggaatgctgaaacaacttggggagcctcaattcaatggagtccattgaac

SEQ ID NO: 11606 - DNA, 407 bp, Gossypium hirsutum
  Clone ID: LIB3135-035-Q1-K1-C6
gcaggaacctgtacgagcggaggctgattttggacgattcgatgctaaaaccgttgtgaggaacatctacatactgttctcaagaagtgaaataccaatcgcagatgaaaaacaaggagatcatggatatggtggatgcttctgttcctcttccaccttggttcactgaggaagttctcgcaacatacggagctttatacgagaaatccggattcaagactgcattgcaagttccatataggtcattcgatgaagactttgggataacacatccaatagttaaagttccggcgttactgataatgggttgcaaagattatgtcttgaaatttcctgggatggaagaatacataaagtttgtgaaggcacaagaactcgtccctaatttgatataatatattttgcct

SEQ ID NO: 11607 - DNA, 419 bp, Gossypium hirsutum
  Clone ID: LIB3135-035-Q1-K1-C8
cggatttggctgttgctgttccttaatctctaatctcatctgcaccagccgacgacgtggggaggagacctgcaaggtgttatcgccaaatcaagaataagccataccccaaatctcgattctgccgtggtgtcccacatcctaagatcagaatttatgatgttgggatgaagaaaaaaggtgttgatgagtttcctttctgtgtccatcttgtgagttgggagaaggagaacgtctcaagtgaggcattggaagctgcccgtattgcctgcaacaagtacatggccaactttgcagggaaggatgcttttcatttgagagtgcgggttcatcccttgcatgttctgcgtattaacaaagatgccttcattgtcccggtgctgattggcttcagaccggaatggagtggtgcttttggg

SEQ ID NO: 11608 - DNA, 364 bp, Gossypium hirsutum
  Clone ID: LIB3135-035-Q1-K1-C9
cccacgcgtccggcaggttcgtttgttgatgtgggttttggttgctgccttgttctcccacaacatggtcattgcagtgacctccactggccttggagagcagaaaaattactatccagttcctgaccctcatgctggaactcccccttcaggttcacatggcacaccaccatcttcaggaggtggaacacctccctctcatggaaccccatcacatggaggtggttaccacccttcaccaacaccatcaacgccttcgggtggaaattgtggaactccaccacatgacccttcaactccatcaacaccatcacacactcctttgcatggtactccaccatcatctggagggtgtagtccccca

SEQ ID NO: 11609 - DNA, 348 bp, Gossypium hirsutum
  Clone ID: LIB3135-035-Q1-K1-D1
cccacgcgttcgtgaccatgaaactacctccccagtcgccccagctaggcttttcaaggcttttactgttgaagccccaaaggtttggcccgcggctgctcctaatgcagtcaagagtattgaggttgaagctaatcctagttccggaagtatcgtaaaaatcaactttgttgaaggctttccattccaatatatgaagcaccagattggaagacatgatgaaaataatttttcatacagttacagtttaattgaaggtgggcctttgggggataagcttgaaaagattagctatgagaacaacgttgaggcagctgcacgtggaagaagtatttgcaagagctcaat

SEQ ID NO: 11610 - DNA, 147 bp, Gossypium hirsutum
  Clone ID: LIB3135-035-Q1-K1-D11
ggcgacctggctgtaccagcttttggattgtcatcaggtgtgggcgtgtctaacggatgggttttcgaaatcgtgatgaccttctgattggtgtacacagtttacgccacagtcgttgattctaataagggaatgcttgtgaacaat

SEQ ID NO: 11611 - DNA, 325 bp, Gossypium hirsutum
  Clone ID: LIB3135-035-Q1-K1-D12
cccacgcgtccggaagggcgtgccaaatcctttgctcctttcccaactggattcagggtgcacagtgaaggggggctgatgagctttgagcatccaatgaacaaaatcagggcaatgccgagggtagacagtgaaggagtgactcgtggtgctaatttcaaggttgatgtttacagtagagttaatagcattccacgagtgggcagtgcaaccaattggactgatcactgggattcccattaattagtatttaaaaagaggagagagaagcaaaattaaacataagagagatgccatgaatatgctctagacaaacaccggggct

SEQ ID NO: 11612 - DNA, 410 bp, Gossypium hirsutum
  Clone ID: LIB3135-035-Q1-K1-D2
gctgattgcaacaatcgatcaattttaccaagatgaacagaaaaaagcctttcattatcagccattatgctatctttatcagttgtaggcttcttgggaacatcacttggaaccaaattatccttgggtgaaatgactgctgctttcatctcaccattgaaaagcttcctagattgcatcgatggtacctgatagatcaaaacaaagacaattacaagcaaagcaaggtttaagcgagccattattgggatcccaagtaacctctatctcttggttttgaaggctttagatagtgtgtagtatcagttagatttcgaggtacatatatatatagatgaattcagtgatagattgctttacgtcatgttggctaagtcatatcatacttagaacaaataagaccttaaaaa

SEQ ID NO: 11613 - DNA, 400 bp, Gossypium hirsutum
  unsure (1)..(400): unsure at all n locations; Clone ID: LIB3135-035-Q1-K1-D3
gaaaaaattatgaagagggtttcctttgttgccttgtgtgtggtggcactcgcggtggtgctgttttcgggtgaaagtcgcacggcggaggcagtgacatgtaatcccgtggagcttgccccctgctcgccggcgcttacgtcgtcctcgcctccatcaagcgcttgttgcagcaagctgaaggcgcagcagccatgcctctgtggatacattaagaacccatctcttaaacagtatgtcaacagtcctaacgctaaaaaggttgcttcgacttgtggagtcccatatcctaagtgttaaatgttgcttaatggtgtatctactatctactggcagcanataagtgattctttttgctgtcaagtactgttctgaataaaagaataatgataaaatatta

SEQ ID NO: 11614 - DNA, 385 bp, Gossypium hirsutum
  Clone ID: LIB3135-035-Q1-K1-D4
tcgtccacgcgttcgcatccatatccgaaaacctaaagattctctctcccaaaccaaaccttcgaatttcagcaagagagagagagagagagaacttacatagctcagatttcgatcatcaatttagggtttcttagttcgatccccgattacccaataccccaattttacagatcaggtctgagtgttctagttgttcggctgtttctatcctctaagtttcatgtctgatcttgacatccagattcctactgcctttgatccgtttgctgatgcaaatgctgaagacgctggtgctggtgccaaggaatacgttcacattcgtattcagcagcggaacggtaggaaaagcctgaccactgttcaggattgaaaaagaattagc

SEQ ID NO: 11615 - DNA, 278 bp, Gossypium hirsutum
  Clone ID: LIB3135-035-Q1-K1-D5
cccacgcgttcgaccacacgtacgcactatttattgttgcttggagaaagtccaacatccggacagttcaagtgaggtaagaggcattgttgctcgcacagactgaatccaagatggtgctccatcctaggtacgagcacatttgcctaggaccatgaattgctgctttaacacatacaaggggcagccgattcaattctggtcttaaccactacagacattgtcatgaccacacaggccttaatatctaatctgaaggctatttatatacaggtcgt

SEQ ID NO: 11616 - DNA, 420 bp, Gossypium hirsutum
  Clone ID: LIB3135-035-Q1-K1-D6
cacaattcccgcttaactcctatcttcttcacctttagggttacaacagccgcacgccagcctagcgtttccataaggaagaaatggcggtccctttgctgtcgaagaagattgtgaagaagcgtgttaagaagttcaagaggccccaaagtgatcgcaagatctccgtcaagacaaactggcgaaggcccaagggtattgactcccgtgttaggaggaagttcaagggatgcactttgatgcccaacatcggttatgggtcagacaagaaaacacgccactatcttcccgatggatttaagaaattcgtggtgcacaatgtccaagagctagagcttctcatgatgcacaacatgacatactgtgctgagatagcacatgatgtttcaacgaagaagaggaaggaaatcgttgagcgag

SEQ ID NO: 11617 - DNA, 128 bp, Gossypium hirsutum
  Clone ID: LIB3135-035-Q1-K1-D7
ctggggcattgagtctccacagcatctcgttttatcttaagattagcaagagtagggatggggttccaggaaattttccagactgtaattttgtgtttagaaggaacatgaaagtttcatagtttttt

SEQ ID NO: 11618 - DNA, 385 bp, Gossypium hirsutum
  unsure (1)..(385): unsure at all n locations; Clone ID: LIB3135-035-Q1-K1-E1
cccacgcgtccggatggcctaggagagctagggtggtggtagcgtctttagagaagactgaggaaggaggttggggtactgtcaagtcaattaagacgtggaagcgccttgatgataaacatctcactgccattgacggggaggtcctttggagcaagaaacatactggtactcgtagaaagaaacatatcaatggcagtcctgcttgaacttcgggaacagaccaactgacagtattattacattattgtctcggaatattttgatctcaaccggctttcaagtttcggactactatgcanaatggagtttagcttgtgtaaaatggtttacggacttgaatgatttgcagtcaatggtgctgtgctggtttctaataatccta

SEQ ID NO: 11619 - DNA, 383 bp, Gossypium hirsutum
  Clone ID: LIB3135-035-Q1-K1-E2
cccacgcgtccgcaaagatcagtgaaacagtgaagggaaagctgagtttaggggcaaggattcttcaagtaggagggttagagaagattttcaagcaattgtttagtttcaaagaaggggagaagctgttgaaggcttgccaatgctatttatcaacaacagcaggccctattgctggcctacttttcatctcatctgaaaaggttgccttttgcagtgatagatcaatcaaagtaccttctgcaaatggagaatttctgagagtccattacaaggttgtggttccagttgagaaaataaagggggtgaaccagagtgaaaacatgaagaaaccatggcataagtacatgggaaattgtgacagtggatgggtttcgatatct

SEQ ID NO: 11620 - DNA, 337 bp, Gossypium hirsutum
  Clone ID: LIB3135-035-Q1-K1-E3
gtaaaagcgaaaccctagccactctctgctttactcgccaatgggggcttataagtacgtgtcggagctatggaggaagaagcagtcggatgtgatgaggtttttacagagggtgaggtgctgggaataccgccagcatccgtcaattgttagggtcaaccatcctactcgccctgacaaggcacgccgcttgggttataaggccaaacaaggttatgtggtttaccgtgtccgtgttaagaggggtggtcgcaagaggcctgttcctaagggtatcgtgtatggtaagcccacataccagggtgtcacccaattgaagtttcagcgcatcaagcgg

SEQ ID NO: 11621 - DNA, 405 bp, Gossypium hirsutum
  Clone ID: LIB3135-035-Q1-K1-E5
cccacgcgttcgtccacgcgttcgccatggtgtttggtccaactaatggcggttgtcacaacattcggtgcactgcagacatcaacggacaatgcccgaatgagttaagagctcctggtgggtgcaataacccatgcacggtgtttaagaccaatgaatattgttgcactcaagggtacgggacctgtggtccgacccgttattcaaggtttttcaaggaccggtgccgtgattcatacagttatcctcaagatgatccttcgagcacctttacttgccctgctggttccaattacagggtcgcgttttgcccccgaggctcacctcatatagagatggtcggaagtaagagccaagaaaaataaagggatcatctcttggtctagttaatctgcgccttgaact

SEQ ID NO: 11622 - DNA, 401 bp, Gossypium hirsutum
  Clone ID: LIB3135-035-Q1-K1-E6
gaaacaaattggctatgcaggagttattgattctttctgtaggagcatcatcctttaaggaggccatgaaaatgggtgttgaagtctatcaccatttgaagtctgtgattaagaagaagtatggtcaagatgcaaccaatgtcggtgatgaaggtggctttgctcctaatatccaggagaacaaggaaggacttgaattgttgaatacagccattgctaaagctggttacactggcaaagttgttattggaatggatgttgccgcgtctgaattttatggaacagataaaacttacgacctgaacttcaaagaagagaacaatgacggtaaacaaaagatctcatgagatgctttgaaagaattatacaactcattcgtagccgagtatccaaattgtgtc

SEQ ID NO: 11623 - DNA, 342 bp, Gossypium hirsutum
  Clone ID: LIB3135-035-Q1-K1-E9
cgaggaagttgggtttgaaaggtgttattctgagacatgattgtctatagcttcggatgcacagatatgatcaagtgatgtttataggctttcataatttttgtgtttttttttatattatcatatttcgtatcatgttttatttaattttttcaaatcatatttattaaatctccaaacctatttgagtttgggaaaaaatcgaatatgatttaattattaaaaagttatgttcaagctcccacttgtttttaatggcttgtcgtaacttgatttattatgcactatccatgcagtgttcgatgatatcttttgagtttaaagcacaactatagccttacc

SEQ ID NO: 11624 - DNA, 322 bp, Gossypium hirsutum
  Clone ID: LIB3135-035-Q1-K1-F1
tcgcccacgcgtccgcaaggatgtatcaagcatgcccggatcccaaccatcttgaactttatccacagggagaagcacaacaggacatgcctatcttcagcttggttccacataaaaatggaatttatgcaattgagttcagttcatcaatcactgcattacaagcgttctttgtctcagtaacaattataagttgtcggaaatcctctggttttccagaatttggtgacctgcctgaaggaaaacttataaaggagacaatgttgaatggcagccttgagatggacaacatacataccgttgtccttggaaccatgcctgc

SEQ ID NO: 11625 - DNA, 314 bp, Gossypium hirsutum
  Clone ID: LIB3135-035-Q1-K1-F10
ggggaggaggcaagcggccggaaaggagcacgacgaagaggaaaaagagcaaaaggggcgagaaaggaacgcgggggaaggaacgaaaggccaaggagaccaagacacgaacgaacccgatgaaaggaaaaaaggaaacggagggcaaaggaaaaaacgaaaaaaggcgcaacaaagaacaggaaaagaacgggacgaaaagagaggagccgggagagaaaaaaccggaaaccgaaagaggcgagaggaaacgaaagacgacagggagagagagagagaagaaaggaacaaggccgaacaagaaaaacgggaaa

SEQ ID NO: 11626 - DNA, 400 bp, Gossypium hirsutum
  Clone ID: LIB3135-035-Q1-K1-F11
cccacgcgttcgatcagaaactgcgaaaattcatttaaaaatggcgaccgctgcatcctcttcatcctccatggtggccaccgccgttttgattcctcgttttccggcagcctccgttggaactacccgttgcagtgccttgccgactattcctactcgcgttttgaccgcttacttgtgcttttactcttgcgttaagctaatcccagaatccaagaggttttctctactgcagacataagcctcagaagagacctgtgttgatgctggcgaccttttcgctgacttgaaggaaaagcgggataaagctgaggacaagaccacagttgttctttacagtggaggggcattagttgctgtgtggctatcatacattctgattggtgccatttactcggtc

SEQ ID NO: 11627 - DNA, 317 bp, Gossypium hirsutum
  Clone ID: LIB3135-035-Q1-K1-F2
ggttaccgctcttaggtctactgagactgctacagctaggattgaaaatgctggtggggaatgcttgacttttgatcagcttgctttgagggctcctttgggtcataacacgatatcaatctttctcttgcattttgttttgagttgttatgctacattagttagttcaaatgtatgtatgttgattcagatgacatttttgagtcctatttttttgaaaattttattgcttatttgatcatttattgaaactcttatgagttgaaatgccagttttacttccatgcactattaaaaacgctacaaggatgatttct

SEQ ID NO: 11628 - DNA, 262 bp, Gossypium hirsutum
  Clone ID: LIB3135-035-Q1-K1-F3
ggtgcatcagccatcaagcaccacccattcttccaaggggtcaattgggcattgctaagatgcacgaccccaccatatgtacctccaccttttagtaaagaagttgtatcagatgaaagctgtccagagaccccagtagagtattattagggtgaagtaaagaaatgatcagtaaattaaaaaagaatcaagcgtcccctatagcaatcatgtaacttgtgattatactttttggaatctatattgcaacgagtattcattt

SEQ ID NO: 11629 - DNA, 372 bp, Gossypium hirsutum
  Clone ID: LIB3135-035-Q1-K1-F4
gtttgcctttgcactgctattaaagctaatgtgttgggggttaacctaaacgttcctgtttcattgtctttgctcctcaattcctgcgaaaagcaaatgcctgctggttacaaatgtgcttaagcaatgtttgggtttttcttttacgtgttctttttttttctgggcgtgttaaatttggtgttttgatatgtcaagggttagataaaatggttaaggtctcttaccttaaccaatactcaattctcatctatttatacaatatttgtcatgttagtaagaaagaaggcgtcttgccttccaatccataaattatgtatgttacaagtcagtgaaacaattggatgaaaaaataagttaattttagaaaaa

SEQ ID NO: 11630 - DNA, 320 bp, Gossypium hirsutum
  Clone ID: LIB3135-035-Q1-K1-F5
tccacgcgttcgcccacgcgtacgaccactcttccggttcttctaccatctctgacaatcgggtggagagattgcagcgcggcattttagcagcagctaaacaatgccaacggttgcatgaaatgaaactgaatcatcccatgaagattgataatcttatacctcttggtgccaagtcgaagcagtcttttatagccatagccgaagggactcccctaggtagtgcattgacttcaacaacaaaaggaactagggggctgataataatcggaccagaaggggacgttacagagaaagagggggacttgaatacagaagca

SEQ ID NO: 11631 - DNA, 404 bp, Gossypium hirsutum
  Clone ID: LIB3135-035-Q1-K1-F9
gaaaggagcacgacgatgaggagaatgagtttatggggctcgaatcgaatgcttgcatagattcgcagtacctatcagaccattatgcggatgaacctgatagttggcaacaaggaaatgctgatgattgttatgaaggagataatgcgttgcttagatcaggtgatgaatgggaccaaacgagatatgcgtgtaatgatgttaccggtgtccgaacgtggttggaggacttgggattcggtaggtatgctggtattttcgaaatgcatgaggttgatcaagaaactctgcctttgcttacactagatgatctcaaagagatgggtgtgtttgctgttgacatcgacggaagttgtacaccgcaatacaacaattaagagggggcaatgctttctcgtgaaaac

SEQ ID NO: 11632 - DNA, 117 bp, Gossypium hirsutum
  Clone ID: LIB3135-035-Q1-K1-G1
aaagccggatgaaaaccatcgaaaacagaagggagaggaaaaagcacacacgacaaaacaacaagaaacggaccaccaaaaaaaaaatagcaaagagaaaagagaggaacacaggac

SEQ ID NO: 11633 - DNA, 402 bp, Gossypium hirsutum
  unsure (1)..(402): unsure at all n locations; Clone ID: LIB3135-035-Q1-K1-G10
cccacgcgtccgaaatgtacctagtcaaagaaccaactcaattgcacacttgttgctggatatcattcccatttcgacagtgagttcagtatctttctggctctttatttttatcttgatggcttatatagcttcatctagtttgatttttaagtacttaatttgtctcttttttttacccatctttggaggttgcttcatccatattgatatttttattttctaaaccccccccttcccggccccggccaacctaatctttgtatgtatgtaaactaatgtacatttgtactctttcaaaaataatatagggatatgataataataaattaaaaaaaaaaaaaaatttcttcatttttttanttttttttatattatatttaattttatttatattataaa

SEQ ID NO: 11634 - DNA, 318 bp, Gossypium hirsutum
  Clone ID: LIB3135-035-Q1-K1-G11
cgtccgaaagtacctattcaaagaactaactcaattgctcacttgttgctggatatcattcccattggggacagtgagttcagaatctttctggctctctatttttatcttgatggcttatatagcttcatctacttagatttttaagtacttaatctgtctcttatttttacccatctttagtggttgcttcatccatattgatatttttattttcttaaaccctacccttctcgtccccggacaacctaatctttgtatgtatgtaaactaatgtacatttgtactctttcaaaaattatatttatgatatgataa

SEQ ID NO: 11635 - DNA, 370 bp, Gossypium hirsutum
  Clone ID: LIB3135-035-Q1-K1-G12
gtcttgattgggttcctggatgtatggatcctacttcacacttatataaccctttggctaatgtagatgatggatcttgccctcttgattctgatgttgaagagtagtggtcatacacctgcatttcatacaatgtaacattttaattattcagtatagtcttcttaaagattaaaatgtgaccattggtgtatagaatgtagcatttagcatgaagatatattgaaaatgggaaaattttcctttagtccctcttataaattaaatcatttcaaagccccttttggggccaaaatcatttgaggttttcccattattcaattgagtttgacttggcataatttattccatcattttttaacatatatta

SEQ ID NO: 11636 - DNA, 416 bp, Gossypium hirsutum
  Clone ID: LIB3135-035-Q1-K1-G2
cccacgcgtccgcagctcagttggacatccccgagtccatcctcccccacgcctacaatcccttctatcaagtttataccacgttaacccaggattatttggtgcttgagcagcctggttttttcaaggcacttatgacgttggaacttgtttaccaactccctctcgctttgcttaacatctatggattgttatactccaagccctggttcaacaccacctgcctcctctttggtgcctctatcgttgcctctacgacagctatggtgggagacattctgaattcccagaaggcatcagccaatttgatggccatgtattatccaccgtttcttccattaggggttctggctatagtgcgaggggtggttggactatcgagcaaggctgctccatccattggcaatggaccttcg

SEQ ID NO: 11637 - DNA, 339 bp, Gossypium hirsutum
  Clone ID: LIB3135-035-Q1-K1-G3
tcgcccacgcgtccgcccacgcgttcgcccacgcgttcgcccacgcgtccggctcaatgcaaaatgcctaagcatcagctcaactaagatgagcagcccaacaaagccaaccccaaagcccttctcccttctctccatgcagaacctgcccaaaggcctcaccatctcaaaaccggccaacaactcaaacctaccgtcttcactcgctggcagcgccattgctggagctatcttctcaaccttgagctcatgtgaccccgccttagctgcacaacagattgctgaaatagctgaaggagacaaccgtgggctagctctattgcttcccataatcccagc

SEQ ID NO: 11638 - DNA, 336 bp, Gossypium hirsutum
  Clone ID: LIB3135-035-Q1-K1-G4
gtgataacatgattgagaggtctaccaaccttgactggtacaagggtcccactctccttgaggctcttgaccagatcaatgagcccaagaggccttcagacaagccacttcggctcccacttcaggatgtctacaagattggtggcattggaactgtccctgttggtcgtgttgagactggtgtccttaagcctggaatggttgtgacctttggcccctctggtctgaccactgaagttaagtctgttgagatgcaccatgaagccctctctgaggctcttcccggtgacaatgttggattcaacgtcaagaacgttgctgttaaggatctcaagc

SEQ ID NO: 11639 - DNA, 242 bp, Gossypium hirsutum
  Clone ID: LIB3135-035-Q1-K1-G5
cgcgttcgccacgcgttcggctcctcatcattatgcttgtaattcgcctcgaaagcgagctgtatatgtatattacaaattttacatatatatgcatgtataactatactaagtgttggtttggatatagaactaacctcttcattattattgttcccgattgaaaaaaaaaaaaaaaaaaaaaactgtgaacttaaaaaaaaaaaaagaataaaactaaaaaaaaaatagaattgaacaat

SEQ ID NO: 11640 - DNA, 409 bp, Gossypium hirsutum
  Clone ID: LIB3135-035-Q1-K1-G7
tttcaaaacacttctccagtgacccaaaaaagcttcattgtctcttctattgaaaaccccatggctgctcttaagctagtttgtgctctagtgttgtgcatgttggtggttgagcccattgccacaaccgccataacatgcggcgatgtgacaagcaaagtggccggttgcttatcatacttgcagaacggagggaacgtgccgaaggcttgctgcgacgggatccggtccctgaacatgatggctcgaaccacccctgaccgccaaaccgtgtgtgggtgcttgcaaactgccgctaaggctgtcaaaattaaaggcaacttggctgagacccttccggccaaatgtagtgtcaacatcccttacaagatcagcacttccactaactggaaaaatgtgaagtgagatg

SEQ ID NO: 11641 - DNA, 360 bp, Gossypium hirsutum
  Clone ID: LIB3135-035-Q1-K1-G8
tccacgcgtccgcccacgcgtccgcctgtaccatgaattttatatgaaagccaagggaagcgtttttaagcataaacgtgcacttcttgaggcccttcataataaagctaagagtgagaaagatcagaaggttcattttgatcaggttatagctattaaagccatgggtaaattaggtagcaaggagactagggttccacggaggaaacaatgttcgagtccacctgtggaagttattgatgtgttgaataatgcttatttagtttgaaagtgtatgtataaaataaagttgatgtaataatgcttattacatttataagtaagatttcggaattttgtattagaaaccaacacgaatga

SEQ ID NO: 11642 - DNA, 226 bp, Gossypium hirsutum
  Clone ID: LIB3135-035-Q1-K1-G9
tcgcccacgcgtccgcttttgctttttctttgaagggccaaaactcttgtcattttctttctctctgtttatgtgatctctttcaatgaattcacaatgtacagtgcttataatggggaagtcataagatttattccctttttcaggacctgaaataaaaagcctctcttccctctttctctcttgagagagatcattaagttcaacatataaaaaatataaaaat

SEQ ID NO: 11643 - DNA, 335 bp, Gossypium hirsutum
  Clone ID: LIB3135-035-Q1-K1-H1
cccacgcgtccgaatcagtttatgctccagagccttttgatgttggtcgaatcctgcaggttgagattatttatgatggccagctaattgtattgacaactgccggtgctattgatccagctgctggtttgggaaactatgtggaggcacttgtgcggaaacatgatattgaattcaatgtagttgttagccaaatgaatggtgcagatcatccatctgaatctattcatgtactacatgttggaaagatgaggatgaaactatgtaaaggaaagacgacaattgtcaaagaatattattccagctcaatgcagctgtgtggagtcagagggggc

SEQ ID NO: 11644 - DNA, 425 bp, Gossypium hirsutum
  Clone ID: LIB3135-035-Q1-K1-H10
gaaagagaaacctgaaccgaaaccaccagtaaatgaacctccaaagaaggaaaagcctgagcctaaaccaccggtttatacaccaccaaagaaagaaaagcatgaacacaagccaccggtgtatgaaccaccaaagaaagaaaaacctgagcctaaaccaccagtttatgcacctccaaagaaagaaaaaccagaacccaaaccaccagtttataagcctccaaagaagccaccagtgtatgagcctaagccaccaaagccaccggtttatgcaccaccaaagaaagagaagccagaacctaaaccaccagtatatgagtctcccaagaagccaccatatggtcactatccaggacaccctccattggagaagcctcaatagagagatttcctcggctaaccattcccgacaactgagctactat

SEQ ID NO: 11645 - DNA, 295 bp, Gossypium hirsutum
  Clone ID: LIB3135-035-Q1-K1-H2
gcgaggcacaatctcgaggcgtagatgctgtggctgatactgtaccaaagatcactgccttgactggtacacgaagacggacgcatgggaaacctgagaaacaacagcctgctacactttcttggcatgggaccaaaaaccaagaacctgctgctttcaatgggaataataggcggacttgtctaggggctagttaacaaaatagcgcacgatcaggctcatggcaagctggcatgtggatcaaatggaaaccgttgtaaagatactaaacaagcccccggatgacaggctatac

SEQ ID NO: 11646 - DNA, 290 bp, Gossypium hirsutum
  Clone ID: LIB3135-035-Q1-K1-H3
tcgcccacgcgtccggaaaaccctagccaacctttccgcagctcgctaatgggggcttacaagtacgtgtcggagctatggaggaagaagcaatcggatgtgatgaggtttttacagagggtgaggtgctgggaataccgtcagcatccagccattgttagggtcaaccaccctactcgtcctgacaaggctcggcgcttgggttacaaggctaagcagggttatgtagtttatcgtgttcgagttagaaagggtggtcgaaagaggcctgttcccaaaggtattgtcta

SEQ ID NO: 11647 - DNA, 379 bp, Gossypium hirsutum
  Clone ID: LIB3135-035-Q1-K1-H4
gggcacacataacctcccaacaatagggtggtaatacctccacgacattcagggggtaaacctccgcatgttgaaggattccctggtgacaaaccatccaagggtaagggaaagggagcacctcatgaacccaaacctcctcatagacacctattgaatgtggaagttgaggacacacataaacctccacgacactcagggggtaaacctccacatgttgaaggattccctgacggtaagccatccatgaaaccattccccggtgacaaaccatccaagggttagggaaagggagcacctcatgaacctaaacctcctcatagacacctcttaagtgagccacacaaatatgttataccacccaaagggtaggggagag

SEQ ID NO: 11648 - DNA, 442 bp, Gossypium hirsutum
  Clone ID: LIB3135-035-Q1-K1-H5
gccagagctagtgaagaagagggatgacaaatacagcatctcaaccgaagcaattatgcagtcaagggtggaaattgaagaacctgaatggatcaatccacaggctgattactggaaacagcatgccaagggtttcgccattgacatcgagaaaactgaaatgaagttgagagctcccatcccttataacttgcctttgcctataaccacaaaatattgtgcctaatcactgctagtcttgtgttgctcttcaattgtgtgtggggtaggttttttgcaataatctgtagaaatgatgtggttctatctatcacatttttacttttaagtcaaagtttgtttttctttatatcaaaattacaaaaaggagccttgtaaattttcttcggaaattttttttggtaccggtgatgacaaaaaatttttaagttaccgccttttc

SEQ ID NO: 11649 - DNA, 300 bp, Gossypium hirsutum
  Clone ID: LIB3135-035-Q1-K1-H6
aaaatggcttctaaaagatcagcttccatggtcctccttttggcactcaacattctctttttttccctagtcagtgcttgtggctcttgctcttcacccacccctaaaccaaggccaaacccaaaccccaacacccccactcctactccatctgcacgaggcaggtgccctatggatgccctcaaattaggtgtatgtgccaatgtgcttaacctagtcaatgtcaccggtggttcacccccagtgatgccatgctgttcccttctcaatggccttgtcgacctcgaagctgctgcatgc

SEQ ID NO: 11650 - DNA, 381 bp, Gossypium hirsutum
  unsure (1)..(381): unsure at all n locations; Clone ID: LIB3135-035-Q1-K1-H7
cccacgcgtccgcccacgcgtccgcccacgcgtccgcccacgcgtccgcccacgcgtgcgggctgctctcactgaattcttctcccacctctacaccgtgaccgtcgtcttcttcaccctcttactcctcgaagttgctatcctcatcaggtcccttaccggcggcctttccgattccgagaaacgcctcatcacaactacccagtacctgaaattcattgaagaaaagaacccaacaatcatatactccacaagatcatcatccagggtggatctgtcatcgaacgagtgcaccgtgtgtttatctgagctagaagaaggtgagaaggtgaggaaactgaaatgtaaacacactntccacaaggattgccttgatagatg

SEQ ID NO: 11651 - DNA, 413 bp, Gossypium hirsutum
  Clone ID: LIB3135-035-Q1-K1-H8
cccacgcgttcgcggacgcgtgggcggacggggaaaagcggcactcgacatctattaaacaacaccaagaacaaagccataccatgccctcgggagaaagacgtgatgattgccatgaatgctgccttcgaggacgtgttgtacaagaaggtctttgccgattcctatcaacatggtgcacccctcagtagaggggcgtgaaaaggccgtggagactttgaccgaatgaatagggatcaattgatagacatttttattgaggaagagaatccaatccaagatgaacgcttttttcgttcgctatgtgctgactggatgcgtactcgcgtgatcgatcaatggacgggggaattgcgtgaatgacgagacccgccctaccctatagtaaaggcttcttccttctctggatggcg

SEQ ID NO: 11652 - DNA, 200 bp, Gossypium hirsutum
  Clone ID: LIB3135-035-Q1-K1-H9
tcggctaaaattgattcctctttatctgatactgatacaaagaaggctgcggttgaagcggcaaagaatgccctctccaaaggaaaaatatcacatttactgttagagcttcatttaacttttctctcctttgttcttttaattgatgttgtctgggtttttatatttgtcagttgatgttctaggcctcaaactttcat

SEQ ID NO: 11653 - DNA, 317 bp, Gossypium hirsutum
  Clone ID: LIB3135-036-Q1-K1-A1
ccaagctcttcataccgccgccgccgcctgtgtaggccgatccacgggctccgtcgtcccagtctccgatcttgacggagatggaatggaccgcgacaaagccaggtgtcgtgcgcgcgaatgacacgcgtggggaggccaatctccgagttctgcggcgactggacccttgctggaggcaagggcttgcggcgctaccggcttctagggttttccaacccttccctttttcattaagttctggcctgggctggggtgaattgggtattgggttttaacttttttgggcttgctattggattttaatattgggaagg

SEQ ID NO: 11654 - DNA, 454 bp, Gossypium hirsutum
  Clone ID: LIB3135-036-Q1-K1-A11
cccacgcgtccggacgcatcaccggtcatccacacggtgcttctcagcttcagagagtaggcattggtctgtttatttccatcttatctgtagcctggggtggggttttcgaaaggtttcgaagaggctacgctataaaacacgggtacaagtttagtttcctaactcccttgcccgatctaagtgcatactggttgttgatccagtattgcctaattggtatagctgaagtgttttccatagtggggctattggagtttctatacgaggaagctccggatgcaatgaagagtataggctctgcatatgctgctatagctggtggcttgggttgtttcgctgccagtataatcaacagtatcgtcaaatcggttacaaggaacccagagaataagcagcaatcttggctatctcagaatataaacaatgcgaaattcgattatttttactggct

SEQ ID NO: 11655 - DNA, 306 bp, Gossypium hirsutum
  Clone ID: LIB3135-036-Q1-K1-A12
cttagtcagaacttgaattaggtgttattgaaacagggttttgtagctacctcgtgtactagcttctttaatcatgattgttaattaaaaaaaaaaaaaaaaaaaaaaaaaaaaaaaaaaaaaaaaaaaggggggcggccaaaaaaaaggaaccaagcaaacgcccgcgtgcgagcgacgacatagcgcgtcgatggcgccacctaaaatcaactcaccggccgtcgacaaacaacggactgacagaaaaaacccgggcccaacccaacttaaccgcctggcaaaacaacccccttccgccagctg

SEQ ID NO: 11656 - DNA, 260 bp, Gossypium hirsutum
  Clone ID: LIB3135-036-Q1-K1-A2
aaaagaaccccaagagtggggctagcaataggggtgcagcaaaagatatagcagtgaggtctgagggcagagcacctgcaaggacttatactatacgtgccagggaagaggcagagtctcccgatgtgattacgtgtactttttctatccatgatctaactgttgttgctttaattgactcgggatctacccacttgtacatttgtatggaattgatacctcatataggcatggtagtagagtccattgagtttgtgatc

SEQ ID NO: 11657 - DNA, 405 bp, Gossypium hirsutum
  Clone ID: LIB3135-036-Q1-K1-A3
acgcaactttgcgccgctcttcagccttaaacccgatcggactccgattcagacggagcaaaacaggttacgatggcgcctactctggtatacgggcgtgagggtgcgcatgtacggagttgcggcagagtgcaggcagaaggcgtggtccctggtggtggcgtggctcggctcggaggcgctacacgagtgagggggaagcctggctcagttgcggcgctggaggcttaccctagctgctagggttttctgattttggtctctgctaggctaggtgttgggccatcaggctattaggtgttgggctagtgttagggtagtttaggttaaaagtggtttgggccacgtaattgggtctgtaattggacattttgggacatttaattatttttggtttttatttcg

SEQ ID NO: 11658 - DNA, 412 bp, Gossypium hirsutum
  Clone ID: LIB3135-036-Q1-K1-A4
cccacgcgtccgggacaagaaggtgaaggaaaggattgatggtcgcaacagcctggagacctatatctacaacatgaaaaaccagattaatgataaggataagctcgctgacaagcttgaatctgatgagaaggagaaagttgaaaccgcagtgaaagaggcacttgagtggcttgatgacaaccagagtgccgagaaggaagactacgaggagaagctcaaggaggtagaggcagtatgcaacccaatcatcacagctgtgtaccaaagatctggtggagatagatgtattagaaaataacaaggaagacaaggaacaaaaggaagattcgaaggcagctgatgcaaatcatccacaagttgaatgtagcaatcgccgtggcagaagcagtaccaacctgagtgattcttg

SEQ ID NO: 11659 - DNA, 398 bp, Gossypium hirsutum
  Clone ID: LIB3135-036-Q1-K1-A5
ccaagctctccataccgccgccgccgcctgtctaggccgatccacggcctccgtcgtcccagtctccgatcttgacggagatggaatggaccgcgacaaagccaggtgtcgtgcgcgcgaatgacgcgcgtggggaggccaatctccgagtcctgcggcgactggacgcttgctggaggcaggggcttgcggcgctacgtgcttctagggtttcccaacccttcccttttccattagtttcgggcctgggctggggtgaattgggtattgggttttaatttttttgggcttgctattgtattttattattggtagggccgggcaaataattggtattacaggttttatttatttgtatattaaaatgtcatgtcattaatttctacaaggtttaacgg

SEQ ID NO: 11660 - DNA, 438 bp, Gossypium hirsutum
  Clone ID: LIB3135-036-Q1-K1-A7
gattgggcaatgacagaacttatcatgaattcgaaagtactctaaaaagctcaagccgacatccggaaagttgtatgggatagaagagtcgtcttagaaactgagctgcctcaccttgattacatgatagctggcatcaaagagacctggcgattacatcctccggcaccggtcttactccctagagaatgcatggaagacgttacgatcgaccggttcgatattccgaccaaaacacggattttcgtcagtgtatgggcaataggaagagatccagaatcatgggaaaatgcagaatgttttgcaccagaaaggttcgtacatagttcaattgacttcaaggggcaaaatttcgagttgataccctttggagctggtcgaagaagctgtcctgttattacattgggcacagtgagtagcgagaaggcactggctcag

SEQ ID NO: 11661 - DNA, 172 bp, Gossypium hirsutum
  unsure (1)..(172): unsure at all n locations; Clone ID: LIB3135-036-Q1-K1-A8
cccacgcgtncgggtgatcataaccattctctatctgttgcacaaaccaccatacttgtatcttcatagatgaacaacctattttcctgttattaatgctcgctagccaaactgtactttgttgggatgggagggttttatcccctctgcaagaagctcttcttttgcttta

SEQ ID NO: 11662 - DNA, 423 bp, Gossypium hirsutum
  Clone ID: LIB3135-036-Q1-K1-B1
gtttcctgagacagtaatttgtggcttgggtgcgagttgccatgatgtacatttatatttttgactgataggcatgatcctccactttaggggagttactggacacaaggagcataatttgcttagacagctgaggtggtgatctataatttggatggttgtgcaatacaaagctcaggcaactctgttcctttgtttgagaagttttatatcccgattttaggttgagggaaaagaaaaattagaaagctctgttatgtctagttgtatgtacttgcttgaattgtctgaattggcacgactccttataatcaagtgtaagtaatatggttgaagttgtagtgtcgcccatccacggttatggagctggtctttgtggcagcctggttgactcagatttgcttatgttccttgattgggtac

SEQ ID NO: 11663 - DNA, 397 bp, Gossypium hirsutum
  Clone ID: LIB3135-036-Q1-K1-B10
cttcactttgaggtttgagcagatcggatggcaccaaagaaagataaggcccctccaccttcttccaagccagcaaagtctggtggtggcaagcaaaagaagaagaagtggagcaagggaaagcaaaaggagaaggtgaacaacatggtgttgtttgaccaggctacttatgataagcttttatctgaggctcctaaatataagctcatcactccctcaattttgtctgatcgtatgaggattaatggatcccttgctaggaaggctataagggaattgatggcaagaggatcgattcgtttggtgtctgcccattcaagccagcagatttacactagggcaaccaacacctagatgttttgttatagttttgcttaaattagttctatgtagtatt

SEQ ID NO: 11664 - DNA, 171 bp, Gossypium hirsutum
  Clone ID: LIB3135-036-Q1-K1-B11
cgttactctgcggatggagcagatcgtgtgtttcctgatagaggggatggccgtgcacccgctgtcgggccagcattggctgtgggtggcatgcaaatatttattaggaggccaggggagatcaaattgacagcggaaacaacatctggtgcttggaccgcgcttcttatg

SEQ ID NO: 11665 - DNA, 409 bp, Gossypium hirsutum
  unsure (1)..(409): unsure at all n locations; Clone ID: LIB3135-036-Q1-K1-B12
ggatgcatggaattttgttggacacattggggtcgagttcagtaggcaaaggtgtttaattaaaacagatgattgtttcctcttataacgttttatgtcttgctacaaatttattgaagaaggatgattctttctgtatatacataaaaaggcaagttttgccgagaatcagatggtattatggcaaaagagaagggtgaaaagatatatataataggtaatgttgttttggtgtgaaaaataaagctgctaagtgctaagttaaatattggtggtcactgcttgccatttctagccagagaaggagagacgggtgataggagtgtgtagatctattccctgctggtaatggtacatctgccaccactcaaactgaaatccttatccttcccttnccctttcccttccc

SEQ ID NO: 11666 - DNA, 257 bp, Gossypium hirsutum
  Clone ID: LIB3135-036-Q1-K1-B2
cccacgcgtccgggtgatcataaccattctctatctgttgcagaaaccaccatacttgaatcttcatagatgaacaatattttttcctgttattaatgttagtaagttttactgttcatgttcgggattggaggatattatctaatctgctcgtttatttccttgtaaattatatgctttgagctttctttaattgaaagaccatttgagatcaaaaggaaagaaaaaagatgttagatttggtattacagatgcgc

SEQ ID NO: 11667 - DNA, 438 bp, Gossypium hirsutum
  Clone ID: LIB3135-036-Q1-K1-B3
atgagctacttaaccatttcccagatctctttcattctcttcttcagcgttcttttcatttgcgcccatgcagcgcgctttgaaatccgcaatgagtgcccctacactgtttgggcggcagcctctcctggtggtggtcgtcgcctatacccttggcaaagttggaccatcgatgtgcctgctggcactgctatggctcgtatttggggtcgaaccaattgcaatttcgatgccagtggtaggggtcattgccagaccgacgattgtggtggactccttcaatgtcaaggttggggtgtacctccaaacaccctggctgaatatgcacttaaccaatttggaaacatggatttctacgacatttccttagttgatgggtttaacatccacatcgagtttgggccaactaatggcggttgtcacaacaattcgtgcact

SEQ ID NO: 11668 - DNA, 386 bp, Gossypium hirsutum
  Clone ID: LIB3135-036-Q1-K1-B4
acgaaaaaaaaaaaaaaacataaacgggacccccttcccggttgtacgatctatagcttccacgggggggggcgtctccttcacctgtagccgatatttacatcttgttctccagcacctactcactagtgcgtcttgaaagatcaacctcactggcacaacgctcatgttccagtttttcaaaacgaataaaaaaaggctcctatgagcgaaaaggaggccatgaaagatgcccatgcccactgaatcttacgaacggacagcgcatttgggagcgccaatggggctcgccctagacatcctgcttacaactctttggtggccatgttacacatcatcttaaccggttcaatgggccggttactaaagcttgatagttaaccttc

SEQ ID NO: 11669 - DNA, 303 bp, Gossypium hirsutum
  Clone ID: LIB3135-036-Q1-K1-B5
tgatggcgactttctcagcggtaatagacatttataactgcgaacggagttaatagtggccgaaaaccatgaagaactgagatggccagttatggactcgcgagaatcagatactgcttaccagagggcttatttgtctggctgacaattatggggagtctagattaaccggtgaagtggatcttgcttagctgaatagaaacattcatgctctggtcccacaatggtgactggtacattgttagctcatccatgttgagcattgccaacaagctctaatcttggcttaatgacaaaaattgc

SEQ ID NO: 11670 - DNA, 121 bp, Gossypium hirsutum
  unsure (1)..(121): unsure at all n locations; Clone ID: LIB3135-036-Q1-K1-B6
tcgccgcggtacggtccgaattcgggtcgcccacgcgtncgcctctcattccttaccccctccccatactacattactactccccaccgggaatacctcactcgcctatttacgcttctca

SEQ ID NO: 11671 - DNA, 347 bp, Gossypium hirsutum
  unsure (1)..(347): unsure at all n locations; Clone ID: LIB3135-036-Q1-K1-B7
acgtccacgcgtacgtccacgcgtncgactgatcgcccttacaccattagtatgattgagagagtaatgcatgaaattcatttcgctgttgatcccaatagtacttccaaaaagcaggctctataggttattcggcagcttcagaataacttccccataaaacgggcgcccatgagattacgactcatagttcctggacagaactttcattctctttgtgagaagctgaatgaatggggtgctacccttgtttcaaaagatgaattcggaactcagctgtcagtaatttgtgaaatagaaccagggctttttcgagaatgtgactcccttgtgaggaatttacaggg

SEQ ID NO: 11672 - DNA, 292 bp, Gossypium hirsutum
  Clone ID: LIB3135-036-Q1-K1-B8
ctgcttttgcacaaggtatgggctatgatttactccacacatgaactgattacaaatggtgggtaatatattagttaccactataggttgactaggatggtagaccaggcaatgtttcatcatttatttcgttcctttttctttcttttctttttttatgatgattgccgaaacagagatcataagctatgtagatttatcttatcattacagtccttcaagaatggttcaccctataaagatgcaaggtacatcataatgcacaatataatcctgtgtttgtcagctatta

SEQ ID NO: 11673 - DNA, 328 bp, Gossypium hirsutum
  Clone ID: LIB3135-036-Q1-K1-B9
tcgcccacgcgttcgcccacgcgtccgagacggtctcgtagctattcacctcgacaaaatgacagagattatcattcaaggggtagacgagggagatcccgttctcgttctccatatggtaggagaagagatgatcctgacttacataggaggcacagagagcgctccttggctggtgatggcaagggtcatcggaaaataaaaaaaattcatttttcaatttggacggaaaagcgataaatatgactttatattggaagggcgcgctcaaagccaaagggcactccctggtgtgggatcattatgaaggcaaccctttattttaatt

SEQ ID NO: 11674 - DNA, 238 bp, Gossypium hirsutum
  Clone ID: LIB3135-036-Q1-K1-C1
gggcaggcctacgctttcctccaagcgttcggtttgcttaaaccatttattctagagggctatcttctttttgaggtgcggaagtgtatggaaacgtattatctatggaacctgaccaacactgcgatggtatacaacctatagctttttgggatctaactatttttagttatggattttatatctgaacttgagaaaccatttagggatatttgatgattgaaagaggtcattgttc

SEQ ID NO: 11675 - DNA, 336 bp, Gossypium hirsutum
  unsure (1)..(336): unsure at all n locations; Clone ID: LIB3135-036-Q1-K1-C10
gaagttccggtgttggatcatgatctacgtactgaatgcagcaccgacgaataaggctgcagcagctgctgcttgaggnattacaaggttgttttggatgaagccttctctttttaggaaaactcttacgagaacattactcttgaggggtgtcattacattgaatgctttagttgtttatagtttatgattatggagttgcataaaaatttgaacaaggatgaatgctttgcattgaaaactgatgctggaaatgttgtatgcaattaaccgtttagaattccaaggattctatctaatcataaaagatcaactaattcgtgaagaaaatggcta

SEQ ID NO: 11676 - DNA, 431 bp, Gossypium hirsutum
  unsure (1)..(431): unsure at all n locations; Clone ID: LIB3135-036-Q1-K1-C11
gcgatgatgggttcaatctctgtcggtacttcttcaatccaataggatgggttatcaaggttgtatgctcgagttgaaagggcatgcactacgtcatttgtctttcgaggggtatactcaaaagataagggcatctccttcgacaaccacatctcgaaagcccatttcttccccaaatatgacggtctgtagacatgccttcgcttcagcagtggtcggatcccttgttcttcctagtgggtgtccaactcaacttcttgcaggacctgttttgtgaattcgcaatctcgaaagaggtgttccacagtttcttcttcaactgagcagactgaacatgcaacatcgttcttgattcttcgaagtctaagagtactgagcgtcngaagaaaattattggcaactcttcacagatgtatttttattttacttgg

SEQ ID NO: 11677 - DNA, 468 bp, Gossypium hirsutum
  Clone ID: LIB3135-036-Q1-K1-C12
acaagttgtattttgccgctatcggattatatcgatcatcacaaggggaaataaaaaaaatgctgaggcaattttggagaaagagaggttattacagacaagttagaagggagaagggtgaaggtgttgttcctaaagggtatgttccagttatggttgggagggaggaggagggagccaagttttttatccacatcgatatgttcgaaaatgattatttcgttagcttgcttgaaatgattgctgtggaggttgggtatgaaaatccaggcatccttagaatcccatgccacacccaatgtttcactcacatacttaaccagatttcaaggatcaacacctagttttcattgtttcgccttccaccactgttttcattgttgcgctctacttttattttatagtgagtttctttttgtgagtttatagttaaggcattaataaaacaaagatttattgggtcaaaaa

SEQ ID NO: 11678 - DNA, 429 bp, Gossypium hirsutum
  Clone ID: LIB3135-036-Q1-K1-C2
ctcgactaacagacatatgcattacctggatggatggtacaatcgaaccgggcggtacgatacattgggtccaatcactatgcagatccagaatgcaaacgggccgaggagttagtctttggcaaggaaggcatcatttcacaaatggtcgaaaccacaccaaacaagctatacagcttgaccttttcattgggccacgctagggacaaatgcaaggaaccactagctgtcatggcctttgctggagaccaagcacgaaattttcactacactccggactccaactctaccttccaagtcgctagtgtcaacttcacggccaaagccgagagaacacgaatcgcattctacagcgtgtattacaatacccgaacagacgacatgagctcattatgcggtccggtggtggatgatgttcgtgtttggttt

SEQ ID NO: 11679 - DNA, 320 bp, Gossypium hirsutum
  Clone ID: LIB3135-036-Q1-K1-C3
acgcccacgcgtacgcttgctggcacacagactctgaatgcataagttgatgaccttctacctggcatggtacgtgcggtgctggataatattcattgcttagcctcctacgatgcctaacttgattccattgcttcatttggtgcatcacttggctaaagtgctcaactgggccggcggacacccaaatcagcttgcgatgacttatctttgagagcggaacactgagcagcgtataaaggcttttacattgggataatgatacaaataagatctaatgattgaaacatcagattgttgcttcgtgcatagctctcaat

SEQ ID NO: 11680 - DNA, 415 bp, Gossypium hirsutum
  Clone ID: LIB3135-036-Q1-K1-C4
cccacgcgtccgcccacgcgttcgccacaatcgaaacctttaggcggcgactactactcgagcttcataacacacgaagcttttaactatggcgggtgtagagacggaggttgcggcggccggtgtgcccaagaagagaacattcaagaagtttagcttccgaggtgtcgatttggatgctctccttgatatgtccactgatgagcttgtcaagctcttccctgctcgagctcgcagaaggttccagaggggtttgaagagaaagcccatggctctaattaagaagcttcgcaaggcgaaaagggaggctccacctggtgagaagccggaaccagttagaacccacctgcgtaacatgatcattgtacccggaatgattggaagcattatcggtgtgtacaatggcaagacattc

SEQ ID NO: 11681 - DNA, 178 bp, Gossypium hirsutum
  Clone ID: LIB3135-036-Q1-K1-C5
gctgggatggattatattcactacttgaccaacttgcttatcgaacacaacctattgctttttgtgggcgcatcacttgtagtaagcgctcatataggccaatgtgcaaccccatttacgggtaatgactgatcgatggggtccattcctcagcagagtaaaaagctctgagatcgtg

SEQ ID NO: 11682 - DNA, 404 bp, Gossypium hirsutum
  Clone ID: LIB3135-036-Q1-K1-C6
gttctttgttaacgaataaggatcttttaagatacgccggatccgctaaaatacgccgatccccgttcgtcttccgatcatatggggctgcttgaccagttgtgggatgataccgttgcgggtccccgacccgataatggtctcggcaagctccgaaagcactccactttcactttccggcctaactctgccaaggaatcggatggcgggagtgtaagatcgtacggtgatgaagcgccggaggaagcgacgagagtgacacgtagtattatgatcgtaaaaccgcctggttaccagagcggatccgcttccgtttcggccgccggatcgacccctcccgtatcttcttttttcggaggcagagaatcatatcggtttccgagaaggtccacatcggatgcata

SEQ ID NO: 11683 - DNA, 436 bp, Gossypium hirsutum
  Clone ID: LIB3135-036-Q1-K1-C7
cccacgcgtccgaccacgcgttcgctgccattctacttctgctgaggttgtggcaggatcaacagcatggttgggtcgaggtctttcttgcgtatgtgctcagacagagaaagtgatgctcgtccatcatttgatttaactccttcccaggaggaatgcttgcagaggctgcagaatcgtatagatattgcttatgatagttcaatccctgaacatcaggaagctttaagggccttatggaatgctgcatttccagaagaagaactacgtggtttaatatctgagcagtggaaggaaatggggtggcaagggaaggatccatctacggattttaggggtggtggctttatatcattggagaacctgttattctttgctacaaattttccgaaatccttcaaggatcttctttggaagctggaaggtgatcggtctg

SEQ ID NO: 11684 - DNA, 394 bp, Gossypium hirsutum
  Clone ID: LIB3135-036-Q1-K1-C8
aaaaaaagttgtgttattaaaataaaaatacatgatttgcatgatatgcaataggcctaagggtcttatcgtatttgccaagattgagagcagcacacgcttttgttaatctataagaacctcctctcctcaaccttcatatcccctttcaacaagagcttagaatactttgccttattgtcatcttccaagacttatagtcccttatcaccatgcagcctagtgaggtttcaggcatccaatacctagttccttccaatccatccccatattcaccccatttcagcatgaatcagagcaacaagcctgcactcgactcgaaccagttcttgaaccccctgtataatttctatatccctcctcacattcaagacatcagtccccactcgtgctg

SEQ ID NO: 11685 - DNA, 402 bp, Gossypium hirsutum
  Clone ID: LIB3135-036-Q1-K1-C9
gcagaagagaatgacataacaagaattcctaaggaatgcagagaaacaatggtggctattgatgaaaataagggagattctcacacttcaagtcttggtcaatctgatgcatttcatggttctacggaaatagttcctgtaactgaactgacagaagaaatgttgtcttcgaagttcccaggccagtctaagaggagtcttgctgagtgcatctcggttgccgatgatgaagagtggtcagccttagaaggtattactagggttaatagcttattaagccttccgaggtttctatctagtcataaaagatcaactaattcgagaagaaaatggttatgagaactgacacagaagtcatttagcaaaataaacatgttttggatgatctcacattaatgaatt

SEQ ID NO: 11686 - DNA, 323 bp, Gossypium hirsutum
  Clone ID: LIB3135-036-Q1-K1-D1
acgcgacacggtggtgttctaaaactcttttagcacctgtatactcttttttcatattcaggaactatcatagcttgttggtcaaaaactgccattgtattgtgaaatttgaaagggactatcatgttgtctcattaatctctctgatatcctctctgatgtgtaagtgggattgtgaagatgtttaacttttgttacttgccttctgatagttttctgagattcttcaaactaaaaaggccttaatggaatgctgcatttacagaagaagaactacgtggtttaatatctgaacaagagaaaagaaatggggtgacaaaggg

SEQ ID NO: 11687 - DNA, 459 bp, Gossypium hirsutum
  Clone ID: LIB3135-036-Q1-K1-D10
gccgctgccgctggctttctcttagccggattttatctactggttgacatctatggatatcaacgcatgacattggtattggaatggatggggaagcatgcattggtgatatacatccttgcagcctgcaatctcataccaatcgttatacagggattctattggaagcagcctccaaataacattcttagcttaattggcattggaagatgaagtgacgattttgctgcaatccatggaagtataggttttctctttacctcttttatcaactacagttgtgaactctctctctatttagattacctaagtgagagaggggtggttaggcaggacagaaagggtagaaaatatggtttgtatgtaaaaaagagtgagcagagcaagcttgcttgagctttctactttcatatattcttggaaaaatggatataatttttatgtcgtctgacctcgtgt

SEQ ID NO: 11688 - DNA, 321 bp, Gossypium hirsutum
  Clone ID: LIB3135-036-Q1-K1-D12
gttcagcgatacatacgaaaagattgaggatagtaaaaggcagcagatgttggagttagagaagatgagaatggattttcacagggagttagaaatgcagaagcaacacatcatggaacgagcgcaggccgaaattgcaaaaatacagcagcaggctgacgatgacgagaatgagaaggcaagcgggtaatgtatgcaaaatacagttttatttcttattgctgattcaatgtcgactgctgaatgttgttgtataatatattggagccttttgccgatctccaacaataacactgaatatgctgcatcgattgagtagaa

SEQ ID NO: 11689 - DNA, 442 bp, Gossypium hirsutum
  Clone ID: LIB3135-036-Q1-K1-D2
gtcaaatactcattctcgcgaacttaatgatgaaggttgctgcgtgttgaacagtgaggatgctgaaatcccatgcaacgatgatgttctcttagctaaagcttttgctccacaagagtgtcataaagtgggcagtgaccaggcctcatcctttgcaaatcaaaatgatagtaaagaagaactgagcttgatgcagacagaagataatcttgctcaatgttttactgctcccaagatggtaggactggttgttttgtcggaatctagtcaagctgtcaaatctgagttccatgatggtcaatgtcatgtgatttccagacaggctcagaattccgtggttgacccatataggttcaaaaccacccacgcatttcccaattctgctgcaaatggtgcagcaaaggaagagccgtcagatgaatgccatacccaaaatattttt

SEQ ID NO: 11690 - DNA, 347 bp, Gossypium hirsutum
  Clone ID: LIB3135-036-Q1-K1-D3
cggacgcgtgggcaaccttctgtttttttctcataaaacctccccactactgatttctctatataatctaatgttctcccgttgttttagccgtctttaacacttttcaatggcttcctcttctgttattgcttggggctcaggtgaagatggtcaattgggtatcggaaacaatgaagaaagagaatgggtttgcgttgttcaagctcttgagcctcacaatgttcgctccgtcgtcgctggcagccgtaattctctcgctatttgtgatgatggcaagttgtttacttggggatggaaccagagaggaaccctagggcaccctcccgagaccaaaactgagaata

SEQ ID NO: 11691 - DNA, 445 bp, Gossypium hirsutum
  Clone ID: LIB3135-036-Q1-K1-D4
cccacgcgtccgcccacgcgtccgatttgcttatcagatatccttgaaggctagtgaaagagacgtttatgaattcttctctagggctggcaaggtacgagatgttcgcctcataatggatcgaaactcaagacgttctaaaggggttgggtatattgagttctatgatgttatgtctgtccctatggcaatagcactctcaggacagcctcttcttggtcaaccagtgatggtgaaaccatctgaagctgagaagaatctagttcaatcaactacatctgcatcagctggacagactggtccatatgctgctggcggtagaaagttgtatgttggtaacctacatttcaacattacagaagatcaactgcgtcagggttttgaaccttttggttcttgggagctcggtcagttgcctcttgatgaaactggtcattctaaaggg

SEQ ID NO: 11692 - DNA, 385 bp, Gossypium hirsutum
  Clone ID: LIB3135-036-Q1-K1-D5
cgacccggtggtcaaccaaaactcttttagcacctgtatactctcactacatattcaggaacgatcataactggttggtcaaaaactgacactgcattgagacatttgaaagggactatcatgtggtctcactaatcgctcaggtaaccactctgaagtgtaagtgggaaagagaagataaagacaatgggttacgctgccttcagactcttgactgagactctgcaagctccgtcgtcgctggcagccgtaattctctcgctatttgtgatgatggcaagttgtttacttggggatggaaccagagaggaaccctaggggcccctccctagaccaaaactgataatattccaagtcaggctaaggctcttgctaatgttaaaat

SEQ ID NO: 11693 - DNA, 399 bp, Gossypium hirsutum
  Clone ID: LIB3135-036-Q1-K1-D6
aaaatgatctctgccggtgaagcaacctataataagtggcggcgtcctgatccttagatcggtccttgcgctcctggcggttccaagttcactcaaaaccctgtaccaccatctgggattgagattttatgtgattatggtaaagaagaacatgattaaaacaagatcttttctaccccaacacataaaggtctagagacttcttcgtggatcaaatggcagctactcttattcatgccagtgaaaagtgatgaagctttaataacattaacgttgatgctcctttcgactgaatttggtgtgtctggatcatgatatgagagcattgctcagattgaaagaaccaaatggctgttgacatttgcataggaacactatgatcatgaatgctcttttgtc

SEQ ID NO: 11694 - DNA, 383 bp, Gossypium hirsutum
  Clone ID: LIB3135-036-Q1-K1-D7
acggggtttcaatcatccatggccacccggctagcgagaaagctgccatcatcgctctcggcgttttcctcatctgcgattaccaaattgacgtctggcatctcacctccgtcgatgagccatggcggacccggactcaggtgtgcctcctcttcctcttgctcttcctcatcaacagcaacgactggatcaaattcttcatcttctaagcgtgagaagaagataacagaccgtctatcagccgacatagacgccgtcaacgaccgtaaagtccctcccgagctccgtggccaacgcaacaacgttagatcggaaaccgacatcatcaacgtagttgagcaaagaatatggcattcaatggaagagggtcagttcgagaattt

SEQ ID NO: 11695 - DNA, 423 bp, Gossypium hirsutum
  Clone ID: LIB3135-036-Q1-K1-D8
aaagacttctacgttggaacttttggtgtcagtgttgaaacttataatcagaatcacttgaagaacactgctgttaatgaaggtaattccgatcggctatggtggtttcaagtgtgtactgaagtggcctatttccaggtggcaccctcaaatgatagcatccgctctaccaaaattaatacaaaataccacttggatctttgcaagaacgtctttggagaaggcatctacccagaggttgatatgacaaatatatactatggaggcacaaaaattgcaggttcaaaaatcgtttttacaaatggctcacaggatccattggcgccatgcttccaaacagacatcatctccagacatgccttcggacattattacttgtcataattgcggccatggaactgatatgcgaggatgtccccaatc

SEQ ID NO: 11696 - DNA, 248 bp, Gossypium hirsutum
  Clone ID: LIB3135-036-Q1-K1-D9
cgcgtccgaaatctttgggcacttaattggtctttcctatttttatatttcatccatggcttatagaataatagatgttcagttttcaaagcttaatttttattctggtatgtgttgcttatatgttttttattggattgcatttttatcagacacactgagaacagctctttatgttcctaggaatctacaaacatgcaaattgtagctgctgcatttggatggtattcgcattctgtgcttatatt

SEQ ID NO: 11697 - DNA, 375 bp, Gossypium hirsutum
  Clone ID: LIB3135-036-Q1-K1-E1
accaaagggtcaaaacaaatgggatatggctgcatatagcagagcaagggacaggaccacttgttctattgcttcatggcttccctgaaatatggtattcatggcgccaccagatcactttcttggctaaccatggctatcatgtagatgctcctgatttgagaggctatggagactctgactccccacttagcccaacctcctacactgttatgcaccttgttggggacatcattggcctgcttgaccattttggggaacagcacgctattatagtgggacatgattggggagctggtattggctggcatctagcactgtctacacctgagagagtcaaaggattgatcaacttatctgttacatactttagta

SEQ ID NO: 11698 - DNA, 345 bp, Gossypium hirsutum
  unsure (1)..(345): unsure at all n locations; Clone ID: LIB3135-036-Q1-K1-E10
gcgcccacgcgtccgctctgcaacatctggttgttagcttatatccccggtatccatgaatctccccgtgggggaatttgtcacctttccccaccctccaacagcgtccattattaaaaagtcctctcgcagcccatatatttttccaggtaaatgaaggtaaattccccaactgagctttgtagaaatctgaattgggaaaatattttactttcaaaacacgggaaataatgaattctgatatattaataagacgccatccctacttcgctaataatgcaacgttaaatttagcaaaatcacgtantaaataaatttatttataatatattatattttaaatat

SEQ ID NO: 11699 - DNA, 464 bp, Gossypium hirsutum
  unsure (1)..(464): unsure at all n locations; Clone ID: LIB3135-036-Q1-K1-E11
gttatcctttacatcttactttgtggtgtcccacctttctgggcagaaacggaacaaggagttgcgcaagcaatttttcgctctgttatagattttaagagggatccttggcctaaagtttctgataatgcaaaagaccttgtgaggaagatgctcaatcctgatcctaagcaacgacttacagctcaggaagtactagatcatccttggttgcaaaatgcaaagaaggctccaaatgtttccttgggtgagaccgtgaaggcaaggctcaagcagttctctgtaatgaacaagctcaagaaaagagctctcaaggtaatagctgagcatctctctgtggaggaagttgcaggcataaaagagggattccaattgatggatactgccaatagaggcaagattaacattgatgangttaggggtgggttgcataagcttggtcataccattcctgatgcagatct

SEQ ID NO: 11700 - DNA, 446 bp, Gossypium hirsutum
  Clone ID: LIB3135-036-Q1-K1-E2
cacttacagcgttttccacggcttttacggtcgacccctcaaccttttatcctcttttaaggcagcatccacttgcttcttccctctcctctcgacttcccttgtaacccagtttatcgtttatggaatcagcttagttcttggtttggtcttttttgcattaatcaaagcaacccaattttactcttcacctactttcatcgtacttatcctcgtctatgtgatcattttcacgtctactataacttatctccaactgaactggatatttgctcatgctgtcgtagtagttgaatcaagctggggacttgaaccattaaagcgaagtcgaaatctagctaaaggaatggaagggcgtgcctttaaagatgatgctgtttttcggcttcttctttgcgtgtaatatctggctctcaattcaaagactggaggatccagctggtgat

SEQ ID NO: 11701 - DNA, 457 bp, Gossypium hirsutum
  Clone ID: LIB3135-036-Q1-K1-E3
attttggcatgaaaaccaggtgaaggtgtcgattctcgttatgtctggccaggtggaagcatcggcaggagtgcattgggctgtgagtgtatatcgatggtcatatgaagcgcacacatgctatcggtcagattcatcattttgtgagagctcattggattgattatagatggttcgcgatgatgaacatattcagacgatgcattgctggtatctgcacgaggttcgctgctgctaagagctcggatgtttgttaataagccagatggaatggttagggaagagagaggtccttatggtgatcctcaacatccatatttctatgaggaggaagatgtgtggatggcaccaggctttatcaatcagttctaccaaagtccttgatattggaagacatacctgccttaagttgatcaggaaagaaaaatggggctaaactcattttataaagcttccc

SEQ ID NO: 11702 - DNA, 240 bp, Gossypium hirsutum
  Clone ID: LIB3135-036-Q1-K1-E4
cagagagggtaattttccaggtggctgcggtcattcatgggtagcaatgttgcctctttcgggacaggtcaaaccaatcaatcacttctctactgaacaaactggcttcctaaccaattgtgttgaaaacagaggagcagaccgtgttggatctcaagctgaggcgggaactgctcctttgaaatggcatatgccaccgtcatgaccatagatgcatgtctgcgctgcttgataggagat

SEQ ID NO: 11703 - DNA, 432 bp, Gossypium hirsutum
  Clone ID: LIB3135-036-Q1-K1-E5
accaaagggtcaaaacaaatgggatatggctgcatatagcagagcaagggacaggaccacttgttctattgcttcatggcttccctgaaatatggtattcatggcgccaccagatcactttcttggctaaccatggctatcatgtagttgctcctgatttgagaggctatggagactctgactccccacttagcccaacctcctacactgttatgcaccttgttggggacatcattggcctgcttgaccattttggggaacagcaggcttttatagtgggacatgattggggagctgttattggctggcatttagcactgtttagacctgagagagtcaaaggattgatcaacttatctgttccatactttagtagaaacccgaatgccaaatttgctgaattcttaatcaaaacatattgggatggaattt

SEQ ID NO: 11704 - DNA, 408 bp, Gossypium hirsutum
  Clone ID: LIB3135-036-Q1-K1-E6
tcgcccacgcgtccgcggacgcgtgggtagatttgaacttttagcccgactttgcccaagattctactgacggccgacataagaagtgcgttcacagaggctggaatgcctgctattcgggctcggaaaaaaacagtgacagagaaagatcttctagatgcggagaacaaggtcatcaagggatatcaaaagctaagtgcatcccccatatacatggtttacaaataacccaaactttggagccactctcaactccgaaaacacatgataggggctcaagctggcgcaatagtatcggatttagatattgcctgtgctgcttacctggatttgatttcatagttgcctatactttggatgtgcgatgcttaatatgctgcaattccacttcttctctcgtgttagaat

SEQ ID NO: 11705 - DNA, 402 bp, Gossypium hirsutum
  Clone ID: LIB3135-036-Q1-K1-E7
acgcccacgcgtacggaaaagtagcaccctacaagtacctttaattctgaatttgaatttgatagggtgggggattatgggttatgtttcagttatatgatttatttataatatataaatatgcagcatgctggtgcttgtgatgaaaaaggaaatccaattatcaaggactactatggcaggccgcttgccgcaagtggtaagccttacgacactatgttagtggctaaatctgaatgtgtctatactggatctggtgatcaacgttgctgcatgtttgcatttaacatggaacaagggcttactgtcatgcccgagtggctgttctgtaacagagtgaattctcgggcaagaaaagatgttgaaaattggtcctacttggctttctttaaagggatgcat

SEQ ID NO: 11706 - DNA, 441 bp, Gossypium hirsutum
  Clone ID: LIB3135-036-Q1-K1-E8
caaatggtgacctcagtgctacctagagtagaaagcttggcaagcagtgggattcaatcaatcccgaaagaatatatcaggcctcaagaagagcttacaagcataggtaacgtgtttgaagaagagaaaaaagaggtccgggaaagatgtcagcaggagctgaaaaaggctgccatggaatggggtgtgatgcaccttgttaaccatggcatctccgaggagctcatggatcgtgttaggaaagttgggcagaaattctttgaactccctgtggaggagaaagagaagtatgccaacgaccagagctctgggaatgttcagggctatggtagcaagcttgctaacaatgctagtgggcagcttgagtgggaggactacttcttccatcttatttttcctgaggataagagagacttgtcaatttggcctaaaatccccagc

SEQ ID NO: 11707 - DNA, 416 bp, Gossypium hirsutum
  Clone ID: LIB3135-036-Q1-K1-F1
cccacgcgtccggaaaagtagcaccctacaagtacctttaattctgaatttgaatttgatattttgggggattatgggttatgtttcagttatatgatttatttataatatataaatatgcagcatgctggtgcttgtgatgaaaaaggaaatccaattatcaaggactactatggcagcccgcttgccgcaagtggtaagccttacgacaatatgttagtggctaaatttgaatgtgtctatactggttctggtgatcaaggttcctccatgtttgcatttaacatggaacaagggcttcctgtcatgcccgagtggctgttcttcaacagagtgaattctcgggcaagaaaagttgttgaaattggtcctactcgccttcttttaagggatgcatgggacatggctactgaaat

SEQ ID NO: 11708 - DNA, 465 bp, Gossypium hirsutum
  Clone ID: LIB3135-036-Q1-K1-F10
attgaatcggaacaaaaatcagataggagttttgggatgagaaatttcaagtacgttaagacaattaaagatgctctggagcaagaatgtccaaggacagtttcctgcgctgatatcgtctctctttctgctagagatggcattgtcttgcttggaggaccacgcattgagatgaaaaccggtcggaaagatagcaagagaagttaccttccagaggtagaaaataccatccccaaccacaatgattcaatggagttggtgctttcacgctttcaatccattggcatcgacacccaaggagtagtagctttactaggagctcactccgtaggtcgagttcattgtgtaaacttagtacacagactctaccccacagttgatccgacattggaacctgactatgccgagtaccttaaagggaggtgtccgacacccgaccctgatccggaggcggtgttgtactcg

SEQ ID NO: 11709 - DNA, 369 bp, Gossypium hirsutum
  Clone ID: LIB3135-036-Q1-K1-F2
gagaaatcgagagtcagcatagaggtggcagctggcggggcggcctccgcagctgcccatagtgcgtccaatgtgagagctacttatgatactgacactgctcagaatatacaacgggacttgactgctgcaagtaccagtctccgccacatgggatgccagagagccatcagctgggcggcaacactatgtatagcctgctttttagaatcgctgtgacacctcaggggaacactagcttcgtgtcctagctcatagacaaccaacacactcactgcaactaaggcaaccgtgatgctcgcgcatcaatgtaaccgtgtaggtctggataaggacgtgaatgtctttaaccaactcgtcccaaatctg

SEQ ID NO: 11710 - DNA, 441 bp, Gossypium hirsutum
  Clone ID: LIB3135-036-Q1-K1-F3
ccctcccacggtactgaccggtgatgctgagcttgaaatgagagggcgatgtagtgcaggtcaaaaagttcttgcttctctaatcatacggttggctttagccgagacattttgcctcaactgtggaatcttagcattagatgaaccaaccacaaatttggacggcccaaatgcagagagtctagctgcagctctccatagaatcatggaggacagaaaaggccaggagaattttcagctgatagtaatcactcatgacgaacgctttgctcaattgatcggtcaacggcaacacgcagagaaatattatcgtgttgcaaaagacgaccatcagcatagtataattgaagcccaggagatatttgattgaattctttcaacgggttttcctcgatacttcatccccagagcgccgtttcatcgagattgaatctgtacatg

SEQ ID NO: 11711 - DNA, 263 bp, Gossypium hirsutum
  Clone ID: LIB3135-036-Q1-K1-F4
tgctgcaagttttcgagccaattcaaaacaaatgcagacacaaaatcaggcatgtgtgggcacattgtctagtggggatgcccctctggctttgctgggggtgaggactttgttgataaatcataggagtcacagatttggatcagccaggatcttctaatccagcatattcttgttcttaacatgtgagaagtcataagactcgagagtgtgctaattatgtttgggacactgctcattatagtttttggtgtcttcttgag

SEQ ID NO: 11712 - DNA, 305 bp, Gossypium hirsutum
  Clone ID: LIB3135-036-Q1-K1-F5
acgctctggtgtgagttctgagatacgatcacctattaaatatgccgtagaatatacccgaaaggcgaaacatggtgcatgagtgcggtcatgtgatctgtccattttttttggcaatgctgaaggcaattaatcagcgtgtgaacaagaccgacaactgtaaggaacaactacagacatactgtcggccctcgtcgacggctgcaacgccgtctgacactgccttaaacgctatcgtgttagtacgggttctcgtgtgcaagcctccttcttaatctaatgtaacatgtaacgggagctttctt

SEQ ID NO: 11713 - DNA, 433 bp, Gossypium hirsutum
  unsure (1)..(433): unsure at all n locations; Clone ID: LIB3135-036-Q1-K1-F6
cccacgcgtccggttcaaaggccgaaaataaacaaaaaacagaaaagggtaggtctaatcttgaaatctcagttatcaatgagaatttaagacaacgaagaagcttacttgatgattcatcgacatcgagagtgggtcacgagcttatatcacctataggagctgtatacctgcagttaacgaggagaagttatcagtactcggttttgagggaattatttttgggttactgctcattagtggttcggttgtattcttgagaagaaagcgggccattaccatgcctggagtttcagcagggaggatccaaccaaactctaggttttgattaataagccctttcatatgaaaccgactttgttgattgttgaggctttggagtaatttagtataaaactacatctaaaggtaaatgctntagctgctcttcctt

SEQ ID NO: 11714 - DNA, 312 bp, Gossypium hirsutum
  Clone ID: LIB3135-036-Q1-K1-F7
acgcatgtgaccacaagcgatggaaggacgcgtgaccagctacaacgaggcaccgtgatacaggcggtaaggacatacatttgatggtcatcagttctagagtttcacgacacataatgctcatcaaatggaagctagtatatgaaatacccaccgcttgagataggggacggtatacaaaggagcgatagggtaaatgtacatgctaatccggccccataaagatgccaatagctaatgtgatttattggcaccccttatgactatacatatatctatactagatggaagatgatccacgctattaaaatt

SEQ ID NO: 11715 - DNA, 440 bp, Gossypium hirsutum
  Clone ID: LIB3135-036-Q1-K1-F8
ctcctttacggcccagatcatttgctgtgaaagatgaaatcttctgcttgtttgagggagcccttgataacttggggagtttaaagcagcaatatggtctggcaaagtcggcaaatgaagtgattttggtcattgaagcttacaaggcccttcgtgaccgagcaccttatcctccaaaccatgtggttggccatctaattgggagctttgctttcattgtctttgacaaatccacctccactttgtttgtggcttctgatcaatttggtaaggttcctctctattggggaatcaccgccgacggatatgtggccttttgctgataatgctgaattgctgaaaggtgcctgtggcaaatctcttgcttcttttcctcaaggctgtttctactccacagcagtaggaggattaagaagctatgagaaatcctagaacaagat

SEQ ID NO: 11716 - DNA, 206 bp, Gossypium hirsutum
  unsure (1)..(206): unsure at all n locations; Clone ID: LIB3135-036-Q1-K1-F9
tcgtccacgcgttcgcccacgcgtccgttgaaattttaagcaataaggaggtcatttctgtaaaccaagagtcactaggtgtccagggaaggaaagtttatgtttctggagaagctaactgccttcaggttngggcaggacctttgtctgtcaatcgcttattcgtagcttttttgattagttgttcgaaagctttatttatttca

SEQ ID NO: 11717 - DNA, 386 bp, Gossypium hirsutum
  unsure (1)..(386): unsure at all n locations; Clone ID: LIB3135-036-Q1-K1-G1
catgtcaccacaagcgaaggaaggactgtgaccagctacaacgtggcaccgggaaattggcagtttggacaaacatttgagggcgatcagttctagagtttcaggacagtaaagggtctttaaatggaagcttgtatatgtaatagccattgtttgagataggggaaggtataagaaggagagttagggtaaaggagaggctcagccggccccatatggctgtcaattgctgaggtgatttattggcacccgctaggcctatacatatatctttacttgattgatgatgatcaaggatattttcatctgtttggcttttgtctaattcatcatagccatgccatgaaacgaatcaaaatatatatttaaaagatttcttttcttna

SEQ ID NO: 11718 - DNA, 452 bp, Gossypium hirsutum
  Clone ID: LIB3135-036-Q1-K1-G10
ctgccgggtagtgcggatggttctatgtataacatccctactggaggtagtgattatcctactcccgtgaatgataatggcagtaatgctgacataaaaggtggaaggccaagcccgtatatgcaatctccttctccttggtcaaatcaaaggaccccactaagtgttgatgttaatgttgcttatgtggaagggcgggaggaggtggacaggggaacctctaatcaacccctgacacaggacttctttatgatgtcatctggaaagagaaaacgtgaggattttgcacaataccaaaatggtggatatataccccaacaagatggagctggagatgctacatctgaagttgcaaaggcagagggaagtaggggtggtaatttcctggatagacgtcactcaacaaccactgcaaaaagcaagatcttggcagagttatctaagtcatcatc

SEQ ID NO: 11719 - DNA, 165 bp, Gossypium hirsutum
  Clone ID: LIB3135-036-Q1-K1-G11
gcagactgacattcaccaagctatggctgcagctgcgctgcaagaaatgagagcagtggatccctccagatcagcaactactacccttctgcaattccagcaaccccaaaatctatcctgcaggcctgctgctttaatgcagtcccagatgttgcagcagtctca

SEQ ID NO: 11720 - DNA, 463 bp, Gossypium hirsutum
  Clone ID: LIB3135-036-Q1-K1-G12
ggtaacctccccaattgctccagccaggcttttcaaggcttttgttcttgaggctgccaagatttggcccacggctgcccctcatgcagtcaagagtgttgagctcgaaggtgatgctagtcctggaagtattgtaaagatcacctttgttgaaggccttccataccaatatatgaagcaccagattggaggacatgacaaaaacaatttttcatacagttacagtatgattgaaggtgggcctttaggggacaagcttgagaaaatcagctatgagaaccagtttgtggcagctgcagacggaggaagcatttgcaagagctcaataaaatattacaccgttggcgactatgtaatcaccgaggatgaaatcaagactctcattaaagggagtgaggtagtttacaaggctattgaagcttatcttttggctaaccccgatgcctgcaactaaagatacagc

SEQ ID NO: 11721 - DNA, 324 bp, Gossypium hirsutum
  Clone ID: LIB3135-036-Q1-K1-G2
cccacgcgtccgaatccatagtatagcatatagatatcgaactgaattgctgttgaacttggtagtgatattttcatgttcaagtttctttttacagaaatgttttagctggatctaattagagatttgtcatgtttgtcctatgtgattgcagctgttttgcctgtgacttttttcttcaacaatgagaaaggacatctaattgggagcttagctttaattagatttgacagatagaaacaacaatttgaaagagggttctgatcaaatatgaaaaagaaactctctacttgaaaggggggccccttctgaaatgtcaacgtt

SEQ ID NO: 11722 - DNA, 178 bp, Gossypium hirsutum
  Clone ID: LIB3135-036-Q1-K1-G3
cccacgcgtccgaaaatgaagaattttgatcaatgatgtatttttattacatggaaaaaaaaaaccattcttgaaataaagttaaaccttgaaaacaactccaaagataattggagttgaaaatgatttttgttaagactaaaatctcttgatgatgaggaatttgattatttcattt

SEQ ID NO: 11723 - DNA, 442 bp, Gossypium hirsutum
  Clone ID: LIB3135-036-Q1-K1-G4
cccacgcgtccgcccacgcgtccgcccacgcgtccgcatccccatggtgtttggtccaactaatggcggttgtcacaacattcggtgcactgcagacatcaacggacaatgcccgaatgagttaagagctcctggtgggtgcaataacccatgcacggtgtttaagaccaatgaatattgttgcactcaagggtacgggacctgtggtccgacccgttattcaaggtttttcaaggaccggtgccgtgattcatacagttatcctcaagatgatccttcgagcacctttacttgccctgctggttccaattacagggtcgtgttttgcccccgaggctcacctcatatagagatggtcggaagtaagagccaagaaaaataaagggatcatctcttggtctagttaatctgcgccttggaactaaaaaataaaaaagtcatt

SEQ ID NO: 11724 - DNA, 431 bp, Gossypium hirsutum
  unsure (1)..(431): unsure at all n locations; Clone ID: LIB3135-036-Q1-K1-G5
catgtcacctctngcgattgaaggactgtgaccagtttcaacgtggcaccgggaaataggcgggttggacttacatttgagggcgatcatttctagaatttcaagacagttaagggtctttaaatggaatcttgtatatgtaatagccattgtttgagagaggggaaggtttttgtttgtgagttagggtaaaggagaggctcagccgtctccatatggctgtcaattgctgacgtgatttattggcacccgctatgcctatacatatatctttacttgattgatgatgatcaaggatatattcatttgtttggcataagtctaatttatcacaaccatgccatggaacgaaacataacatttatttaaaagatgtctttacttaaaaggcgacatcaattgtcctttttaaaatatgtttaactttatgg

SEQ ID NO: 11725 - DNA, 436 bp, Gossypium hirsutum
  Clone ID: LIB3135-036-Q1-K1-G6
caaacactagtagaaggtttagttttacaaacatggctcgttgcggtgtccttaaggtggtttccatgattctcatggtgtgcatgactatgatgagtgcacccaaggcaggcaaagccgtcatcacgtgcagcgacgtggtgaaccacttgatcccgtgcttgtactacgtacaaaacggcggtacacccgctgctgcatgctgcagtggggtaaaagcactctacggcgaggttcagaccttcccggaccgtcaaaacgtgtgcaagtgcatcaaatcggcggtgaacggaattccgtacaccagcaataaccgtaatctcgcagccggactacctgctaaatgtggtctccaactcccttacagcatcagcctctccactgactgcaacatggtgcagtgaggttgatgatgatgatattgaaggagtggaag

SEQ ID NO: 11726 - DNA, 239 bp, Gossypium hirsutum
  Clone ID: LIB3135-036-Q1-K1-G7
acgcgatgtgcaaactatatacggatataatgcctgctggttgctgcaaacagccgcaattcatgaagaaaagatagagcgaagctcagccttagacattagttttgcactcaatgggatgtatttgttgaaagtaccgaaaatcactttcgtctaatgtgatccgattccatatgtatttgtaaacaatttattcctccttggctgacctgttttaaaggctcaaaataatatacggg

SEQ ID NO: 11727 - DNA, 276 bp, Gossypium hirsutum
  Clone ID: LIB3135-036-Q1-K1-G8
atggcatggggtagtaaggtataaaacgggagtaagagatagtggtgggtatatgttgttgttctgagatgtaaattaataaaaactgcatgtaattgaaatgtctgatcaaagaggagataaaatgcaggtgacagaaaggagttaggtgtttacatatgttgataatgggggcattgttaaagaaggtataggcatgtaattgtggaaaacttggcatgaattcttcacttaaatatatgataatggaatggtataatcctgcttttgaagcca

SEQ ID NO: 11728 - DNA, 240 bp, Gossypium hirsutum
  Clone ID: LIB3135-036-Q1-K1-G9
taaaatcccggaattacttaaacaacaatggctacctatgaaggtaaagttttcactgaagaacaaggggctttggtgttcaagttatggactgtaatgaagaataacgcagctgaattgggtcttaaattcttcttgaagatatttgagattgcaccatcagccaagaaactattctcattcttgagagactccaatgttccattggagcaaaacacaaagctgtagccccatgccatg

SEQ ID NO: 11729 - DNA, 419 bp, Gossypium hirsutum
  Clone ID: LIB3135-036-Q1-K1-H1
gaatgtgcaaactatagacggatataatgcctgctggttgctgcaaacagccgcaatccatgaagaaaagaaagagcgaagctcagccttagacatttgttttgcactcaatgggatgtatttgttgaaagtaccgaaaatcactttcgtttaatgttcttgttttcatatgtatttgtaaacaatttattcctccttgaaaaacctgttttaaagtctcaaaaaaaaaaaaaaaagaaaaaaaaaaaaattaataaaaaaaagacaaaaaaaaaaaaaaaattaagatagaaaaaaaaaaatataaaacctataaaattaaagagaaaaaaagacaaaaaataaaaaaaaaggggggcccttttaaaaggtcccaggtttatatacccgtgcttgcaaggaaaaattttttttatggg

SEQ ID NO: 11730 - DNA, 294 bp, Gossypium hirsutum
  Clone ID: LIB3135-036-Q1-K1-H10
tggagaggctggtacattctgacctactggattgaccactgaagctaagtctgttgagatgcataatggagctatgcaagaggatattgctggagacaatgttgcatggaacatgaagaatgtacctgtgaaggatctaaagcagatatttgttgcgtacaactccaagagaggatctctgacgggaagcaaccagctttacctgcaaagatattatcatgaaccacgcagggcagatggtagaaggctatgcaccgtgtctagatggccacacgttccatattgctagaaagt

SEQ ID NO: 11731 - DNA, 463 bp, Gossypium hirsutum
  Clone ID: LIB3135-036-Q1-K1-H11
gttgaattaaaaactcctaattcttggagcacttgttgagtgaagttacaatcccgaaagagatgactcaccgtctcctcttcttcttgacacactggacaagtcgtgtttgccaccagtttcagaacttttagatttttcaagaccggcataaattcattagcaactttccatagatgtattctgatcttgtttggtacctttatttctcaatttttttttgtaaaatttagatagaagattagattgtatgttggtaccctctgctgtattcagccaactatatccagttttagctgtataatctcctgtattatctcccctccaagttataacgtcttgtggtgcactactcgccagcaggattgagactatcttttgcatttgctcatccctaaataataaacgattttcctcttgctttcagctcccagtaaccagacatcattccagatattaacac

SEQ ID NO: 11732 - DNA, 303 bp, Gossypium hirsutum
  Clone ID: LIB3135-036-Q1-K1-H2
acgcggacgcgtgaggtacttcagattctgacttgggcggagatttactaccatgcacaaacggtatcagctgatggagcgcggcctactttctttacagtataagctgcagtttatactcttcaaatagcaagcgtggctgatattgcagtgctaacatatcccagttctaggcattctatgtaacacgctatttgcaggggcgtgacatggagcagaactgtgctatttacgagatggaggaaggctcctgttagcgcagcctaggaaccctgtcgagtcccaaggacggcaaacgaagct

SEQ ID NO: 11733 - DNA, 431 bp, Gossypium hirsutum
  Clone ID: LIB3135-036-Q1-K1-H3
gaacaggaggttcatcagcatggactataaaagtgatgtgtgaatcaaggttcgtggcccagacttgtgcacggaggttagcgtatcatctagaggagttgaaggaagatactgtgatcaagaacattttggttttggagcgcggcttcaatggctgggaagcttcccgacgacctgtttgtcgctgcactgacatcccttgcaagggcgagagtgcatgaccaaccatccattataattaattccggctgataaggaagcaaaaacatatatcatctacttggtgccaaccatttttcccgttattctctcttctgattgataatgtgtaatggagatatactatattactgggtttgcgttctaccatacgtgttttcactgttgcctcaacaaaatcgcacgcttgacccacatattgaggaacaatt

SEQ ID NO: 11734 - DNA, 228 bp, Gossypium hirsutum
  Clone ID: LIB3135-036-Q1-K1-H4
cccacgcgtccgtaatgatatatttttagttcttgctcccagttttacttcctttgggctggctctatttatgagttacgggctcttttgtctgtgcgtgtacgtgtttacgtcggttttcatatatgataaatttatcgttgacctaaaatctggcagaattcaagcctaaagaaatccagggattggattcggcaaaaaaaaaaaaaaaaaaaaaagacccaactt

SEQ ID NO: 11735 - DNA, 342 bp, Gossypium hirsutum
  Clone ID: LIB3135-036-Q1-K1-H5
aagaaactcatttagatcaggcacatattcccttaggcttctctctctctctctctgtctcccctttctgattaattttggcattgcagtgagtttcacggaaccacaaggaatcttcaaagattatgtttatctgcattgttcactcttaaaacaaagacacgacatggggtaaatttaattaagaaccaaagttgcagctttgtaaagaatttattagtcaaaggtggagggatgctgctgttattactttcagagtgacatcatccagttgttattaggcttgtaaaatatctctatttttccttagcttagagtggtttaatgacaaccctggtagtg

SEQ ID NO: 11736 - DNA, 430 bp, Gossypium hirsutum
  Clone ID: LIB3135-036-Q1-K1-H6
acggtccaaatggattgctgacaaatcacaggtttacactcaacatgcttatatgagacctcttggagttgttgctatggcgttgggtattgatgaagagaaggggccccaactctacaaatgtgatccagcaggccatttttatggccacaaggcaaccagtgctggatcaaaagagcaagaggcaattaatttcttggaaaagaagatgaagaatgaccctgcttttacttatgaggaaacggtgcatactgctatttctgctctacagtctgttcttcaagaggatttcaaggctactgagatagaggttggagtggtgaaagctgataatccagctttcagagtgatgtcaacagaggaaattgatgtacatctgacagctattattgagcgcgactagtgagcatggaccaatattagctgctgc

SEQ ID NO: 11737 - DNA, 314 bp, Gossypium hirsutum
  Clone ID: LIB3135-036-Q1-K1-H7
acggctcgaacagtggggatagcgatcggtgggtataagatgaaattgcaattaggacggtgggcacagcgactgaagagacttgtactatgcgtgccagagaagaggcagaggctcccgatgtgattagcgacacgttttatatccatgatctaactgatgtggctttaattgaatcgggatctacttacttgtacattagtgtggaaaagatacctcatataagcaaggtaggagagaacattgagtttgtgatcaacggacatacagcgtgtactataaggcgagcacaaggctactgatatagacgtagg

SEQ ID NO: 11738 - DNA, 340 bp, Gossypium hirsutum
  Clone ID: LIB3135-036-Q1-K1-H8
cccacgcgtccgaatacagctacttaatggcaatataattaagaagtgaaaaatgaggggagctggaagaaatgggaaacagaataaatcagccagacaatactagttgataatattacttatacaacaaaaaagggcaactcttacttcctgccgacatcttttgtcttggttacgtcttcaatggagcctttttctctctatcggatattcgtgcaggacctgtcgtatgtgttttgaagcggcctctccctccttcctctttttcctttttcttaacaatctgaacaacatcttcatcctgcaaggaatggccaagcccacagtgttgacgattatg

SEQ ID NO: 11739 - DNA, 450 bp, Gossypium hirsutum
  unsure (1)..(450): unsure at all n locations; Clone ID: LIB3135-036-Q1-K1-H9
cccacgcgtccgaaaaaagaaaaaaacgcaaagaaaagagaaatggctactttgggtggaattagccaggtcgatggaagcgccaatagtttggagattgaaaacctcgctcgttttgctgttgatgaacacaacaagaaagggaatacgatgctgcagtttaagaaggtgacgaatgtaaaacaacaagtggtttctgggactatgtattacataacattggaggcgatggatggtgacaagacgaaagtttatgaagccaaggtgtgggacaagccatggatgaatttcaaggagttacaggatttcaaggttattggcgatgctcccgccggttgtacttncaccgcttaaggtgactggagattgtagaggaaggatatcgggatatcgaaggcgggttttaaataaatgtaactgtcttatgttaatttggatttagactactaa

SEQ ID NO: 11740 - DNA, 454 bp, Gossypium hirsutum
  Clone ID: LIB3135-037-Q1-K1-A10
acgttccagactgtaattttgagttttgaaggaacatgtatgttccatagttttctgtagaaagttttaatcttggcctataaattattaattactaggaactagtgtagccctttgtaatagtttgtaggcacttttaatggagaaattaccggatggttcccctccccatacttggaaatcgtcgtgcacagcccttgccaatggaatctgcatgatttttttaacaatctctattttaaagactagatagaaatgtgatccccctttccgacccttcagtacaatcctttttccaaaagtcctttagatgcccacacactttttcagggctcctaccgcgcattgagggggtggtgtgaatagtgtaggttattttgtggacgaatgcctcattccatacttgggagttagtcggattcaaaacaagcggcattgatctgaacaattgatt

SEQ ID NO: 11741 - DNA, 284 bp, Gossypium hirsutum
  Clone ID: LIB3135-037-Q1-K1-A11
acgcggaaaaattaaccagcttttctgctcattttcccagagaaaacatgaaaacatgcagatgagaaaactttcaagcaggttcatcctcatattatgcattttggtctacttttttaaactagtgcaattttcctcacttgtgtagatttcgtaatacataaaactatttaaggttgtttaaagttgtactgactcatgcccactcattgccattttgaaatgtaattaggaagttgttctaaaacgcacaatacagatagaagaagccatacaagtttctc

SEQ ID NO: 11742 - DNA, 76 bp, Gossypium hirsutum
  Clone ID: LIB3135-037-Q1-K1-A12
ctcaaaaatacgtccacttttccgctactttttaacggcacatcacggactcatgcgaatgggaaaatttcaacgc

SEQ ID NO: 11743 - DNA, 402 bp, Gossypium hirsutum
  Clone ID: LIB3135-037-Q1-K1-A2
agccctaatcttctcatcgcttcttcctccacaaaaccctaataaaggtcgtagaaaagaacatgggtcgccgcaaaagcaccaacacaactcaaacctcgaccaactcttcgaacaaattcgaaggagctaacattcgcttccaagacgccgacgacaaggaaatcgccagcaacagctccaatctcgatgattcaatcgtcgccgttgataaagctagtgaagatatttccatgggagagcccgacgtttcgtttttcggttgcgacggcgaagatgataaaaccagtgctgattattacttcgattcttactctcacttccgtattcatgaagaaatgcttaaagatgtagtgcgaaccaagacatatcaaaatgttatttatcggaataagtttctat

SEQ ID NO: 11744 - DNA, 394 bp, Gossypium hirsutum
  Clone ID: LIB3135-037-Q1-K1-A3
gcccgcccttgctcgtttgaaagcttatgagggcgttccttccccgtatgataaggttaaaaggatggtcatccctgatgctcttaaggtcttgaggcttctaaagggtcacaagtactgcctgttgggtcgcttgtcatccgaagttggatggaaccattacgataccataagggaacttgagaagaagaggaaggagagggctcaagttacatatgagaggaagaaggagctgaataagcttacggtgaaggctgagaaggcttctgaagcgaaacttggttctcaacttgacatccttgtgcctgttaagtactgaattttctagtgactagcttgtttttcttacaattttgttatttgaatggattacatttcattgttgcattctatt

SEQ ID NO: 11745 - DNA, 327 bp, Gossypium hirsutum
  Clone ID: LIB3135-037-Q1-K1-A4
aagaaaaaggactgagaatggaactgtgcgaattgacatagtaagaaaaaactgtcatctaaacttgatgtctcgacgagaaagaatccctcatggatgaacgcaaaaaaaaaggatgcatacacttgataacggataaatgaacatttggggcgcccgttttaaaagatcaatgttcgagcacgtgctctggtggaagaatggctttttttatcgggaagatatgtacaaagagcaggcgggggtttaacaacccggactgtgggaaaagcttgaggtgcgcatacttaacggctaggatctaaacccgacttatggcgatgggct

SEQ ID NO: 11746 - DNA, 446 bp, Gossypium hirsutum
  Clone ID: LIB3135-037-Q1-K1-A5
ggcgaagtggcaaagaaacagcagatgcctcctgcaagtgtgatgacaaggcttattcttatcatggtttggaggaagctcattaggaaccctaacacatattccagtcttttcggcttgacttggtccctcatatctttcaggtggaacattcagatgccaacaattgtaagtgggtcgatagcaatattatccgatgctggtctgggaatggcaatgtttagtctaggcttattcatggcattacaacccaagatcatagcttgtggaaaatctgtagcaacattttccatggctgtcaggtttttgactggtcccgctgtcattgctgcaacctccatagccattggtcttcgtggggttcttttgcatgtcgctatcgttcaggctgcccttccacaaggaatagttccatttgtgtttgccaaggagtataacgttcatcc

SEQ ID NO: 11747 - DNA, 450 bp, Gossypium hirsutum
  Clone ID: LIB3135-037-Q1-K1-A7
cgcgagactccaaacaagcagaactttcctttttcggctccagaaacaaaggagagttgcgggtcagcacctcagggaaacagagaaagctatcctacagcagagctgaagattttatccaaaccaagatcgaagtcgacttgaacacgccaacattaaaagaatagaaacggatcgctctctctacaacactaatctaatgtctacctccgatgacgatggaaactctaacggcaactccagacgacgatattcaagcggataacaaggaagagggaccagtggaataataggaggagcggtaaggatcgcatgtactccggccaatataacaggggaagagatgtctcgcggagctaaagagaaggtttcgagggttcccgaccctgtgaccggatgctacagacccgagaactgttccaatgagatcgacggggccgagctcagatc

SEQ ID NO: 11748 - DNA, 317 bp, Gossypium hirsutum
  Clone ID: LIB3135-037-Q1-K1-A9
acgcccacgcgttcgcttgctggcacaaatactctgtttcaaagagtggatatccttctacatgacatgttgtgtgcggagctggataaaagccactcctcagcctcctccgatgcctaacttgattccatttcttcttctggagcatcacttgtttcaagtgttcaacttggccgatgtacacccaagtctgcttgcaaagacttatcttttagatcgaaaccaaggttgtgtattaagctctgagattgtgatagtgatataaatattattatatgattgataaataaaattgttccttcttgcatagctttgaa

SEQ ID NO: 11749 - DNA, 433 bp, Gossypium hirsutum
  unsure (1)..(433): unsure at all n locations; Clone ID: LIB3135-037-Q1-K1-B1
gttggaccaggagctcgagacagagatgggaagcatatcccagttaatctgaaggaaggagatacagttcttttgcctgaatatggtggcactgaagtcaagcttggtgaaaaagagtatcacctatacagagatgatgacatcttgggaacccttcatgactgaattttgcggctgtgggactggagaatgattctcattcaaatatgtctctgttcttgaaggaaacaaatatttaccttggacttgtgactctatcagtaattttacatgttttaagactttttattcgtttgaaggcattttggatgaggaatgttttcaagaattttactagccatgggaaaaaaaaaaaaaaaaaacaaaacccccntaaaaaaaaaaataaataaataaaaaataaattattccaaaacctttttataaaaattaa

SEQ ID NO: 11750 - DNA, 261 bp, Gossypium hirsutum
  Clone ID: LIB3135-037-Q1-K1-B10
gaaagaagttgtaattgaaaaggttgtgcggtacaaacgcacatgtataactactgtggaaggcctggaactttttggtgataaattaagcgatgcttcaaagaaacttggaaagaagtttgccacaggagcctctgttgttaatgggccaactgacaaggaacatattgatgttcactgagacatatcatacgacattgctgcatgcattaccgaaacctgggctgatgtgcccgagactgcaattttctctattgtgga

SEQ ID NO: 11751 - DNA, 158 bp, Gossypium hirsutum
  Clone ID: LIB3135-037-Q1-K1-B11
acgctggctggtgtgtaatacctaacatctttcttatgtgttttggggaaagaaagcggcgacatctattaaagcaacacgtcgttgtagcttcgtatatgataaagaaaaggaacactcttcatatttattccatactttatcacccgaatgaaacc

SEQ ID NO: 11752 - DNA, 110 bp, Gossypium hirsutum
  Clone ID: LIB3135-037-Q1-K1-B12
ctcattcgttcgtacagacgaccagtagtaaataactgctctgacaggtataaagatagcgggggtgcgtcatcccgtaaacctgcttactatagagagccagattgagg

SEQ ID NO: 11753 - DNA, 187 bp, Gossypium hirsutum
  Clone ID: LIB3135-037-Q1-K1-B3
cgaaatatgattggttaggagaaccctacttttcccttgcttgggggcgggttgattcactaggatgcgactgttactgtgagattttctctatgtgcatgctcccaggaactcaagagtatctgtctgccatagagcacttattatatatatatatatagctggtcatcaatgattttaaaacaaa

SEQ ID NO: 11754 - DNA, 347 bp, Gossypium hirsutum
  Clone ID: LIB3135-037-Q1-K1-B4
tggaaagttaacttgctggaggcctaggttatgttgtttatgacagatcttaacttgcttggaagtggctatacttggaagatattttatgcggacctccattttgtgtaattagttgtgtagctttcggctactagactgaatttctgctgtatctttcatgttggatgatattaacatgatctgtgaaatggaaacgtaaaaaaggaactagatggtgaatcttgctattaatgagatgggaaaagaaagaagttaatttcggtttttttgcttctaaagagattttaattaaaacgtctaaagatggacaaccgctgataagcctaccactatcattgggtata

SEQ ID NO: 11755 - DNA, 312 bp, Gossypium hirsutum
  Clone ID: LIB3135-037-Q1-K1-B5
cttacttttcttatactttggacattcatattctggtcatcgactctaatctacaaatctgggaaacaaaaaagaaacgacaatactcatactaggcttgaaaaacacacaaactatctacacgcaaagctgatacttctaggggccgttcttttttggtgccgatcgcccgaacaaatgcatcaagcttcttagacttaaatcattcttcctatcctccaacaatgggccgtcctataacagctggatggtacatgaataatcctgcggctaccgactctattcgtctgttagtatccaacccttttcttc

SEQ ID NO: 11756 - DNA, 445 bp, Gossypium hirsutum
  Clone ID: LIB3135-037-Q1-K1-B7
gagaaagagaagtatgccaacgaccagagctctgggaatgttcagggctatggcagcaagcttgctaataatgctagtgggcagcttgagtgggaggactacttcttccatctaatttttcctgaggataagagagacttgtcaatttggcctaaaatccccagcgagtacactgaagttacaagtgagtatgcaaggcaactgcgagccctagcgagcaaaatactttcagcactatcaatttgcttgggattagaagaaggaaggctagagaaggaagttggtggcgtggaagagcttcttcttcaattgaaaatcaattactaccccaagtgtccacaaccagaactcgctctcggtgtcgaagctcacaccgatataagtgcactcactttcattctccacaacatggttcctggcctccaactcttttaccagggcaagt

SEQ ID NO: 11757 - DNA, 441 bp, Gossypium hirsutum
  Clone ID: LIB3135-037-Q1-K1-B8
cttggatgtatggtggagctcctaagggacctcagattacggatcgtaaaagacggggtgacataggctatgcctcacctcgtcgactgatacatctgctagactctctatacacaacctggagaagagtgacttaccttgttttgaaggaagttgatagaatgttggacatgcggattgagccgcaaacaagaaagattgttttttaaagtctacctgagttacaaacattgtactggagtgcaacgaggcctaaagatattgaatctttagcatgacagttattacgcaacccataatatgatgcccatattcttatgatgttatggctatcattgcatctacttatctgaaagcaaccaatttattaaccaagttgttgaagtcataacagatccacaatagttcaacatgctaatctaattgctcgaggatctgatg

SEQ ID NO: 11758 - DNA, 323 bp, Gossypium hirsutum
  Clone ID: LIB3135-037-Q1-K1-B9
cccacgcgtccgtctgcatcgtcggcggcgttgcagaaaggaagagaaagaagaagctatgatggccgcacctgaagctcctctccgctatgttggcatccctcgccaatctgctgcttttcgcctcatgaagcaaatgggatgggaagaaggagaagggcttgggaaagataaacaagggatcaaaagttacgttagaattaaaaacaaacaggacacaattggggttggattggaaaagccgaatccgtgggctttcgatacagctcagtttgatagtattctcaagagattgaaagtgcaagcagcacagatcaatgatg

SEQ ID NO: 11759 - DNA, 446 bp, Gossypium hirsutum
  Clone ID: LIB3135-037-Q1-K1-C1
cactatcttctgaaaaactgggtgcaccatttcctcctaacttcaaagatgtagtgaagacactattcaaaagactgttccgagtatatgcccacatctatcactctcactttcagaaaattgtgagccttaaggaggaagcccatttgaacacatgctttaagcatttcatactttttacttgtgagtttgggctgattgacaagaaagagctagctccacttcaagagctcattgaatccatcatagtcccctactaattacaggactggactttggatatactgatgatgtttctttcttcttctttttttctttttttttttctttattttagggatgcaaagtcaaataaattaagagactgttattgcagacgacttaagaaacaagcgtctctaatttatatctctgcgttataaatgcacgttcatatgtcatgttcc

SEQ ID NO: 11760 - DNA, 351 bp, Gossypium hirsutum
  unsure (1)..(351): unsure at all n locations; Clone ID: LIB3135-037-Q1-K1-C10
cttaatttccatttactagcaatttcttcaagttcttttctttggttttttaatcaatgggtgaccactacctccaaaacactgaaccaatgactcaccaaatggtgaaagccgctactgccgcaacagccggtgggtccctcctcattctctccggtttaatcctagctggcacccttattgcgctcaccatagccactccactcttcgttattttcagtccacttcttgtccctgctctcattgcaacagctctcctagcaacgggtttcgttgcctccggcggtttctgtgttgcanctgtcacggtcctgtcctgggttnacaggtatgttacggggaggcacccac

SEQ ID NO: 11761 - DNA, 365 bp, Gossypium hirsutum
  Clone ID: LIB3135-037-Q1-K1-C11
acgcggtcgaaattataacagattacagaaccgattcttagcttagacatgggtgcaatgatatgctcaaggctgattgtgtagatctgttggttaaatactacaaagaagcgagacgtgcagtttacttgagcaatgaagaagacgatactcgatccaagagggatgcaagtggagcctctttaccaatagagaaaacatctagcgtgagaaacatggtggttaagtctaaaactagacggggtggaagatgttgtttgtgattccatcctttctggatacaaaaggtgtcggacattgtgttcttttgttgtcatgcttatcacacgacttgcttgactgactctactgacagtaatagcagc

SEQ ID NO: 11762 - DNA, 369 bp, Gossypium hirsutum
  unsure (1)..(369): unsure at all n locations; Clone ID: LIB3135-037-Q1-K1-C12
gctaaccatgagctacttaaccatttctcaaatctcctacctcctcttctttagcggcctttgcatttccgatcaagcagcgcgctttgaaatccgcaatgagtgctcctacaccgnctgggcagcagcctctcctggtggtggcctgcgtctagaccctctgcaaagttggaccatcgatgtgcctgctggcactgctatggctcgtatttggggtcgaaccaattgcaatttcgatgccagtggtaggggtcattgccaaactcgtgattgtggnggactccttcaatgcaaatggtggggtgtacctcctaacaccctggctgaatatgcacttaaccaatttggaaacatggatttctacaacat

SEQ ID NO: 11763 - DNA, 429 bp, Gossypium hirsutum
  Clone ID: LIB3135-037-Q1-K1-C2
gagcgttggttaaaagattccaaacatgatattaaatttacaccccactccttttgactcctaaatagatgcttatcgtggcttggcttgaaaaggttagtgatttttctggggaaagaatccagtttagtatttgatgagatgccaaatcttatttcttgaaagcttctttgttaatatatctgagacatcaccattgatctaaatagagatgttttaacgattggatcttgtttatcttcgtctcatactacattgcattaataacagtgatatggaaagccggagctcttggataatttaatcatatctgcaaactgttctaatatgtgtaactagttcatatatgcattgatttatgcactgctttagtcgacaacttaataaaacacatggctcttaacttatatctctgcgttataaatttgg

SEQ ID NO: 11764 - DNA, 430 bp, Gossypium hirsutum
  Clone ID: LIB3135-037-Q1-K1-C3
aaagcaaccgaactcaactcaaaattacacttatccgacacatccaacttgccgcaaggaacgacgaacagctgagcaagctgctcggcgatgtgaccatcgccaatggtggtgtgatgcccaacatccacaacctcctcctgccgaagaaaaccgggacctccaagacttccggtgccgatgatgattaatgcagataaatttagattccccaaagccgttcacaaatcaaccccttcccccctctctatgtagtacatgacgatcctgatattcaaatctctaaggtttttggctttggctgttgttctattattaccttctgtggaactttagctagcaattagatttttagggatctcggtatgatgtcgatataaatcacattatccatcttttttttcctttgggaaaaaaaagcaaggtcata

SEQ ID NO: 11765 - DNA, 401 bp, Gossypium hirsutum
  Clone ID: LIB3135-037-Q1-K1-C4
acaaaattgaagctcacgtggcttgcagaaactagtgaacttgtaaacctttccttggtggagtttgattatctaataacaaagaagaagctggaagaaggggaggatttcctagatgcactaaacccatgtacgaaaaaggagacagcagcaattggagattccaacatccgcaatttgaaacaaggagagatattgcagctggagaggaaaggctacttcagatgtgatgttccctttgttagaccttcgaaaccagtggtgttgatcgcaattccagatgggcggcaacaaagcatgttgaagtaggtcttttaccctatctttattctgatctgtagagtgctgggaagatcctccaactcttttctggctaatacttggacatgcgtatctatgac

SEQ ID NO: 11766 - DNA, 430 bp, Gossypium hirsutum
  Clone ID: LIB3135-037-Q1-K1-C6
aagaaaggttgtgtcattcagatatattttctatattcgcacgacatactaaatcgggcatgggctttatcgtatgcggcaagacttagagcaactgctgctaacgttaaattataggatacctcctctcctcaacgatttaactcccctgtagacattgagcgcacacatacgtctgccttattggacgccatacacgcttatatagaaacaatagcgccatgcatcctagtgctggtacatacttccgacatcctacactctctggataataccgatattcaccccattgctcgatgaataacagcaacaagcctgcactccaccctcactctatagtataaccgggggtgtgagggtcattcccctccttagattcagaacatcagtccccactcgtcctgaatcataatggtttccactttttgac

SEQ ID NO: 11767 - DNA, 307 bp, Gossypium hirsutum
  Clone ID: LIB3135-037-Q1-K1-C9
cccacgcgtccgcagggtttaagaaggatgtttcgcaatcgttggttgataacaccgacatggaactcttgggaatcgattacctatatattcctgcttatgttgatgctgcccctactcatcatatacttctgaaacggaggtaaatcgctataggcgaaggtctaaacctctatagaataaaaccgaagaagtatacgggtcaatgcctacctttaaggatggttggtgcagatggatgcccaacaagatgccttcttactgcttaaaacacaaatgctgacttcaagttggtaagatatatgcc

SEQ ID NO: 11768 - DNA, 258 bp, Gossypium hirsutum
  Clone ID: LIB3135-037-Q1-K1-D11
ggatgcatggaatcttgttggacacattggggtcgagttcagtaagcaaaggtgttgaattaaaacagatgattgctttctcttataacgttttatgtcttgctacaaatttattgaagaaggatgattctttctgtatatacataaaaaggcaagttttgccgagaatcagatggtattatggcaaaagagaatggtgaaaagatatatataataaggcatgttcgtttggtgtgaaaaataaagctgctaaatgct

SEQ ID NO: 11769 - DNA, 139 bp, Gossypium hirsutum
  Clone ID: LIB3135-037-Q1-K1-D12
gcccaaccatcgtatactagccacgaactggactggataggaggattcatacgctgccggtgcttgagctaacctcagtgctaaacatgtcgctcctggtccctacggaacctgatcgcgaggaaggacccaccctccc

SEQ ID NO: 11770 - DNA, 338 bp, Gossypium hirsutum
  unsure (1)..(338): unsure at all n locations; Clone ID: LIB3135-037-Q1-K1-D2
tcgcccacgcgttcgcccacgcgtccgcccacgctttcgctagttctagatcgcgagcgngccgccttttttttttttttttttttttttttttttttttttttttttttttttttttttttttttttttttaaaaaaaaagataaaaaaattttttccctttttactacatataggacaaaatataatcgctttattattttttaaaaaaatttttttaaaaaaaacttcctaaatttatttaaatcccaaataaatttggcctttaaactaaaaaaatttattttcctttaactatttaaaagatgcaataaacaacctttttttttccttaattg

SEQ ID NO: 11771 - DNA, 431 bp, Gossypium hirsutum
  Clone ID: LIB3135-037-Q1-K1-D3
cccacgcgtacggccacgcgtccgaccacgttttcgtacatattaaatcgagaggagaaccaatgcgttgcttgcccgtcaacaaaacggattactcggttggagccaagaattgtcagccgaagaaggtgaattgtaggccgaatggtttcagcttctacaagctagaaggagttgaccatttcatgagccagtacaacgaaggagaagggataaaggagagtgattgtgggaggaaatgcacctctgattgcacgtgtttggggtacttttaccacagggaaacatccaaatgttggatcgctaatgagttgaaaacccttgctaaaacctctaactcttcccatgttggttatataaaggcacccaacaagtgacgggaatcctattaaggatttggaccttttcctttgtattttccagcttcttta

SEQ ID NO: 11772 - DNA, 385 bp, Gossypium hirsutum
  Clone ID: LIB3135-037-Q1-K1-D5
gaagaattctacgtgggaactatttttgtttttggcgaaacggataatcagaatgacttggggaacactgctggtaatgaaggtaattcctatcgggtatggcggttacaagtgggtactgaagtggcctatttccaggaggcactctgaaatgatagcatccgctgtaccaagctttatacagaataccacttgtatctatgcaagaaggttttatgagaatgcatctacccacaggctgatatgacaaacatatactattgtggcacaaaaagtagaggttgaaagatagcctttacaggtgtttcacaggatgcatggcgccatgtcttacaacagacattatcttcagacatgccgttcgtccaacttacatgccatacat

SEQ ID NO: 11773 - DNA, 215 bp, Gossypium hirsutum
  Clone ID: LIB3135-037-Q1-K1-D6
aaagagctttgcgcgagacccctttttctatttccagacgctgcctaacggcggccgtgctataacactgtttagggtgagaaggaccataatggagtactgggacttgccttgcttaataaggagacctgctttgagaactcttcgtagatccttctatatttgttgacatgggattcgatgctttgcatcttgaataattgcaagaacatctt

SEQ ID NO: 11774 - DNA, 348 bp, Gossypium hirsutum
  Clone ID: LIB3135-037-Q1-K1-D7
gaagagggtggtagagcgacaaaatttcttgtactcgataattgccttccagggcgcacgttcttgtaagtatctatcataatttttgaccatttcgtttaggttctttcttttggtctttgctggaagctaattaatgaattctggctttctctgatcttttagattgccgatatttaatatgatccaagaccttatgaggttcaatcaagaaaaactgaagaagaaaatgatgatgtgatgttcaaaatggtcaactaaatgcatgaacatatattaaaagtgaccaaacaaacctgtagcatttattcacataactcgatccatcacggtgctagacatgcgggg

SEQ ID NO: 11775 - DNA, 179 bp, Gossypium hirsutum
  Clone ID: LIB3135-037-Q1-K1-D9
ctacgcggacgcgtgtgcggacacgtgggcgcaaggtttgatctcgcttttacctctgtcttttgggggtaaatgcaatgatgtacaaaacatcttttggggtatataagacaattcatcagaatagttaagaaactaagaaatagaaagcacctttgtcagaatagcttttgaaatat

SEQ ID NO: 11776 - DNA, 123 bp, Gossypium hirsutum
  Clone ID: LIB3135-037-Q1-K1-E1
cccacgcgtccggaggaattgttaatttattatttatatgttttgttaattactttatgatatgaatgtgtgaatttctaattttctgttgcaataaataccagtacattaacttttcttttc

SEQ ID NO: 11777 - DNA, 448 bp, Gossypium hirsutum
  unsure (1)..(448): unsure at all n locations; Clone ID: LIB3135-037-Q1-K1-E10
ggtcagcgtcccggtggtagaagggctggggctggtcagcaaagtcagcaaccagttccatgaatgcagcagcagatgctaccgcgagggcgggtctatcgctatccaccagggcgtggtctacctgatgtttcaatgcctaacattgctggaggcatgctttctgttccatatgatatgggtggcatgccaatgcgtgatgcatcaatttctcagccaattccgataggagccttggcctcagccctagcaaatgctacaccagatcagcagagaacgatgctggggagaatctttatcctctagttgaacagctggagcctgatgcancagctaaagttacagggatgcttctggagatggatcaaactgaggttttgcatttgctcgagtcaccagaagctctaaaagcgaacgttgctgaagcaatggaggttcttaaaactgg

SEQ ID NO: 11778 - DNA, 175 bp, Gossypium hirsutum
  Clone ID: LIB3135-037-Q1-K1-E12
acgcccacgcgttcgagatgcgtcaaagggtatcttcattaaaggtatatccatgcatgcgcagcaaatcgtacaacggctcaatgcgtcaggatccacacctaaaaacaaacctaacatctaagaaaggctgggactaaaacaaccaatggcactcaaaaagacaatcctataa

SEQ ID NO: 11779 - DNA, 398 bp, Gossypium hirsutum
  Clone ID: LIB3135-037-Q1-K1-E2
gaagcgttgaataagcggttagggactgaggatttggatctgtatagaatattagaggagactgaaaggcgcgggataacctttgatcaattactcactatcccggaacaagatgaatgggtctacagtgatgggaaatcaacaacatgtgttgcctttatccttgagatgtataaagaggctggggtcttcggtcccctttcaaactcgattcaagtaaccgaattcactatccgtgatgcgtacatgcttaagatatttgagaacaaccaaacgaacctgcctagttggtgtaacaatggggatggccggcttccattctgtcagattctgggcgagtattggatggagttgccattttataacagcttagaaccatatgccaatatgaatgaaaa

SEQ ID NO: 11780 - DNA, 423 bp, Gossypium hirsutum
  Clone ID: LIB3135-037-Q1-K1-E3
aggggttgctgcttccatggggtattctccttatcctatgtatgaggaccaaaggaccaggttcaagcaccagagccttatgcaagactttgaagacttgcacaaggaaacagaagccatgagaatgaaattgcagatgatgaaagagcaaaaattaacccttttggccgaagttcggtttttgaaacggaggcacaagttcttgatgcaaaaccgatcttccaacaccctagccggccgaaactttgtgcaaccacagagtacggtggttaaaagaagcaaatcaaatgtgaaggaaaagaaatcaactggaaaggaacacagtttgcgacatctaactattggggttcgaactgaaccaaaagggaaagacttatagtgaaaaggaaaccactttcgctcatccttctctgatatttgact

SEQ ID NO: 11781 - DNA, 397 bp, Gossypium hirsutum
  Clone ID: LIB3135-037-Q1-K1-E4
gacgagtctgatatattcccaaacatgttgttattcgccgaagcatgcggaatacccgctgctcgtgtgacgaagaaggaagatctccgacaagcgattcagaaaatgttggaaactcctggaccgtacttgttagacgtaatcgtaccgcatcaagaacacgtcttgcctatgatccctggtggaggggcattcaaagatgtgatcacggatggtgatggaagaacaaaatattgattttaatgaactttctgttatatgtatgtatgagcaaccatggaagcttagctgtgggctaataatctagttttcctcttctaagaaactcagggtatacttttatgttgtcttgaagtatatgtgtttgtatatttgggtacgaatataaagatatgat

SEQ ID NO: 11782 - DNA, 440 bp, Gossypium hirsutum
  Clone ID: LIB3135-037-Q1-K1-E5
caaggatggagatggttgcattacttccaattagtcgggaactgtgatgcgatcacttgggcagaaccccactgaggcagaactgcaagatatgattaatgaagtcgatgctgatggaaatgggaccattgattttcctgaattccttaacctgatggctagaaaaatgaaggatacagactctgaggaggagcttaaagaggcattcagggtgtttgacaaggatcaaaatgggttcatttctgcagccgagctgcgccatgtcatgacaaaccttggtgaaaagcttacagatgaggaagtcgacgagatgatccgcgaagccgatgttgatggtgatgggcacatcaactacgatgagttcgtcaaagtcatgatggccaagtaaaggacctctccaactataaccagtattaaaaaatggggtttaaaaaaaagga

SEQ ID NO: 11783 - DNA, 306 bp, Gossypium hirsutum
  Clone ID: LIB3135-037-Q1-K1-E6
taaagattaacttaggggttaaattttatttgccgttagacttgacaatctttttcggctttcatgaagaaatgacactattctaaaaaaaaacggtcttacgtgaggatcctgttcgatgtcatagtatgggttaaactcgggagatatcgtcaagggctagggattgatgtcggcaagagatttaagatagcaccatgagaacattacttattttagggactaaatattcacttatctcaagacatacacttatggggttgactatacaggagggattttgcacagcatcacctcaagaagagc

SEQ ID NO: 11784 - DNA, 342 bp, Gossypium hirsutum
  Clone ID: LIB3135-037-Q1-K1-E7
cccacgcttacctatgggttaaatttaatatttgtcttgactagagcatatgttgggtcggtcacgaatgcatgcttcttcaactccacatgcatacgtacaaacactaaggatagggagaaaaaaaattatactttgcctgatcagaaacaatagcctccacatgagaaagaaccattactaatattttatgaatcttcttgaaaacaaatcccaacttgtgaaatggaacaatcctggatgaaggaacatgcacttattgtcccctgtgagaggtagaaaagcgtgtgagaagcaccacagaaagcacaatcggatcgggccggcactccaattaaacct

SEQ ID NO: 11785 - DNA, 410 bp, Gossypium hirsutum
  Clone ID: LIB3135-037-Q1-K1-E8
cccacgcgtccgttcaaaacacccttctccctcttccatcgtgatctccgctctcttctctcatatcgaacaaaaaaaaacccgatcccaatggcttcttcaactggattttcactcaatttctcccctctttcaacttctttcaagcacaaccaggtacctcatcatgggatctctaatgtcaacttacttagtctcccatctcttagaatccgaccgggacctatgcgcctccgggtttcttgtgcggccaaacccgagacggtggacaaagtttgtagcatagtgaggaagcaactagcactacccgaagattcttctgttaccggagaatctaagcttgctgcactcggagctgattctcttgacacggtcgagattgtgatgggactcgaggaggagttccgaat

SEQ ID NO: 11786 - DNA, 394 bp, Gossypium hirsutum
  Clone ID: LIB3135-037-Q1-K1-E9
gccaactgtgaataatgtgaattgacattcaatcgttccattccatttacgtataggggaaagacacttgagtaccttcgatcatattttaatgtcaaaaatggccgaggagcataccagtgaggcccctgcgttggagagcaacgttagcggtgaaagagcaccggatagcaaggtccgacggttgatctatttcatggggaagaaagaagaggataagcctcaacaggacgtgatcgtcaccgagtttgaaaaggttactatcgaatagacaaaggcaaaggaagaaggtgaggagaagaagaagcatggtctcctgtagaaacttcaccgggcagatagcatcagcttcagctcttcaagcgactaggaagaatgtggaggagaagagaag

SEQ ID NO: 11787 - DNA, 446 bp, Gossypium hirsutum
  Clone ID: LIB3135-037-Q1-K1-F1
atcatggtcttcacaaggcaagtcaaagacgaagaaaaagacaaatgttaggcataatcatcctaaagatgcccaacaaggaatacaacaggcttatgagagcatcagtaacgggcttgggaaatctgcttctgctttggttcagaaacctttgaaaaaataccaacgaggagccagtgcaagttctgctctggcaactgctgttagggcagttcctactgctgctatagcgccagcttccggttgtgcaagtgcaatacactgtgctctccttggactcagaaatagccttgatcctgaacgcaagaaagagtcgatggagaaatattttggtcccactctgccacaggatccaaattaatcttgcaagcaacagtgtcacttctgggatggtgtgatggatcaaagagtgttctttcctcgaggagaacacggatcgtcatgta

SEQ ID NO: 11788 - DNA, 383 bp, Gossypium hirsutum
  Clone ID: LIB3135-037-Q1-K1-F10
tcgcccacgcgttcgggaagcgcttggaaaagcggtagagtctattagaaccaagagatcgtttgaagccttcttccttaaagcttatgcattggccgactctagcatggatttttcatgttcttcaacagttatctcattgcttgaaaatgccttgaaatgcccctcggataatcttcggaaaggtcaagctctgaacaatcttggaagtgtgtacgttgattgtggaaaattggacttagcaaccgattgctacattaatgcccttaaaatacgacacaccacagcccatcaaggccttgcacgagtacattttctcaaaaacaacaaggctgcagcatatgaggaaatgactaaactgattgaaaaagctaaaaacaatg

SEQ ID NO: 11789 - DNA, 398 bp, Gossypium hirsutum
  Clone ID: LIB3135-037-Q1-K1-F11
tgatcgtccaaacacaggatcatccacaattgtagagtgggatgttaggctagagaacaagggtgggtatatttcttgtgatcaagttgaaccttcaagaagtgatcaagaaacaaacaagcccattgataagacacagaaacgtccggcacacaatcgagaagctgctcctagaagtcgtctacagaaaaaggcctatcatcaacaattagatatgaagcggttgcaactagctcatctggaacaagatctctaaagaactatgcagcaggtgatatacataaacaatccatcagatactggcgattttggactgtcgtgaaccgtcaactcagggagtactgcatttgagatgagaaatcgacactgcgttgaggtgcaaaataaacagacttgtg

SEQ ID NO: 11790 - DNA, 429 bp, Gossypium hirsutum
  Clone ID: LIB3135-037-Q1-K1-F12
tcgcccacgcgtccgctcgaaacctgggacttgctagatgtaaaaggtggcagtgttgcacaatttcagggccaagaaaggggagtcattattgcctctaccgatagatcaacagtccaacacagtgaggttgacagaacttactgtgtgggatttgtaagcaatccaaaaagggttaatgttgcgattacccgggccaaatcattgctcatgattgtcggaaatacacacatcatttgtaaggatccttactgggaaaaactggtgtggcattgtcatgaaaataactcatatcagggctgccccccaccagaaagggtgaaccatgactttgaagagtcatgttctgagactggattaagtaacgaaatagaaggttcacgttggaatgatgggacatgggattgttaatatgaaacaaaagctggt

SEQ ID NO: 11791 - DNA, 412 bp, Gossypium hirsutum
  Clone ID: LIB3135-037-Q1-K1-F2
ctttttggacaccgtgagaatcggagaccgagaatccgtctttttaggggttggttcggattttaatttttgtcgcaatggcggatgattcggatagtaagcatgcagcgggggagtctatgatgggcaagatcagcgagaagattcacggcacatgattcatcgtcatcttctgattcggatcatgacaaaccggcttccccttcctccgttaaggctaacagctatcggttgttcggaagagagagaccacttcatcatgtgcttggtggtggaaaacctgatgatgtgttcttgtggaggaacaagaagatttctgctggtgtccttggtggagcaactgcaatttgggtcctttttgagttgattgaataccacctacttactttaatatgtcacatttcgatactct

SEQ ID NO: 11792 - DNA, 335 bp, Gossypium hirsutum
  Clone ID: LIB3135-037-Q1-K1-F3
ggcgcgtgctgtggtggtcgcgtgggcaaggtgaaggatccatatggatacgtttggcttatctgctctcctgcgaagaagtgcggtgacgcggaggcttagatgccgttcgatctttgatctactttctgttaatctctgagctttaatttgtcagtaaaaaaaatggcttctagccggtaggattaggtgatcaacagtgatagactctttggtattgactcttttgatactgttcttcatgaacctacagttgtcagttgcagttaaatgaattttactagcgtttttatctctctaaaaaaaaaaaaaaaaaaaaagaaaaacaaaaaaga

SEQ ID NO: 11793 - DNA, 381 bp, Gossypium hirsutum
  Clone ID: LIB3135-037-Q1-K1-F4
caaagactcaggtgctcagaatttaattcctatggaattagccttgaagattactagcaagataagggcaaaagaaagatttgcggtttatattgttataccaatgtggcctgagggtgaccctacttcagcctccgtgcaagagatactctgttggcaggcacagacaattcaaatgatgtacggagtcgtagcacaagaattgaaatccatgggtatcgagaattctcatccacaagactacctaaatttctactgccttggtaatagggaagaagttcccaaaagttctgggccaagttcatcccaatgtaaccatagtgaaacggtaaccaaacagtgacactacctttgtcatttggttatatacttgggtgattg

SEQ ID NO: 11794 - DNA, 439 bp, Gossypium hirsutum
  Clone ID: LIB3135-037-Q1-K1-F5
atttttctctgctgcctagacagctttgtaatcgtatatgtactctgtatactactactatgtgaaaaccaagatgtcaggcttcttccagaccaggttctacttcggatacactttgatgttttgtcttggtttgggaatcctttgcggagctgttggttatcttggatctaatttgtttgtaaggaggatctacagaaacattaagtgtgactagaactttgctaatggatattagaaccagcagcgcttccacaagcattttcagttgtcgaggcaataatcatggataggtagcttcttgtcacgtatgaggaaccaagcaaagcctcaagatgaaactggaagccctgagatttttgttttgccttcgattttactcgcctgtaattggaagccctgatttagaatatagaaagtaactaaaatattaaacaac

SEQ ID NO: 11795 - DNA, 392 bp, Gossypium hirsutum
  Clone ID: LIB3135-037-Q1-K1-F6
gctaccttctcggagatatgacgattcttatagatgctggacttgagggattgaaggatgtggtagctctagccccacctcctgaaaatggctcaactgaaagataccctgaggatgatacttacttcatctgtacatgacctgagaacggccctattctgatatcaaatgacgctgtggctgttcttgacccacaaactaggcttgctagggacgaagtggcatactgtgtgtgcgcaccattggtaacacttatcttcaccgtgagctcaatgtctttgagctggacaagtgtaatataggatatttattgagcatgttgtcggaagactgatgggtacgttgtgtagcttatgcgcacttacgtacagttgaggattgaatgctcatca

SEQ ID NO: 11796 - DNA, 382 bp, Gossypium hirsutum
  Clone ID: LIB3135-037-Q1-K1-F7
tattctttctggcccgagagcaatttctgatttttcatatactagtactataactgctggtgtgcttggggatgctgcccactcgaggctgccacttgctgcgaacatcgctacagctgatgccctcatgactaccctgtctgcaacatacatgaaggcacctgcttgatgagcaagggcatttctttggcagtgaaagcactgaagcgcactccagcttaaccgctctgggcacattgaaagcctgggattgtaatgccgtagatgatgggttacaagggagatgatgaaagctcgacagggcttaacaatctccttgggtctaatatcagtatatggatggtgacaattatgtatatagtatcctatttatgacccatgg

SEQ ID NO: 11797 - DNA, 339 bp, Gossypium hirsutum
  unsure (1)..(339): unsure at all n locations; Clone ID: LIB3135-037-Q1-K1-F8
ctnnntttttttttttttaaaaaattaaaccccattttaatggcttatactttcacttacattttcatattaagggagccttttcatttaagacttatgcccatttatttattaagatacctgcccaccgtgaaagcgcaagggtcatttgggggaagttaactttacagagtctccagaataagacagaccttggcagcctttccggatgatctgaacgaagcaccataggcgcacctcttatacctctcatgtcacggaccgcgggccaccacacgtatctcgggccacacatccctcggggcacacacataccctcggcccactcatccctttttc

SEQ ID NO: 11798 - DNA, 412 bp, Gossypium hirsutum
  Clone ID: LIB3135-037-Q1-K1-F9
tcgcatgaaaccaagctacaaagcgctattagatgtttatgaagaaatggaacaattggggggtgagcatgggagacaatatcgtgtcgaatatgcgaaaaatgcgatgatacgacttgctcaatcttaccttgtggaggccagatggactcttcaaaactacaaaccatcatttgaggagtttaaggctaatgcattgccaacttgtggatatgccatgcttgctattacatctttcgtcggcatgggagatattgtaacaccagaaacctttatatgggcagccaatgaccctaacatcattcaagcttctacaattatttgtaggcttatggatgatgtggctggacacaagttcaaacatatgagagaagacgattgctcagcaattgagtgttacatggaagaatat

SEQ ID NO: 11799 - DNA, 276 bp, Gossypium hirsutum
  Clone ID: LIB3135-037-Q1-K1-G1
cgacaagcttggccttcattctctccgccagcgtcactggtatatccagagtacatgcgccacatctggtgaaggactgtacgagggactggactggctctcaaacaacattgcaaacaaggcatagatggcgtaattgacttgtcagtctcagaaaatgccagccccttttggaattattgatgtttctacgtccgttaaaatgttttggtttttcatgttcttttgtttcttgcaaactttgtcatttgttcttgtagtttaagaataattgat

SEQ ID NO: 11800 - DNA, 393 bp, Gossypium hirsutum
  unsure (1)..(393): unsure at all n locations; Clone ID: LIB3135-037-Q1-K1-G10
cggacgcgtgggcgactaacttcttttacaggaagagttatccacggactacttttatcaactttggatgatcctaataaaaaactttgcatagcaatcagtatggttgtagcagctattgcagtctacgactggccagaaagttggccagacttggtgccattctcctaaagttgattggtgatcaaactagcatgaatagaggagttgagaaggaaagaggatgcaatagcacaggtgaccgagattccgtttaacaattttctttattgttggaacaagtcttaaccaagatcaagancaaagtacttgactaagttatgtatgcaggcatgtcaatactttggctttatctaagcttggaccaacccctcgttggatattgggtcttct

SEQ ID NO: 11801 - DNA, 202 bp, Gossypium hirsutum
  Clone ID: LIB3135-037-Q1-K1-G12
cccacgcgtccggttgaacttgtggtgtctgcatccagctataagatgcttacacaaatggacttgctgaaattcctcaaggaccatgcctctgaattgggggagatattatcaagcagcataaaggaaataggttgcttaaaccagaatgtttacgccattaccgatcgtaccagatggatggatgccatcaaatgcttga

SEQ ID NO: 11802 - DNA, 327 bp, Gossypium hirsutum
  Clone ID: LIB3135-037-Q1-K1-G2
gtcgaccgaagaccctaattttcggaggtaaggaggaaaagaagaaatggcggtgccgcttctaagtaagaaaatcgtggagagagagggtcaagaagttcaagagaccccagagcgaccgcgaaatctccgttaagacaaactggcgtagaccaaagggtattgattctcgtgtcagaagaaagttcaagggatgtactttgatgcccaatattggctatggttcagacaagaagacccgacactatcttccaaatggctttaagaaatttgtcgtgcacaatgtcggagagcttgaactggtaatgatgcacaacaagacatatt

SEQ ID NO: 11803 - DNA, 429 bp, Gossypium hirsutum
  Clone ID: LIB3135-037-Q1-K1-G3
cttcgctggatcgggctcaggaatggcttttaacaagttgaccgacaacggagcaacaaccccggccggtctcgtagccgccgctctagctcatggcttcggtcttttcgtcgctgtctccgttggcgccaacatctcaggtggccacgtcaaccccgccgtcaccttcggtgctttcgttggcgggaacatcactctcttgcgcggcattctttactggatcgcccaactcctaggctcaaccgtcgcttgcctgttgcttaagttcgctaccggcgacctggctgtaccagcttttggattgtcatcaggtgtgggcgtgtctaacgcattggttttcgaaatcgtgatgaccttcggattggtgtacacagtgtacgccacagccgttgatcccaaaaagggaagcttgggacaatcgcaccattg

SEQ ID NO: 11804 - DNA, 446 bp, Gossypium hirsutum
  unsure (1)..(446): unsure at all n locations; Clone ID: LIB3135-037-Q1-K1-G4
ttttggaatcagcaacaacataccatcaacaggttcaagcctctgtgcaagaaactttgaagaagcatgagctgacaagacctcttgcaaccaaagagcttgagtggttttcggcatctgctctattggctctacctattattattttgttcagaatattttcagcaattttctgcaaaaagacaaagaagcgtgttcgacatactaatgcagtccaccatggtcgtcgtaagggcaaaagggggcacacagacaagtagactgcgtgtatttaggttttggtctctgaatgttgggaaatattagaggctaactggacgtatgtttttactttttaggggctctaggtgatcatgttgggtagggagctgtggtgttgcaattgggaagtatttaatcttctcttacccctcagggccctggntttaatattattattatttttt

SEQ ID NO: 11805 - DNA, 288 bp, Gossypium hirsutum
  Clone ID: LIB3135-037-Q1-K1-G5
gattaatgaggtctaccacacactttctaatattactactaggagaggaccctctgggcgcggcctcttttggtacgtattagtttaccaactatggcaagcccactacggctgtgtatgagccgacttatgagaaagccacatcttatgaacataaaccatctgtgtatgtacctacagagaaagaacaacctgtgcctgaaccactatttgttacaccaccatagatagagacaccagacgcctggccgcctctatatgaatctaccggcaaggaaaatgccccac

SEQ ID NO: 11806 - DNA, 434 bp, Gossypium hirsutum
  Clone ID: LIB3135-037-Q1-K1-G7
gtaactactataaatcctacccttgtgggtgatcctcggccttctaaacactgtagggggtttgcacccagtggatgtgttccttctaagattgggttctgtagttcacatgaactgaacggtgaaaagttctctggttctgggaaatcttgcaaccagattaatgcttctgaaacaaggatcagtatcacatctgaagatggtttgcatgaagatcatgaacatgaaaaggatcccactttctcttctagtggaactgttcttcctgaatcacacagtacatgcttttatcaatgctgctttgggtgcctacatgccctccttagttggatgccaaaggctctggttactgaatggacatcagatgagagccattggacagctgttgatgtatatgaaacagctgcgttattgtctgcgcatcatctttcaac

SEQ ID NO: 11807 - DNA, 429 bp, Gossypium hirsutum
  unsure (1)..(429): unsure at all n locations; Clone ID: LIB3135-037-Q1-K1-G8
cccacgcgtccgcccacgcgtcctttcacgcgtccgctgacttgcagggaagaatgggaacagtttgggatggtggttccatggtgttcgcaagtggaagtattgtttcatccatcgttgggttgcttcgtgacgcattgtgggtggaactcgacgttggagagcatggcggccggtgtaccggtggtggctttccctcaatggacggatcaaaggactaatgcgaagctgattgaagatgtgtgggggaatggggtgagagtgagtgctaatgaagaagggatggtggaacgtgatgagatcgataggtgcttggatttggtgatgggggatgataagaaagggattgaagtgaagaaaaatgtagagaaatggaaacggttagccagagaagcccgcatggaaggcnggctccttggatatgaagct

SEQ ID NO: 11808 - DNA, 407 bp, Gossypium hirsutum
  Clone ID: LIB3135-037-Q1-K1-G9
gctacttaaccatttcccaaatctcctccctcctcttctttagcgtccttttcatttccgctcatgcagcgcgctttgaaatccgcaatgagtgctcctacaccgtctgggcagcagcctctcctggtggtggccgtcgcctagaccctcggcaaagttggaccatcgatgtgcctgctggcactggtatggctcgtatttggggtcgaaccaattgcaatttcgatgccagtggtaggggtcattgccaaaccggtgattgtggtggactccttcaatgcaaaggttggggtgtacctccaaacaccctggctgaatatgcacttaaccaatttggaaacatggatttctacgacatttccttagttgatgggtttaacatccccatggtgtttgggccaactaat

SEQ ID NO: 11809 - DNA, 426 bp, Gossypium hirsutum
  Clone ID: LIB3135-037-Q1-K1-H1
atgctttcatttctttgttgagattgaaataaagttatttaaaaaagggggtaggtataatgcacgcaggccaagtcaagaaaaggacttccttacttttatttcatagtagtcttaatgactagtagtttgaagccttaaccggtttttttcggcgctcggtttcttcgtcttaagtcaagttcagtttactttttcgattttgaatggaactcttagtcgagctgatggcgagatcgattttttgttcgaggttcaagagaaaagagaggaaccaccgcccaatgatgctttcacggtttttcaacccgtcatggctactctagactccgatgtccccatggtacccgtcggcgagtcttccaacagctacgccgcttcctcttccactaagaaacccaagcgtttcgagatcaaaaagtggag

SEQ ID NO: 11810 - DNA, 70 bp, Gossypium hirsutum
  unsure (1)..(70): unsure at all n locations; Clone ID: LIB3135-037-Q1-K1-H10
tcgcccacgcgttcgcccacgcggtccgntaaaatttaaaaaaaaaaaaaaaaaaaaaaaaaaaaggaaa

SEQ ID NO: 11811 - DNA, 232 bp, Gossypium hirsutum
  Clone ID: LIB3135-037-Q1-K1-H11
acccacgcaaacgcccaagccgttcgcgacccagctccacaccttagaagctgccgtgtcatactgcagcaagcatgcagctgccacgagagtttactttgttcgctgtccttatgcagaccaatcaaatagcgctgtctcatataccaaaggctaacaacctggcatggtggcaactacattctacgacatcgatatacaaaaacatacccgctgtatttatgatggcagc

SEQ ID NO: 11812 - DNA, 381 bp, Gossypium hirsutum
  Clone ID: LIB3135-037-Q1-K1-H2
cacacttgataatattgctactaggagtgttttctcttgccactaccgctgttggtacctagcacgctcgccacgatgggaagccgcctactttactttttaaacctgctaaggtgaaagcctccaccttatgaacactcatgcctataaacctcctaacgcgaaaccttcaccttatgaacataagccctctgtctatgaaccaccaaagaaagtattacctgagcctatggcaacagcttatacaccttcaaagaaagagaagcctgaacccgaaccaccagtctatgaaccttccacgaatgataagcctgagcctaatacaccagattatacacgcacccatgaaagagaagccgtgagccataccaccagtatatg

SEQ ID NO: 11813 - DNA, 396 bp, Gossypium hirsutum
  unsure (1)..(396): unsure at all n locations; Clone ID: LIB3135-037-Q1-K1-H3
cccacgcgtccgcccacgcgtccgtggccgattcggtacctttggcagttgaagagtaaattgaagttgccggggaaagaattgggagggatttccgagttcttgagaataatctttgttgctttggcattttgatccaactcttttgttttctctgctcttttatgtgtatttgtctttgttcatgttttgggcattgtttcaacatctgggcgttgagcccatcaattctagtaaagtaaaacatggcaacttttgcttcanaaaaaaaaaaccaccaaacaatgatgctttaacggattttaaacccgacattggctactatagacttcgatgaacccatggtacaccgacggcgaatcctacaacagtttacatcgttaaaaggggggcctt

SEQ ID NO: 11814 - DNA, 297 bp, Gossypium hirsutum
  Clone ID: LIB3135-037-Q1-K1-H4
aaccctccgcttcaagatattttttgggtgttaacttttgtatttaatgtttggatatagtatataatatatgttcattatcttcatggatcttttttaaaaaaaaaaaaaaaaaaaaaaaaaaaaaaaaaaaaaaaaaaaaaaaaaaaaaaaaaaaaaaaaaaaaaaaaaaaaaaaaaaaaaaaaaaaaaaaaacaaaaatttttgcttttgaaaaaaaagaaaaccagacacaatattatatttaataaaaatgggtcgcgctatgaaaatacttaaattttataaccctgatat

SEQ ID NO: 11815 - DNA, 447 bp, Gossypium hirsutum
  Clone ID: LIB3135-037-Q1-K1-H5
gctcaacgatgtctaccacacacttgctgatattactacttggagtggccgctctagccactccctcttttggtacctatgagtctcccaactatgggaagccccctactcctgcttataagcctcctaaggtgaaacccccaccctatgaacatacaccacctgtctatgaacctccaaagaaggaaaaacctgaacctaaaccaccagtttatacaccaccaatgaaagagaagccacagcccaagccaccagtatatgaatcaccaaaaaaggaaaagcccgaaccaaagccaccagtttatacacctgcaaagaaagagaagcttgaacacacaccaccattatatgaaccaccaaagaaggaaaagcctgagcctaagccaccagtttataccccaccaaagaaagagaagcctgaacccaagccaccactgtatgaaccac

SEQ ID NO: 11816 - DNA, 443 bp, Gossypium hirsutum
  Clone ID: LIB3135-037-Q1-K1-H6
gtgggattgagggataagctcttgctatgggctctactaatgtttctgtgctgctatgcttgggagaggttgttaagatgggcattccctggtaaaatcccagcttggaggaagcgccaacgtgtggctgctgctagttctgagaagaagctggtctaagtgaacagagaattctccctctactaatgattttggaaaaggatgacaccggtcagattattatatttagtgaattagctcaagatatgcaactcctttttttttttaatttgatatttgttaaatcatgttttgcttaatcctttaggacgtggaatctgttaaatggtattttgctcatagaatgaggaggttattctttaggaaagcataaactttgattttgttatttttgcaaagccaacttgaaagaatagttgtttcaacacttaaagaaaaacaaa

SEQ ID NO: 11817 - DNA, 315 bp, Gossypium hirsutum
  Clone ID: LIB3135-037-Q1-K1-H7
gagggattgagggataagctcttgctatgggctctactaaggtttctgcgctgcgtgtgctggtgagaggtctggacgatcgccattccctggtgaaaacccaacttggacgaagcgccaacgcgtggctgttgctagctatgagaagaagctggtctaaatgcacatataattctcactctactactgaatttggaaacggatgacaccctgcagaatattatatttagtgaatcagctcgagatatgccgctgcttcttttttctcatttgatatatgcgagagcacgtggtgcttaatccttttagactggg

SEQ ID NO: 11818 - DNA, 250 bp, Gossypium hirsutum
  Clone ID: LIB3135-037-Q1-K1-H9
cccacgcgttcgcagttcaaaggatgtgaaatttgcaggtggggggcctataaagagggctgctgaaagagtcatgggtagcagggtcttttgcaaataaagccaattcacactatggatcaaggctccttgctgcggcgaaggtctaccatctgttaaccggagagaggatgcgtgcccttttaaatgatagaggaccaccttccaagggatataatgagaaactgtttgctcacccgaaatgcgtaaa

SEQ ID NO: 11819 - DNA, 428 bp, Gossypium hirsutum
  Clone ID: LIB3135-038-Q1-K1-A1
gccaaaatgccgccaaaacttgatccaagccaagtcgtcgacgtcttcgtccgcgtcaccggcggtgaagtcggagcacctagttcactcgctccgaagatcggtcctctcggtctctctcccaagaagatcggagaagatatcgctaaagagaccgccaaggaatggaagggtctccgcgtaaccgtcaagctcactgtccagaaccgccaggcgaaggtcatggtggtaccgtcggcggcagcgctggtaatcaaggcattgaaggaaccggagagggataggaagaagaccaagaacatcaagcataacgggaacatcggactcgatgacgtcatagagatcgctaaagtaatgaggccgaggtccatggctaaggatttgagagggacggtgaaggagattctgggcacctgtgtttccgttgg

SEQ ID NO: 11820 - DNA, 392 bp, Gossypium hirsutum
  Clone ID: LIB3135-038-Q1-K1-A10
gtctcatgttctccagctctattgtcttcactcagcttctactgattttgatttgacaggacaattggtatggcctggtgcaatgcttttgaatgattatctctctaaaaacgctgagatgcttcaaggatgttccgtgatcgaattaggctctggtgtgggtatcactggcatgctctgcagcagattttgtcgtcaaattcttctgactgatcataatgaagaagtgctgaagatccttaggagaaacatagagctcaatgcatcttctgaaaatcctagttgttgtgctgcactagaagctgagaagctggagtggggaaattctgatcagattaacaggattttacacaaatatcctggaggttttgaattgattcttggtgctgaca

SEQ ID NO: 11821 - DNA, 421 bp, Gossypium hirsutum
  unsure (1)..(421): unsure at all n locations; Clone ID: LIB3135-038-Q1-K1-A11
cccacgcgtccggcttggaggttacttagcactaatgactgtgatattcttctgggcaatgaaagacaccaatttcttctcgaacacatttaatgttagatcactgaggcatagtattgatggtgagagagaaatgatggcagctttataccttcaagttagtattgtgagtcaggccctcatttttgtcacaaggtctcgcagctggtcctactttgaacgccctggacttctactagtcagtgcctttctagttgctcagttggtggccactttaatagctgtgtatgcagactgggggtttgcaaggattaaaggtatgggttggggatgggctggtgtaatctggctatacagtgtggtgacttttatcccactggatnttatcaaatttgcaatccgctatgttcttagtggaaag

SEQ ID NO: 11822 - DNA, 340 bp, Gossypium hirsutum
  Clone ID: LIB3135-038-Q1-K1-A12
ccacgcgttcggccacgcgttcggccacgcgttcgcccacgcgtacgtccacgcgtccgagggtggtgctaagaaaggggtgatctctgcccctagcaaagatgcacccatgtttgtaatgggtgcaaacgagaaagactacaagccagagcttgacattgttttcaatgctagctgcactaccaattgtcttgctccccttggtaaggttatccatgaccgatttggaatcggtgagggtctcatgactaccgatcatgccattactgctacacaaaagaccgtcgatggaccatcaatgaaagactggagaagtggtagagccgctttcttcaacatc

SEQ ID NO: 11823 - DNA, 349 bp, Gossypium hirsutum
  Clone ID: LIB3135-038-Q1-K1-A2
tgatggcagccaaaacagtcacaagaggaaaagggatactgcttcctatagtgaatgcagtgtggatggaaacattataaagattagattttccttgaaaaagccccgggcatctgatgcatcaatcagcagcgaagaaccagcctgctctagttctggtaggacagattcaattcaagagccaaattgtaccattgcttctgtgcctgaactgaaactgcagcatgatgatggaaggaaggagcaaggctcctcttcttctggaacattgctgaaggctgcattgcagtataaaaccttcattgaggattggatgccacctcttctcgaagctgagctgaaatatgat

SEQ ID NO: 11824 - DNA, 341 bp, Gossypium hirsutum
  Clone ID: LIB3135-038-Q1-K1-A3
cccacgcgtccgcccacgcgttcgcccacgcgtccggggaatggtttctagcattctgcagattgttattgctcctattactgcaggattgcttttgaatcgggtgttccctcgtctttgtgaagccatgagaccatttctgccgccgctttctgtacttgatacagcttgttgtgttggagcgccccttgctattaacattaattcgggtctgtccccatttggcttaactgattcggtgctcattgctgcattccatttatcagcattcattgctggttatttcctcaggggatcactcttgcataaagcacctgatgtgaaagcattgcgaagaacac

SEQ ID NO: 11825 - DNA, 386 bp, Gossypium hirsutum
  Clone ID: LIB3135-038-Q1-K1-A4
cccacgcgtccggaaaatcaaaacagaaaagatctaattttcctatccccttcaatcggccgaattcgtcggttccttgccctcaaccgccaattcgccaccgtagttggcagatagcgtcaaatgaaggccgaacccgatcctattggaggctctatctctctaatcccccttttagcttcgattacaacgaagcaaatgaggaatcggaggcgttcttccaaaaagataaggcccttttttttgtttatatttctatacgagagaactatatggagggataaaaagaaaaaaagaaatgaatcgaaaacctaaagtaaatctgaaaagaccgtttttcttttcttctatttttttttttggatttcaatctcaacatctgtgtg

SEQ ID NO: 11826 - DNA, 428 bp, Gossypium hirsutum
  Clone ID: LIB3135-038-Q1-K1-A5
gccaaaatgccgccaaaatttgatccaagccaagtcgtcgacgtcttcgtccgcgtcaccggcggtgaagtcggagcagctagttcactcgctccgaagatcggtcctctcggtctctctcccaagaagatcggagaagatatcgctaaagagaccgccaaggaatggaagggtctccgcgtaaccgtcaagctcactgtccagaaccgccaggcgaaggtcatggtggtaccgtcggcggcagcgctggtaatcaaggcattgaaggaaccggagagggataggaagaagaccaagaacatcaagcataacgggaacatcggactcgatgacgtcatagagatcgctaaagtaatgaggccgaggtccatggctaaggatttgagagggacggtgaaggagattctgggcacctgtgtttccgttgg

SEQ ID NO: 11827 - DNA, 286 bp, Gossypium hirsutum
  Clone ID: LIB3135-038-Q1-K1-A6
gccacgcgtccgcccacacgttcgcaaatatgagaaatcaggtaatgagcaatttttgaccgaacttagcaaatggaccttccatgaaagaggtcatcttaaggctgtgtatgtaaaacaccacaaagtcgtagaaacagattaacctgctttgtacaggattaatgatgagttggaatactcagttgagatctatgtgtggtctggaactagctgggagccatacattactgacgatgtccaagtccagttttacatgatgagcccccatattttgaaaactttg

SEQ ID NO: 11828 - DNA, 393 bp, Gossypium hirsutum
  Clone ID: LIB3135-038-Q1-K1-A7
acggtcttgttccactctcgtataccatgggagttgttcatagcaatggtgctgatatttgggctcccatcaagaccacttcaccaaaatttgacaagcctttctcacaattcaattgacatattttccttcatcggtgaccggtaggctttgaacgtttcattggaaccggttttaaaggtaaccaacttaatcttgaatgcacaaaattttcctaatcagatgcaaaatttatagcacaatgcactgacataggatgttagtatcgagaaactagtaggattgtgtattcagaaatgcagacctgtgcctacttagttttaagccagtgatctgcatttaatatctgattgaattatagaaattaattgatctctcctaatcatgtattgt

SEQ ID NO: 11829 - DNA, 137 bp, Gossypium hirsutum
  Clone ID: LIB3135-038-Q1-K1-A8
gcggactcagccacacatgatatacaatgttcagtgttcccgagcaatcgggggaaccgtgggggaggaaccctgaaaaagcacaatcgacaactcgtgtgaaagagaactctacaatcttgccgataccaacacta

SEQ ID NO: 11830 - DNA, 273 bp, Gossypium hirsutum
  Clone ID: LIB3135-038-Q1-K1-A9
acgatccctgttcccgacggaccttacaccggttttttttggaacacgcaaccaaccaacgctccttggagctgagtcaatgtggaagatgacaactcccttggggatctggatggtcttacggaatctggtttaaagaagaaggggtgatatgaatcatgcaacccttttagctccaaagcatgtatttgagaactctgtgtttggataggctaaatgacaagtttatggagctggaatctatttgggtacctttttaggacgatccaaaac

SEQ ID NO: 11831 - DNA, 352 bp, Gossypium hirsutum
  Clone ID: LIB3135-038-Q1-K1-B1
gattgctgctcatttggaagcattagagttcgatgtctccctcgttgctacggagtggtttctatgcctttttgctaaaagcttgccttccgagacaactctgcgtgtgtgggatgtccttttctacgagggagcgaaggttctttttcatgcagctttggctatatttaagatgaaggaagaagatttacttctagcacatcaggtcggcgatgttattaatataatacaaagaactacgcatcaccttttcgatcccgatgagttattgacggttgcattcaataaaattgggtttatgacgacaaacactatatcgaagcaaaggaaaaagcaggaacccggagtaatg

SEQ ID NO: 11832 - DNA, 233 bp, Gossypium hirsutum
  Clone ID: LIB3135-038-Q1-K1-B11
gttggatgtggtctaatttccatctcaagcagaatatgatagacttttatgagatgagaaagagaccctcttatcgttctttggttgagattacaattaaaagaaatgggaaaaaattcctgcaatggcaatatgaatgtgaacgaattctttagacctcttagtttttgttttgttattgtttccatggtgtgagtttgcaggcattatttaaatttgtgttgaatctgagt

SEQ ID NO: 11833 - DNA, 375 bp, Gossypium hirsutum
  Clone ID: LIB3135-038-Q1-K1-B12
cccacgcgtccgaaaagcaaaagaaccctaccgacgatgttccggcaagcgtcacgcctcttggctcgaactaccaccccatggaggggaagtcgagcattttcgtcagatgtaccagccacacccgctcaagattcgagcttcatcgaatcatggtccaaagtcatacccaacttagaccctcccaagacaccatcttctttcatgacccctcgccccgccaccccttctgctatcccttctaaactcaccgttaactttgttcttccttatgcatctgagctctccgctaaagaggttgacatggtaatagttccagcaacaactggacagatgggtattttgcctggacatgttcctacaattgctgaactg

SEQ ID NO: 11834 - DNA, 436 bp, Gossypium hirsutum
  unsure (1)..(436): unsure at all n locations; Clone ID: LIB3135-038-Q1-K1-B3
cccacgcgtccggggatggccaaattaaaaacgattaccatgattatcaatgaaactttacggctctatcctcctataagtggcgtgataagagaagtaggaagagaagtccaattaggaaaacttgtcctgcctacacattcagaggtcgacatgcgaatcatagcacttcaccatgatcctgacttatggggagatgatgttaatcttttcaaaccagagaggtttgctgaagggatagcgaaagctactaagtacaatgcagctgcatttatgccttttggattgggacctcgatcttgcattggcatgagctttgcaatcactgaagcgaaaactgcactttccatgattctacaacgctacactgtcaccgtcttccctacctatgntcacgcacctgcaccacgtcttacactcaagccacaacatgaga

SEQ ID NO: 11835 - DNA, 458 bp, Gossypium hirsutum
  unsure (1)..(458): unsure at all n locations; Clone ID: LIB3135-038-Q1-K1-B5
atcccaccagaccaacaacgtttgatctttgcagggaagcagcttgaggatgggaggaccttggctgattataacatccagaaggaatcgacccttcaccttgttttgaggcttcgtggaggcatgcagattttcgttaagacattgactgggaaaacaatcacattggaggtggaaagttcggatacaattgataatgtgaaggcgaagattcaggacaaggaaggtatccctccacatcagcaaaggctcatctttgctggaaagcaattggaggatgggaggactttagctgattataacattcagaaagagtccacccttcaccttgttcttcgtctccgtggtgggcagtgagaagttaattcttcttttgtctttgttctagcttaagatggtcgcaaataagcctttaggaaagngcctattttcttatctcttaatgtaacatggtaagc

SEQ ID NO: 11836 - DNA, 406 bp, Gossypium hirsutum
  Clone ID: LIB3135-038-Q1-K1-B6
aacacttctgcagtgaccaaaaaagcttcattgtctcttctatcgaaaaccccatggctgctcttaagctagtttgtgctctagtgttgtgcatgttggtggttgagcccattgccacaaccaccataacatgcggtgatgtgacaagcaaagtggccggttgcttatcatacttgcagaacggatggaacgtgccgaatgcttgctgcgacgggatccggtccctgaacaacatggctcgaaccacccctgaccgccaaaccgagtgtgggtgcttgcaagctgccgctaaggctgtcaaaattaaaggcaacttgactgatacccttccagccaaatgtactgtcaacatcccttacaagatcagcacttccactaactgcaaaaatgtgaagtgagatggatg

SEQ ID NO: 11837 - DNA, 439 bp, Gossypium hirsutum
  Clone ID: LIB3135-038-Q1-K1-B7
gttggtgaaggctttccaaaagacttactacaatagctatggaggtggtgccaacgagctccaagatgggttcaacaagggcaccggcttgggtgctgagatcattggcaccttcgttcttgtctacactgtcttctcagccactgatcccaagaggagtgcaagggattcccatgttcctgtgttggcaccacttcccattggatttgccgtgttcatggttcaccttgccactatccctatcactggcactggcatcaatccagcaaggagctttggagctgctgtgatttacaaccaagaaaaagcttgggatgatcaatggatattctgggttggacccttcattggtgctttcgttgcagccttttaccaccaatacatcctaagagcagcagcgaaagcaccaatgaaggctttccaaaagacttactacaat

SEQ ID NO: 11838 - DNA, 438 bp, Gossypium hirsutum
  Clone ID: LIB3135-038-Q1-K1-B8
gcgccacgagacagcctataccaaaatcgttgaaaagctgtttgagattgatcctgatgaaacagtcctggcatttgctgacatgatgaagaagaaaatcgccatgccggctgagttcatctatgatggcagagattataacttatttgaccactactcagctgttgcccaaagaatcggggtttacactgctaaggactatgttgatatagtagagcacctggtggatcgatggaaggtgaaggagctagctgggctttcagccgaggggcgtaaagctcaggactacttgtgttcacttccttcgagaattagaaggttagaggagagagcgcaagaaaaggccaaggaagcacccagtgtcccattcagttggatatttgatagagaagtgaaactttaggtcatgaaatacagttaagactcctgcaatgcatt

SEQ ID NO: 11839 - DNA, 313 bp, Gossypium hirsutum
  Clone ID: LIB3135-038-Q1-K1-C1
acaattcctgctttgaacatttgagaccatttatggtggtttagggtttgatcacagtgagaaagaccgatgggaggtggtcattgagggagcacaacttacaaaggtgtaactttgcgccacccaaagagatggcacgtcgttacctgtactggcttgtgcattgtcatgttgttttcagtcctgaacaaaggtaaccaggatgggtctgtattgttgggatagcaacacccttgctaggaccgatatgaccattatcatggccatggagaccaccattgatctgaagaggcttatgtggtcatgggtgcct

SEQ ID NO: 11840 - DNA, 339 bp, Gossypium hirsutum
  Clone ID: LIB3135-038-Q1-K1-C10
agaaggtgaagtgttgactgagaagattggtgtagagacatgggttcgtgccctcagtgtttcctcattgccaacaactcctgcagaacgtttttccatcctcttcaaagaacgagctaaatgggagtggaaagatttagagccctacattagggatctaaatgtacccgggctttcatcggaagctttgcttctgaagtacactcggagatctcaaccgagcattgatgcggaacctgtttttagtgctagatagatatatgtatatattgaggcttggctttctgagggtgccattgtcgtggtttcatgcaatctagtgatttagtactagaagaa

SEQ ID NO: 11841 - DNA, 369 bp, Gossypium hirsutum
  Clone ID: LIB3135-038-Q1-K1-C11
tcgaacgccatcaacacccatcaacatcgtcaatcgtaagttcaattgtaccacaacggcggcgattacaataataatttaaatattgattcaatatacattaagacatggtagtttctgacttggtccgtgaactaaaaagagtatctactctctgtctagcattaaggcatgtaggaccacaactttcatatatggtgattcgtatgtggtgcataaaggcatatcatcaggaacttgttcagtgcgtttaaactttttttttttttcatttcatgtagattagaaagcagattccattaaggtaaaatttgattcttttggtacaaaaacctgaaacaggaaaagtccttttttttttttctataa

SEQ ID NO: 11842 - DNA, 393 bp, Gossypium hirsutum
  Clone ID: LIB3135-038-Q1-K1-C12
cccacgcgttcgggcgcacgttggcgtcgtacgactggtcaagaagtttactcgccggtccttttagccttcacatatgagaacatggagacctggaaatcatcccatttgacaaaagcaactgccatggatccaggctatactttgccactcaatgttgctttaatcactcttcaggaattgagtgatggaactgcactccttcgtttagcacatttatacgaagaggctgaagattctacatattcacaactagcaaaagttgagctaaagaagatgttcaatggaagaacgataaaggaagtacaagaaatgagctttacaacaaatcacgtgaaatcagagatgaagaaattatcatggaaagtagaagggtgacaatggaaacaacct

SEQ ID NO: 11843 - DNA, 315 bp, Gossypium hirsutum
  unsure (1)..(315): unsure at all n locations; Clone ID: LIB3135-038-Q1-K1-C2
gcccgtgtttgcagagtacatcccgcagagaggctatcatctccatgacgttaaagcttatggccagatgcttaaggatgctggacctgatcacgtcattgcagaggaaccaacccaccagcttatacacgatctggggcgtggattagacaaaactgagaaggacaaggattccttcatcaccgacttttatgaggaagactacgacnaatatccctgggggacggaacgcaaagctgattaggaccaaatttggcgagctaagatggggccttttcattggcaacaaaaactaagtactgcttcgtctctaat

SEQ ID NO: 11844 - DNA, 340 bp, Gossypium hirsutum
  Clone ID: LIB3135-038-Q1-K1-C3
cttcacttgtggaagaagacaaacttgatctagcaacatcactctcttgagaaggccaaggcaaaaggagtctctctcttgctcccctctgatgtggttgttgctgacaagtttgctgctgatgctaacagcaaggtggtgccagcatcagggatcccagatggttggatgggcttggatattggacctgactccatcaaaaccttcagtgaatctttggacactacccagaccattatctggaatggaccaatgggtgtgtttgagtttgagaagtttgctgccggcactgaggcggttgccaagaagcttgcggaactcaatgggaagggagtgacaa

SEQ ID NO: 11845 - DNA, 236 bp, Gossypium hirsutum
  unsure (1)..(236): unsure at all n locations; Clone ID: LIB3135-038-Q1-K1-C4
aaaaactataatttggtacccttntgcttcacttgattggtgaatctccatggctgccaaggtttttgcatattntgtggcttttgttgctgtcttcagcgtcgccaaatctgaccctgatcccctccaagatatctgcgtagcccntacatcttcaatggtgaaggtgaactgatttgcatgcaagaaggatgccgatgtaacggaaaatgatttcttctttagtggcttcaaca

SEQ ID NO: 11846 - DNA, 418 bp, Gossypium hirsutum
  Clone ID: LIB3135-038-Q1-K1-C5
attttgatttggatatttctcgggaccacatgtctggtacatcatcggcaggacaaaatgctgtcaggtctgaatcttcttcaaggctacatgcttcaaggccagatgcaacaccaatggattttgttgtgcgtccgcaatctaagattgatccagatgaaattagagctcgagcaaaacaagttgtacaagatcaacgtcgtttaaagatgaataagaagttgcagcagttgaaagcccctaataagaagcagctgcatgcgtctaaacttactgttgaggatcgtggtatgcttaagcaccttgtaattgtaatccacagtccacataccggaactattagctctctattttccacaagaaaccttccttgaagcaaatgtttctcgttttcttatccaattgattccgatcattg

SEQ ID NO: 11847 - DNA, 428 bp, Gossypium hirsutum
  Clone ID: LIB3135-038-Q1-K1-C6
gagcaaagaaaaccaaagaacccaaaaccaagaaagctgcagctcctcggaaaccacgggctgctcctactcatccaccttacgaagagatgatcaaagatgcgatcgttactttgaaagagaggacaggttcaagtcagtacgccattgctaagttcattgaagagaaacagaagaatcttcctgggaatttcaagaagcttcttcttgtccatttgaagaagcttgtggctgctgggaagttggtcaaagttaaggcttcgtataaacttccatcggctagatcttcgaagacggctactgctgcttctgctcctgcaaaaaagaaaacggctactaactaagtcaagtctaagcctgcctcaaagcctaaggaagggaagagtacaaaagctactcctaaagcgaaggccaagacaaaaactact

SEQ ID NO: 11848 - DNA, 287 bp, Gossypium hirsutum
  Clone ID: LIB3135-038-Q1-K1-C8
cccacgcgtccgctttattttttcttacgctttaaaatctataattgtttacctttttgcttcacttgattgttaaatctccatggctgccaaggtttttgcatattttgtggctttggttgctgtcttcagcgtcgccaaatctgaccctgatcccctccaagatatctgcgtagccgatacatcttcagcggtgaaggtgaacggatttgcatgcaagaaggatgccgatgtaacggaaaatgatttcttctttagtggcttcaacagccaattgccgggaactc

SEQ ID NO: 11849 - DNA, 151 bp, Gossypium hirsutum
  Clone ID: LIB3135-038-Q1-K1-C9
cccacgcgtccgctctttgagtttagcatatatattaaagtttgacacaatcttgctgaagaaagggaaaaaataaaaaaaaaaagagacaaacggcgttcagacatgggaatacatgccttcgtacgcgaacaaacaaagagaatatagg

SEQ ID NO: 11850 - DNA, 350 bp, Gossypium hirsutum
  Clone ID: LIB3135-038-Q1-K1-D1
gcacatttatatgccgcattaaaacatattttagtgcctttgttctcacaaaggttagtttgctgatttcttgtacattactttgtgaatcaagaattatggtgagagaaagaaaagaaaaaaaggtaaaaggaacacgacttgtcagctgtttttttactaactggtgtctggtttagaaagaaatccaaaatggaaggttgcagctcttctataggctaggcaaaaggaggttatatctaatacaaatgtcctacgaatgcttgtctggtcgtgtttgtttcacttattcattctctgcaatgggaatgccatctcatatataacattagatactttttgcgtgtgta

SEQ ID NO: 11851 - DNA, 380 bp, Gossypium hirsutum
  Clone ID: LIB3135-038-Q1-K1-D10
cgatgaatctttgttctaaatgttacagagttttccgacttaaagaacaacaacaagcttcttcgggtaaatcggctatctctacctctccttcatcttcgtcaacggcagtcgaatctgcttctcaggtacctctcctgactctccctgaagtcaaaggagttccgctggttgtttcggctgtcgcgatctctccggtggcggaacagaaaccacaacagcaacagcaacagcaacagcaacaacaacaacaacaacagcaaccgactcggtgcactgtttgcaagaaacgggtcgggttgaacggattcaagtgcaagtgcgggaatacgttttgcggggcacacacgtacccggaaaatcatggatgcacgttcgat

SEQ ID NO: 11852 - DNA, 339 bp, Gossypium hirsutum
  Clone ID: LIB3135-038-Q1-K1-D11
ggcgtcccaagctgctaacattgagagaccgacggctgtgctaatgttccaatattttgccgccctggcgtgggagacctatggatttacatgtggccggacactatacaaccttacatgcaaaaaccgcgcgaaccctatgctggatgtgggctaaccaatcaagggaccgataggaactaattgattacaaagaaagtgggaaaagctcatagctttcttgttacacagacgagctgactacagacccgctggcaccactgtgggcttacaatcaaagacagcgctgtcaaaaggctttactccaccaactggggattaaatgaacgcttagaaaaa

SEQ ID NO: 11853 - DNA, 348 bp, Gossypium hirsutum
  Clone ID: LIB3135-038-Q1-K1-D2
cccacgcgtccggcttatgaatgttgaaggtttgactatctaccatgtgaaaagccacttacagaaatatcgacttgccaaatatatgccagagaaaaaagaagagaggaagacttcttctagctctgaagaaaagaaaccagcttcaagcagcaatgaaagcgatggaaagaaaagagggggaatgcatattacggaagctttgcgcatgcagatggaagtacagaaacaattgcatgaacagctggagctacaaaggtcgcttcagttacgcatagaagaacatgcaagatatttgctgcatctggttttcaaataataaataaaaaaaagatgattttcactttc

SEQ ID NO: 11854 - DNA, 439 bp, Gossypium hirsutum
  Clone ID: LIB3135-038-Q1-K1-D3
gccgcctcccccaagctttgaggtttttttaggttgctcttggaacatttagcagccaaccaaaaatggttctccaaaacgatatcgatttgttgaatcctccagcagagcttgagaagaagaagcacaaactcaaacgtcttgtccagtctccaaattctttcttcatggatgtcaaatgccaaggctgtttcaacataacaatagtgtttagccactctcaaacagtggtggtatgtggtaattgtcagactgttctttgtcaaccaacaggaggaagagctagactcaccgagggatgctctttcaggaagaagggtgattgatctcatatcttgctactttatgattcacaaaaacaaaaggaaagtaatctttggatcaaatatgggaatcatatgaataatctttttcatgtgtttcaagtatgacatatggt

SEQ ID NO: 11855 - DNA, 342 bp, Gossypium hirsutum
  Clone ID: LIB3135-038-Q1-K1-D4
gcagatccaccctccttgttcaaagatagatgttcatcttcattttgtgtcttatttaggatattatgatgacatttgatgggcttatttaggatatctatttgtgtcttatttaggatattatgatgacatttgatgggcttatttaggatatctattgttggattcaacaaatttcctcaagcatatcatgatgagtcaatgatataatttgaaatgaatggatttttttgattgatagattcattaaggtattaccacttatttgtgggaatgcttagtgattatcaccatagatacatttactcaagtattaaccacttgtttgtctagttgacacaa

SEQ ID NO: 11856 - DNA, 413 bp, Gossypium hirsutum
  Clone ID: LIB3135-038-Q1-K1-D5
gccacgcgttcgatactaatgtacgcccgacaattaacatgcacggcacttcaattgtctttatcacggaaaaaagtctgggacagagtggaaactggggccgacgaactggatggaggagagcccttggactgtgtagttgcaacatattcctatacctgctcacactcgaaagcaccacatctgtagaatcaggatcattgcgtctatccacggaacgcacactttgacgtaccatgaatagaattcatttctgataacggtagataaatgaaaacaacagtcgcctgctcccgttgataatccaatgattggaaaccatattgccttctatctgacactctatactcctctggatgaaagaaacaatagctaggagtgtctatgggtttttacaataaatcagacttgac

SEQ ID NO: 11857 - DNA, 457 bp, Gossypium hirsutum
  Clone ID: LIB3135-038-Q1-K1-D6
ggtgaattggatgtttcaaaaaataggttatctggtttgcttccaaacaaccttggtagctgtgtaagcctagaggagttgtttttggatggcaatttgtttgaagggcccattccttcatctttgagttcattgagaggtcttgcggcactagatgtatccgaaaataatctttcaggtaaggttcctgaatttcttgcaagttttgggacattaaagtatttaaatctctcattcaatgattttgaaggagtgataccaagtgaaggagtcttcaagaattctagtgctacatttgttgaagggaacaataagctttgtggaggcatcactgagttacacttgtcaagatgtaactcggaaaaatcatcaaacacttctcttcgtttaaaatttgttattgttgctgtaattttaggagtgactttgatctttctttttctccttatcatgttgc

SEQ ID NO: 11858 - DNA, 339 bp, Gossypium hirsutum
  unsure (1)..(339): unsure at all n locations; Clone ID: LIB3135-038-Q1-K1-D7
cccacgcgtccgttacgcattataatagattatatatattggctgagctgctccactgggggtcagacattcttgagtccaatatcatgtgagcagngcaccaccttatggttaagtcaggatctagaatcccagatcttgagcaacattttcctaatgatcgaaaccttagtatttggaccacaagaacttaacttagctctgaaaccttactagctgcttatatattatcgcgtatgtggggtttcagcatgcaaactgtgaaacccacgagccttaaaaatacgagatattaaaattttaatcctcgtgtgtcggggccttaaggaaattaattaa

SEQ ID NO: 11859 - DNA, 157 bp, Gossypium hirsutum
  unsure (1)..(157): unsure at all n locations; Clone ID: LIB3135-038-Q1-K1-D8
ggatggtcgaactttattatactacaatattcagaaggaatccactctgcatcttgtccttggcctccggggtggtgtctaattgggagtcttgngctcgccatcataattttgcatttctatggaaccgtgcgtgttttaagcgtccaaagccatt

SEQ ID NO: 11860 - DNA, 452 bp, Gossypium hirsutum
  unsure (1)..(452): unsure at all n locations; Clone ID: LIB3135-038-Q1-K1-D9
cccacgcgtccgccaaaacctattcgatgcaatgttggattcattatactcggctctcgagaaagccggacagggagggctcgaagttgtggtatcagaaagaggatggccttcagccggtgggttcgggacatccatcgataacgcggccacttatctatcgaacttaataagacatgtccaaggaggtaccccaaagaggccaggaaaagccatagagacatatttgtttgctttatttgatgaaaacctttaaaccaggtcctgaattagagagacactntgggtttgttttcaccaaacaagcaaccaaaatatcagcttcattttggtggaggaaggcatttgggatattgcttctgaagaatataaagggaactctttctcttaagtcttgatattgtaaaatttaccaagcttgagaaatttggggcatttcaatggggttttcg

SEQ ID NO: 11861 - DNA, 371 bp, Gossypium hirsutum
  Clone ID: LIB3135-038-Q1-K1-E1
cccacgcgttcgcccacgcgtccgaaatacacaagaaaaaaaaaaaaaaaaacacgtgagcagataaattgaagacttttatttctgttaacatccattatgagtactgctggtcaagtcatccgttgcaaagctgcggtagcatgggagtcggggaagccactgtcaatagaggaagtggaagtggcaccaccgcagaaggatgaagtccgtattaagatactcttcacttctttatgtcacaccgatgtctacttctgggatgctaagggacaaaaccctctgtttcctcgcatactaggtcatgaagctggagggattgtggagagtgtaagtgaagggggtgactgatctaaagccaggtgatcatg

SEQ ID NO: 11862 - DNA, 247 bp, Gossypium hirsutum
  Clone ID: LIB3135-038-Q1-K1-E11
cgggcgcaaggcccaacttgttcattgagctcagtggctaaatgacctttggagcaaaccgccactggcatgatcacctttaactgcggctccactcaccgactctgcttagtacgtacttaactgacaaaaccgtagttctttgtgctaaatcacatgactcacacggaaaccagaggggtgaatttaatggcgacgctcacatactctttaaagaaaaaaagtgagcaagtcctataccgctcgg

SEQ ID NO: 11863 - DNA, 246 bp, Gossypium hirsutum
  Clone ID: LIB3135-038-Q1-K1-E12
ctcgcagataagataagctgtacaatataccgtatagcaaagacagatagcgaaaaaaaatgaaggagagcggtcatttttcataaacaatttacggggaaaagaagaagcgaattaatcagcatggagacaggggggagaggtgaaagaaagatagtcgagcctgcaagcagcaagcaacaacagctgaaaagccgttgcgcgctatcttataaaataagggtataggaggggagaccccttttt

SEQ ID NO: 11864 - DNA, 278 bp, Gossypium hirsutum
  Clone ID: LIB3135-038-Q1-K1-E2
ctctctcatacctgctctaacttactcccgttcagactgctaaggaagtggattacgttgttgactataaatggagttcttgatggaaatcttgattggaagagggattagagcaccgaatgtacctccgcttacccacgtactaacacagacgctactgtaccatgtggaaactgaccatgaaactgtgcaccgactggtgtaacgacttgaatgagcttgtggaagaccttaaggaataccccaatgcattcattagaaccattgttataaacaac

SEQ ID NO: 11865 - DNA, 471 bp, Gossypium hirsutum
  Clone ID: LIB3135-038-Q1-K1-E3
cccacgcgtccgaatgtcggccatggaaacgaaaccaagctctaaaattcccctctttttcccaattcttttccttctattatcaactctaacccaacccccattatcatcatcaatcgacaccatcatcatcaatggcaaagacccatcaatctctttacggcgccgtattctattagcttctcaaaggaacaacaagatgaaccacatccctaattgtggcgaaagggtgtcgagatctcagtgtttacaaaacccaaagtgtcgatggtgtcgtagtgaagctcttgatgatatgtgctttaaaaaagctgaagcttggcgattgcctcaacaggttctttcttgtaattgatattcgattttaagttatttgggaaatgaatttgatctgaatttatgatatggttttttggaaattttcgtactgtttgattgggtgatttatggtggatctttttgaatggattt

SEQ ID NO: 11866 - DNA, 408 bp, Gossypium hirsutum
  Clone ID: LIB3135-038-Q1-K1-E4
gatccattcaacaacttggatgttttgaacccattctcccattctttccctttccctttcccttcatttctttccacccatttccctggtttctcctctgaaattttcccctccttgggaacccaactcaactgtgtagaaaccccaagggcccatgtctacaaagcctaccttccaggggtcaccagagatgaagttctggttttcatcgatgatgacaggatgcttcagataagcactgaaaatggtaacttcatgagcaggttcaagttgcccgacaatgcaaggactgatgagattgagggtttatggagaaagggatgctcatcgtcactattgggaagcaactcaagctcggagagccaaatgtaaggtcgttgaatcacgagtatttcacttttttttatg

SEQ ID NO: 11867 - DNA, 423 bp, Gossypium hirsutum
  Clone ID: LIB3135-038-Q1-K1-E6
cccacgcgtccgctggatctggttcagaaggtgcaactatccgcctctacattgaacaatacgaaaaggactcatcaaaaactggaagagattcccaagaagcgcttgctcctcttgtggtggttgctctaaaactttctaaaatgctggagttcaccggccgatccgcacctacagttatcataaactcatacccctataagggttgtctgataaggcacggttctactttggaagaaagtaaaaaaatgaataagctgttcaaggtctgtctagataacctacatacatctttgtcattctgcgtctgtctatgactacattggagtatcctaagtgactgataatactctagcaaaatttttgacagagttcataaaaaataatttgaacgttacagatgcctatactcgtatctttttt

SEQ ID NO: 11868 - DNA, 86 bp, Gossypium hirsutum
  Clone ID: LIB3135-038-Q1-K1-E8
ttgagatagctgatatcgcgccttcctaaattcataggaagggccatcggttctagcgacgccataaaagccaatgcccaggcctt

SEQ ID NO: 11869 - DNA, 384 bp, Gossypium hirsutum
  unsure (1)..(384): unsure at all n locations; Clone ID: LIB3135-038-Q1-K1-F1
cccacgcgtccgcccacgcgtccgagagacaaaatggaatgtatgactaggactggcgccaacagttaatcacggaagaaaggactcactgagccgggatcactaactaatactaatctaatctaactaatactaatctaatactaatagaatactaatctaatactctaatactaatagaatagaaaaaatagaatagaaaatactaatataatagaaagaactgtcttttctgtatactttccccggntccgttgctaccgcaggctttacgcaatcgatcggatcatatagatatcccttcaacacaacataggtcgttgaaaggatctcggagactcaccaaagcacgaaagccagcatctttcagaaaatggattccta

SEQ ID NO: 11870 - DNA, 335 bp, Gossypium hirsutum
  unsure (1)..(335): unsure at all n locations; Clone ID: LIB3135-038-Q1-K1-F10
tgcaaactgccgctaaggctgtcaaaattaaaggcaacttggctgagaccctcccggccaaatgtagtgtcaacatcccttacaagatcagcacttccactaactgcaaaaatgtgaagtgagatggatgaagagagggttttgcagcagcttgaaggagatataatatatgattaaaaagaagaagaagaatgaataaggattttgggatggaattttcaaaatccaaaattagtctccactttagtgtagtgaggctttgtttattttgtttaatgttttggtccctgcatgtattggctgttttaatgttntaatgaaaggaagcttatgct

SEQ ID NO: 11871 - DNA, 295 bp, Gossypium hirsutum
  Clone ID: LIB3135-038-Q1-K1-F11
cccacgcgtccgcggacgcgtgggattttcttggaaaatggccgggaaagtgagttccaagagactaggagtgtttgcattgatgtttgtgttcgctatagggatagctgagcgtagaaagcttgagaaggagaatttgggtggtggttttggcggtggtgctggaggacggcttggcggtggctcaagaggccaatttgagcaccaagactttattgacatctccaacatcgatggctttaatgttcctatggagtttagcttcaactcctcagtgtgcactatggttatcaat

SEQ ID NO: 11872 - DNA, 386 bp, Gossypium hirsutum
  Clone ID: LIB3135-038-Q1-K1-F2
cccacgcgtccgggtggattgattggaagatgtggctccaatatttcaaggatcagaatcgagtctggagcaaccataaaggtttatggcgggaaaggagagcaaaatgtgaggcatattcagttcagtggtagttctcagcaggttgccttagcaaagcagagggttgatgaatgcatatattctcagatgattcaacaagctggtactcaaccaccaggtttgcagatgtaatgaaggtgcaactgaatatctttgggatcattaacagttgaaggctagtattgtctcaatgttgtttcaccttctgaccttgtagctaagattgcaaagtcattaaatattgggtggctttttgtttctttcaatggatgaacaacgtgatt

SEQ ID NO: 11873 - DNA, 315 bp, Gossypium hirsutum
  Clone ID: LIB3135-038-Q1-K1-F3
cagattggaagcgagagagaggctggcgtactcttcaaaagacctggagttgatgcctttttggaacacttggcgaagttctatgaaattgttgtttactccgaccagatgaatatgtatgtcgatcctgtttgcgaaaggttggaccctaaccattgtatacgatataggctatcaaggggtgatactaaatatcagaatggcaagcattatagagatctctcgaagcttaaccggaatccagccaagattttatacgtgagtgctcatgcatttgagtctagccttcaacctgaaaattgtgttcctattaag

SEQ ID NO: 11874 - DNA, 359 bp, Gossypium hirsutum
  Clone ID: LIB3135-038-Q1-K1-F4
ggagatactactcactatgatgcggtggctaattctgttgcatctggggtgctttcagctggcctaaactctggtgttccttgcatatttggtgttttgacttgtgaggacatggaccaggcattaaatcgagctggtggtaaatctgggaacaaaggtgcagagtgtgctttgacagcgattgagatggcttccttgtttgatcaccatcttaagtagcctcagcattatccattacatgatgaacttgtgttgttgctgtgggatcattctatctggggagtttacgcaaaagcaaaacggtaaacatagattgatcccggaactctaatttgcaattttcttggtatacactattc

SEQ ID NO: 11875 - DNA, 167 bp, Gossypium hirsutum
  Clone ID: LIB3135-038-Q1-K1-F5
gtgattcagaacaatgttttcattatcgctttcttccccaggactgaagggaaccgttgaggcgttttgaccaatacacgtggttggtaacacgcattgttgatgaatagaacttgttccagagcctgccaaaggatttgaggagagatattaagaggcacctctgt

SEQ ID NO: 11876 - DNA, 410 bp, Gossypium hirsutum
  Clone ID: LIB3135-038-Q1-K1-F6
cccacgcgtccgcccacgcgttcgctttgaatgtccagaaataccttcttgatgagtgcagaaagtggaatctagtatgggttggaaggaataaggttgctccacttgaagctgatgaggtggaaatgcttctgggtttccctaaaaaccatacacgaggaggaggaatgagtcggacagataggtataaatcactgggcaattcattccaggtcgacacagtggcttatcatctttcagttttgaaagacatgttccctggtggtatcaatcttctctctcttttctctgggattggtggagccgaggttgccctccaccggcttggaatacccctgaagaatgttgtatcagttgaaatatctgatgtgaatagaaacatagtaaggtggttggtgggagcaaactaa

SEQ ID NO: 11877 - DNA, 434 bp, Gossypium hirsutum
  Clone ID: LIB3135-038-Q1-K1-F7
gtgattcagatcattggttgcattattgattgcttccccaggacttaagggaacgggtggggcgttatgaccaatacaagtggctggtaacacgcggtgttgatgaatagaacttggtccagagcctgccaaaggatctgaggagagatattaagaggcacctctgtctgtctttgattacaatggttcctttgcttgagagtttggatcagacattgcttgatgccatttgcgaacggctgatatcatgcctgtttactgagagcacctacattgtccgagagggggattctgttttttagattctattctttatttgttgcactggttgatagtgttacaacacatggttgaaggagtgggtttttcaaccagattttgttaaaagaaagagatttctgtggataggaacctttacatgggcattggattcc

SEQ ID NO: 11878 - DNA, 204 bp, Gossypium hirsutum
  Clone ID: LIB3135-038-Q1-K1-F8
gttagaagctaaaaatgattccagttcatacgcattacattggcttaagtattattacctggttatttccatgttgattatcatctgttctgaagagactctattcctttagtaatgttacaccccttaatcccttccttaattgttactactactgcatcacatatatctgcgatttattatattttggactctcattaaaaa

SEQ ID NO: 11879 - DNA, 275 bp, Gossypium hirsutum
  Clone ID: LIB3135-038-Q1-K1-F9
cttttagaactcttaaggagggttcagaaatctgttttggaccaaaactttgtgctaacacgaatggggtgttttgcaagggaacaaaacataccacatttgtcattgtctctttacatggaccgaacaatctctaatatcttgcttgcctgctgacatctggatcagaacattatctttaattgggatgcagactgctttattaaataaaccctcttgattgtgtcgctgctattcttatcattgagagtttttctgaactgtttttgatacaa

SEQ ID NO: 11880 - DNA, 464 bp, Gossypium hirsutum
  Clone ID: LIB3135-038-Q1-K1-G1
caagaatttgtcatacagttatagtttgatcgaaggtggacctttgggggacaagcttgagaaaatcagctatgacaacaagtttgaggcagctgcaggtggaggaagcctttgcaagagctcgatgaaattttacactgttggcgactatgtgatcactgaagatgagatcaaggctcaaatcaaagggagtgaaggagtttacaaggctgttgaagcttacctcttggctaaccctgatgcctgcaactaagatatatgttggttgctttgaattctcataacttgaatttaaagaatggggtgcttttggtattttcctttttagtcttaaaactttaaaccgtctttccgattgtcttaaataaaaaatggcgggggggatttgatctttcgatcatcttttggtttattgatggaaataaaataaatttttaaactagggaaaaaatttaccttatttt

SEQ ID NO: 11881 - DNA, 261 bp, Gossypium hirsutum
  Clone ID: LIB3135-038-Q1-K1-G12
ggcaggaaaaccagagcccaaaccacacaccctagaaggcgggcaaagaaaccaccagaggcagaaccccaaccaccaaaggcaccggggtacacaccaccaaagaaggaggagcccgaacctagaacaccgcggcatgaagctcccaagaaaccaacactcggacaatacgcaagacacccaccactggggaagcctcaacagagagatcccaacggctgaccatcccgaaaacaggaccaacaacggctacatggataa

SEQ ID NO: 11882 - DNA, 255 bp, Gossypium hirsutum
  Clone ID: LIB3135-038-Q1-K1-G2
agatgtcgagcgaaaaagccctgaatgcactcaatggtggaacttcaaacaacgacttgtgttccttagcttatgcagaaaatgaaataaaaccctttaccgtgagcaaaagaaagtgaccggatcactcggcctgttctgtttcctgagaatgagttctctgataggatccccttttccagcaatttgaatggaagttggactttctctttcaatggcaagggggggtctttttatattaaccaagattacctt

SEQ ID NO: 11883 - DNA, 336 bp, Gossypium hirsutum
  unsure (1)..(336): unsure at all n locations; Clone ID: LIB3135-038-Q1-K1-G3
gctgttccagaaggtacttatgatgcacttatagtggattcttctgatcctataggtcctgctcaagaactctttgagaagcccttttttgagtctgtggcaaaggctcttcgtccaggaggagtcgtctgcactcaggcagaaagtatctggctacatatgcacatcattgaggatattgtagcaaactgccgtcaaatcttcaaaggctctgttaactatgcgtggactacagttcctacatacccaagtggtgtgattggtttcatgctttgctcaactgangggcctcttgttgacttcaagcatccggtgaatcctatagacaaagatgag

SEQ ID NO: 11884 - DNA, 320 bp, Gossypium hirsutum
  unsure (1)..(320): unsure at all n locations; Clone ID: LIB3135-038-Q1-K1-G4
caaattcagcgcaagagctgatggatcaaattggcttccagataacaacttgaacgagggcgaattggagtacttttactggttgatcactgccttgcaagtggggaatcttatttactacatctgttgtgctaagctgtatacgtataagccgattcaaatccatggcaaagacagtggatctgattgagatgcatgagtatagcttgctagcaaggcttagtttttgcatttgatgaaactagatggtgaattcttgttcctttttctaaaactgtctanccatacatcttgttgagagagtctaatacattacaatc

SEQ ID NO: 11885 - DNA, 415 bp, Gossypium hirsutum
  Clone ID: LIB3135-038-Q1-K1-G5
aaaccaaatacctttagttttttttaagctttaaaatctataattgtttacctttttgcttcacttgattgttaaatctccatggctgccaaggtttttgcatattttgtcgctttggttgctgtcttcagcgtcgccaaatctgaccctgatctcctccaagatatctgcgtagccgatacatcttcaggggtgaaggtgaatggatttgcatgcaagaaggatgccgatgtaacggaaaatgatttcttctttagtggcttagccaagccggcggtggtcaacaactcggtgggatcggtggtgaccggagccaatgttgagaaaatcccagggttgaacacccttggggtgtcgctttctcgtattgactatcaacctggcggacttaacccaccttacacttacccacgcg

SEQ ID NO: 11886 - DNA, 262 bp, Gossypium hirsutum
  Clone ID: LIB3135-038-Q1-K1-G6
ccacgcgtgcgaccacgcgtgcggcttaaaaccctaaccctataaaattattcgtaattgatcgctggtgctatctgacctcattcaaaaagcctcgccgtaactctgaaaagtatgcttatcgccctgcccctcgtcctgctcctgctcgcaaccctccacctcaaccagctcatcatgctccgtgctcaaatactgctaatagtgaaagtgaaggaaccttgctgggaggcataggctctaccataagtcagggcatggc

SEQ ID NO: 11887 - DNA, 254 bp, Gossypium hirsutum
  Clone ID: LIB3135-038-Q1-K1-G7
cccacgcgtacgcggacgcgtgggattttatccaggcgggaagcgccagctttatggttatatggctatgaaggaagacctagacagcttcaaccagcattctcaaggcaaatctatgctgaaatttgagatgagatcctatcaagagatggttgttaagcacatcacgcgcatgagggaggacaaccagcagcttatgttttacaagaacaaggttgcataataacaaatgctaaacgttgtttttgaaagtc

SEQ ID NO: 11888 - DNA, 376 bp, Gossypium hirsutum
  unsure (1)..(376): unsure at all n locations; Clone ID: LIB3135-038-Q1-K1-G8
ccgaaaccgaatacatgttacagactctaagggaggagcagaggcttactatggatgactctaatatcttccctgacacaagtgttcatctggatggtggtagtcaccggtttatggctgcttccggttacaatgtgtcggaattggggaggtttggaagcggtgtatctctcactttaggattgcagcattacgaggatggtagcatatctatgtcgggtggaagccatcatcaaaattttgttgcaatgagaggggatgatatgtacaatcatatanccaactggaaccgggatttcgaatgcatgaatcctagtaaccggcagcacaggttgagttcctctcagttggtgcatgattttgtatcatgatacgt

SEQ ID NO: 11889 - DNA, 141 bp, Gossypium hirsutum
  Clone ID: LIB3135-038-Q1-K1-G9
aagcctacttaggttttaacttttttggacagaagtctgaaaccagagtggaatagttggccataaatatgacgacttgcaatcttcaatagatttatatataaaacatcacgcgttacatcggaaaaaaaaaaaaacaac

SEQ ID NO: 11890 - DNA, 240 bp, Gossypium hirsutum
  Clone ID: LIB3135-038-Q1-K1-H1
cccacgcgtccgttttgatctgaatatgtacgtttagatcaatatgcagtcacggggaggagctttgtattttcttgcatgtttgtctttttaattctgtatgaattcaatgtgtcctatgcttttatttgtgttctaataaatatttgtaagtatgatatcgtaaaaaaaaaaaaaaaaaaactgaaaataaaactttacccacctttgtttgtaaaactaacaaattaaaaaatgaag

SEQ ID NO: 11891 - DNA, 248 bp, Gossypium hirsutum
  Clone ID: LIB3135-038-Q1-K1-H10
gtgattcttcaacatatgacactgaagggaggtttatgccaatgaaccttgggaggattttcaggggggtcccctcaaccggggtccgttaagttacctttcaagaacttttggacatggcttgaggctattcgaaactcatatgcttcattggctggataatatccgaagggggaaggggacacttggaatgacctgcaaaagatgaaaatggggtttttgtccaaaaaaaccccgggggggttttt

SEQ ID NO: 11892 - DNA, 408 bp, Gossypium hirsutum
  Clone ID: LIB3135-038-Q1-K1-H11
cccacgcgtccgcccagctgttcctggaatcatgttcttgtctggcggacaatccgaggttgaagcaaccctcaacttgaacgcaatgaaccaatctccaaacccatggcacgtctcgttctcgtatgccagagctctccagaacacttgcttgaagacatggggaggcagacccgagaacgttaaggctgctcaggatgcactccttgtccgtgccaaagccaactcactcgctcagctcgggaaatacaccggcgagggagaatcagaagaggccaagaaaggaatgttcgtaaagggctacgtctactaagctgctgcaaacaaagttttagctgagatgatggagatttcatgatatggcttctttctctttgtgttgaatggtttataggctctggagactac

SEQ ID NO: 11893 - DNA, 361 bp, Gossypium hirsutum
  Clone ID: LIB3135-038-Q1-K1-H2
cccacgcgtccggcatagcttgccttttcttattcggcattcagtgggctgctggattcgcaactttttggtacccaggtggctcaagaaacagcagagctgcattgttgccctggcatgtgttcttcgggatgtatacgtatgcacttgctgttgctactgctactacgggtatcttagaaaagcttacatttctccaaacaaaccgggtaatatcacgctactctacggaggcattgctagtgaactcattgggtattttgattgttgtgctgggtgggtttgtgattctggccacactcactcctgtgaatggcaaaagtgatgtccacaggggactagtggaatgaataggttatag

SEQ ID NO: 11894 - DNA, 72 bp, Gossypium hirsutum
  Clone ID: LIB3135-038-Q1-K1-H3
gggacgcgtgggttctagtcggccgttacatattagatctgtactctaccacgggcttttgggtattttggg

SEQ ID NO: 11895 - DNA, 311 bp, Gossypium hirsutum
  Clone ID: LIB3135-038-Q1-K1-H4
gttttgtttctcagcatattctgggcctttatttctacgtataactcttccttcctttttagcgattctgttgccactgtatcgcgagagcgtttctcgattttggtgtatacttgaatatgacactcctagatctatttagtttctacttaatatcgtgaatatatgttccaatacatgatcgatcttgactctctgacaaacatttctttattattgtgagggaatcaccttctatgatgatctttggccattcttgttctactcctatttggacagcttttcgacatacaattacttcagcagcaaag

SEQ ID NO: 11896 - DNA, 394 bp, Gossypium hirsutum
  Clone ID: LIB3135-038-Q1-K1-H6
caactatgcagccagtgaaactcaaatccatgaagacccgaatgtggctcttttctttctggaaaaggatatgcaccccggggcaacaatgagcctacatttcactgaaaatacagagaaatcagctttcttaccttatcaaactgcccaaaaaataccgttttcatctgacaagttgccagaaattttcaacaagttttcagtgaaacctgcatcactgaaggcagagatgatgaagaacacaattaaggagtgcgaacagccagcgattgaaggagaggaaaaatattgtgcaacctcactggagtcaatgattgactatagcatttccaaactagggaaagttgatcaggcagtctcaacagaagtggaaaaacaaaccccaacgcagcag

SEQ ID NO: 11897 - DNA, 168 bp, Gossypium hirsutum
  unsure (1)..(168): unsure at all n locations; Clone ID: LIB3135-038-Q1-K1-H7
gcgggcgggacagtgacaagaggaaaagggatactgctttctataacgaatgcaggggggatggaaacattataaagatgagattcaacatnaaaaagccacgnncatctgatgcatcaatgagcagcgaagaaccagcctgctctagntctgggaggacagattcaa

SEQ ID NO: 11898 - DNA, 290 bp, Gossypium hirsutum
  Clone ID: LIB3135-038-Q1-K1-H8
cccacgcgtacgacatgatattgacaaggaggcttgcaacaaggtcaacaaggaataactgtcataacatctgtgacgcatgaagagctcacttgacgaatcgagccatttttaagtgtggatgggtccaccttgtaacagaatgtgcaagaacagccatcgcagtgttattgattcttagagatgacactgtccaaagtcacgggaactgtatgaaggaatgaagccatcctctaatgactaaatccttgttagttgctggtatgaactgttaaataatatactttaat

SEQ ID NO: 11899 - DNA, 321 bp, Gossypium hirsutum
  Clone ID: LIB3135-038-Q1-K1-H9
aaagtttgcatgacctgtttttgcaaggggggtctacaatattttttgagcaacctcttcatgaaagcatcgtccaccttgaagaagttccttcaacgctcaaatgctcttccaggttagggaaggttgattccctaacctaacctagcttcaagaaaattagactgtggataatatttttcctttaaaaccttcgctaataatgaggtaggatagattgtcaattgccaaccttggttagctaatatcgtgatattaaattgacttacattttgaaaaaaaaaaacagttgtagcaaaaaaatagcaataaatttggggg

SEQ ID NO: 11900 - DNA, 85 bp, Gossypium hirsutum
  Clone ID: LIB3135-039-Q1-K1-A1
gacccgggggggggggggcaaatgggaccaccccaaccacccattgttcccaagccccttgaggaaattgagaatggggccttta

SEQ ID NO: 11901 - DNA, 60 bp, Gossypium hirsutum
  Clone ID: LIB3135-039-Q1-K1-A10
cccacgcgtccgaaaaaaaaaaaaaaaaaaaaaaaaaaaaaaaaaaaaaaaaaaaaagga

SEQ ID NO: 11902 - DNA, 429 bp, Gossypium hirsutum
  unsure (1)..(429): unsure at all n locations; Clone ID: LIB3135-039-Q1-K1-A11
cccacgcgtccgcccacgcgtccgcaaaggttacagaaagaaagaaaacatgtctcttgtgacagaagagataaaagcgagtgcatcagagatttaccatggagatgagatatgccaggagaaatccaagtttttgttggaggaagtaggcatgccaagggggcttttgccacttagagacatcgaagaatgtgggtacgtgaaggacacaggtttcgtgtggctcaaacaaaagaagagcatcacccacaggttcgaaaagatagggaagctggtttcctatgcaactgaagtcacggctgtcgttgagaaaggcaagatcaagaagctgactggggtgaagaccaaagagcttttggtttggatcacactgagtgatatccaagtggatgatcctcccactgggaagatcactntcaagactccttc

SEQ ID NO: 11903 - DNA, 449 bp, Gossypium hirsutum
  Clone ID: LIB3135-039-Q1-K1-A2
tcgggattcgagccacgcgtcacgcgacccgtccggaagaacaggatatcttttatcatccttggccgaaaatgcaaaaaggaagggggaagagcttgagaaaatcggctatggtggtttgctagactaagctcaagaacctaaaggagaggcgtccaacaaggggaaatcgaaggtcatcgagtagcccactcggaattattttacccaacataaagttgcttggtctcatctatttttgcggggtcgggccgtcattgaagtcatcacaccggatagcaagttttggtactttcttcttagtgtgtttagaagatcattttggcatgtataagctagtacgttgtgtttgaattatggcatgtaaactttaagccatgcgaaaatggcacgaatgttcgattgaattggatcaaaggtaggcatgaaatgggcctacgtactttcgt

SEQ ID NO: 11904 - DNA, 356 bp, Gossypium hirsutum
  unsure (1)..(356): unsure at all n locations; Clone ID: LIB3135-039-Q1-K1-A3
atgctttgcgtgcctntgngagatgaaatgccaaaaaaagatgagctgtactatttttttcatcaaaatgttccaaataccgatgaaacgagaagtctttttgaacttaggtccagatgttagggtttggtggcttcgacgtgagtatgctgaacaaaatccaattgcgtcattttcatccttggtagcaacatcctcatttcccttccaaccataccatcaaccacctccaccataagctccttagaattattattgtaatataactatactactttttttatatgtaaaactaatgaatgatattttttatgtttggtatttntatgctatgcttttattcaagttnnnnaaaa

SEQ ID NO: 11905 - DNA, 77 bp, Gossypium hirsutum
  unsure (1)..(77): unsure at all n locations; Clone ID: LIB3135-039-Q1-K1-A4
ccgtccggcgttggacccggcacctttaaaggggctnnntaccccgttaaatctcttctcaacgtctttgcccgatg

SEQ ID NO: 11906 - DNA, 350 bp, Gossypium hirsutum
  unsure (1)..(350): unsure at all n locations; Clone ID: LIB3135-039-Q1-K1-A5
gcagaggctgtgaaatcgtggaggaagagtgcacgatcgtgcaacatgcgagctaggaatccgttcgtgggtgttgaagcgtgggagttgcaccgtgggcaaatggaaccctagggtttgctatattttgaaaaaatttacgtcattgggcttgtaatcgggccttttaattttagtgatttgggtctattttttgggccgagcaaaatttgggccttacatctgcctttaaataaaaaaatttaaacagatttattggnntctgccnttcatgcccataaataaaagttctgtttagcaacagtaagtgtttttatatttggacactgcttaatcttaaatgacatcaa

SEQ ID NO: 11907 - DNA, 421 bp, Gossypium hirsutum
  Clone ID: LIB3135-039-Q1-K1-A6
gccacgcggccgactaaagccattatctatgcaagattgcaggcaagcgaagaatcacgtggcggctggcttcgcatatgagggagctggaacgaatgagttaaaacagcggaatgactcgtacagagaaggggcttcatgatattaggtgcggctatcttactttctatgaagggattcgtcctacagttacagacacctcaagaagaatcttaacagagaacccatgattgaagtcatcctccattgacgaccagatgaaatacttctaaagaacaagcaagcaaatcgatgctaaccaggagaagcaaaagccaacctgagaatctatccttgttgctagcctagtcctgtaatgatacaagaaaaggtttgtaatattaatttacagtggtttgtgttgtacccgtacgagtgtagt

SEQ ID NO: 11908 - DNA, 381 bp, Gossypium hirsutum
  Clone ID: LIB3135-039-Q1-K1-A7
cacggttaagaacgaggataagatggagttcagcaaaatcctcgaggcaatcaaggccaacttcaacgacaagtacgatgagtacaggaagaagtggggaggtggtatcatgggctcgaaatcacaagccagatccaaggcaaaggagaagcttctcgcgaaagaagccgcacaaaggatgacttaagccaaccattgttcccttccagaggttccctctggttaccaagtcaaattttactcctttgcccgaggattacttatatattttgtagtttaactttcaaaacaccgagtaactgctgtttgtgatgtaattttgtgcccaaaccatcatttatgctgagcgatcttacttaaatagtcgtgtatgatatatat

SEQ ID NO: 11909 - DNA, 453 bp, Gossypium hirsutum
  unsure (1)..(453): unsure at all n locations; Clone ID: LIB3135-039-Q1-K1-A8
cccacgcgtccgcccacgcgtccgagaaaatcaggagtaactgaagaagatgcagatattcgtcaaaaccctaacagggaagactattactctcgaggttgaaagcagcgataccatcgacaatgtcaaggccaagattcaggataaagaaggcatccctcctgatcagcagaggttgatttttgctggtaagcaactggaagatggccgaaccctagctgattataacatccaaaaggagtccactcttcacctagttttaaggcttaggggtggaaccatgatcaaggtgaagactctcaccgggaaagaaattgaaattgacattgaaccaactgataccattgatcgtatcaaggaacgggttgaagagaaagaggaattcctccagttcagcaaaggcttatatacngccggaagcaactngcagatgacaagacagcgcgggactac

SEQ ID NO: 11910 - DNA, 294 bp, Gossypium hirsutum
  unsure (1)..(294): unsure at all n locations; Clone ID: LIB3135-039-Q1-K1-A9
cccacgcgtccgcttcaattcccatgatgaaatacggtttaatatatgatcaaacagaaaaatgtataacttaacttcaatttaagaatcacataataatttatttggccctccaatattaaaaaaaaatattttatccnnnanaaaaaaaaaaaaaaaaaaaaaaaaaaaaaaaaagggcnggggctgtaagatgtaagggatctatgttcgcgtacacgcgaatgcaacgtttttgcttggtgataccgaaacttaaattcaatggcactggccttacatcgacaacggctg

SEQ ID NO: 11911 - DNA, 409 bp, Gossypium hirsutum
  Clone ID: LIB3135-039-Q1-K1-B1
caactgagaagactgacgtttacagtatgggcattgtgctgatggagcttgtcagcgggaaaatgccaactgatatcctttttggtgtagacatggcattgccagcgggaacattgtgtgaattgggtgaaataaataattgtgattctgtcaaagtttgcttcgaaccctgtaatagttgtttgataagtggtgattgtctgttctcattcaagcctcaaaataatccccattttatctgtttgatcaacatagatatggtgtgtgaagtttagtttcataggaataacggacaccatttggatgattataatttgtcagtttgatagtgtggcaggcaccttcattaccttgctgataataagcttatttcatgtgtaattttcattttcaggacggaatgtttatt

SEQ ID NO: 11912 - DNA, 451 bp, Gossypium hirsutum
  Clone ID: LIB3135-039-Q1-K1-B10
gggttcatcaccactgccaacaagttgatctccaaatccttaaaaaaaggagacattttcgcgttccctaaaggtttggttcatttccagcagaacaacggcaaagaaccggcatcggtcatctccggcttcaacagccaattgccgggaactcagtcgattgccgttaccttgtttggttcaacaccagcagtgccggaccatgtgttgaccaaggcattccaaattggtaccaaagaagtcaacaagatcaaaagcagactttcccctaagtaagaaaaaaaaaaagaagaagaaggtaatttgagttttgaggtgaaaaatcataaaattgtttctttggagttgaataatgtaatttaaattaccaaaataagttcactttgaggcaatataatcaacatactatcatgtattgaatatttgaagtatttcacacgatatttatttt

SEQ ID NO: 11913 - DNA, 458 bp, Gossypium hirsutum
  unsure (1)..(458): unsure at all n locations; Clone ID: LIB3135-039-Q1-K1-B11
catgtccgtcctatccatacacggatccatattatgggggagtggtgcctccttatgtacctgaatctttggtacattctcatagtcttggagtgcatcctgctagaatggctttgcctcttgaaatggctgaggaaccagtttatgtgaatgctaagcaataccatggtattttgaggcgaaggcagtcacgtgcaaaagctgagctggaaaagaaactgatcaaagtcagaaagccctatcttcatgagtctcgacatttacatgctatgagaagagcaagaggatgtggagggcggttcttaaacacgaagaagcttgatagtgatgcttctaaagccacgcctaacaaaagcagtgacactagtttgaatcttccatcacaatgtcccgaanacacgagtggcatctcagttaccaatcagatgtcctggaatgacaattcatcttgtggtcat

SEQ ID NO: 11914 - DNA, 427 bp, Gossypium hirsutum
  unsure (1)..(427): unsure at all n locations; Clone ID: LIB3135-039-Q1-K1-B12
cccacgcgtccgcgatgacatttttatcaaactgggttctgaaaaggacaagcgcaaggatgctgataaagaagaaagagtcaaaaagtctgttagcatcaatgagtttctgaagccagctgaaggggagaggtactacggacccgggcgtggtcgaggccgtggccgtggtcctagaggtggatatggaggcaatacagctagcagtgtgttagctccctcaatcgaagatcctgggcacttcccttcattgggtggcaagtgagaccccaccgctgcaatctgcacaatggttttcattttcatgggaatgcattgtgatctattcaatagtcaggagtctacaagcttttctgtttttgagtgtaaattntagatactttgcccatttcctgacatgcatgcatgcatactntgnttttcttat

SEQ ID NO: 11915 - DNA, 254 bp, Gossypium hirsutum
  Clone ID: LIB3135-039-Q1-K1-B2
gcatatgcgcattgcataacggagtaacgacaccaatgcgatgttctaatggcgactgccctctatttgctttaatttatatataaaaaaatgggagaagaaaaaattggggtctcatttcttttaatttggggattgaggtgactaatagtaggagcagggcttaacttgatgtaacagttttttgttttggttgaactgatatgtatttcccatatttgattaattggtatctctctgcattatcgaccccc

SEQ ID NO: 11916 - DNA, 454 bp, Gossypium hirsutum
  Clone ID: LIB3135-039-Q1-K1-B3
gaaaaagccaagtccagtaataaaaagagaaaaagtgcttctgaaaggcaaacatctgctaagcgaaggatttctcagaagacaagtgaacctatctatgtggataatgagttagatgatgcccttcaagacgatatgcaatcacagagacccaacacgcctaactgaccaaagaagagtgtaaatgaaaacctacaaccagcaattactactgcagctgctgcatcagcttctggccaggtacctggaaatgagtttggtcctggtggttttgggactgaaatggggcataacatggcgcagagtaatatgtcaacgtgataacttgacgaaaggaaagcaaggtacaccttaattgctgtcactgcaacacttgttggatggttgtggtcatttcgactaacactgacctgcatattgattagtatagtagtatgcatgtatatataacatt

SEQ ID NO: 11917 - DNA, 440 bp, Gossypium hirsutum
  Clone ID: LIB3135-039-Q1-K1-B4
ctctttgctgggtatcgtcggctgattcgtctgaagctgctttcgtcaaaaagaccatctctgcccacaagatcgtcatcttcgcaaagtcctattgcccgtactgtaagaaggcaaaatctgtgttcaaggagttgaaagaagttccattcgttgtggagcttgatgagcgagatgatggatggaatattcaggatgccttgagtgagattgttggtaggcgtactgtaccacaggttttcattaatggaaaacacatcggaggctcagacgatactgttgaagcatatcagagtggaaaattggctaagctgttgggtattgaggtagagaacaaggatgatctctgagtccataaacaaaattgaatgtttgttgccagagtaaattttgattttattgcttttacgtacttctttattgtacttcaactttgaact

SEQ ID NO: 11918 - DNA, 186 bp, Gossypium hirsutum
  unsure (1)..(186): unsure at all n locations; Clone ID: LIB3135-039-Q1-K1-B5
aggtaatggctatacttgggggatgtttacttgctaaagatatatctgctaagattcaacacaagaagccattggtgcttcataaggttacttttttttggttagtagcgtcagatattagtgttcaaactttggattatttgcatgcatgctcatgttggnccttttaattttagtgatttannt

SEQ ID NO: 11919 - DNA, 176 bp, Gossypium hirsutum
  Clone ID: LIB3135-039-Q1-K1-B6
tgtaacactgcctggagacattgccattctctatgtaatagagaaaaccaatgcatgacatttgtattgtatcactcggatccgaggttatcaaggaaaacaagttcatggtagtctgaagttgatatcattttcatctgtaaacttgttctttttaatatatatatatatttgtt

SEQ ID NO: 11920 - DNA, 407 bp, Gossypium hirsutum
  unsure (1)..(407): unsure at all n locations; Clone ID: LIB3135-039-Q1-K1-B7
cccacgcgtccgcccacgcgtccggtgatccgaccctctcatcatcacattcactgtatttaggcttcctattttttttcttttttcttttttttgtataagtctcaaagaaacttagaccccttcgtattctccgctcataccccaaatccccataccccttctgttcaacagcaaagatggcaactgtgcgggttacctcctctagtatcgttcaagcttcaatcccgaaccgattcacgagtgccattgtcaaggccccgacttctcttggatcttttaagaacatcttcaaatcttttggcttgaaatgttcctccaatcacaaaacattaatggcaggctataagattaagctngtaggacccgatggtgaggtgagcgagtttcaagcccctgacgatcaa

SEQ ID NO: 11921 - DNA, 439 bp, Gossypium hirsutum
  unsure (1)..(439): unsure at all n locations; Clone ID: LIB3135-039-Q1-K1-B8
cgcatgaccatatcgtccacaatgaaaacatattatagacagggattcgtattctaccttctgtttccggccattaatcaatatttgagacactaaaggcttctctaaatcgacataaacagccaacctagcaaatcgtcccctcgtcctactatcggtgctcatatctaacttgaccactttgcccacaagttctcctatttctgtaatgattttactattgtaaagataactcggtagagcagggaatcaaattcatgtcataacaacacttgcgtatgcctgaataggatcgaaagccatcgtccaaggctgaacagtcaaatactgcccgaaaatcgtccatggaccttcggaaagaggcatattgcagtcaagtttgttctagaatttgacaagaaaatagccattntctatgtccatcatatgaataggggct

SEQ ID NO: 11922 - DNA, 378 bp, Gossypium hirsutum
  unsure (1)..(378): unsure at all n locations; Clone ID: LIB3135-039-Q1-K1-B9
cgagctcactcttatcggaaaaatgatcgagtgggatccatggggtgttcctgatgactatgaatgtgaggttatcgaaaatgatgctcctattcccaagcatgttcctcagcaccgacctggtcctcttccggaggagttttacaagacgctagaagctctttctaagaaagacgagcctaaagtcacctgcggagatccacagataaaggagtaatgtgacgcagacggttggctgaaatttgcattngtctttcgttcttatttgtcgatcttgtattgngcctgtttccgttgatggaattgaagctttaacctatgataaaaagctggacccgaaccctttagtgcataataatattgaatgccagtggttat

SEQ ID NO: 11923 - DNA, 82 bp, Gossypium hirsutum
  Clone ID: LIB3135-039-Q1-K1-C1
acgaaaaaaaaaaaacgtacgaccacgcgtacggtgaaagggaagtcaatattttattctaagatgaaaaggctaagaaaaa

SEQ ID NO: 11924 - DNA, 383 bp, Gossypium hirsutum
  Clone ID: LIB3135-039-Q1-K1-C10
cccacgcgttcgtgaattctttccctcactttctcgaaaaaaaaaatgtcttcaggttgcagtggcggatctaactgcaggtgcggtgacaactgctcatgcagcaggaaccttaaccttggatattcggagaagacaaccagcactcagaccatcatctccggagttgcgccagtgaagatgacctttgagggaccagagatgagcactactgaatcaggacatggatgcaagtgtggatcaaactgctcttgtgatccatgcaactgttgaaaagcttgatgaaagccatagattatgaaaaaaagaaagcagcgcaaataacaggcctctgttatgatatattgtcaaggatggatgcctgcaacgtctataattatgtc

SEQ ID NO: 11925 - DNA, 453 bp, Gossypium hirsutum
  Clone ID: LIB3135-039-Q1-K1-C11
ctctcactagccaacgcgccatgtcgatgcgattctctcgtgactgtgacgcctgcgacggtgacggacagtgcgagttctgctccgtcgagttccatcttcgcgccaaatgcataagcgatcaaacactggatgtcaccagtaaggatctatacagttccgaccatacggttgttcccgtcgatttcaccgattacgctggctacgaatcctctgaacaaagggggattatcatcgtgaaattgcggcgagggcaggagttgaggctgagggcaattgcaaggaaagggataggaaaagatcatgcaaaatggtcacctgccgcgactgtgactttcatgtatgaacctgagattcacatcaatgaagatatgatggataccctgacccttgaggagaaagcaaagcttgtcgacagtagtcctactagagtctttgacattgatcctaata

SEQ ID NO: 11926 - DNA, 418 bp, Gossypium hirsutum
  Clone ID: LIB3135-039-Q1-K1-C12
gccacgcgtccaagcttctcgagaaagtcaacgtcaatgatctcatcaccagcgttatctccggcggtggttctggccctggtgccgatgctggtgcttctggtgcagctggcggtggagctgatgacggtgctgctgctgatgacgagaataaggaagaagagaaggaagagagtgatgatgacatgggatataacatgggtgactacacacatgacttaacacaacggatatcacttcggatatgttgatagaaatgacgcaaacatacgactaagcttaaagattagttgaaattttgtatggatatttgagaagctatgcagaaactcaagaagtgacatagcaactactacttcgctttaaacttggcgaaaacatcgaaacgtttaacacatgggcggtcgttgtagaggat

SEQ ID NO: 11927 - DNA, 436 bp, Gossypium hirsutum
  Clone ID: LIB3135-039-Q1-K1-C2
aggaaatcagattatgtgagagagccaatcccgaaagctggtttggagtcgctttggaagaaaatgatggagctggaaaagcctaaaatggactttaatccttatggtggaaaaatggcggaaattgcagcagaagaaattccattcccacataaagctggaaatctatggaagattcaatatctggcgaattggaacgaagcagggattgaagcaacaaatccttacatagatttgacaaggagactccacgagttcatgactccttttgtgtcaaagaacccaaggcaagcatttctaaactacagagacgctgatttgggaagcagctcccatggaaaagcctcgtattcggaagcaagacttaatgggatgaagtggtttatgggtaatttcgacagattagtgcagattaaaacggacgttgatcctacta

SEQ ID NO: 11928 - DNA, 357 bp, Gossypium hirsutum
  Clone ID: LIB3135-039-Q1-K1-C3
cacacgcgttcgcccacgcgtgacgccacgcgtccgaccacgcgtgcgagttactgatttagtgtaagcctatacccatcaatagatattaatttgttgtcatccattaatagtctaaattaatgcatataaataatgtgagattgtctaatgcacgcacgacagaatctatataccattgcttcatgtgattatgaaaaaagagttattgcgctcattttgtcccaaataaaattttactcctttgtccgaggattacttatttattttgtagtataactttcaaaacaccgagtatctgctgtctgtgatgcaattttgtgcccaaaccatcatttatgctgagcgatcttactt

SEQ ID NO: 11929 - DNA, 452 bp, Gossypium hirsutum
  Clone ID: LIB3135-039-Q1-K1-C6
cttcattctcactctctctccactgaactcttgctaaacggtatcgttttagtcagtctttcatcaagggcgaaagaaccggttcgcgtcctcgttactggagctgcaggacaaatcgggtatgctcttgtacccatgattgctaggggagtcatgttgggtgctgaccagcccgtgatccttcacatgcttgatatcccacctgctgcggaggctttgaatggtgtcaaaatggagttggtggatgctgcttttcctcttctaaagggtgttgttgctacaactgatgttgttgaggcatgcactggagtcaatgttgctgtcatggttggtggtttcccaaggaaggaaggaatggagaggaaagatgttatgtcaaagaatgtgtctatttacaagtctcaagcttctgccttggaacagcatgcagctcctaactgcaaggttttggt

SEQ ID NO: 11930 - DNA, 152 bp, Gossypium hirsutum
  Clone ID: LIB3135-039-Q1-K1-C7
ccacctcccacgctcggaagggaagcaatatctttagatgctctgatgaagagagttgcacatcgattgatatctattgagcctatatgattgagttgtcttttgagcgaatggcttaataactttctactatacgttgaatcaatcataac

SEQ ID NO: 11931 - DNA, 106 bp, Gossypium hirsutum
  Clone ID: LIB3135-039-Q1-K1-C8
cccactcattcttatactataaactatctattcttcaccataccctatatataggcgagctgggttaaatatcaaagctcaattgcacctatattactaaccatgt

SEQ ID NO: 11932 - DNA, 357 bp, Gossypium hirsutum
  Clone ID: LIB3135-039-Q1-K1-C9
atccaatctaaattcaaaaccaagtggtagctcagctctgcggagaagatgaagcacagtggaaagaatagcaaaggcaatggaaagccatctgatgtgaggaaagataggaaatcgggtacgggaatgaacggatcgcccaagaaaggaggtcatggtggcaagttcacttgggttggagatggcctttcgcccgccgagatcgggggtgaaacagagcttgtcgatgccaaggaccctaatttcgaagatcccgatgagatcctggccgattgattgagttcatcatcgctcttgcttctatactttggttagaaatatttcagcaactcaatgaataaattgtaatgcttgcca

SEQ ID NO: 11933 - DNA, 82 bp, Gossypium hirsutum
  unsure (1)..(82): unsure at all n locations; Clone ID: LIB3135-039-Q1-K1-D1
tcggccaagcgttcggccacgcgttcggannaaaaaaaaaaaaaaaaaaaaaaaaaacccaaaaaaaaaaagggcggtcaaa

SEQ ID NO: 11934 - DNA, 420 bp, Gossypium hirsutum
  Clone ID: LIB3135-039-Q1-K1-D10
cttcaaagaacgctttaccatcaaaaccagctagctaaatcaaccgcatttcaccaggatcgctagaggattgaagaaacacttgaagaggctcaatgcccctaggcattggatgcttgacaagcttggtggtgctcttgcacccaagccatcatctggaccccacaaatccagggaatgcttgccattaattctcattctgcgaaacagattgaagtatgctctcacgtacagagaagttattgctattctcatgcataggcatgtcatggttgatgggaaggttcggaccgaatagacttattctgctgggttcatggatgttgtgtccattcctaaaacaaatgaagacttccgtttccttatgacaccaaagggcgttttcgtcttcatgccattacgggtgatgaaaccaaattt

SEQ ID NO: 11935 - DNA, 482 bp, Gossypium hirsutum
  unsure (1)..(482): unsure at all n locations; Clone ID: LIB3135-039-Q1-K1-D12
tcgtctcgacatngnnttggacctttttaaaatcttggaaactccgnnggcgaattcaaccatgctttgagctttgcgtgagggtggtacaaagaaactaatagacctcgaatgctgaagatagacgttcaggctcaaacactagaagatgactccgcacatagaggaagctctgatatctcaagagccaaagagttacttggttggcaacccaaggtctccctccgaaagggtctccctctaatggtttcagacttccgacaacgtatctttggtgatcacaaggtcggcagcagcaccaccaccaccaacgactcatcatcttaagatggcctatatactcttctcacagacagagcgataaaaatatataatggttaagaggaaaagagcttgccgttgtcttttccctattgaaacaattaatattatagtgtatctttatgatagatgtgggatggacgtttttatttttatttttg

SEQ ID NO: 11936 - DNA, 411 bp, Gossypium hirsutum
  Clone ID: LIB3135-039-Q1-K1-D2
cccacgcgttcgcttttcgaagcagggatcatgcttatctgcttctctcaatttgtcttggttactttttacttcaattcaaagcaatggatgttatcgaaacacctaacatcaaaagataaacaaaagaagcttatttgattgtgcactaacattaacttcatgagactgatttttactgggatgtatcaacagattgatttgttagttcttggttgatgatcacgatttacatacatgcatgtatgtatgctttcttgatgaatttctttcgagtatacagaacttatgtttgtctcttactagatgttctctggctaaacttgcgccgtcataatgttatttttatttggtaccaagtcggaattacagtaacagtctcaatttttggtcattggggtgtcaacaagg

SEQ ID NO: 11937 - DNA, 425 bp, Gossypium hirsutum
  Clone ID: LIB3135-039-Q1-K1-D3
cgattcgggtcgcccaccgtccgaagttctagagagacaacctattgggacatcagcccagacagacaaggactacaaggagccaccagcagcacccttctttgagcctggtgaactcaaatcatggtctttttacagagctggtattgccgagtttgtagccaccttcttgttcctttacatcaccgtcttgactgtcatgggtgtgtctcagtctaaaaccaaatgtgcaaccgttggtattcaaggcattgcttgggcttttggtggcatgatctttgcccttgtttactgtactgccggcatttcaggtggtcatattaaccctgctgtgacctttggattgtttctagcaaggaaactgtcacttacaagggcattgttctatatgatcatgcagtgcctgggtgctatctgtggagctg

SEQ ID NO: 11938 - DNA, 414 bp, Gossypium hirsutum
  Clone ID: LIB3135-039-Q1-K1-D4
tcgaccacgcgtgcgcaactccatttgcaatctaccgttccttattccttctaattccctacacaccccatttcagggcagggcacattgtctctccgccttcattctccgcacggagaatcatgggactcctccatacatcatgcaatggctgccgctgcaaaaggcgagccaacgatcgggtgaataactgctcgtgaaatcggaacctcatcgtgggcatttcttgctattatgccagagcacaatctacatctttctttctcaaagacaccatcaaaattgattttaacaatcgatccaggtgggtgtcttcatttggccatcgttctactcctgaccaaagagtccacaaagcacatccaaacattcgactctgatgctgagagctctccccaaaacctgggtaagcca

SEQ ID NO: 11939 - DNA, 315 bp, Gossypium hirsutum
  unsure (1)..(315): unsure at all n locations; Clone ID: LIB3135-039-Q1-K1-D5
ggccgccctttttttttttttttttttattttttttntttttntttattttttttttttcggggtttggtttttttaaaatttatagcatcaacctttaggtgtgtgctgtaaatttataaaaaaatatgagcttatttttgtgttggttttttaggcaaagggactgaattgcaaaaatttcagtgtacattttttatgaaacagctttgagcaaatttttaatcactttggggatattggctcacatcaattcaggaatcaattcatattcttttacctgtttttaataggaaatgacagtgacgaatttttt

SEQ ID NO: 11940 - DNA, 213 bp, Gossypium hirsutum
  unsure (1)..(213): unsure at all n locations; Clone ID: LIB3135-039-Q1-K1-D6
cccacgcgtccgctttgtcattcttgaagttttgttcctcgtgttcatctttgctgtcttgtaaggtacttggtgggtaagaaggtgaatggtgggtggtgtagttagatcaaatgaagtcaaaagtagcatttttttttttttgaaaaaaaatgtggttatggactggaaaatgtttcacattacatgaaatagaaacttgaaaggtgtcng

SEQ ID NO: 11941 - DNA, 274 bp, Gossypium hirsutum
  Clone ID: LIB3135-039-Q1-K1-D7
cggacgcgtgggcggacacgtggggaccgagcctgcgtgttctgctttagcttcctctgatgggactcctggtgatttgatctacaagagaaatcatgcaccaatccccgtagtcgatgacatacagagatattgtgttgatatatgcggattaattggaactccaaaaaagctgtatatgatagatgcaaggatgctgccaaaatacgatgtccacgccactttacagtgtgcacgtaatatgaggacagccatgagcaaaactagaaaagtg

SEQ ID NO: 11942 - DNA, 200 bp, Gossypium hirsutum
  Clone ID: LIB3135-039-Q1-K1-D8
gctgcagtgacccgttgctgttagaaagcaaatttcaaagttatgtagcaagtacttttgggttttagccccatccatgtcatgactgttgtcttcttaacttttcaagcacatattattttccataataattgttgggtctggattggaaccagatttttgatatttcgatttcaatgttatactttacacgtcctttt

SEQ ID NO: 11943 - DNA, 445 bp, Gossypium hirsutum
  unsure (1)..(445): unsure at all n locations; Clone ID: LIB3135-039-Q1-K1-D9
cccacgcgtccgaaataccttctagagcatggtgctgatcctgctatacccagcaacttagatgccactgctttacatcatgcagctggaattggggatgttgaattgctgaagtatatactggacaaaggcgtcaaggttgattcacaaagtgatgctggtacccctttagtttgggctgctggtcatggtcaacgtgaagctgtgaaagtattattagattatcatgctaatccaaatgctgaaaacgaggataatatcactccattgttgtcatccgtggcagcaggttcacttgcatgcacggatttgttgattcaggcaggtgctaaagtgaatattacagctggtggaacaactccgttgcatattgcagctgatcatggaagcnctgaaactaataacagcttacnntgaagctgagctgatcctaatgcactgatga

SEQ ID NO: 11944 - DNA, 378 bp, Gossypium hirsutum
  unsure (1)..(378): unsure at all n locations; Clone ID: LIB3135-039-Q1-K1-E10
gtgcttgcaagctgccgctaaggctgtcaaaattaaaggcaacttggctgagaccctcccagccaaatgtagtgtcaacatcccttacaagatcagcacttccactaactgcaaaaatgtgaagtgagatggatgaagagagggttttgcagcagcttgcaggagataaaatatatgattaaaaagaagaagaagaagaatgaataaggattttgggatggaattttcaaaatccaaaattagtctccactttagtgtagtgaggctttgtttattttgttttatgttttggtccctgcatgttggctctaattntatatcctctatgtattggctattttaatgttttaatgaattaaagtttatgctttgtcaatc

SEQ ID NO: 11945 - DNA, 454 bp, Gossypium hirsutum
  unsure (1)..(454): unsure at all n locations; Clone ID: LIB3135-039-Q1-K1-E11
gtgcctgaaccatctgttgatgaaactatacagattttgaaaggtttgcgagaacgttatgagatacaccataagcttcggtacacagatgaggccttaatttctgctgcacagctgtcataccagtacatcagtgaccgttttctacctgacaaagcaattgacttgattgatgaagcctctcgtgttcgccttcgtcatgcacagctccctgaggaagctaaagagcttgaaaaagagctgaggcagatcacaaagtcaaagaatgaagcagtccgcagccaggactttgagaaggccggggaattacgtgatcgagaaattgaacttagggctcagatcactgcaattcaggagaaagacaaggagatgaacaaggctgangctgangcangagatggaggtccttttgtgacagaagtggacatccagcatatagtctcttcatggactg

SEQ ID NO: 11946 - DNA, 401 bp, Gossypium hirsutum
  unsure (1)..(401): unsure at all n locations; Clone ID: LIB3135-039-Q1-K1-E3
cccacgcgtncgaaggattcaagcttctttagaagggaagaagaaaatcatataccttggagatggcagcggagattactgcccacgcttaaagcttggagaggtagactacatgatgccaaggaagaattatccagtttgggatttaatttgcaggaacccaatgttgatcaaggctgagatctatgaatggaccgatggtgaagagctagagaaggttttgctgcaactaatcaacatgatttctcttgaagaagacgatgccaattcttgccaattcatctacgttgactgcaaattgcagaccatgtcggcatccaaaagtgccttccctcatgccctcccggttcctcagtagatcngtgccattgctcatatatattatagctgacttggtcgaa

SEQ ID NO: 11947 - DNA, 450 bp, Gossypium hirsutum
  unsure (1)..(450): unsure at all n locations; Clone ID: LIB3135-039-Q1-K1-E4
gttatctatgttatgacccatgattccattggtcttggggaagatggaccaacccaccagccaattgaacacttggcaagcttccgtgcaatgcctaatgttttgatgcttcgtccagctgatggaaatgaaacagctggtgcatataaggttgctgttctgaacaggaagagaccttctattcttgccctctctaggcaaaagctgccccaacttcctggaacttccattgagggagttgaaaaaggtggctacattgtttcagacaattcgtctggcaacaatcccaatgtaattctgattggaactggttctgagttggagattgctgctaaagctgcagatgaactaaggaaggaaggcaagaccgttagggttgtctactttgtttcttgagagctctntgatgagcaatcagatgcctacaaggaaagcgttttaccatctgct

SEQ ID NO: 11948 - DNA, 440 bp, Gossypium hirsutum
  unsure (1)..(440): unsure at all n locations; Clone ID: LIB3135-039-Q1-K1-E5
ccacgcgtncgaccgaatgatttctttataatgtggttggacttagatattgaagcagtactgcaacttgtcaacagagttgccttgtttatcccattgagaggaagcatatgctctcattctgattattagcatcctcatggcattcttttcgcctgatttatcaatggaccatataaatgcatgcagaatttggcagagttgctctcatctcaaaactcgttgaatgaacacatggagcctggatgttattttcaatgccaaccctatcacatttttcattctcaagctagattgatgtttaccccatagaggaacccaacataagcacctggaaaaaaaaaatccaaatgattttggtttagttggaacttcaaaatgaagagttggttccatgacacangctattgacttgattgtcacatcagtttgggctaaaa

SEQ ID NO: 11949 - DNA, 174 bp, Gossypium hirsutum
  Clone ID: LIB3135-039-Q1-K1-E6
ctctatcttctacaccgtcttcgtttctatctatatctctctgaacctaacattctctagggcgacgcttcctgagaaaccatgttcttttaccaccttctcattttctctcacgaacttgtgttttactcaattccttaccaggaaatcaatcatgggatcctgtggtaactt

SEQ ID NO: 11950 - DNA, 134 bp, Gossypium hirsutum
  Clone ID: LIB3135-039-Q1-K1-E9
ctggactcagttcctgccattttcttctgtgattgctgcttaatgctatgtatgatgcttgctgaaaatgatgtatacatccaaactgaaaggacatatatatctatatatataaaaattcttattattaatat

SEQ ID NO: 11951 - DNA, 395 bp, Gossypium hirsutum
  unsure (1)..(395): unsure at all n locations; Clone ID: LIB3135-039-Q1-K1-F1
ttccttcaacggtttggtttcaaagggccaatcttacaagctggttggactggagcttttaagcggctggaatatacttcaaatataaaccaacttccatctggagaattcattggtggagccattggtgaatcaaaagatgggaagaaaaaagtggtcaatcgactcgataagatcacttaaaagtcaacccttttagcatctaatacaaagtccatctcattactcgattagcatctgcaactagcaaaccatgccaggtcattggaaatgcattcatgaatcctcctncaataatgaaagtggttgagattgttcgaggtgcagacacatcggatgaaacatttcatgcgacanaggcattggcggagaggtttcataagacgataatatgc

SEQ ID NO: 11952 - DNA, 432 bp, Gossypium hirsutum
  Clone ID: LIB3135-039-Q1-K1-F10
cccacgcgtccgcttgaaggtacttaatctatcaggaaatgcaatagcaaggattactgctggtgctcttcctcgaggacttcacatgttgaatctgtcaaggaataatatatccaccattgagggtttacgtgagcttactcgacttcgtgtgctgaatctgagctacaatcggatatttagaattggtcatggtttggcttcttgttcctctcttaaagagttatacttggctggaaacaagataagtgaggtagagggtctccatcgtctcttaaaattgactgttttgcatctgcgtttcaacaaaatctctactgccaaatgtcttggccaacttgcagcaaactataattccttgcaagccattggcttggaaggtaaccctgcacagaagaatgttggagatgaaaatctgaagaagcatttgca

SEQ ID NO: 11953 - DNA, 374 bp, Gossypium hirsutum
  Clone ID: LIB3135-039-Q1-K1-F11
gtgcttgcaagctgccgctaaggctgtcaaaattaaaggcaacttggctgagacccgcccagccaaatgtagtgtcaacatcccttacaagatcagcacttccactaactgcaaaaatgtgaagtgagatggatgaagagagggttttgcagcagcttgcaggagataaaatatatgattaaaaagaagaagaagaagaatgaataaggattttgggatggaattttcaaaatccaaaattcgtctccactttagtgtagtgaggctttgtttattttgttatatgttttggtccctgcatgttggctctaattttatatcctctatgtattggctattttaatcgtttaatgaattaaagtttatgctgtgtc

SEQ ID NO: 11954 - DNA, 454 bp, Gossypium hirsutum
  Clone ID: LIB3135-039-Q1-K1-F12
tcgcccacgcgtccgcccacgcgtccgcccacgcgtccgcccacgcgttcgtgttgagggagatgatgtaccagatgaacagaaagctagaatttgcaagagtttggctgaagcagataagcgtctagttgatggtgctgatgagtatttgcagctgctggatgtggccagcaacacaatgcgagctttgtgtaacatgccacaggaattctcttttgaaacttagtgggaaagcccagtgtgagatggcagatacttttgaagacaaggagagattcttcaaccttttggactgtaaactggtacatattgcaacaaacctgcttttctaactttctgtcatgcctgattgtcatagatgggtccatccttttgaatctcttgtcatttaacatggatttggtgttagttctctaattaactcgtctctagtctattgctatagacgatgagt

SEQ ID NO: 11955 - DNA, 383 bp, Gossypium hirsutum
  unsure (1)..(383): unsure at all n locations; Clone ID: LIB3135-039-Q1-K1-F2
cggagacaaagatcgatactctatagcagcttttgtcattccaaatgagggtactataatcaagacacccaaagagtttatagatgaccaacatcctcggcttttcaaggacttagatttcatggagttcttcctttttgccttttccgacccagcaaggcacatcgacaacggggagttgctccatgtctttgctggcctctcaccatcagtttccaattaaaattatgctcatatagacaagtaaaagtttggttntggttntaaattaatattacaaataataaattgagtcctatactcgagatctacgttctcgaactgtattaccatgttatattttggtataattgggtactacaaaatctactgtgttgagtaat

SEQ ID NO: 11956 - DNA, 459 bp, Gossypium hirsutum
  unsure (1)..(459): unsure at all n locations; Clone ID: LIB3135-039-Q1-K1-F3
tcgnccacgcgttcgnccacgcgtnncgccacgcgtncggatagcttttagtgaccggaaacctgagaggcgncgcaccgctcccgctctcgggtttcctcgcgttaggttcttccgtttccggcgcttgacgtaatcgtcgactccgctccacccgtattcccaacaagaaaaaaaaaacggagaagagaagttcatttattacttttttttttattttcttctttatatttctcggttgaattattgtataatatgacacttggaatatgccgaattccaaaaataatcgtaaggagcaggagaagaaccggaaggaaacgtcggaggccgatcacactatcaaagaaataactcggtataattagacgttttgctttgtgtatggcatgtatagaaacttagctacttttgggataatatgaataatgagtgatgtgtaagtacgtgatgatgtat

SEQ ID NO: 11957 - DNA, 288 bp, Gossypium hirsutum
  Clone ID: LIB3135-039-Q1-K1-F4
cggagtgaggttgaaacctaatgtgatattcggactgaaactcatcgatctgagtcgcgactcactgggtattgaacaagacgaaccactgggcgttaagttcgggtgcaagctttaccggatgccggacgaacacgtgttccttatgaagccaagagactagctcttgcgccgcgtgaaatgattagcatcgctcgggctgacattagtggaacaagagatgctcacaaatacggcgccgatcgcgttaagggtgttagaagcatgcatatattacggagctatatt

SEQ ID NO: 11958 - DNA, 336 bp, Gossypium hirsutum
  Clone ID: LIB3135-039-Q1-K1-F5
gccatgcatgttatgacctatgatttcattggtgtgggtggagatggacctacccaccaggcagttgatcacttggcaagcttccgtgcaatgcctaatgtttggatgcttattctatctgatggaaatgaaacagctggtgcatataatgttggtgttctgaacaggaagagaccttctattcttgccctctctaggcaaaagctgtctcaacttcctggaacttacattgaaggagttgaaaaaagtggctacattgtgtcagacacttcgcctggcatcaattccaatgtaattctgattggaactatttatgagttggacatagctgcttaa

SEQ ID NO: 11959 - DNA, 413 bp, Gossypium hirsutum
  unsure (1)..(413): unsure at all n locations; Clone ID: LIB3135-039-Q1-K1-F6
gngaaatatgttcctaagttccggctaaggcctgaaagctctggtccagctccaccttctgaacctgatcgatggggcaagccagcacagttggagcccgaccgatgggctgctggcagcagggctcctccatcgcaatctgatcgctggactagtggcagtagggctccacctcaggattctgatcgtttggcaggtggtggtagcagagctacacctccagattcgaatcgttttggtggtggcagtgggagcagcaaggcagaaccctggcgaccttcaagggccaggaacccacaacgcggttgaaccggctgctgggttggaatgaatgcagaaatttttgtacttgggaactatttatggttgtcaatgacaaatgacaaacagctttgaggcatattggtttttgg

SEQ ID NO: 11960 - DNA, 380 bp, Gossypium hirsutum
  unsure (1)..(380): unsure at all n locations; Clone ID: LIB3135-039-Q1-K1-F7
tcgacccacgcctcacgccatctcttattccctntaacgatttgtttccaaaggccaaatctcacaggctgcttgtacgtgaagggttgaggcgtctggaatatacttcaaatatagacgagctccgatctgcagatttcattgttgaagcaattgtagaatcagaagatgtgaagaaaaagttgttcatcgaactcgataagatcactaagagttcagccattttagcatctaatacaagttccatctccattactcgattagcatctgcaactagcagaccatgccaagtcattggaatgcatttcatgaatcctcctccaataatgaagttggttgagattgttcgaggtgcagacacatcggatgaaacatttcat

SEQ ID NO: 11961 - DNA, 443 bp, Gossypium hirsutum
  Clone ID: LIB3135-039-Q1-K1-F8
cccacgcgtccgcccacgcgtccgctgtatttgtggacacttacggtactggaaagatcccagacaaggaaattctcaagattgtgaaggagacctttgacttcagaccaggaatgattgccatcaatcttgatcttaagagagggggcaatagcaggttcttgaagactgctgcgtatggtcattttggtcgggatgaccaagatttcacttgggaggttgtcaagccactcaagtgggacaaggtccaggcttaattggagcttcatcacattggttctatgtctgatttatttgatctgctgtctgctaccatatgaggctgcttttcttacaatttcctttaatttcttttttgggtttgaaatttgattaacatttatatttatgcatatgatatgatatgagcgataatgaatcgtattattattacaatttgaaag

SEQ ID NO: 11962 - DNA, 319 bp, Gossypium hirsutum
  Clone ID: LIB3135-039-Q1-K1-F9
ctcacgcgtacgtccacgcgtccgggttcttctacggccttttgttgaaggatatggacatggcggaaccaaacgtactatggcttatctttgggatccttcatatgatactttatgcaagctacaagaaccacgcaaagaaaatggtggtggaagatccaaagcttcaactacgagatcatcacattgtggatgtcattaaactcgagtctggcgagtctacagatgaaaacacaacggatccttaaccgtacgaaaatagaggaagagctagaggaggtgttgaagctaaaatacgaaggaaaaagcatcatatgct

SEQ ID NO: 11963 - DNA, 280 bp, Gossypium hirsutum
  Clone ID: LIB3135-039-Q1-K1-G12
cccacgcgtccgatttgatgctaagtcagaacccagaatttaattagttttagggtgactacttatatatttttttcatgtcaaaccttagagaacaatccaatacacctgatttttgtacctttagtaaacacatggtggggaagttgctgattataaatctcagaaaaatgtatatctcttgtgcctgaataaattcttcttataactttagttagtatataaaacatacatttgtggggttaaaaaataataattaatatattataattatttatat

SEQ ID NO: 11964 - DNA, 360 bp, Gossypium hirsutum
  Clone ID: LIB3135-039-Q1-K1-G2
acagccttgaccccttgtgctatcttggatgtcttatctccgccctactccgatgacttgggcaggccctccacctacttcttagacttccccatcccttctcttcctggttatgcttggcttgaggaaagagaagtaaaactgccatgtgacttggttgttaaaggggcaccttaccttggtcctccacttgatgtaccagatgatgatctttgctaactggatctacaagaattctcaatatatgtatatctgtaacctttttgtttagtattgtaaaagaagtatacatgtacaacataccccagcatctcataatgggcgaacccatcaaactgaaaaatcatctattgcagttcc

SEQ ID NO: 11965 - DNA, 196 bp, Gossypium hirsutum
  unsure (1)..(196): unsure at all n locations; Clone ID: LIB3135-039-Q1-K1-G3
cggacgcgtgggctcgaatcaattttttgttatgtcttaacaattggaatttcacatttagaatagtgaagaactttcattgtagttgggaaataaagatgaaatgcactttgctttatttaagtngacaaaatcagaaactacggtccacccgtatatccaacaagaaaaaaaaagcccgggaagagaagttcat

SEQ ID NO: 11966 - DNA, 335 bp, Gossypium hirsutum
  Clone ID: LIB3135-039-Q1-K1-G4
cagagatccaaagaggaagctccgattgctgtaaaacaatggcggattaccatttcgtttacaaagacgtcgaaggagcttccactcaatgggatgatattcaaagaaagcttgggaatttacccccaaagccaccagctttcaagcctgacccttttgaacccgcacctgacccggattccgtccctaaggacaagtcttggatcgatgaaaagactgaagaagagcttgaagaaatcgaagatgatgtcgatgatgatagattccttgaagaatacagaaagaagaggctggctgagatgaggaaagctgttaagatttcaaagtatggatcg

SEQ ID NO: 11967 - DNA, 250 bp, Gossypium hirsutum
  unsure (1)..(250): unsure at all n locations; Clone ID: LIB3135-039-Q1-K1-G6
gcctgcaactattatggctagcctctaangcttgaaagctctggaccagctacaccttctgggcctggtcgatggggcaagccagcacagttggagcccgaccgatgggctgttggcagcagggctcctccatcgcaatctgatcgctggactagtggcagtagggctccacctcaggattctgatcgtttggcaggtggtggtagcagagctacacctccagattcgaatcgctttggaggtggcagtg

SEQ ID NO: 11968 - DNA, 228 bp, Gossypium hirsutum
  Clone ID: LIB3135-039-Q1-K1-G7
ctcacgcatacgctcggttctttttcataataaactaaactcaaaagattaagagtggagagctaacggatcatattaatttgatgaatctccatcttaaacctaaactatcatcctcaaatattctgcaagatagacgcacccgcgcattaccacattagtaccccgatagaatgaacttctcgctatatgaattgtgagctttcattgaatggccatttaacaaaa

SEQ ID NO: 11969 - DNA, 439 bp, Gossypium hirsutum
  unsure (1)..(439): unsure at all n locations; Clone ID: LIB3135-039-Q1-K1-G8
gaaactctctgcagaggggaaaagaggggttccagtctcggccttcggcctccgagcaattcaggctcacgcacctcacgcgccaccatatacggtggtcggagggttaaaaccctcgccctttcaagcgaaatacaggtaaccctcttcccttttaatatttcagtagtttattcgatgtatgcatgtttccgtaaaaaggaaaaaaaaataaaataattacctttactctcaatcgactgttggtatctgtaagtttgtgtaacactgtgttttttattgaatctatgtattctttttctctgtaaaaaaaaatctcgtccctattacagtaaaatccttcggcttttatagcctctgtttacaagtttgaatattctctgctctatttcttgcctntgttcgcttagtttccttttctattacattttctttttct

SEQ ID NO: 11970 - DNA, 457 bp, Gossypium hirsutum
  unsure (1)..(457): unsure at all n locations; Clone ID: LIB3135-039-Q1-K1-G9
ggttttagtccaatctaaaggatccgctttttccgaagcgaccatggccaaccgtacggacgcggcggcgaagagcattaggggaaccaaccctcagaatctggtcgaaaagatcgtgcgctcgaagatataccagaatacgtactggaaggagcagtgtttcggtctgacggcggagacactggttgacaaggcaatggagctcgaccacatcggcggaacttacggcggaaatcggaagcccactcctttcatgtgcctcgtcatgaaaatgcttcaaatccaacccgaaaaggatattgtcgtcgaattcatcaaaaatgacgattacaagtatgtacgagttctgggagctttttatctgcgtcttacggngatcgactccgatatttatcgttatttagagctcttgtacaacgattatcggaaagtaaggcgaaatcacctgatggaaatt

SEQ ID NO: 11971 - DNA, 389 bp, Gossypium hirsutum
  Clone ID: LIB3135-039-Q1-K1-H10
cgcacgcacgaagtcccgaattcgacccaccgacccacgcatccgggttcatcatgcccttgtgtcccttgccctctttggtgcttttgtgagccgtgctggtatttcaacaaatgatgtattgacccctaaagcctttatcgtctacactagtcgaacaacgctcgctctctggttttctgctatgaccatgaagagtgtgggaagtgcagcttttaagatggttgaggaagtgcgcatgcaattcaacacaatcccaggtcttatggaaggtactgctaaacctgactatgctacctgtgttaagatctctactgatgcttcaatcaaaaaaatgatcccacctggtgcccttgttatgctaacaccctttgttgttggatcttttt

SEQ ID NO: 11972 - DNA, 370 bp, Gossypium hirsutum
  Clone ID: LIB3135-039-Q1-K1-H11
gacccacgcgtacgttatcgatggaagtcaactgtgggaaacagccttctgatgacatgccaccaatacttggagctgctggctttactgcagttactgacattgccggagggtacgccgcgtggactcagaatgggcttgcaacggaatgatgatgatgatgttggaggcagggaataaagttggtgatacaataataaagcatggaagacagagaactagaaagatctcaagtgtaaagaaaaaaaaatgtcgcatattagtgtagttggcagccacagaatgaccaggaagtatgtgaatgtgaatgtgactgtttcggtcgtgttctgtatggaaaagggaagccaagaaacatacaaattatttt

SEQ ID NO: 11973 - DNA, 200 bp, Gossypium hirsutum
  Clone ID: LIB3135-039-Q1-K1-H12
gggggggggcggggggggcccaaggaaacaaatgggtaaaaatttgaacagacttctgtggcgcttggccataagcggcatttacacccaaaagaaagcaaaaaaagcaaatatctcatgaaacaaacaaaagaaagaaacaaggcagggtctaaaagcagcaagaaaagtgcgggtgaagaaaaagatagggggggccg

SEQ ID NO: 11974 - DNA, 405 bp, Gossypium hirsutum
  unsure (1)..(405): unsure at all n locations; Clone ID: LIB3135-039-Q1-K1-H2
cccacgcgtncgggagaatcctctacagttgaagtgcttgaatcacatttcacttgtgtgcagatcagttgaaaaatctgtagatttctatcaaaatattttagggttctttcccgtaaagagacctggttcctttgatttctctggtgcatggctgttcaattatggcattggcatccatcttcttcaatctgacaaccctgatagcatgcctaagattggcggtataaatcccaagaacaatcatatttctttccagtgcgagagcatggcgccattggagaagaaattgaaagagttgaacatagaatacgtgacgagtggtgtggaagaaggtggaatccgcgtggatcaactcttcttccacgaccccaatggctacatgattgagctatgcaattgcga

SEQ ID NO: 11975 - DNA, 347 bp, Gossypium hirsutum
  unsure (1)..(347): unsure at all n locations; Clone ID: LIB3135-039-Q1-K1-H5
gattaaattacctataagatcctgcgttttctcattcttctgctacttgcattaatattttggtaacttgctgccacacctggcgtggatcttctgtaacaattcacgtagcttcatgagaagtggtggtggcagagtccttggtgcagccggtagcttttgtaagtgtaaacttagcaggttgtagttgatacgagtattagattttgtgccgctaggaaatcattgggcagtctcagtttgatgtgtttgctgcagatgtgatgaaactttgctcatatattnttaatttttgtaataatgtgtagggaagtatcaattattcctacttgtgaaatgcaattctt

SEQ ID NO: 11976 - DNA, 434 bp, Gossypium hirsutum
  unsure (1)..(434): unsure at all n locations; Clone ID: LIB3135-039-Q1-K1-H6
cttttcttctttcaactcatagaaaactcccagtaatattagaatcatgggtgttgtcccttataactatgagtctacctctccagtcgcccctgccaggcttttcaaagctttttctcttgaagctgacaaggtttggcccaaggctgctcctcangcagtcaagagcgttgaggttgaagctaatcctggccctggaagtatcgtaaagatcaactttgctgaaggccttccattccaatatatgaagcaccagattggaggacatgacgacaagaatttgtcatacagttatagtttgatcgaacgtggaccttttggggacaagcttgagaaaatcagctatgacaacaagtttgaggcagctgcacgtggaggaagcctttgcaagagctcgatgaaattttacactggtggcgactatgtgatcactg

SEQ ID NO: 11977 - DNA, 408 bp, Gossypium hirsutum
  unsure (1)..(408): unsure at all n locations; Clone ID: LIB3135-039-Q1-K1-H7
gttttctcaaaagcactgctgaagaaaagggttcggattgcgtgcatccctttgtagccttgcaaacctgcatcaaaagtaaccccgatgcatttcctaaaaacatcattgaagataaagaagtcaagaaagaagaaccaatccaagaatataaaatctatcctcctatatggttcaaggaatctcacaaaccaaaaccaaaaccaaagctggaggacaaacagtcattcttatacattttcattgcttatgctatttttgattgataaattgtatcatttaagtcttggttatgaaaagacttgtgtcatctgtgaatagagagagttaaagatgaccaaatttggttgctcacttacgatcattgaaaaacgatcnttattgaaataaaaatcaaacttttattgc

SEQ ID NO: 11978 - DNA, 342 bp, Gossypium hirsutum
  unsure (1)..(342): unsure at all n locations; Clone ID: LIB3135-039-Q1-K1-H8
tcgtattaaaaaaaaaaaaaaaaaaaaaaaaaaaattaaaaaaaaaaaaaatataaaaaaagggaagggtaaaaaaataaaggatttatttttttaaaatttaatatttatttttttttgtttaaattaatttgnttttttttttttttattgttaatttaatttaattttggtttattaattttttttttattaaaaaaaattttgttttttcttaatttaatttttttgaatttattttaattttattatttttttttttttttattttgtttattattatttttttatattataattttagatttttttttttattttttgggtatttttttttttttt

SEQ ID NO: 11979 - DNA, 437 bp, Gossypium hirsutum
  Clone ID: LIB3135-039-Q1-K1-H9
ctttttgaagggagtcgttgttaatggctagcgaccaagatcagttcacgctggtatcccgcgccataaaccaagaagggaagttgccaagaaagtacacggatgaaggtcaaggtgcaaagaggaaggtgtcaccaccattagaatggtacaacgtgccagaagggactcgttcgatggccctggtggtggaagacgtatatgcgccagaccccagcggccccatcgtgccatggacctgttgggtagccattaacataccgacaaagttgaagggtctaccagagggattttctgggaaagaagaggaagttgggggagattatgctagcatcaaagaaggcaacaacgatcacaaggtccctggatggcgaggtcccaagttaccctctgacggccaccagttcctggtcaggctatttgctttggatgatgag

SEQ ID NO: 11980 - DNA, 282 bp, Gossypium hirsutum
  unsure (1)..(282): unsure at all n locations; Clone ID: LIB3135-040-Q1-K1-A1
tcttattatatataaacacctacggnttctcggtttttcatcttagcgtcaatacaagactatttgggggtgtttggaaggattttatatcttacatgagtgcatcctgttgcagttagagtgcaccggaaaagagcgatggccgcagttcccggacagttgatttgggaggtagtgaagaagaacaattgctttttggtgaggcagtttggaagaggaactgctagccttcagttcaccaaagaacccaacaatctctacaacctccactcctacaaacac

SEQ ID NO: 11981 - DNA, 436 bp, Gossypium hirsutum
  Clone ID: LIB3135-040-Q1-K1-A10
acggaaggtaatgaaaccattgctgctggccaagcagacggttacacaatcaatggccgtcggggagaaacatatggatgcagtaatgatacaacatatctgctagaagtggcttacgagggtctttaccttcttcgtttaataaatgccgttgccaacgaaacaatggtgttcgccatcgggcagcacagtttcactaccgtcggacaaaacgcgacatatgcccaacgctctttctcaacttctcttaccttagcaccgggccagacgctcgacgttttgctcggcgcaaaccaaaacgtcggccagtattacatcactgctcaaccttcctctggcaggcataataccaccggagttctacagtatctcaccagcactggtgtttaatttatttacttggcttttgggattccattggtatagtttgtttatg

SEQ ID NO: 11982 - DNA, 407 bp, Gossypium hirsutum
  Clone ID: LIB3135-040-Q1-K1-A11
gcgtcgataatttcaggattaatacttatttattctttttaattgaattaatacatgctgtctgtcatttatataaactttttaaatatatcacgttgaaaggatagctttcatattctatagcttgtaaaatggatgaaaaataaagagttagtttttatttaacttaaaagatgataccaggttgattattaattttgtaacagatttatgattgattgaactctttcctcgtgattgaattcattggaatctgggttttcattgatatctatgtttctgaagttcaattgacaaaatggtgttgccttgatagaaagaatatgcttgctcgacatgaggaaagctgtttagattttaaaagtatgcgttcgtttattcccacttttccggatccctatttttta

SEQ ID NO: 11983 - DNA, 192 bp, Gossypium hirsutum
  unsure (1)..(192): unsure at all n locations; Clone ID: LIB3135-040-Q1-K1-A12
gaagaaaggacggaatncggaaaatagattacgttgacgctgccgcgttcttgtcagtgaagggtatcggtactgcgttgtggaagaacgtttttgctcggaagcgggtcggacccgggaccccatcccgctctgtaatggtgctttgggcccgaatatctgtttgatgaatatataggaggtttgaaggtt

SEQ ID NO: 11984 - DNA, 202 bp, Gossypium hirsutum
  unsure (1)..(202): unsure at all n locations; Clone ID: LIB3135-040-Q1-K1-A2
cccacgcgtccgcccactcgtccgaccacgcgttctgctttgtccaagtatgaactattgtcgtgagggtttggcattcaaagaaaaacttgtcagataatgttcttgttgaatctattatgggacattaaagtgtcttaccatcagtgcattattgtttttcaatgaacggttaatgcttgcttgctcttgngggcatcta

SEQ ID NO: 11985 - DNA, 350 bp, Gossypium hirsutum
  unsure (1)..(350): unsure at all n locations; Clone ID: LIB3135-040-Q1-K1-A3
ccgcccgaattccgggtcgccacgcgtcgagaagggattggctggagtacgtgaaggattgggtacatgggcaagcccgttcgtatgagggtgaaaattgcccttcacctcaaatctgtccgctacgaggacgtggaggaagatttgttggcacccaaaagcgagcttcttcttaaatctaaccctgtttacaagaaaatcccggtcttcttccatgctcataaccctatctgcgagtccctaatcatccttcagtacatcgatgaggtttggaccacctctgcttcttncatcctcccttccgatccctatgaacgttcccaatccccgatttgggctggctatgtcga

SEQ ID NO: 11986 - DNA, 174 bp, Gossypium hirsutum
  Clone ID: LIB3135-040-Q1-K1-A4
gccacgcgtactgaaaatccaaatcctttttttaccacgctcacattttaaaaacctatatcaggtctggctgttcttttctcaaaatttcccatcaactatatggctctaaaatgtgtttatttaggctgcaccctaccctcttaaaccatcatgttggttctacttacacta

SEQ ID NO: 11987 - DNA, 282 bp, Gossypium hirsutum
  Clone ID: LIB3135-040-Q1-K1-A5
cccacgcgtccgagggaatgaaggtggcaaaaacgaaaacatatggacaacaagatgggctgctaaaaggatgataacaatgatgttatttggctttggggttggcttcgtttattacggaatccaactaaacgccgagaatctcaatttcaatctctacttaacagttataatcaacgccgcaatggaaatccccgccgttttcatcggcggcatactattgggtttcaccgaccgacgtctcctttcatcgttatcagcaatttcagccggcgtttcatg

SEQ ID NO: 11988 - DNA, 460 bp, Gossypium hirsutum
  Clone ID: LIB3135-040-Q1-K1-A6
cccacgcgtccgaggaaacagagaacagcgttccctccaaattttgtgcattcacttgatggttctcacatgatgatgactgctgttgcatgcagagacgcgggtctatattttgcaggggtccatgactctttttggacacacgcgtgtgatgtggagaagatgaaccagatacttagagaaaaatttgtggagctttacagcatgccagttcttgagaatttgcttgaaagctttgagacatcatacccgtcgttggtttttcctcctctcccagagagaggcaactttgacttgcttgaggttctcaagtcgccgtactttttcaactgattctccgagaaaaacaacatttgtatatcatttgcagaaacactgctggcttgtacattcttttgcccttgagaatcaacaaagttcaattgaggactaaggagaaaatccatgtgggactcaactg

SEQ ID NO: 11989 - DNA, 314 bp, Gossypium hirsutum
  Clone ID: LIB3135-040-Q1-K1-A7
tatcattattagaggctagataagaaaaatattgtatggctcacttaatctgttatgttccagactatcagtcccacttgaagcttggggcaagataagatcaagcaagagccatcgggttttaggtttttcataaatctttagacattgaaggaagataattgttgtggtgataattcttgttccctcgacaaattgtttaaatttagtgtttagattcttgaatcatgttgtagatgcaaaaataaattagtatacaagtaaaaaggcttctcaactttgactcaggtctgggtcattgttattttggattc

SEQ ID NO: 11990 - DNA, 347 bp, Gossypium hirsutum
  Clone ID: LIB3135-040-Q1-K1-A8
cccgacttctggaagggatgcatttattagataaaaggtcgacgcgggctttgcccgttgcggtgatgattcatgataactcgacggatcgcacggcctttgtgccggcgacgcatcggctggtgcgtttcgtggggacgttaggtcgtatttggaccctatcataggccacttagcatgggctagaacacccttgcttgccaacatttacacttacttcagctattcaggcaatccaagggatatctcacttccatatgctcttttcacatccccttcacctgttgtatgggatcaaggacgtggataccaaaacctattcgatgcaatgttggattcattatact

SEQ ID NO: 11991 - DNA, 404 bp, Gossypium hirsutum
  Clone ID: LIB3135-040-Q1-K1-A9
aaagaaatcaaatatgggttccatttccaagagtttccttctccttgctcttctagcggctgggggtcttctcatttcttcggaagtggcagctcgagatcttgctgaaactaccactgaaaacaacaatggtgaggtggctaccgaaacaacccagcctgagctagaagataaacgctcagcttataatggaagaggacacggaggtaaaggagggtatggaggtgggcacggagggtatggaggtgggcacggagggtatggtggtggacacggagggtatggtggtggacacggagggtatggtggtggacacggagggtatggtggtggcggccactgagggtatggtggtggtggccaccgaggatattgtggcggtggacatggatgaggttataaag

SEQ ID NO: 11992 - DNA, 269 bp, Gossypium hirsutum
  Clone ID: LIB3135-040-Q1-K1-B11
aaaaaaaaaaaaaaaaataaaaaaaaatttttaatttttaaaaaagaaaaaaaaaaaaaattaaaatttaaaaataaaaattaaaaaattattttttaaaaaagctttttttaaattaaaaaaaattaaatatattagtaattttttatataaaaattcttttatttttttattttaaattaatttatttttaataatttataatatttttaaatatattatatattatattataatttatatttttttaatatatttaaatttatata

SEQ ID NO: 11993 - DNA, 428 bp, Gossypium hirsutum
  Clone ID: LIB3135-040-Q1-K1-B12
taacgatcgagctagtagcagctctagcagctccagtagttcaagcagcgattcttcgtctgggagtgattcagattctgggagttcatccggaagtgattccgatgcagacgatgcacggtcttgaaggcatgagctattcgattttggggcaaatccagttggaaaattgggtggtggggatgtagatgagaggtagattttgctaacatctgctaacaaactggaaaaaaaattagggatattagtaagtattaaatgctgaagatatgaacattttttttcctcttttttttggttgatgtacagggtggtggtggtgggttgcttaaatgttgtgtgaaattgtaatggttgctcactttggaggaaagaaatgtatgaaaatggaaaaggggagggcagctttgggaagagagaatggtgaa

SEQ ID NO: 11994 - DNA, 420 bp, Gossypium hirsutum
  Clone ID: LIB3135-040-Q1-K1-B3
ctgaaatcgatctttacaaatacgatccttgggaccttccagatttggcgttgtacggagagaaagaatggtattttttctccccgagggataggaaatatccgaacggttcacggcctaaccgggcagctggttctgggtactggaaggcaaccggagctgacaaaccgattgggcagccgaagccggtcgggattaagaaggctttggtgttttacgctgggaaggcacctaaaggagagaaaaccaattggattatgcacgagtatcggttagctgacgtggaccgatcggctcgcaagaagaacagtttaaggttggacgattgtgtgctttgccggatatataacaagaaaggcgccatcgagaaacagtcaccgcaaggaagcattggcaaaagctctgccgtgacggagatcg

SEQ ID NO: 11995 - DNA, 307 bp, Gossypium hirsutum
  Clone ID: LIB3135-040-Q1-K1-B4
gtggacttggccaaggctttcaaggctcttgcgaaggacaactcggtgcgggtcatcatcttgtctggagctggacgggctttctgttcaggcatgtatttgacggctgcacaagatgttttcaagggtgacgttaatgacccggagacggatctttttgtgcagatggagcaatgccccaaacccatcatcggagctatcaacggcgttgctattactgtcggcttcgagatcgccctcgcttgtgacatgctggtcgctgctaagggagccactttcggtgatactcacgccagatttgggatat

SEQ ID NO: 11996 - DNA, 421 bp, Gossypium hirsutum
  unsure (1)..(421): unsure at all n locations; Clone ID: LIB3135-040-Q1-K1-B5
atcactttggtttagtagtaaagtactgaagccatggcagcagggaagttttttgtgctgatagtaatggtcgtattaatggttgagggctcaagggcaatgaccttgtgtcgcatgaatgatcagggacttgatgcgtgcaagccatcggtgacacagccgaacccggtcgacccatcacccgagtgttgcaaggctctgaaaggggctgacttgacatgcttgtgttcttataagaattcggtgtggctaggtactttttgggatngatcccaaactttgncttggatttgccttcaaagtgcaagcttcaaatgcctagtgtttgctaaggtttccagaagagcatgaagctgctttctcatgtttgttggactttcacaagtttctttgtattggtttgatgtgaaaatctttgcaa

SEQ ID NO: 11997 - DNA, 429 bp, Gossypium hirsutum
  Clone ID: LIB3135-040-Q1-K1-B6
tcgacagaagtcaaataagaggaaaggcagaagcactgcacttgcctcaacattggctggcgttgaacctcctccgatagaagaaaatgaggtgagcaagaagctcagaaggcatttcattcttcttcgggacattaaagagaacgagagattaaggggtgagttggataggacagcatcagccctacagttatatgaagaatacaagaagcaacggaagccagccactctgacaaacaagaaaagcaaaaaagcaaaaacgacggttgggatgtgaaatatgcagagggagtgttttgccattgaattcacttcattttagaagttggcgtctggtaatgctgataattattcccatttatgttttaggttttacgtgcatccatcatgggttttatttcaatgagtataagtctttttttttctttt

SEQ ID NO: 11998 - DNA, 392 bp, Gossypium hirsutum
  Clone ID: LIB3135-040-Q1-K1-B7
tccggtttttgctcaaaaatccatctgcaaggaaacaaatggggatggaaggaagaaagaaggtagaaagaaattatctaaagaagcacatgtacaagagatttgtagaggttctgaccaggtgtatgagaagccgatagcatcctattgtgtctattttaggtccaccactctcattcttttatttattttcattaattaggaacttttctatcagtcatcagcaaccccctgtcatttgacgcacaatttctttagctatttcttttttctgtcaggagatgtgatattgccttttaattcagtttaaaagactttaaaagcacatataaacaattttcaactttgtaatctctccaatagtaaactcctttaaaaagatatatatattt

SEQ ID NO: 11999 - DNA, 434 bp, Gossypium hirsutum
  Clone ID: LIB3135-040-Q1-K1-B9
atttttggaggtttctgttgggatttggttttcgttttggttgaatgctacaaattggtcatcgccctatggcatgaaaatgctggttcctctacctgctccactgggccttgtgtgctttggaaaagtttacctattgttgacttcattttcttttgtttccatggggaatggggttaacttaacagatggtcttgatggtctggctggagggactgctgcattagcctttattggaatgtcaattgcagtgcttccagtatgccctgagcttgctatatttggagcatcaatggctggggcctgtgttggttttcttttgcacaaccgatacaaagcatctgtgtttatgggtgatactggatccttggccctcggtggcgcattagctgcaatggctgcttgtactggaatgttctttcccttattccttt

SEQ ID NO: 12000 - DNA, 274 bp, Gossypium hirsutum
  unsure (1)..(274): unsure at all n locations; Clone ID: LIB3135-040-Q1-K1-C1
ctttcccatcatgtgtcatcggnnagaagaagctgtcgtaacccaatgaggggagattaaagnttcaaaaggcgttgtgcgtcaacatctccgtcggtgaaagcggcgatcgtctcacccgtgccgccaaggtcttggaacaactcagtggtcaaacccccgtcttctccaaagctaggtacactgtgagatctttcggaattcggcgtaatgagaagattgcttgctacgtgactgtgaggggagagaaagctatgcagcttcttgagagtgg

SEQ ID NO: 12001 - DNA, 357 bp, Gossypium hirsutum
  Clone ID: LIB3135-040-Q1-K1-C10
cggacgcgtgggatcttactcaagcccagtatggtaaccccaggggctgaacacaaggggagggctaatcctgagactattgccaaatatacgctcacaatgctgaaaaagagagttccaccagctgttccaggaataatgtttttgtctggaggacagtcggagatggaagccacattgaacttgcatgcaatgaaccagagccccaacccatggcacgtttctttctcttatgcacttgcattgcagaacactgtactaaagacatggcaaggacgtccagagaatgttgaagctgcacagaaggctcttttggtgcgtgcaaaggcaaactctcttgctcaacttggaaaatac

SEQ ID NO: 12002 - DNA, 373 bp, Gossypium hirsutum
  Clone ID: LIB3135-040-Q1-K1-C11
cccacgcgtccgcgttggttcacctccagtgatgccatgctgttcccttctcaatgggctgggcgacctcgaagctgctgcttgcctttgtactgctatcagagctaacatcttaggcatcaaccttaacatcccagtttctcttagcttgctcctcaacgtttgttcaaggaatgttccaactggcttccaatgctaattaagtcatcacttttccctccattctttctcaacttccttgtggtgttttgtgtttggttttttataaagttatgatgtcataacttcattgttttaatttgtatcattcttgctttaatttcattgggagaattgatacagaataatatttttcttaaagtgtttttctttg

SEQ ID NO: 12003 - DNA, 408 bp, Gossypium hirsutum
  Clone ID: LIB3135-040-Q1-K1-C12
ctttcttctcttctttcaactcaaaaactcccaagtaatattagaatcatgggtgtgcgcacgtataactatgagtctacctctccagtcgcccctgccaggcttttcaaggctttttctcttgaagctgacaaggtttggcccaaggctgctcctcaggcagtcaagagtgttgaggttgaagctaatcctggccctggaagtatcgtaaagatcaactttgctgaaggccttccattccaatatatgaagcaccagattggaggacatgacgacaagaatttgtcatacaggtatagtttgatcgaaggtggaccttttggggacaagcttgagaaaatcagctatacaacaagttgaagcagctgctgtggaggaagccttgcagaactcgatgaatttacactg

SEQ ID NO: 12004 - DNA, 413 bp, Gossypium hirsutum
  Clone ID: LIB3135-040-Q1-K1-C2
cttgaatttaagttgcaagatactgcaagagttagtcacaacactcacttgttcaggttttgatttgatccctctgctaagttgggattggatgtcgcttcatgcatccttactagggctccattaggacaagatgctgaaggaaaaaccaaatatgtcatacgaccgtatactcctatatcagatccagatgctaagggatactttgacttattaatcaaggtgtatccagaaggaaaaatgagccagcattttgctagcttgaaaccaggcgatgtagttgaggtgaaagggcccattgaaaagctcagatactcacccaatatgaagaaacacattggcatgattgcaggtgggacaggcataactccaatgcttcaagttattgaagctatactgaagaaccctgatga

SEQ ID NO: 12005 - DNA, 342 bp, Gossypium hirsutum
  unsure (1)..(342): unsure at all n locations; Clone ID: LIB3135-040-Q1-K1-C3
cgggcgcccagcgtcgttgtccggacttttttccatgcaatacctaaactatggtgctgcagtgagtgaggtggagataaccttttaactggtcaaaccacaatattgcagacagatatcatatatgattgtggcaaagcttaaaccctgccgggtttaggacagattgaaggggcttttgttcaaggaatagggttctttatgcttgaagaataccccacaaactcaaaggattagtggttgcagaaagacttggtcatataagaacctactgggaactgacctaaaagttaatgttgaaatctgaacagggcatnataagaccgtgtctttcataaaagc

SEQ ID NO: 12006 - DNA, 402 bp, Gossypium hirsutum
  Clone ID: LIB3135-040-Q1-K1-C4
gtgggactgtactcgtgggcacatctcctcttgcctgtacttagtagcaaaaactgtaatcgacaatcgagagatctaattttacaactggtggaatggatcttatccgtctcaaaagctcgttcaattttagtaaataatgctgttagaaaaggggaacgtttggtgcctccatcttcatttgagatactgatgcgagctaccttccctgcatcttcatctagggtgaaggcgactgaaaggtttgaggccatatatcccacagtaaaggaagttgcacttgctggtgctcacggaagcaaagcaatgagacaagtggctcttcagatgttcgcctttgctatcaaagcagcaggagaaagctctcctgagttatccaaagaggcagctggaatagtcata

SEQ ID NO: 12007 - DNA, 470 bp, Gossypium hirsutum
  Clone ID: LIB3135-040-Q1-K1-C5
tcggaaaggaataacaccgactattgataggattgctgagagtctaaacatgtctcagaggaaagttaggaatgccacagaggcagtcagtaaggtcttctcccttgacagggatgcattcccgtctttgaatggtcttcctggagagactcaccatagttacattgcagataaccatgtagaaaacaatccatggcatggagtagatgagtgggcactcaaggatgaagtgaacagactgatcaatataacgctcggagaacgagaaagggagattatacggctttatcatggtttggataaggaaagtcttacatgggaggacatcagtaaacgcataggtttatccagggagagagttaggcaagtcggactcgtggcgctggagaaactaaaacacgcagcgaggaagaagaaaatggaagccatgctagtcaaacattgattttgtaacgcttcaacatacacat

SEQ ID NO: 12008 - DNA, 402 bp, Gossypium hirsutum
  Clone ID: LIB3135-040-Q1-K1-C6
aataaccgaacgaaaacgccagggatcatctacacaatgcctgcgttatactatgcgtggtggggcgtatcatcacatggcatggcatgaacatatatgcaccctacctcgggttccatcaaagcctgattaggactcgaaaaccaaacgggacatagcacccgttgcatgatataaaaagacacatactacacgagtctattgacttaattatcaccggctatccataaggaataattaaacagcgttctgctatcttgaaaccacgcgatgtatttgaggtgaacgggcccatttgaaagctcagatactcacccaatatgaagaaacacattggcatgattgcaggtgggacaagcataactccaatgcttcaagttattgaggctatactgaagaacc

SEQ ID NO: 12009 - DNA, 274 bp, Gossypium hirsutum
  Clone ID: LIB3135-040-Q1-K1-C7
atcagcgacatactcttttggtaaagatcgcatctgttagagaagtggtattaggggccccggcaatagtaatcctaaaacaccttgcttcaagaacagatgctcctgatatagatcagattgttgcacttgtgcatcggccaaatgagaccttcttgcttgttccttaagcagataaggtgactgtgttgtttacaatgagactcaaggactctatagatactgttttggcaaccgccttcctccatgaattaatggactcatggcgctcagc

SEQ ID NO: 12010 - DNA, 321 bp, Gossypium hirsutum
  Clone ID: LIB3135-040-Q1-K1-C8
tcgctggaggagcggcctaaggtcaggagttgtcaagaatatcctgctggagaaaccaggtccgggtcccaaactgatggttgctgtggagacaatgaatctgacactgtaatgaaagtggagtctgtgcagcagtcggatcctgtttgtgtcgataaccatagtgctaaaatcgatgaatgggtacttgtgacgccagaacagcttttggaggtgtcctgtgaagaacaagaaatggcattagcttcttctagtgttaaagaatcatgtatttgtaatggaacacacgtgtctgtacgggaaacaactgctgaaagactg

SEQ ID NO: 12011 - DNA, 416 bp, Gossypium hirsutum
  Clone ID: LIB3135-040-Q1-K1-C9
ctaaatcctgtcagaaccaccttcctgtgttaatagacatagggtatagagttataagctggagttttctagcagccaaacagaaaataatatttttttttcctgtggacaatgattggagttgggaagataaagcaatactcaaacatccttgagaagcccctcagcaagggcaaacaagaggttagcttgagtgcctttgcatttttgttctctgagcttattcagtaatcaaactcgggttgaccattgctgaattagaaagaaggttggaagattaagggtatgctgttggggcataacttttatcctgttggtggttatcttttcaagctggaaaagcctaatgcttatcacttctttaagttctagtgttaattaatgtttttattccattgtttgttattttattcata

SEQ ID NO: 12012 - DNA, 398 bp, Gossypium hirsutum
  Clone ID: LIB3135-040-Q1-K1-D1
cccacgcgtccggaagggatgggttcacagcaaaccggacactcgccaactcaaacttgccgggtttcaacaatactctcgaccgattaaagaacaggtttagcaatgtggggcttaacaccagcattgatctagtagccttgtctggtgctcacacatttggcagagctcagtgtttaacttttaccagtcgattgtacaattttacgggagtgggtgatacagatccgaccttgaacaccacatacttggaagaactacgccaaatatgcccacagggtggaaatagtagtgtgttgacaaatcttgatcccacaacacctgatggtttcgacaataactacttcacgaatctacaagttaatcgaagcttgcttcgaagtgatcagaatttattt

SEQ ID NO: 12013 - DNA, 432 bp, Gossypium hirsutum
  Clone ID: LIB3135-040-Q1-K1-D10
cagagattggaaaggagaaaatggagaaggcatctgctgccactgttgcatcatgaggggagttttggattaaaatttgagtttcattcatttagaagtggtttgatgaaagtctcatttcatttacagcattcattggttcatatggtcgtagagttgattgaacctcataaggttgaggttcaagtgcacatagtttgtgattttggtttggtgagactggcagaatcttgggcagaagatgcccgtctcaaccactttcttgttcatttcttttcaccagccgctcttttccattatttcttcacgttttgtcaatttattggttaaggttttcccagatttgttgtttctgggaggccgatcttctttcagggagtgtcaattgcgtagtatatcagatggcttttctttttcattcttctttttgat

SEQ ID NO: 12014 - DNA, 159 bp, Gossypium hirsutum
  Clone ID: LIB3135-040-Q1-K1-D11
cggacgcgtgggataattttctggtttcttttgttgatgggacatgagttcttgggtgtgtgtctaggttagtttaagccaaaaggctttaatagttgcgaacatatgaatctgcattgatttggatgaaatggatccatggctatggccattgtttat

SEQ ID NO: 12015 - DNA, 308 bp, Gossypium hirsutum
  unsure (1)..(308): unsure at all n locations; Clone ID: LIB3135-040-Q1-K1-D12
attaggaactctcaaccctccacttaatatggaaatgtacgaatcttggcggaaagttgccaagtgttgagtatgaggtctgtatatgatgtatatatctctctcttcaaattttccttgttttgttccttggttttcagtaatgtccaatttgttttagcagttnaaaaaaaaaaaaaaatattatataacttttatatatttatatataaaaaaaaattataaaaataaaaatataattaatataaataaaaaatatatattattaattatttatttttattttaatttttatttattttatttta

SEQ ID NO: 12016 - DNA, 382 bp, Gossypium hirsutum
  Clone ID: LIB3135-040-Q1-K1-D2
tcttaatctcactttagttactctctaccttccacagccgcctcatggccgattccgccacgggcgtcttcccccctcaaagtcattgctggagctgattctttcggcgccgagctaaaagacgccatggtatcccacctccgctccctcaacatagaagtcgaagatctcggaatcacctcctactacaacatcggtgctgaagtcggccgtcgagtctcttccgccaccacctccccctccgtggagacccgtggcctccttgcttgcggaacgggcgtcggagtcgggatcttcgccaacaaattccccggcgtattcgccaccacatgtctcactccggacgaagctcgcaacaatcgctccatcaataactgcaacg

SEQ ID NO: 12017 - DNA, 436 bp, Gossypium hirsutum
  Clone ID: LIB3135-040-Q1-K1-D3
acaaaatagaggaaggaaggggtacagacagaaaagtaaagcgctaaggagaagaggaagaagagatggcagtgagtgcaacggtgatcggagcactgctgggactgggcacccaaatgtactccaacgctctccgcaagctcccttatatgcgacatccgtgggagcacctgttggggatgggtctgggagccgcgttcgttaaccagcttgtgaattgggacgctcagctccaacgggaccttgacaatatgctcgaaaaggccaaggctgccaacgagcgccgctactttgatggagatgatgattaatgctttcgccctatcatcagaaaagacattcatgcgccaagcttctgtggtcataaaccggttcagattgtgagtggatgattttggactgcttgtttgttttggaaactacttttgcttttttt

SEQ ID NO: 12018 - DNA, 391 bp, Gossypium hirsutum
  Clone ID: LIB3135-040-Q1-K1-D4
gcgagaactgtgaaggacgtttctccccacgagttcgtgaagggctacgccgcccacctcaagacgctccggcaagattgagcttcctccatggaccgatattgtcaagggtggtaaattgaaggagcttccaccgtacgaccctgattggtactatataagagctgcttccatggcaaggaaaatctacttgaggggaggtcttggtgttggtgctttcaggaggatatatggaggagccaagaggaacggtagccgcccacgccatttctgcaagagcagtgggtctattgctcgtcatattctccagcaattgcagaatgtgaacatcgtcgatcttgataccgaaggtggtaggaaaatcacatcgaatggccaacgggatctcgat

SEQ ID NO: 12019 - DNA, 329 bp, Gossypium hirsutum
  Clone ID: LIB3135-040-Q1-K1-D5
aaagaatcctggtggaactgtcgcaccatgtggtggatatgttgccgggagaaaaggatgggttgatgctgcagcagctcgtctatcaacaccaggcctaggagttgactgtggctcaacccctggcgatatcatgcgtgccttttttcacggtttgtttcttgcaccgcaaatggttggtgaggcaattaagggaacctttctggttgctgaagacatggcttcaaaagggtataacgtgcatgctcttactcgagtcccccgcagtgatacagtacaggcagtgcatcttggaaaccgtgaacttctccttgctttctgtgaagctg

SEQ ID NO: 12020 - DNA, 317 bp, Gossypium hirsutum
  Clone ID: LIB3135-040-Q1-K1-D6
gcgctaacctgaaagaaaatttgaacctggagaatcatctaggagtcgatttaaagtcgaagatggggaaggaaatacattttatgacatccaagatttaacatttagtgactaggaaataaatgaatattctgacccacctccctgaaaatataaatcaaaaatttccatgaaaaccgtgctacttccacattggggcgtgaagctgccggcgcgtttattacgacatcaacttcctcttcgaggagacccggggcctccctgcttgccgaacggacctctgagtctatatcttttccaacaaatttccccgcgta

SEQ ID NO: 12021 - DNA, 294 bp, Gossypium hirsutum
  Clone ID: LIB3135-040-Q1-K1-D7
aagactcacaggaaacctggtctgttatgtccgagggggtccctttgttttgtcggacgtcggttcatttcatgtgaatttgtccaccgagtggactttattttgtctacattaatttttgcttctcttgtgttagagaaaaagggctccaatgcctaaatttctggccggggaaaaaaatataaagcccacgtcaataaacaacaattgaaatgggacactcatgatctaacaagacctcgtcactatacttgaaaaaggacaaagcttttaactagacgccgctactttgtt

SEQ ID NO: 12022 - DNA, 335 bp, Gossypium hirsutum
  Clone ID: LIB3135-040-Q1-K1-D8
ggctactcttgcttttatatccatgcaaagatgcttcaggaccatcgtaacagaggatttgatgatttccgtaacggcgcatgcagaaatcttgtttgtactgatctttttacaaggggtatagatatccaagctgtgaatgttgttattaactttgacttccccaagaactctgaaacatacctccatagggttggtcgatcaggaaggtttggtcatcttggattagctgtgaatttgatcacttatgaagaccgctttaacttgtataggattgagcatgatcttgggactgaaattaagcacattccttcacatattgatcatgctattta

SEQ ID NO: 12023 - DNA, 259 bp, Gossypium hirsutum
  Clone ID: LIB3135-040-Q1-K1-E1
cggacgcgtgggaaaatattttctcttcctttggggcaaatgattatatttttgattctttggtgtcgattgcacattgtaatgaaatcgaaaaagtgagagaaaaagaaaatgaagagaaagaattcgaaaaagaaattgagattgtacaagagtgcgagcgagaaaaagaaatcaaaagaaaagaaaaagagattgaaaaagaaaaagaaatcaaaaaagagagtgaggtcgaaaataaaattgaaaacgagagagg

SEQ ID NO: 12024 - DNA, 379 bp, Gossypium hirsutum
  Clone ID: LIB3135-040-Q1-K1-E10
cccacgcgtccggctagccttgtacggttttggtgcatgtggggttattcattttcgcgggtggattccaactgcgcttctactgcttattccggttgagattctccgatggatcattatactcattgctggttcagcctcatcatgctttgttgccttgaatttaaaatcttatatcgagggggcgaacgatctcaaaatgatggttgtcgcagcattcttgttgcaaatggcccttgcaatcttcatcaaggtttggttctttccatagtcaacttatgtagactatccgagcatctaaaaacccaaactttgattactttgtttctgtgaaatacgcaaaagaagatccgaattagatcgaggaaaagcttgtgtg

SEQ ID NO: 12025 - DNA, 438 bp, Gossypium hirsutum
  Clone ID: LIB3135-040-Q1-K1-E11
aagagctgtcacaatactcccaagaaaagacctgctcctttgaacctccacacacattgtgcgtgatccttatacactgataataactcttaacagatcccaagcagctgaaagctaactctatacagatgacggaaaaagctacaacttcaaacatggggcatacatacatcgccgctttgcgttctctaatgggcatctaacatcctctcccgttggcaactctaggttttcgtctgactgcattatcgagcgggttattcttcttggatatacccctggggctaaaaccgcacttgtcgaaccaggaaatcaaaatgctgaaatctaacttggtccacttctgttcggcggacaacatgctgcttttgctgtaaccatcccgaagcctgccgtgagggttgctgaagattgcaagaaaaaaattttgtatgatgt

SEQ ID NO: 12026 - DNA, 310 bp, Gossypium hirsutum
  Clone ID: LIB3135-040-Q1-K1-E12
aagccaccggtttatgcaccaccaaagaaagagaagccagaacctaaaccaccagtaggtgagtctcccaagaagccaccatatggtcactatccaggacaccctccattggagaagcctcaatagagagatttcctcggctaaccattcccgacaactgagctactatggctacatagataaattattatcactgcaataagagctgctgccggctcatgttctgttttcttgtatgtcatgtagtattgttttcttttactagcaagaatgcacatggcagtatcattggaatgaatgcctattctgt

SEQ ID NO: 12027 - DNA, 448 bp, Gossypium hirsutum
  Clone ID: LIB3135-040-Q1-K1-E2
ctatcgaaagaggtggctaaaagtatggctgaagatgctggtttgccttcatcccccgttgggcctcaatcgtcagcagcacctaatggattttctggcagcaagattgatgaagttcttaaagaaagttctttaggcagtcaagaaaaacccgaagtttctgctgccccaaaagcttcccataccgttgttaccagcgctgtcaagaagcctcttggtgcccgaaaggttaccgggaagaccggggggcttggtgccagaaagcttactaataggccaagtgaaaatctctacgaacagaagcctgaagaaccagttgtcccagttgcttcctctactaatgacattgcacccactggctcatcttttccatctcgttctcgttttgagtacgtagaaaatgttcaatctacttgagtgaatcatggtggcccacaagtgcttaatc

SEQ ID NO: 12028 - DNA, 319 bp, Gossypium hirsutum
  Clone ID: LIB3135-040-Q1-K1-E3
gcaggttaagctggaacagaagtattcttggtgggcttgtcgtagagtttgagcaaaagggggttgacgtgtccattaagactagggcacgacagatggagaggttcttgcgtgagcctatcaactttggttccctctgaaggatgttataaccgccaagtgaccatttcagtttccttgtgcaccaattgggttattccgagaactgcaaagaataattaatggtctttttgttttgcctctgttttcttctactcttgacattatatgatggaatgcatccattcacaataaaagaaactttctcggcatttctttt

SEQ ID NO: 12029 - DNA, 381 bp, Gossypium hirsutum
  Clone ID: LIB3135-040-Q1-K1-E4
cggacgcgtgggtgcaatcttagttttgggtagagatctcgtggtagttcctaaactcattggtccgtgacccccagcaatgtcatcaccagaagcatccccagaacgtcatatagaagatacatggatgcaggagctgaatgctaacaggcctccaacaccaactagaggtcgtcctcaagtagcaaatgatcgaggctctcttgcttggatatagtacatccttccaattgtttctatatacatactccttcaggctcatgctataccacatggggattctggctttctggatagagcatgctgccatatacaggcattttcctaccttgtaatctctcccattagaagttagaagggtttacaagattttggtttttt

SEQ ID NO: 12030 - DNA, 429 bp, Gossypium hirsutum
  Clone ID: LIB3135-040-Q1-K1-E5
cccacgcaaccgaattctcgcccttctccttctcagattaaagcagcttatataaggaaagggtgggaatcgcatcctgacttgtttccagttcacgaaaagcattcggcggagtctaagtttaagttgattgctgaagcttatacttgtctacggtctggttcaagaagaggaggttcgtactcagctacatattcacatgtcgtcagaacgggagtaccaaaggctcatgggggaagaagacaaccgggtttgattcagattcctttccttcttatacttctgggaactgttggacttgggggattaaatgcaaccagggcttatagaaagcaaaaagaagcatgcccttctcacaatccattccttccctgaccaagacattattctattttctcatttggcatcgatattggagattcaatttat

SEQ ID NO: 12031 - DNA, 318 bp, Gossypium hirsutum
  Clone ID: LIB3135-040-Q1-K1-E6
aacgaaccagatgctgtggtcgaagaacgcaaaaaggagtccgaagagctttctagaagagcgaagagaatgacaatagaaatcggaccgagcagctttgcatcaaggaagaagaagagtcggaaaaacacaagcagcttaattgcccttatggcttgtgaaggcgagtgtttttggcatgtaattcagctacaaattttccagttttttgtttggcaaaatagaaaggcaaattaccaaatccctttggattaaatgcgtttaattgtagtaaatttgacttgctcttttgatgtaccttaatctactctttctagt

SEQ ID NO: 12032 - DNA, 458 bp, Gossypium hirsutum
  Clone ID: LIB3135-040-Q1-K1-E8
ctgaaactctcagcaacaatgctcttaagagagaacggagggcaagagagaggcaggtcagagaagaggagaaaaagaaggtgaccacaaataagacaccagagaatcagaggcaacaggtggcaaataatgataccatggatccttcgcaattcctcagcaacagaatcaaaagtttggcattactaaaggaatctggtgtaaatccgtaccctcataagtttgatatttcaatgtctatcactgaatttattgacaaatatagaagtttgcacgttggtgaacatgttgagaacactgaaatctccttagcagggagaattttgaacaagaggtcatcatcgtcaaaactatatttttatgatcttcatggaaatggtgctaaaattcaagtaatggcagatgcaaggtacatacataaatacatacgcattccaacatggatgaaaatgagttct

SEQ ID NO: 12033 - DNA, 251 bp, Gossypium hirsutum
  Clone ID: LIB3135-040-Q1-K1-E9
cctgcagatactaaggaggagtaacatgttcgagctttagctgtttctgtttcgaacaggtgatcactcgttgtactggacatgccggaagagacagcattgtgttgttcgaatgaatgtgaatcgtcttctatatataaactcaagttagtgcagatactgtttctagcaaaacttgcctcaataattagttccatcaaaaaaataaatgttaaaaaacctggggattcagacaaatacttattatgatg

SEQ ID NO: 12034 - DNA, 316 bp, Gossypium hirsutum
  Clone ID: LIB3135-040-Q1-K1-F1
cccacgcgttcgctcaaaagaaaagaggaaacgcccaacgtggttcatctaacgcacttaaccgcgccagaatccatctatcatctccgccttggatttgcctccttggcctctaaaccttactcgtcagcttggtactcgtgggtgctctggcccgttacattgtgggccatggtgcttaccacgatttatcgtcgaactcttgttgttgaaaggaaccgctttcatcagcttagattacaaacatgggccatacccaagtacggcatataataccgcttgtaatggcgaaaggaatacgtcaataacatgattg

SEQ ID NO: 12035 - DNA, 414 bp, Gossypium hirsutum
  Clone ID: LIB3135-040-Q1-K1-F10
attttgtctaaaaaagaaaaatgccaggcctcaccattggagacacagtgcccaaccttgaagttgaaaccacccacgggacattcaagcttcatgactacttcaacaatgggtggaccatcattttctctcatccttctgatttcacgcctgtgtgtacgacggaactggggaagatggcggcttacctgccggagtttgaaaaacgaggggttaagcttctaggtttctcttgcgatgatgtgcagtcacacaaggagtggatcaaagatgttgaagcctacacgcctgggtgcaaggtggcatacccaatcgtggcagatcccaagagagggatcattaagcaacttaacatggtggacccaaatgaaaaagactcttcagggaacgagctcccatctagagctctgcata

SEQ ID NO: 12036 - DNA, 370 bp, Gossypium hirsutum
  Clone ID: LIB3135-040-Q1-K1-F11
cctacgcgtccgaaataaaaataaaaaaaaaaataaaaaaaaaaaaaaaaaaaatagggggaggtgttaatataataaaaaaaaataaatttataaataaaaattaaaaaaaaaattaatattataatatcctgttcaagattcaccaaaaattttgcaagacaccataactaacaattttattaccatccccacaatcatcgcctgtacactcattctatttattcacgactgtctttctaacggttgcgatagttccattctcatatcttacactttatttaacaaatcttaacgttattccgatataatactttatttttcctttgaagatccattttgaccttattttttctaatctaaaacattt

SEQ ID NO: 12037 - DNA, 403 bp, Gossypium hirsutum
  Clone ID: LIB3135-040-Q1-K1-F12
gctgaaaatggcaccttcatctccgccacaaacaccgccgtccgccgtggttattgggctcgggttactcttctccacggcattgctttgtgaatcaaggttaagcttagattactactccaaaacctgtcccagtttcaccaaaatcatgcaagacaccataaccaacaagcaaatcaccagccccacaaccgccgccggtacactccgtctatttttccacgactgtcttcccaacggttgcgatggttccatcctcatatcttccaccgcattcaacaaagctgaacgtgatgccgacatcaacttatctctccctggagatccatttgacctcattgttcgagccaaaacagcccttgaactcgcctgtcccaacaccgtctcttgctccgacatcctc

SEQ ID NO: 12038 - DNA, 389 bp, Gossypium hirsutum
  Clone ID: LIB3135-040-Q1-K1-F2
cccacgcgtccgcccacgcgtccggttttctttcgccgttctaaatcacagaaagctttgaggaagaagcttttggaggtgcaaaacatggggccgaagaaaggtggaaaggtggctgtgcccgccaagaagaaacaagagaaggttgtcaatccgttatttgagaagcgtccaaagcagttcggcattggaggggctttacctcctaagaaggatttgcatcgattcgtgaagtggcctaaggttgttcgtattcaaaggaagaagaggatcctcaagcagaggttgaaggttccaccagcattgaaccagttcaccaagactcttgacaagaacctcgcaacaagtctgttcaagttgctcctcaagtacaggccagaggacaaagc

SEQ ID NO: 12039 - DNA, 261 bp, Gossypium hirsutum
  Clone ID: LIB3135-040-Q1-K1-F3
cttttttgccagtactttcactttatttgacttttttttcccctttatttaaggctaagtagggttaattatgagatgaatacgggatgtaagagatgcatacgggggaacttgcttgcatggttaaaggtgggtgggtagtatcggaatggaagatttggggattgggatagtttttaaacataaatgctgccgggaatgcatcgtttacaccataaagtgcctggcggctgtgggtggaataaggaaaaagaccatatt

SEQ ID NO: 12040 - DNA, 318 bp, Gossypium hirsutum
  Clone ID: LIB3135-040-Q1-K1-F4
cccacgcgtccgcccacgcgtccgactagttctagatcgcggcggcgccctttttttttttgtgataggtttttttttatttcttaaaaaccataccaaagatctttttaatatacccttatttccccaaagaatgcacagacttcaattataacctattttacttatactttctatctttccttcaaaaaaaggcgtttaatgcaataaataatttgcttacaatataaaaagtggcttaaaattgttcttttcaaaagaaaaaaaaaaatctttaactaaacgctttaaattttccaaaccttttatccctttcac

SEQ ID NO: 12041 - DNA, 355 bp, Gossypium hirsutum
  Clone ID: LIB3135-040-Q1-K1-F5
gtcacgcgtacacaaattactcaagcttggtcgattttacatatcacacttaagaggggacggtccattatatatcctcatacgccatataccaatgcctttctccaccaaaacgaacctgatattttggttgcttgttttgcgaaaacaacccacattgtctgtctaattcactaaccaagatttagcgttcaacacataaagctaacaaataccgctctcttgctcttactttcctcacatgggccactccttggacctgaataattaaccgcgttagatgagtgaacgaattctccatcgacatccctgacccacctgctttagaccctccactaataggtaccacaacttt

SEQ ID NO: 12042 - DNA, 353 bp, Gossypium hirsutum
  Clone ID: LIB3135-040-Q1-K1-F6
cccacgcgtccggaaggatccgaagaaggctcttcacctcgggcttccgtttcagacaatgggggctacaacagtgcaaatttggcatctaaaagggctctcatttccaagctaaatgaggagaaaaacgccaccattctggaaaataacaagctccagcaagaactggaactcttgggacgcgaagcgaagagagattacagtggtatgaagtttgtatacgtaattcttgttggtttagtcagcatcattctggggtacctcttgaaactaacatgaccacggcaccaaggtactactactactactattctattcttcgatgccgatacaagctcgaaaaaaatgtagag

SEQ ID NO: 12043 - DNA, 272 bp, Gossypium hirsutum
  Clone ID: LIB3135-040-Q1-K1-F7
ccacgcgtgcgctgacattccagatcttagcttatttttcattatttctctcaccccattctcatctaagtggggcaggtcttccatttaactcgccctgcttcaccaacattctacaaatactatctctcatatacaataaagactaatttgaatcgtacattaaaaatttttgattgtataaatcttaaacatacatgctatctacaaagcataacttacacctatcatgtacatccttttgtgcgttccctaactaaaaacaacatctt

SEQ ID NO: 12044 - DNA, 384 bp, Gossypium hirsutum
  Clone ID: LIB3135-040-Q1-K1-F8
ggaatatttacattcaaaaaacattgtgcattttgatttaaaatgtgacaacctgcttgtgggcttgaaagatcccgtacggccaatttgcaaggttggggacttcgggttgtcaaagataaaaaggaataccttggttactggtggtgtgaggggaactcttccatggatggccccagagctgttgaatggcagtagtagcaaggtttctgaaaaggtcgatgtgttctcatttggtattgttctatgggagattcttactggcgaggaaccgtatgccaatatgcattatggagcaataatatgaggcatcgatagcaacacgctcaggccacctgtaccaagctactggtacccagaatgtgaagtactaatggagcaatg

SEQ ID NO: 12045 - DNA, 428 bp, Gossypium hirsutum
  Clone ID: LIB3135-040-Q1-K1-F9
gatacctacactctaaatattacatgatcatcttcatataacgatcaacattccatgcggggacccagaccttcataaatgctcaatgtaaaacatcatttcttaccgatacccacgccgagtacacattaccaagattgaaaacgcactaaaaatcgtactatgcaacatgaagttatatcataactccagaacatgcatacaactcatgttatatagcgaggaagaccagctttctgtcggacagatgcaaaaattctcatatatgctatagcattacttatgcatctcaagatattcttcttcttgatgaagccacatgatctctacatgctactagcaactacctcgaccctgatgccatgcatactctgatgaaagcaagaactgttttagtgatcgctcatctgatattaacggtccaaaca

SEQ ID NO: 12046 - DNA, 354 bp, Gossypium hirsutum
  Clone ID: LIB3135-040-Q1-K1-G1
cggacatccgagatttgagctcattcgtcatgatgtcactgagccgttgctcattgaggttgggcagatctaccatcttgcttgcccggcttcgccaatcttttacaaatacaatcctgttaagacaataaagacgaatgtgatcggtacattgaacatgttgggtctggcaaagcgtgtcggagcaaggattttacttacctcaacttcagaggtttatggagatcccttggaacatccccagactgagagctattggggaaatgttaaccctatcggtgttcgaagctgctacgatgagggaaaacgagtggctgaaactttgatgttttattaccataggcagcatggcat

SEQ ID NO: 12047 - DNA, 434 bp, Gossypium hirsutum
  Clone ID: LIB3135-040-Q1-K1-G10
catgatcattaatgaaactctacgattgtatactcccttaaatgggatggtaagaagagctggaagacaagttcaagtgggaaagctagtcttgcctgctgaagtagatgttttgatcccaaacatggcacttcaccatgaccctgagttatggggagacgatgcccatgttttcaaaccggagaggttcgaggaagggatcgcgaaagctaccaagtacaatgcggctgcatttattcctttcggaatgggacctcgagcttgtgtcgggatgacctttgcaatcaatgaaacaaagactgctctttccatgattctacaaagatacaccatttctctctcccctgcgtatgttcactcacccgcacctcgtatcacagttcaaccacaacatgggattcaagttatgctcaattcactgtctaatgatgctt

SEQ ID NO: 12048 - DNA, 439 bp, Gossypium hirsutum
  Clone ID: LIB3135-040-Q1-K1-G11
gctgaaaatggcaccttcatctccgccacaaacaccgccgtccgccgtggttattgtgctccgcttactcttctccacggcattgctttgtgaatcaaggttaagcttagattactactccaaaacctgtcccagtttcaccaaaatcatgcaagacaccataaccaacaagcaaatcaccagccccacaaccgccgccggtacactccgtctatttttccacgactgtcttcccaacggttgcgatggttccatcctcatatcttccaccgcattcaacaaagctgaacgtgatgccgacatcaacttatctctccctggagatccatttgacctcattgttcgagccaaaacagcccttgaactcgcctgtcccaacaccgtctcttgctccgacatcctcgccgtcgctactcgtgacttagtcaccatgcttggg

SEQ ID NO: 12049 - DNA, 415 bp, Gossypium hirsutum
  Clone ID: LIB3135-040-Q1-K1-G12
gctgaaaatggcaccttcatccacggctcatacaccgccagccgacgccgttattgaggtgcgcttactcttctccaccgcattgcctctgtaatcaaggttaagcttagattactactccaaaaccagtcccaccttcaccaaaatcatccaccacaccatatccaacacgcaaatcaccaaccccacaaccgccgtcagaacactcctcttatttttccacgactgccttcccaactgatcctatgcttccatcctcatatcttacaccgcattcaacaaatctgaacgtgatgccaacatcaacttatctctccctggagatccatttgacctcattgttcgagccaaaacaacccttgaactcgcctgtcccaacaccgtctcatgctccgacatcctcgacgtcattact

SEQ ID NO: 12050 - DNA, 432 bp, Gossypium hirsutum
  Clone ID: LIB3135-040-Q1-K1-G2
attggaaccgttgatgattctaatcgcgaaattgcagctttctttgcgcatgtgacgcacgagactggacatttctgctacatataagagataaacggggcctcaagagactactgtgatgaaaccaacacacagtatccatgcaaccctaacaaaagctactatggccgacgaccaatccagctatactggaatttcaactacggaccagctggcgagagcatcgggttcgatggactaaactagcctgaaaccgatgccaccgacccaattatgtacttcaagaccgcagtctggtattgagtgaactctgttcaaccagcgataaaccaagggttgggggcaaccattcttgccattaatggagctctggagtgcgatggtgtgaacccatgcaccgttgagcgacgggtcgagtactatatcgattat

SEQ ID NO: 12051 - DNA, 264 bp, Gossypium hirsutum
  unsure (1)..(264): unsure at all n locations; Clone ID: LIB3135-040-Q1-K1-G4
atccaacattaaaagaaaaaaaaaaatcgtatatgcatgctcacacaccaaccaaaagcagcgcacggggccacactttcatactaaaccagattcttttaaataaaggcgntttattttcctttatttcttaaaacgggcaccacaaacggcgacatgatcctccaaaaaagtnnaattctaataatcaacccttcaactgaaccaaaccgttatgaatctgagatctcttattaaaaaccttattacaaaacccctaacaaa

SEQ ID NO: 12052 - DNA, 381 bp, Gossypium hirsutum
  Clone ID: LIB3135-040-Q1-K1-G6
gcgaaaaaaaataccaaacatgtcgaaatcggtgattgaaatgcccccaaagggcggcgggagcgggcgatctttgttaaaaaaacgagatgctttcaaagaaaggcgatttttttgctgcatttcataaaacgggtaccacacaacgccggcaagagcgtccacgaggcgcggacccaagcagcatacactagagcaactgaacgactcatagtttgcgataaaaattgtgaaaaaaataattacatggtcaagaacatttactgtcgcggagcttgaactgatactgacacataggctgtaactgacattgtccgttcacagattcagctacaccgctatcataccgctatagagcccatggttgcgacagcattgacc

SEQ ID NO: 12053 - DNA, 456 bp, Gossypium hirsutum
  Clone ID: LIB3135-040-Q1-K1-G7
cgcgtaaagtaactataattttacatgttctgctgcaataggctgaccatatacctttggggcgcgcaagacaagaaacccagacttcatattaaaaaacaaagtgccataagtcatatgatcacatactctctttgcttgaagctgaagaggatgagccaaaccaagacctgtcttctctcctcacaactttgcaacaggaactttcttctgactctgttttagatgacccccttccttacccaacatcagccgacttagatgctggccaaaaaaaccccaggcctaacaccacagcagaagctaccaataccaacaccatcaccggcagcttagaagacgaagatattcaggatgataaagagaaagtcatacgccatttgcttgaagcttctgatgatgagcttgggaatcctaataaggaacatggttttgatgttggagtttttgagtttg

SEQ ID NO: 12054 - DNA, 437 bp, Gossypium hirsutum
  Clone ID: LIB3135-040-Q1-K1-G9
cgcatatggatattcagtggtgacacagatgctgtaatcccaattacatccacccgcgacaggatagatgctctcaagcttgcaactgtgaaaccatggcatgcgtggtatgatgatggccaggtaggaggatggacccaagagtatgaaggactgaagtttgtatcagtgaggggagctggacatgaagtccctttgcatagacccaaacaagctctcgccctcttcaaagctttcttatcaggaacctccatgcctgcgcctgcctctgcctctgcccctgcccatgcccatgcttctcagctactcatctccgactcctgaacttttgggttgatttcatttcatgctttctcaatgtaatatctactttgggggattctaatgttcccgctttcccaaaacattcaataaaattttcaattaagaacaatcat

SEQ ID NO: 12055 - DNA, 452 bp, Gossypium hirsutum
  Clone ID: LIB3135-040-Q1-K1-H1
cccacgcgtccggcaacttttcttttccctgtcctgctgcaatggctgagcagatgcctttagggcgcgcaagagaagaaacccagagttcagatgaagaaacaaagtgccataagtcatatgatcacatactctctttgcttgaagctgaagaggatgagccaaaccaagacctgtcttctctcctcacaactttgcaacaggaactttcttctgactctgttttagatgacccccttccttacccaacatcagccgccttagatgctggccaaaaaaaccccaggcctaacaccacagcagaagctaccaataccaacaccatcaccggcagcttagaagacgaggatattcaggatgataaagagaaagtcatacgccatttgcttgaagcttctgatgatgagcttgggattcctaataaggaacatggctttgatggtggagttttt

SEQ ID NO: 12056 - DNA, 422 bp, Gossypium hirsutum
  Clone ID: LIB3135-040-Q1-K1-H10
gcacttcgcaaacttgtgccaaaacaccttcgtaagtgttcaacatttgagctattggctgcgtgtttatggcgttgtcgaaccatcgcaattcaagctaatcccgaggaagaggtacgtattatatgcatcgtaaacgcacgttccaggtttaatcctccattaccttcggggtactatgggaatgcattcgcgttcccagtggcagtagcacaagcagggaaactttgtcaaaacccattagggtattcattagagctagtgaaacaagcaaagaatgatgtaacagaagaatacatgaaatcattagcagatttaatggtgattaagggtcgaccacatttcacggttattcgatcttacctggtgtcggatgtgacacgtgccgggtttgatgatgcggatttcgggtggggcaaagc

SEQ ID NO: 12057 - DNA, 334 bp, Gossypium hirsutum
  Clone ID: LIB3135-040-Q1-K1-H11
gttctctccaaaatatctgctttttcttagttttcctttttgtcccttgtttatttgggatgggcccctcatggccgccgctgatgtcgagttccggtgcttcgtcggagggctcgcatgggccaccgacgaccgggccctctaagaagccttcagtgcgtttggtgaaatcgtcgaatcgaacatcattaatgatcgtgagactggaagatcccgaggctttggattcgttactttccgtgacgagaaagctatgagggacgcgatcgaaggaatgaacggtcaaaatcttgatggaaggaacatcaccgtcaacgaagcccaatcgcgcaaa

SEQ ID NO: 12058 - DNA, 374 bp, Gossypium hirsutum
  Clone ID: LIB3135-040-Q1-K1-H12
cccacgcgtccgggtgttgagcttcatgacacggtaatgttgggagcagactattagcggagtgaacctgaaattgcttctctattggcagagggtaaggtcccgattggaattggacgcaatagtaaaatcaggaactgcattattgacaagaatgctaagattggaaaagatgtggtcattgtgaacaaagatggtgttgaagaagcagatagaccagaagaaggattttacataacgtcaggtttaaccatcataatggagaaggcaaccatagcagacggcacatttatataaaaatgggggaccttaaaaatgacatccatgggggcagctttgaagatcggaattcgagttgcgaaaaaagccaccga

SEQ ID NO: 12059 - DNA, 374 bp, Gossypium hirsutum
  Clone ID: LIB3135-040-Q1-K1-H2
gggattttgaagctgttcatgtagttcgaggggaaaaggcacaaaatataaaactctggccgggcttgggcgccgatacctctcctggtgctcttctcacaaagctcaaagtattgattcagccttggaggaatctttacatagcaacaaacgagccattctataattactttgataaattaaggtctcaatataaggtccgtctgcttgatgactacaaggaattatggagtaacaagagcgagtggtacaatgagacaacattgctgaatgatgggaaaccacctgagtttgatggatacatgagaagtgctgtggacactgatgtactttactcggcgaagacgcgtgtttaaaccttttacaatttaact

SEQ ID NO: 12060 - DNA, 360 bp, Gossypium hirsutum
  Clone ID: LIB3135-040-Q1-K1-H3
cccacgcgtccgcccacgcgtccgcaaaactctatcaaagaccaaaagtccagattttccttggaaatggacttttctcatcaaaaccctaactctaaccctaattacactttcttccctgaaaacgtcaatcccatgcccgattttgaggtctccgattatctcgatcttgacggcagtatcttcgacgacgatacatcgtcggagaaaggcatggctgcagctactgaacttagtggtgcaacatcaaaaaatagtaacagaaaatgcaaaaatggagtggggaaaaacaaatcggaactgggggtacgagttgcgtttagaatgaaatcagagatggaggtgaccgatgatggatac

SEQ ID NO: 12061 - DNA, 355 bp, Gossypium hirsutum
  Clone ID: LIB3135-040-Q1-K1-H4
gaggttttaggcttcatcagggttttggggaagccaaagaaaacatggcggctacttgtggaagaagaaccctagggttctcctgctcctcggccaagaccattttcacccatttaccatcctcaacacctgctaacaataagctacccggccttttctctcctaacaaaatttctgcttctcgattctctctccgcaatctcactttttccaggctcccattggaattgggtggtgcagtaactttgatgcctttgcatagtgttacggcttctgctttgttcacttccttgctgtctttgcataatcaaagctgggggtgtttgtcagaaagatttgcaactcctctatagca

SEQ ID NO: 12062 - DNA, 333 bp, Gossypium hirsutum
  Clone ID: LIB3135-040-Q1-K1-H5
gaactaaaggaaacaaaggccttcatcttagcactccgccgccccttatctcatcgcaatcgtgatcatcccagaaaagaaccgcagggagatatcaaagtacctctttcaagagggtgtttgctacgccaaaaaagattacaacttggcaaaacacccagaaatcgatgttccaaatcttcaagtaataaagctgatgcaaagcttcaaatccaaggaatacgttcgtgaaacttttgcttggatgcattattactggtaccttaccaacgatggcattgaatttttaaggacttaccttaatctcccctctgagattgttctgctactttg

SEQ ID NO: 12063 - DNA, 330 bp, Gossypium hirsutum
  Clone ID: LIB3135-040-Q1-K1-H6
tccacgcgtccgaaaaaggtgcttcagttagctggaattgaagatgtcttcacttgtgcaaggggttcaaccaaaactcttgggaactttgtcacagccacctttgaatgtcttctgaaaacatatggttttttgacaccggatttctggagagagactcgtttcacatggtcttcattgcatgagtatactgatctgctgggaaagccatccaagaccctttttctgtaaaatatcgagagagtcgatatctcatcgaagatcaacagtgtcattactcattagttagttggatgcatgtctaagtcctttctatcttgcaatctttac

SEQ ID NO: 12064 - DNA, 342 bp, Gossypium hirsutum
  Clone ID: LIB3135-040-Q1-K1-H7
gccacagctaccaaaatttcccaaactaacttttaaagcaaacaaattttacctttgctaaagggcccccaaagctgagaaaaagccagccgaaaagaaaccggcggaggagaaaaagaccaccgttgccgagaaatccccggcggagaagaaaccgaaggccggcaagaagcttccaaaagaaggcggtgccgccgctgacaagaagaagaagaaggccaagaagagtgtggagacttacaagatctacatcttcaaggttcttaaacaagttcaccctgatatcgggatctcaagcaaagctacggggataatgaacagtttcattaacgatatctttga

SEQ ID NO: 12065 - DNA, 311 bp, Gossypium hirsutum
  Clone ID: LIB3135-040-Q1-K1-H8
agaaaacaaaacagatagcattccttctctctctctccctctttctcttctcctcttagccggccccatggccggccatgggttcatcggagggtgtctccacacccatgaacggcggccggtgttaggtgaaacgggcccctttcggtccttctccgaacgagtacggaatcggggccttcacgacttgcagtaccacaaagaacggagggacccctcggctctctttctctccgttacggacaatggccagaccccgaggggttaggcgacctacagatcggcaagagcgtaccggagcacaccccgaa

SEQ ID NO: 12066 - DNA, 436 bp, Gossypium hirsutum
  unsure (1)..(436): unsure at all n locations; Clone ID: LIB3135-040-Q1-K1-H9
cttggctctgctaatcgccacttgagatcttcaaacaggaagaaaatggggttcattgtgggatttgcagagaatctggtgttgaggttaatggaggacccaaaagagagggatagaaaattcagagaacacgtttactctatgaaggatcgatgcgcaaaaaccaaggagatgtggagttatccactgcggccttatgggttttggacatttgagcgccacaatgctcagctccgttgggatcctcagattagccaagtccccggccgcagggatccttatgatgaccttcttcaagacagntatgcgtcttcctccaaacgaaactgaggaatcagaagccattagcagatggtttggagcttgatctacaaatgggaagtggacattgaaaccctttttactgttttgttgaatttattttcaattgtgctac

SEQ ID NO: 12067 - DNA, 271 bp, Gossypium hirsutum
  Clone ID: LIB3135-041-Q1-K1-A1
accaccctttcttccactcatccgaaactatagccgctctctcgaagcatatacaccctcaagggatccgccccgctcttacaacaaccttgaagactacatctacaaaggtcgtccgaacaggatagtctcttctaacacaacagtattatgaaacaaaagacattatacttgaaggtgccattactttagactataggagtgggcacatgaatgctagagccgctatcgattcgaggctaatgattgataaaggttatgatgattatat

SEQ ID NO: 12068 - DNA, 303 bp, Gossypium hirsutum
  Clone ID: LIB3135-041-Q1-K1-A10
atcaatgtaatgtattcattcggttctcggttcataacttaaaaaaaaaaaaaagggaccgggatattattaaaacagaacagaaaagagccgaaccgaaccgaattttattttaatttaattttagctagtgtttaatttctgatggtataaaaataaataaatatattttatttctaaaaaaaaaaaaaaaaaaaaaaaaaaaaaaaaaaaaaaaaaaaaaaaaaaaaacaaataaaaaaaaaaaaataaaataaaaaaaaaaaaaataagggaaaaaaaaaaaaaaaaggggggggccgt

SEQ ID NO: 12069 - DNA, 385 bp, Gossypium hirsutum
  Clone ID: LIB3135-041-Q1-K1-A11
cagtaaactaattgtggcatatgggacaaggattttatctcttcctaatcctgctgatatatgtgccttcaagtacaagggaatatggatttcactaactattctggcaagaggtcttgctggaaactatgtaaactttggtgttttcgaactctatggtgatagggcactctccgatgcactcgacattgctctaaagatgaacattgtcaattcctttggccgatatattggcatttcggaagctaacgagggcgtacttctcgttcttggaggttctattcaatagccacattaactttatattgaatttagatgcagcaaccttcatgcatattggtggttcccttgaatctggtcttaaaggcctggatataaatatctc

SEQ ID NO: 12070 - DNA, 396 bp, Gossypium hirsutum
  Clone ID: LIB3135-041-Q1-K1-A12
cccacgcgtccgtgaagatgggaggacccttgcagattacaacatccagaaggagggcacccgccacctggtccttcgcctccgcggcgggatgcaaattttcgtgaagaccctgactggaaagaccatcaccctggaagttgagagctcagacacgattgataatgttaaggccaagatccaggataaggaaggaatcccaccagaccagcagaggctgatttttgctgggaagcaacttgaagatgggaggacccttgcagattacaacatccagaaggaatccactttgcacctggtccttcgcctccgcggtggcttttaagtgtggtgccgaacacctgtccagttattgttgatgtgttaagcttgtatgtgtgtgggtcgtatgctaat

SEQ ID NO: 12071 - DNA, 369 bp, Gossypium hirsutum
  unsure (1)..(369): unsure at all n locations; Clone ID: LIB3135-041-Q1-K1-A2
acgcccacgcgtgcggacacgcgttcgggttgtgcattgaacatggattgtcaattagcacttctttataataggaaatgcatccccttcaataataatgtttgaccattgcatgtccctgcctatttgagttgttgttcgacacgctattgcttctgcggcaaaggctgatgccacatgatgatgaatccttgtacatgataaaagtgtgtttccgtcactatccctggccacgatacccgctgctgattgccgtgagttcccatcaaatgctgcatcgaagttaaccttcacanactggaccgatctattagtcttttcatgcacctctcctattcctttctccccatattgcccaaagagcgcaac

SEQ ID NO: 12072 - DNA, 221 bp, Gossypium hirsutum
  Clone ID: LIB3135-041-Q1-K1-A3
aaatatacaaaattaaatttcttactctcttctggattattcaggtattttggcgtgtcttatattaaattacaattacaaccaaataaatctttgccttgtgcttcagtaaataaaaaaaacacaaaaaacttataaaaaaaaaaattaaacaaatacaaaataaaaaaatttaacatattaaaatgagtgttatattcattattaataaaaaacaaaaa

SEQ ID NO: 12073 - DNA, 390 bp, Gossypium hirsutum
  Clone ID: LIB3135-041-Q1-K1-A4
accagatcagcagaggttgatttttgctggcaaacagctagaagatggtaggacacttgcagattataatatccagaaagagtctacccttcacttggtgctccgactgcgtggtggaatgcagatttttgtgaaaactttgactggaaaaactatcacattggaggtggagagctcagacacaattgataatgtgaaagccaagatccaagataaggagggtatcccacctgaccagcagaggttgatttttgctggaaagcagctcgaggatgggaggacacttgcggattataacatccagaaagagtctacccttcacttggtgctccgactgcgtggtggaattgcagatttttgtgaaaactttgactggaaaaactatcacat

SEQ ID NO: 12074 - DNA, 376 bp, Gossypium hirsutum
  Clone ID: LIB3135-041-Q1-K1-A5
cggacgcatgggctgacacttagacgaactcatgctctagaccattgatcggactcatccatcggacatcgtggggagctttttacgtgacgctctaatttaatgaatccagtaacggtatatgccaattgttgatcgaagggtctatgccacttaaactcaaatctatcttaccttcaatccatctttgttcagccagctcataacaaaatgttagaccgggctgacacaaccaaattggttgaagaaaaggaaaccccagcgaccaatcactcccacccccaaaagtggagaccgaacaccgtcaggttgtcgaggacacgtctgaagaggaggcgggcgcactctaagttgaccaccctacccactaatggac

SEQ ID NO: 12075 - DNA, 350 bp, Gossypium hirsutum
  Clone ID: LIB3135-041-Q1-K1-A6
ctcgctttcttacttcaatctgcttctactaccctatcaatttcagggtgggtttctgccgcgtcaaggagtcatccaaccagagggctgtccggcacgcttttgcttctgccccaaaagttgaggaaactctttgatgaacctaccgacatgatctaagaactaaaccctacttattacgggccacaactacgataaccgctttactttgtctaccatcgtatgccgcatcgtaattgattctgactaccctgcccactggctttatgcatattattacggtctatcgctcctgtctgcccagatggcccatactactacacacaatatttgatgctgaagagtcgagc

SEQ ID NO: 12076 - DNA, 302 bp, Gossypium hirsutum
  Clone ID: LIB3135-041-Q1-K1-A8
ttggatatacgctccgattgtgcattgataatggcttgtcagtgagacttctatataatagggaaggcatgccgttcaatactgatgtgctgaccattgcaagtacgtggctactgaagtgctcaaagatcacggttatgatggtgcatcatatgatatttcgtcatgcggaggaatcctcttcgtgatcatggctggttattggccctttgatgagccaagcctcataggcttgtataacaaaatctgggaggcttctttcagctgtccatcgcggttttcatctagtgctaggaatttga

SEQ ID NO: 12077 - DNA, 373 bp, Gossypium hirsutum
  Clone ID: LIB3135-041-Q1-K1-A9
ataaaattgtttcctgagaagatatataaaacagctttgtagacctttttgtgaagattaatggatgcgggaggatccaaaaccaaagcctgcagcatttatccaggtaattgtatctaaaatcagttgcatgattacctgaattgttgcctatttataggccaaataaaacaggtttgcagaccagttttctactaagataaatacatgcacaatgatccaagaattggagagtttgtgcgaccaggggactatttggctgcttttatgatgtggatttctgggattggttgaatcctggataaaagactacctgtgatttgatgctactgctatactactaaaattcacttgcctttttcgtatataacct

SEQ ID NO: 12078 - DNA, 262 bp, Gossypium hirsutum
  Clone ID: LIB3135-041-Q1-K1-B1
gcgctcccaacaatggtggcatcaaacttctctcttgctttgacactcgctgccattatatctgtctgggtggccgctgatgccgcccaccaccaccacacggcgtcggctccttccccttcctcttcctcttcctccgtggactgctcctccctcatcttgaaacagatcaaggatgggtttggtgagggaaaagacctggtggtgtctgttatgtcggccatgggggaggagcagatctgtgctctcaaggacattggtc

SEQ ID NO: 12079 - DNA, 416 bp, Gossypium hirsutum
  Clone ID: LIB3135-041-Q1-K1-B10
cccacgcgtccgcccacgcgtccgtgttattcttggctcaagatttagggatgctttccaagatcctggtgcctttcttgcgatagaacctctctttgagaaagaaagatatatagtgacttacaatccttcaaagggaaaagtatatgcactgctcaaggatcaagcgaagtcagatgacattctaaaagcagcattccatgcacatgtgctcttgcatttcattcattctgccgataatagtctatcatctagaagccagcatgaacatctcatgccagcagctactgattttgagcttcatattgctgaatcatgtaagatggtttcaacatcatatagacatttcaagaacaatgctgcagaacagggttggaggatgtcagactcgcttcttaatccgggtcggctcgact

SEQ ID NO: 12080 - DNA, 386 bp, Gossypium hirsutum
  Clone ID: LIB3135-041-Q1-K1-B11
cccacgcgtccgctttgcgttgtttcctttctcatgttctttttgtgcattaatacccaaaggcattcaataatatctaagggaatacttgcttttgcttcgagcggttagagatgaagaagaacagctgcggcggtcagtcgaactctaaacctgataggaaagccatctagaagaagcgcagaaatgacatgaaaatttcgcgttctaagcttgcctctcttattcctcaccacaacttcaaaccctccaaggaaattgcatcacaacaagaccagcttgatcttgcagctgtctatatataacatttgagagataggatagagaaattaaagaggctgacagatgaagcaatgagattcatgggaagcaagcgagtacatgat

SEQ ID NO: 12081 - DNA, 426 bp, Gossypium hirsutum
  Clone ID: LIB3135-041-Q1-K1-B12
cccacgcgtccgcccacgcgtccgcctacctggaatttcaggctgcaaattctaccttaatgaggagctatggtcttgttcacgaagattgtataacaaagatgaggttgatgtcattggttgatcttggctcttatgaatctggacaaattccatatgccctcatcaaggatactcttaggatcaacgatgatgaggtggaattgtggattgttaaggctataactgctaagttaatcgactgtaaaatggatcagatgaaccaggttgtgattgtaagccgctgtactgagcgcatttttggacagcatcagtggcattctcttcggttatactagcaacatggaggggtaatgttgctagcctcatcagcaccatccaagctaacagggctgtggaagagggctacaagctatgcaagggatg

SEQ ID NO: 12082 - DNA, 231 bp, Gossypium hirsutum
  Clone ID: LIB3135-041-Q1-K1-B2
cttagaccagctccataagaaagaaagaaagaaatcaaatatggggtccatcgccaagagtgtgcctatccttgcccctctagctgctaccgttcttatcatttcataggaagtggcaactcgagaccttgctgaaaccaccacagaaaagaacactggtaaagccggctactgaaacaaacctaagctgatgcgtcacgtataagacgccaaatatggatatggataata

SEQ ID NO: 12083 - DNA, 393 bp, Gossypium hirsutum
  Clone ID: LIB3135-041-Q1-K1-B3
cccacgcgtccgcccacgcgtccggggattcatgggtggtgaaattgccttgtttttgattgaagaattcagtgttcctgttgattgtattacctttttggtgcttctctttaattttgctgttattggtgttttggctgtttttatgtcaaaaatgccaattattgtgactcaaggctacttggttttaattggaatgttggttgcttattggtttactcttttgcctgaatggactacttgggtgttattggttgcaatggcattgtatgatcttgctgctgttttattgcctgttggtcctttaaggctccttgttgagcttgctatgtctagggatgaagatatcccagctttggtttatgaggctaggccagttacacatcatgattc

SEQ ID NO: 12084 - DNA, 354 bp, Gossypium hirsutum
  Clone ID: LIB3135-041-Q1-K1-B5
ctcctcaaggcactagacaaggaactctcgaatgactttgagaggctggttctgctttgggctgttgatcctgctgaacgtgatgcccttttggctaatgaagccaccaaaaggtggacttcaagcaatcaagtccttatggaaatagcctgcacaaggtctgccaaccaactgcttcacgcaaggcaggcttatcatgctcgttataagaagtcgcttgaagaggacgttgctcatcacacgactggggacttccataagctcctcctacctctagtgagttcatacagatatgagggagaggaggtgaacatgactctggcaaaaacagaggcgaagttgcttcatgagaaa

SEQ ID NO: 12085 - DNA, 420 bp, Gossypium hirsutum
  Clone ID: LIB3135-041-Q1-K1-B6
tccacgcgtgcgggaatatcgtatgccatcaatagtggctaccaatcatggggtcccctctttggtaagggattctttgccttctgggtgatcatccatctctaccccttcttgaaaggtttgatgggacgccaaaaccgtacacctaccattgttgttgtatggtcaattctgcttgcctccattttctctttgttgtgggtgcggatcgatcccttcacaaccagagttaccgggccggatgtagaacagtgtggaataaactgttgagagagaacctataaagactgaagatttgttttggtgtcactaagcttccaatgccaaaagtttgtttagttgtaatttgggtatttcagttcacatcatgtgcagaatatacggttgatatatatatggcatcttgtttctcctttgatg

SEQ ID NO: 12086 - DNA, 272 bp, Gossypium hirsutum
  Clone ID: LIB3135-041-Q1-K1-B7
gcgctcccaacaaaggtggcatcaaactgctcatttaggtttgacactcgctaccatggtctctggcacgcacgccgaatgtgcatgtctccaggaccagcggccactaatatgggcaacatcttggctccaactgcagtgatgggggtattccttgctttgattgttgcagacttgggtcctttaacagaataatatttaatattgcagcgttgttttgagtttcttcgctggtctcaaaaaaagaaatagaagatacaacaggggcgcgg

SEQ ID NO: 12087 - DNA, 307 bp, Gossypium hirsutum
  Clone ID: LIB3135-041-Q1-K1-B8
cgacccacgcctccgctcactttaacacatccaacatgcctcgccgtaagtctggatgatctgcttatcgcccatccgctctttgggctactgcacgcggcccaccacctcaacctgctcaacatgctcctcctccggctcctgctcaaagtggaagtgggggatcccttcttggaggcataggctcaacaatatctcactgcatggcttttgaaactgtaagtgctgcatcccacaaggcctgtcgttgctgttattggtcctcgtactattcaacatgaaactgctgtttcctaggctgcatctt

SEQ ID NO: 12088 - DNA, 409 bp, Gossypium hirsutum
  Clone ID: LIB3135-041-Q1-K1-C1
gttggtaacaaaagaagttcttccaataaccttccgacagtaacaagatttccggtgagtggggtcactctccagtcatttttagcgtgtggagctgtggcttttcatgctctggctgaagggcttgcactaggagtggctgcgccaaaagcttatggacttggccggcacatggtccttcctgtatcccttcacgggcttccacgtggtgcagctgtggccagctgcatctttggaactactggcagttggtatggctctcttgcagcagctgctctaatcagcgtcatatggcccgatatctgcaattggagcaatattggcaggaattgactacagtggtcttgaccatgtgattgttttggcctgtggaggattgatcccatgccttgttagaatagttcaaaga

SEQ ID NO: 12089 - DNA, 272 bp, Gossypium hirsutum
  Clone ID: LIB3135-041-Q1-K1-C10
gccacacatacggtcatgagtatatacactatgttggctcctggggtcccgctataattgggggggcacataatgaaggccttgctgccttggctgaaactatgaataaaggaacaagctttggtgctcctcgtcttcttaacaatgttatagcagaagaaggcatcactgctcgacctaccattaaaatggggcgatatataaactctgggacagaagcatgcatgggtgtgctccgacttgcccatgcttttactggccgagagaagatc

SEQ ID NO: 12090 - DNA, 432 bp, Gossypium hirsutum
  Clone ID: LIB3135-041-Q1-K1-C11
cccacgcgtccgtgcttgctacgtgacagtgaggggagagaaggctatgcagcttcttgagagcggtttgaaggtcaaggaatatgagcttttgaggaggaacttcagtgatactggctgctttggattcggcatccaggagcacatcgatcttggaatcaagtatgacccttcgaccggtatctacggtatggatttctatgttgttcttgaacgagctgggtaccgtgttggccgtcgtcgcagatgcaagtcacgtgttggtattcagcacagagttacaaaggaggatgccatgaagtggttccaggtcaaatatgaaggtgtcatccttaacaagtcccaaaatattggagcttagaagtagcagtttgagattgtttttagtttgagtacctgattttggctagtttatatttatcagatagtatt

SEQ ID NO: 12091 - DNA, 385 bp, Gossypium hirsutum
  Clone ID: LIB3135-041-Q1-K1-C12
atcggtccggaaagcatctattctgactggaaaggttgagattcttcacaagatggctgatggatattttggagagggtttaactcttctgggtgaaaggctgttccaagtaacttggttgacgaaaattggcttcatatatgacataaaaaaattgcagaaattagagcaatttacacatgagatggaagatgggtggggactggcaactgatggcaaaatcttatatggaagtgatgggacttcaacactgtatcaaatcgatcctcaaacattaaaagtcacaacaaaaaatgtcatcaagtttaatggtcaaaatgtacgctacctgaatgaattggaatatataaatggtgaaatatgggctaatgtttgacagactgac

SEQ ID NO: 12092 - DNA, 379 bp, Gossypium hirsutum
  Clone ID: LIB3135-041-Q1-K1-C2
cccacgcgtccgaaatcggtgtgggtgatgaatgttgtgcctgttagggcacacagtacgcttgctctcattcttgaccggggttttctgggtgctttgcacgactggtgtgaacccttcccaacatatcctcgaacgtatgatttgcttcatgcaaatgggctcctctcacatctcacttcagagaggtgtggcttgatggagttatttatagagatggatcgaattcttcgtccggagggctgggttgtgctctctgataaattaggagttatagagttggcacgtgcacatgctacacaaatacgatgggatgcaagggtgatcgaccttcagaatggtagtgacgagcccctacttgtttgtcaaaaaccttttg

SEQ ID NO: 12093 - DNA, 145 bp, Gossypium hirsutum
  Clone ID: LIB3135-041-Q1-K1-C3
cccacgcgtccggtgcttgctacttaggacttggcgacttctttaaagcccggttcacacaatgtggtataagttgatttgtttttgttttttttaaatttcggacattatggactttctgattttaatttgttttggaacgtgt

SEQ ID NO: 12094 - DNA, 300 bp, Gossypium hirsutum
  Clone ID: LIB3135-041-Q1-K1-C4
aatacacataatctcactcagtcggtacataataaaacttattataagaataagaactacaatggttttgggttttaattcaagttttaatttctcgtcctcaaaaaaatgttgatagattttatcaatgcgatagtgtctcctccggacaatctgttggctaactgatatctaactttattatctaatataacagtgtacgctatgattaaacagtttctttaatactaactactttgtcgtttccattcacattttataccatgttcaatttgcttatttttaccataaagagtttcc

SEQ ID NO: 12095 - DNA, 358 bp, Gossypium hirsutum
  Clone ID: LIB3135-041-Q1-K1-C5
aagagccccaggctcgccgtgtacaattaatcttgcgcctaagctagaaagaaatcctctaaggcggttggggatccaaacaagccattgaggcctgctaataccttctctctcttcatgaaagctttcctttagccattctagtataaacaccccaaagacaaatctgcctctactttgggcacatcttgtgtagaaatatcgctgaacttgtctgtttctaaaaaaccaccttatctagcaaaagcactgtagcgatatgtcgcgtctgcatagaacatgatcgcctacactcttagacacgctgtggctcccacagaagaacagtcgaagtctgagaagtcggtgtctgatgcga

SEQ ID NO: 12096 - DNA, 254 bp, Gossypium hirsutum
  Clone ID: LIB3135-041-Q1-K1-C6
cttagtgcttacatcacatattgtatgtactctggcgtttgtgccggcgtgacccccgcacaggatgagggtgcctatcctaagcgctatgttgacccttctaaccccttggtcttcaatgaagctctggctaccgacctctcctagagtgaatacataaatggccaagctgtaaagaatgacacctatatggcacacacatctgtgaggttcactaataaccgactcacgtagggtttttgcccaaacgttga

SEQ ID NO: 12097 - DNA, 258 bp, Gossypium hirsutum
  Clone ID: LIB3135-041-Q1-K1-C7
caaagtagagccaggtttcgatggtgggcattgccacggcttgttttgcagatgctattgcacttaaccgggttagatgagcaatctattaatatttcattatactttatagattgcctcattttcgcttgtcatgtgcgtactcgagagacgagagaataagatcaacatcatattggtgtacattgaattatattacgattaaatatatacattatttttatggattggaatgtaacagccatatgcttctataaa

SEQ ID NO: 12098 - DNA, 386 bp, Gossypium hirsutum
  Clone ID: LIB3135-041-Q1-K1-C8
gttccttttagcttacatcttccattgttttttatgggcttagagcttataaagaagggggaccaatcgaggggaaataagaagatttgttattgttagcgaacaagttctcagagaggcaacctattgggacagctgcccattcccaagatgataaggattacactgagccacccccatctcccttgtttgagcccagtgagttgacttcatggtcgttttaccgagcttgaatcgatgagttcgctgctactttcctattcttgtacatctcggtgttgactgtgatgggagtccttaatgacaaaaccaagtgtacaactgttgggattcaagggattgctttggcttttggtggaatgatctttgctcttgtttactgcact

SEQ ID NO: 12099 - DNA, 426 bp, Gossypium hirsutum
  Clone ID: LIB3135-041-Q1-K1-C9
gcttcatattatcttttttagttccgacaaaagaaaacgaataaaaagaagaagaaatacaatcgttttctttttgaagacgggttttagtttttggggtgaaaaaaatgtcgggagtatttaacagtgcgatagtggcttcgccggactagcttgtggcgggccgttggcgaactccatcacctaagataacggcagacgctctggtgaaacggatccttgagacgaactccttcggcgtgtccatgcacattggagaccatgtgcaattcgcttattctcaccataaagagtctcctttacagcccagatcatttgctgtgaaagacgaaatcttctgcttgcttgagggagcccttgattactttgggagtttaaagcagcaatatggtcttgcaaagtcaagcaatgaagtgatattggtca

SEQ ID NO: 12100 - DNA, 397 bp, Gossypium hirsutum
  Clone ID: LIB3135-041-Q1-K1-D1
cccacgcgtccgccgttgtcttccttttttcccttaatttcaaagctctctttctctattctgtttggcttatctatcgctttgatttcgcgtccttactgtgcactcgatggcaaatcgatggttgaggcctgaggtgtatccgctgttcgcggccgtaggtgttgctgtcggaatctgcgggtttcagttggtgcgaaatatctgcatcaaccctgaagtcagggtaaccaaggagaacagggctgctggggttttggacaactttgctgagggagaaaaatattctgaacatttcttgagaaaatatgtccgcaacaagacgccagatatcatgcccagtatcaacagcttcttcactgacccaaagtggaggcttcactcttgctttatgctg

SEQ ID NO: 12101 - DNA, 426 bp, Gossypium hirsutum
  Clone ID: LIB3135-041-Q1-K1-D10
gaaaaactctgatctttatgggccatggaagcggaagaatctttctgagtatggcgtcgtggctcagtgtatggcaccagctagggtgaacgatcaataccttacaaatcttcttctgaagatcaatgctaagcttggaggtcttaattcaatgctaactattgagcaaacaccttcaatccctatgatttcaaaggttccaactatcatccttggaatggatgtatctcatggttctcctgggcagtctgatgtgccttcaatagctgcggtggttagcttcaggcaatggccattgattttccgctatagggcatcagtccgtacacagtctccgaagcttgaaatgatagattctcttttcataccagtttctgacataggggatgagggtatcatgagggaggctctcttagacttttatac

SEQ ID NO: 12102 - DNA, 415 bp, Gossypium hirsutum
  Clone ID: LIB3135-041-Q1-K1-D11
cttgtaataaaaagcttcaaaatttggacttgggaaataatttaatctctcaatgggcggaagtgaaggcactggattcattagtccatctgaagaatctcaacctacaaggaaatcccatagccgaaaaagataaattggctaagaaggttaaaaggttactgcctaacttacacatattcaatgcatgaccaattgataaaagcataaaaaacaaagagggtgagatcgtcaacattgctttgcatagtacagatattcacatggaggagaaaacaggtcggaaaagaaaaaggaatcccgaatttctggtgtcggttgagaaacaagacgttaatcatgatagtaatgctactgcttttgataccgagaaagaatcgaagaggaaaaagaagaatggaaacgacaaactgac

SEQ ID NO: 12103 - DNA, 409 bp, Gossypium hirsutum
  Clone ID: LIB3135-041-Q1-K1-D12
gttcaccgtgccacaatgttattatgctaagcaaccacctgctttgcatcaaggctatttttggaagtttacagttgatgcgttgttctatatattttacagcatgccaaaagacgaagcccaattatatgctgcaaatgaactttataatagaggctggttttaccacaaggagttccgattctggttcatgagggtccccaatgtggagccactagttaagacaaacacatacgagagaggttcataccactattttgatcccaactcatttgaaataatccgcaaggataattttgtcgtccattatgagttgttggaaaagagaccgtcgctacctcaacattaatattttttcccctcatttacactgtaaagcacaagcatgtaactcattccttttatacat

SEQ ID NO: 12104 - DNA, 270 bp, Gossypium hirsutum
  unsure (1)..(270): unsure at all n locations; Clone ID: LIB3135-041-Q1-K1-D4
aaanaaaaaaaaaaaaaaaaaaaaaaaaaaaaaaaaaaaaaaaagaaaaaaaaaaaaaaaaaagggggaaggggggaaaaaaaaaaaaaaggggggggcggtaaaaagggagaagcttaagtaagcgggcaggcgggggaaaacatttggggggggggggtaaagggaccaggggacgccgggggcagggggggagggggatccgggggggcccaaaaaaaagggggggggggggtcccatttgggggggggggaaccggggggggcccg

SEQ ID NO: 12105 - DNA, 419 bp, Gossypium hirsutum
  Clone ID: LIB3135-041-Q1-K1-D5
ctccatctctacatcacagtaggaatggcgacagatgttgcagcccccgccaccgccgcacccgaagacccaacccaacctcaccttgaagtaaaactcttcaaccgctggagcttcgaggaagttcaggttgctgatatctccttgagtgattacattggtgtccaagcttcgaagcatgctacctatgtgccacacactgctgggaggtactcagttaagcgtttcaggaaggctcagtgcccaattgttgaaaggcttacaaactcacttatgatgcatggccgaaacaatgggaagaagcttatggcagtcaggattgtgaagcatgccatggatattatttatctcttgactgatcagaacccaattcaagtcattgttgatgctattatcaacagtgggccacgtgaagatgc

SEQ ID NO: 12106 - DNA, 349 bp, Gossypium hirsutum
  Clone ID: LIB3135-041-Q1-K1-D7
ctaacaactactttgtaactgcttcacttgacatgacgtggtgtttttatgatctttcgtctggtttatgcgtgacccatgttgaagacccatcaaattctatgggctatacgtctgcagcttttcattctgatggccttatccttggaactgtcaccactggagctactgttagaatttgggatgtgaagagtcggggaaatgtatgccaactttgatggacacactggggctgtaacagccatatacttcttagaaaacggttacttacttgcgactgctgctcatgatggggttaaattgtgggatccacgcaaattgataaaactttcgatcttttgaatttttt

SEQ ID NO: 12107 - DNA, 336 bp, Gossypium hirsutum
  Clone ID: LIB3135-041-Q1-K1-D8
ccgggagtttgatagtaatggctttgatatcttcagcattattgattgtaagtcgttactggttttgccaaagtacgttgccttcaaaggatataataacaagtacctgtgtgttcgtgaaaattacataacattttcagcagatgacattggtgactcaactgtggcatgcgagacttttgttactgatgatggaaaggttcacatcaaatccatttgtgctggaaagttttggtgggccgacccgaaatggatttgggtaggatatgatgaccctagcaacaatgatcgcactacgtttcgccctgtcaaaattgaccgataagactataggtc

SEQ ID NO: 12108 - DNA, 302 bp, Gossypium hirsutum
  Clone ID: LIB3135-041-Q1-K1-D9
cgtcccacccgaaccaggtactgacataatagcatttgaaacagctccgatcaagatcaaagctcatgcttttggtgaactcttacatgaagaacacacaaagcttcctgcgtggttaactctgaacacaaaagatgtcgtcaatgtacttagccgcgattctttgcttttctgcgcatacaaagctaaatcttgcacacttagatgtgctgtatcaatgaactgcacgccacctaaatttattcatgatctgattttagcaattaaaaaggtcactaccaaacccatagttatatatccca

SEQ ID NO: 12109 - DNA, 426 bp, Gossypium hirsutum
  Clone ID: LIB3135-041-Q1-K1-E1
cttgatcattcgtcgagagtcccgtataaccgtcactaagggacaatccatttcacatcctaggcgcatcacctgataacctgccagggcctcatcagcaaatggtgactgaacattcctgtatagaacagtctacttagccacgagtcttcctctttcgccccaaaccacaataccaaatgcccacttaaagttcctgttatcaaaggctgcatcaaactggatcgtcattctagtgtaaccttctcgatgcttgtgactactacttgcgtttaagtacttgagctccaagcataccacaagccacatcatatgatcttgcactattcagaagtactcaatctaaatatccagattgctctccttacatgcttgaaaatcctcatgatcagttttcgccaggggtatccgcagaattttttgagc

SEQ ID NO: 12110 - DNA, 344 bp, Gossypium hirsutum
  Clone ID: LIB3135-041-Q1-K1-E10
ccgacgcaatacatgccacctatgatgagtgcctgaaatgtgggatggatggatatgtctcggagcccttcatggaaaaaaatctctaccacgcagtagccaacttcttcaaagccaaaccaacctcgtaatcgtcatcaaaacaccttgcaccatcattggaaagtcaacacaaccaaaagctggttggactttttcagcgaaactttcccaatccttctggtgcattttggtcataaaaaaactacgtatagtttcctggagctcccgagaattctggactgcatcgatagcaaacatgcatgcatgttcggtgaattagagttagagtatgtgtatactac

SEQ ID NO: 12111 - DNA, 336 bp, Gossypium hirsutum
  Clone ID: LIB3135-041-Q1-K1-E11
tccacgcgtccgattgaattcaacgttactgtaattcattactaagatgttatctacagattgggaaaaagtcatatcattctgtcacgcttgattagaataaatgtatgagatatatatcttcatctgattaaaagttaaaattctcatacttgatcattgtattttatcattatattacaaataaagattaaattcttagctgcaaaaaaataacaaaaatatcaaaattaaaaaaaaaaaaattaaaatgaaattgttatacatcagataagtcattcactgaaaatgtagtatacatgcatacactttctaagctaaaccatttgatctttt

SEQ ID NO: 12112 - DNA, 324 bp, Gossypium hirsutum
  Clone ID: LIB3135-041-Q1-K1-E12
gcaaagcgttcttcccaacgatgcagctgccaaagctggtgctgcaaattcatcaggcactggaggctgcactgaatgcggtatgcaatgcaaactgaagaacactctggacaactgtgtggacgacagaccttatacgaaaccaagaatgtggaaaagacgctgcatggaaccatgcatgaagtcacactatattggcgatgactcctgcgccatatgctgctgccttactcagtgtcaagcaaaaggatatgaacccacagaacaaacgactggacatatacccagaaaggtacacattatggaagacatgcatgatatcat

SEQ ID NO: 12113 - DNA, 380 bp, Gossypium hirsutum
  Clone ID: LIB3135-041-Q1-K1-E2
caactttagtgatgctcatggatgtggcaataggtgtgtagtgccaggatgcacaaagagtgcacgcggtcgcaccgactgctgtgtcaggcatggtggtggaaaacggtgcaagtttgagaattgcggcaagagtgcccaaggaagcacggatttatgcaaggcccatggtgggggaaaaagatgctcctggggagaaggcaaatgcgagaaatttgcaaggggcaggagtggtctatgtgcagctcacagtagcatgttgcaagagaggcaggcaagcaaggggagggctcattgcacctggagttttccatggtcttgtatcggcaacaccaaccacaggaagcagcttcaacaacaatcactcattttcaggcaat

SEQ ID NO: 12114 - DNA, 323 bp, Gossypium hirsutum
  Clone ID: LIB3135-041-Q1-K1-E4
cgtcaatatccaactttttcctcttctacatttctcagatcttttttagggcttgactctcctcgctgcggttctttatgctttcgtgatggtgaaagcatatgcgcaagagcacatttacaaacattcatgggagcgagtaacttctgcatcttggcgtaagtttgctgaccctgaaaacaagcgtaccttgtctcatattctagaagttgacacattgaatcgcaaactcgatcctctctctggtgatcgttacactactcgggctcttaccatacatgctccaaggccatggtttgttcgcaaaatcattggccaggaca

SEQ ID NO: 12115 - DNA, 402 bp, Gossypium hirsutum
  Clone ID: LIB3135-041-Q1-K1-E5
cgaccacgcgtccgaaacaaaccttttacttctcaactctttcaaattcatcatgtctgacaagtgcggcaactgcgacgtgctggtacatgatccagtgcgtgaagaaaggaaatagcttggtcattgatactgaaaagagctacatcagcactgtagtggtcgaagctgtggcagagaacgatggcaagtgcaagtgtggagatagctgcagctgcacagactgcacatgtggcactcattaagcagacatagaaccatgatgttttagtccatatcaatattatgacctaaaaataatgaaattgagttgaataaattggtggtttggttgtgtagtttgagacattgaatgcgttttcatgcctgactgtcttatgatttgattctcattgtacacta

SEQ ID NO: 12116 - DNA, 385 bp, Gossypium hirsutum
  unsure (1)..(385): unsure at all n locations; Clone ID: LIB3135-041-Q1-K1-E6
tcgtccacgcgttcgtccacgcgtncgtgaagcccttgagatcactaggaagttcatgaacaaacgagtgagggttttggttaagcgtgatgagctcaccctcgagggtatcaagcagttttatgtgaatgttgaaaaggaggaatggaagcttgaaactctttgtgatctctatgagacccttgccatcacccagagtgtcattttcgtgaacacaagacgcaaggttgactggctaactgacaagatgcgaagccgtgaccacacagtttctgtcacccatggagacatggaccagaacactcgtgacatcatcatgcgtgaattccgctccggttcttctcgtgttctcatcacaactgatctccttgctcgtggtattgat

SEQ ID NO: 12117 - DNA, 321 bp, Gossypium hirsutum
  Clone ID: LIB3135-041-Q1-K1-E7
cccacgcgtgcgaatcattcaaggttatttttaatctatatagaagacgccaggaataatatagggaagggtgggacttggcatgggaggagcgaagcgccaccgtgaggtcctacggtgacaacattcatggcattacatattctgcaaatcgactctttgcccgcaggggaagagtgaaacgtatcaatggctttatctacaatgaaacccgaggtgttctcaagatcttattgtataacgtcattcgcgatgctgtcacctacaccgatcattccaagaggaacactgagacgcgacatggatgtggcatatgctctg

SEQ ID NO: 12118 - DNA, 296 bp, Gossypium hirsutum
  Clone ID: LIB3135-041-Q1-K1-E8
gagatcccttgaggacatattcatacagattcagagcagcggtgctaatgggcgatcacaaagaaaacgaagctattgcggagctcacaagagcactagctcttaagccagacctgctactactacatcttgaagctgatttccatgactcgatgggggaatatgcatttactgttagagactgtgaaacacacatatgtcttgaacccaaccacgccgatactgtctagctatataataaacgacgagagccggtcttagaacgatattgagaaaaatcaaatcccaataaatca

SEQ ID NO: 12119 - DNA, 401 bp, Gossypium hirsutum
  Clone ID: LIB3135-041-Q1-K1-E9
gatccggtgataggaaaatcaaggatccttgttacgcctagtatgaaagagcaggccaaagaaatcgcggagacatggaaaaagagccttgaagagagaggagggattgagaatgtgaaaacccctgatgttcatacttttttgcagcatttggttacgtttgggattgtcaagaaagaggatctggagctttataggaaacttgtcgttgcttctgcttggagaaaacaaatgcccaaactcgccgtttcgcttggcctcggcgatcagatgcctgacatgattgaagaattgatcagcaagggacagcagcttgatgcagttcattttacttatgaagttggccttgtggacaagttcccccctgtgcccctgctgaaatctttcttgagggatgcaaa

SEQ ID NO: 12120 - DNA, 273 bp, Gossypium hirsutum
  unsure (1)..(273): unsure at all n locations; Clone ID: LIB3135-041-Q1-K1-F1
cggtccgtgtaattcccgggntcgtacccacgtccgtccgcttcatatatcttatatgtccctctgtatttcttttgaagnntagatgatgttatgccttatatacgattttgtgatggtatctctgtgttttctttgtccctccacaatactttgtcttcatgaanntcattttccttcactttggattaaaanaaaaaaaaaaaaaaaanaaaaaaataaaaataaaaaaaaaaataaaaaataaataattaataaaaaaatttaaatata

SEQ ID NO: 12121 - DNA, 403 bp, Gossypium hirsutum
  Clone ID: LIB3135-041-Q1-K1-F10
cccacgcgtccgcccacgcgtccggagattttcttgaaatctataaccaaggatgttaccaatgttcagattacatacccttgtaggttctttttcttgttccttactagtgcaacatattttgttttttatatctcacaaaagtaacattgcagacactattttacagttgtctagtgtctaaaaatatggatatttgcagggattgaactatgttggttcaatgtgcttttcagattacgcatttgttcttgttgcttctaacgttttgcagtttaaatgcatggcttgtacggcgaagattacgacatacagccttaagggaagtgagaagctccttcagctagtctcaaattactccatggtttcaaaacttgaggataatgaatttgaagtatggaac

SEQ ID NO: 12122 - DNA, 154 bp, Gossypium hirsutum
  Clone ID: LIB3135-041-Q1-K1-F11
cataccctaccaccttcccccccttgttccttacatagtacaacatatattcttatttatatctcacaaaagaaacatttcatacactattttacatgtggctagtgaataaaaatattaatatattcaagcaatgaactattttgatacaaaa

SEQ ID NO: 12123 - DNA, 420 bp, Gossypium hirsutum
  unsure (1)..(420): unsure at all n locations; Clone ID: LIB3135-041-Q1-K1-F12
ctctccaaagcgaaccctctcttctctagaaaccaccgtcgagccatggctctaagcacccgggccaccgccaatcgcctccctcacctcctctctctcctcttctgccaccccaaccacatacgctcgcccttctccgccgtccacctccggcactccctccagtctgtctaagcctgctgagtacgtgatctccaaggtcgatgacctcttgaactgggcccgtcgtgggtccatatggcccatgactttcggcctcgcttgctgcgccgtcgaaatgatgcacgccggtgcttctcgctacgacttccatcgctttggtgtcatttttaggcctagccctcgccaatccgattgcatgattgtcgctggcactctcaccaacanaatggcccctgctcttcgcaaggtttacgacca

SEQ ID NO: 12124 - DNA, 320 bp, Gossypium hirsutum
  Clone ID: LIB3135-041-Q1-K1-F2
cggacgcgtgggctggagtttacactggtggctcttgggaatctgcccatgctactttttatggtggcagtgatgcttctggaactatgggcggtgcatgtgggtatgggaatctgtacagccaagggtatggcgtgaacactgcagcattaagcacagccattttcaacaatgggctaagctgcggagcttgctttgagatcaagtgcacggatgacccaagatggtgccacccatgcaacccttccatttttattactgctactaacttttgcccttctaactatgctctcccaagtgataatggcggctggtgtaac

SEQ ID NO: 12125 - DNA, 214 bp, Gossypium hirsutum
  Clone ID: LIB3135-041-Q1-K1-F3
tccggaggaaacagatcattctttagaagttttgatgaagaagagaatggagatgaagatcttgatgagattttcatcaacctggaagaaaagacgactcactgtgaccaagtccagttctagagaaagtttcgaggggaaaacaaacttaacctgaaggaaactaactagctaagaacttgttttacaaccccgtcaagttgccatttgtttc

SEQ ID NO: 12126 - DNA, 376 bp, Gossypium hirsutum
  unsure (1)..(376): unsure at all n locations; Clone ID: LIB3135-041-Q1-K1-F4
aatgactgatggatttaacagctgcaaaaatgtggtttgtaatttcactgaaggtgccatgggttctttggctcaattacgcttaccaccaaaagctatagaagctgccaaacaggcaggaaaagtcccagatgttttctactgtctcaagttgttggaagcaacaggcatctcaactgtcccgggctccggattcggacaaaaagaaggggttttccacttgaggactacaattctacctgctgaggaagacatgcctgaaatcatgtcgagtttcaagaaattcaacgacgagttcatggctcaatatgaagataactggaatcgttcaaggatgtgaagcatgnttagaagtccttaatactgtatttatcta

SEQ ID NO: 12127 - DNA, 338 bp, Gossypium hirsutum
  Clone ID: LIB3135-041-Q1-K1-F5
gacatattctgcttgtttcaaggccacattgagaatattgctgttcttaagcaacaatatggcttgaacggaacagcaaatgaggggatcattgttattgaagcttaccgaaccctcagagacagaggtccttaccctccggatcaggttgtaagagatatccaggggaaatttgctttcattatctttgatagctcttcaaaagccacatttatagcttctgatgctgatggaagtgtacctttcttctggggaactgatgctgaaaaccaccttgttcttgcagatgatgtggagactgtcaagaagggctgtgggaagtcttttgctccattccc

SEQ ID NO: 12128 - DNA, 424 bp, Gossypium hirsutum
  Clone ID: LIB3135-041-Q1-K1-F6
tccacgcgttcgtccacgcgttcgcccagattgttcccccttccaaacttgacggtcagcatagttcatggcagcaagagggatctgtaatattcactgaacaacctcattctgaaagttcccactctccagcatagctctctatggagaagtcccttcgaagcccagatgctcttctaggtgagaaaaggtaacagatctacatgtgactctaaactctcgacacacagtaggatgatgcagtaccaggagcgccgaacagatctagacagaaaacaattaaaccagaataaaacctaaagacgcataccagatgcggcagacagaaacgtgctagggtagcagacttttacacttagtctacaactatatttaaaaacaggcttaatgcacattttagttattgaagtatactacttttttc

SEQ ID NO: 12129 - DNA, 344 bp, Gossypium hirsutum
  Clone ID: LIB3135-041-Q1-K1-F7
tcggtcccgtacaactgagcctgtcgttgcgactccagctgctgctgctgctgctccaactaccgggaaataggttcctaagttccggctaaggcctgaaagctctggtccagctccaccttctgaacctgatcgatggggcaagccagcaccgttggagcccgaccgacgggctgctggcagcagggctcctccatcgcaatctgatcgctggactagtggcagtagggctccacctcaggattctgatcgattggcaggtggtggtagcagagctacaccctccagattcgaatcgttttggtggtggcagtgggagcagcaaggcagaaccctggcgatct

SEQ ID NO: 12130 - DNA, 288 bp, Gossypium hirsutum
  Clone ID: LIB3135-041-Q1-K1-F8
gacttcggagccatcggagacggcaaacactacgacacatcctccatccagttggccatcgagagctgcggcactaaaccatgctacgtgaccttcccaacaggcacatacctaacggccaccatcttcctcaaatccaacgtgattttggacatcccgaaaggctccaccatcttgggtgggaccaaattggaagactacccgaaagagttcgataggtggtatgtgatattggcagagaatgcaagggatgtagggataacaggtggaggggtggtggatgggcag

SEQ ID NO: 12131 - DNA, 365 bp, Gossypium hirsutum
  Clone ID: LIB3135-041-Q1-K1-G1
tttctgttcatggtatgctttgcaaaagcattggctggctaataatattctgggtctcgcttgctgcattcagggaattgaaatgctttctcttggatcttttaagactggtgccattctattggctgggctttttgtatatgatattttctgggtctttttcactcctgtgatggttagtgtcgcgaagtctttcgatgctcctataaagcttttgttccctacagctgactctacccgaccattttccatgcttggacttggtgacattgtaattcctggtatttttgtagcactagcattaagatatgacgtatctagggggaaagagaggcagtattttaagagcgcattttttgggtaca

SEQ ID NO: 12132 - DNA, 440 bp, Gossypium hirsutum
  Clone ID: LIB3135-041-Q1-K1-G10
ctggcactggtgtgtttatacctcgcagatatgggaacaccaccaacaccaccagtcatgaggctagaaagaaatcaggttgttcaacggtgttactaccagcaaaggttgatcaagctttaaatctcatcttcgatgataccaataaccatgttcaacctcaattcaatcccacttttgcatcaaactatgatgccttggtagcaagaagaaatgcactcttgacacatgcaagaagaaattatagaccagatggaagcttaaacttgcctcaagaatggacttactgaaaatttagtccaagttttctctcaaaatagtgtttgttttgatggaaaaagatgtagggttagtagctcttatgatagggtatatggtattttggtttatatatatataaagaagacttcaggaatgcgtgtagtttagaaataaataaa

SEQ ID NO: 12133 - DNA, 262 bp, Gossypium hirsutum
  Clone ID: LIB3135-041-Q1-K1-G11
cccacgcgtccggcaaaacgtggtactgatcccaaatttgtagctcgaaagccaggaacttggggatagagatctgtgcataacatgaatattatgtaaatagtggcagactctatttagttttgtgaggtcgaaccattatgtttgttgtctgatagcatcgcatttaaaacgtttaaaaaaaaaaaaaaaaaaataaaaaaaaaaaaaaaaatgaaaaatataaacaaaatataattaaaatttaaaaaaaatattattg

SEQ ID NO: 12134 - DNA, 347 bp, Gossypium hirsutum
  Clone ID: LIB3135-041-Q1-K1-G12
ggaaaacaagaaaagcagagccgcatcactttttgctagctaagctactgtgggagttattggtcttcataacagcttctgcagtagctaataataacgttatatattatataaattttatacatcctttttaccctacgactccatatataagcaagtaaaaataaatatggctcgctctgtttcttcctttaagttccttggtgcttctgtttttgatgctctttatgtctccatatcaaggagaggttactcaggtgcaccgccggcggcagtgacggctagctttggtaggcctggagcgatggggaaagtggaacgaagatatgcgatgaaagagtcgtcgt

SEQ ID NO: 12135 - DNA, 385 bp, Gossypium hirsutum
  Clone ID: LIB3135-041-Q1-K1-G2
gaaagaagctttatagtcttgatgcaggttccgtcattcactcgctttgctttaggcctaataggtactggctttgcgccgccaccgagcagggtatcaagatctgggatctggagagtaagagcatagtggaggacttgaaggttgatcttaaggcagaggctgagaagtctgacgtcactgacatcggaaataagaagaaggtcatatactgcacaagcttgaactggagtgccgatggaagcaccttgtttagtgggtacactgatggtgtaatcagagtttgggggattggtcgttactagatatgcttgtcttgagttaagatttttgttcaaatgtcgggaggttttttggtttattttcttaatatgggtggatattg

SEQ ID NO: 12136 - DNA, 225 bp, Gossypium hirsutum
  Clone ID: LIB3135-041-Q1-K1-G3
cttttatagggctgggattgccttgtttgttgctactttactctttttgtatatggggattttgactgttattggagtcgttaacgaaaaaactaatttcccaactgttggtattcaaggaattgctagtgccttacggtggttgtgatcttttatctagtttactgtaaatgtttgcatttcatgtggccatattatacacgaaagtgactttcttaccattct

SEQ ID NO: 12137 - DNA, 295 bp, Gossypium hirsutum
  Clone ID: LIB3135-041-Q1-K1-G4
gagagtggatgcacctattaaggatccggtatccatagatcatcctgcacaatacacggaagcgtactgtggtagagttcatgactcacttccaacaagaaaggccttgatggaaagtatgcactgctgcatttcaagatatgaaccaattccctcaaacaccaatataatgaagcattggtctttccatgtataactagaactcgaaacgtatgcgtgtatgaatgtatgtatgtattctttgtaaacaaaaatattgttgactattgaatatgccgattgctgcctgaataca

SEQ ID NO: 12138 - DNA, 280 bp, Gossypium hirsutum
  Clone ID: LIB3135-041-Q1-K1-G6
cattcttctatgtgctgtctgcatcacagcacatctaatctctcgttctgaccacgttcttcgaacaccgttgcattgttggataatggccattgtgatggcccttttgagtggatttgcatgagtgtacactgaggctataattaataatcgcccatcaaggaatataaatttgcagaatttttggttgtatatctttgtaatggcctttaatgcttgttctattctgatacaagttttcgatgctgtcattatacatgggtttttttcattgtattct

SEQ ID NO: 12139 - DNA, 367 bp, Gossypium hirsutum
  Clone ID: LIB3135-041-Q1-K1-G7
tcgcggacgcgtgggcggacgcgtgggttgtgtcttagtgttttccgaaacgattgagcttgatgggttcaaggatagctttttgaaagatggttacaaacttgctgtagcaatgccaaaccttgatgaattgttgaaagatacacctacccatgtatttgcatctttgtggcttaaatggagaaagacaaaattctatactatccattatagtgagctcgttcgacttgctgctctttacaaatatggtggcatttatcttgattctgacattatagttctgaaaaccgtttttgacactcaataatttctgtggggccttgaaaatcaaaggaagctctttttattggaagctttaatgggcatt

SEQ ID NO: 12140 - DNA, 434 bp, Gossypium hirsutum
  Clone ID: LIB3135-041-Q1-K1-G8
caggaatggcctttaacaagttgactgacaacggagcaaccaccccggctggtctcgtagccggcgctctagctcatggcttcggtcttttcgtcgctgtctccgttggcgccaacatctcaggtggccacgtcaaccctgccgtcaccttcggtgcttttgttggcgggaacatcactctcttgcgcggcattctttactggatcgcccaactcctaggctcaaccgtcgcttgcctgttgcttaagttcgctaccggcgacctggctgtacccgcttttgggttgtcatcaggtgtgggcgtgtctaacgcattggttttcgaaatcgtgatgaccttcggattggtgtacacagtgtacgccacatgcgttgattccaaaaaggggaagctgggaacaatcccaccaatggccaatgggtttatcgggggg

SEQ ID NO: 12141 - DNA, 361 bp, Gossypium hirsutum
  Clone ID: LIB3135-041-Q1-K1-G9
taaaacacagtttattggtgagcttgggcccaaattgttaaaaaagttaaaattgaggcatatgtaaaatgggcttgcatagacgctaacactaagcgctaaatcatcttctccttcccgcttcttctagggttttgcttctgaaactcttaccagaaacaagggtttatcatttattggcgggagctgaatccttataaataaatacaaataagagattgtttctttctattgagttctttaaaggaaagattcatggcgtattctcaagcacgagacttcatgttctgtaacttgtgtggtacgatgctgtctttggtttcacctaagattgctgaatgctctttgtgtagatctaaaa

SEQ ID NO: 12142 - DNA, 415 bp, Gossypium hirsutum
  unsure (1)..(415): unsure at all n locations; Clone ID: LIB3135-041-Q1-K1-H10
tccaaacaaagacgacgcattcaaaactcacccagtgaatctgctgaatgagaagactctcaagggtactttctttggaaactacaaacctcggtctgacattcctgctgttgtggagaaatatatgaacaaggaacttgagctggataaattcatcacacacactgtgcctttctcagagatcaacaaggcatttgagttaatgcttgcgggtgagggactgagatgtgtgattcgcatggatacataaggaatggatagcctggattgatcatccatggatgaagggctnttctgtagggtttggatttcctcatagtttacggacacaatatacaccacatatttaaatattttaaaagtccttgtttcttgtttaatcaattacccctaaaaaaatttagtggctaaaaag

SEQ ID NO: 12143 - DNA, 335 bp, Gossypium hirsutum
  Clone ID: LIB3135-041-Q1-K1-H11
cccacgcgtccggctccaactccccagggtgcactagggttatcaagtgtacgggcgacattgtcggacaatgcccgaaccagttgaaggttcccggaggttgtaacgggccttgcccagtgttcaaaactgaagaacattgctgtaattctgggaactgtcaacctaccgacttctcgaggtttttcaaggagaggtgccccgatgcttatagttacccaaaggatgacccaacaagcttgtttacatgccccacagggactaattacaaggttattttctgcccatgaagagtatttgggatggttttaagtcctttctatacacaaattagt

SEQ ID NO: 12144 - DNA, 148 bp, Gossypium hirsutum
  Clone ID: LIB3135-041-Q1-K1-H12
acccactcgtcccacgcgtccgcccacgcgtgcggcaaaaaggagtcttcaagatggagtcttcaaggacttatcagggatgattgtcgccctaaagataacactacctccgtccctactactaaaacatactagactatgccctgta

SEQ ID NO: 12145 - DNA, 352 bp, Gossypium hirsutum
  unsure (1)..(352): unsure at all n locations; Clone ID: LIB3135-041-Q1-K1-H3
tcgcccacgcgtncggtttaggtcaagttgaattatcggaattggatggaccctttgtgaagattagtctcaagggtcgattttggcacaaacgtaccacggttgtagccagagtcggaaattatctgaagcagagaatccctgaaatcctggaggttgagattgaagatgagaaacaattatatgacagccctgaaaacttctgagaccctgaaatgaccctagggtcgtttattcatttagttgctttcagtttatggccctttttttattattactatttttgcagctcaatggatacaactctaaagggaaaaagactttaatccgttaattataaactattgatttc

SEQ ID NO: 12146 - DNA, 263 bp, Gossypium hirsutum
  Clone ID: LIB3135-041-Q1-K1-H4
tcgcccacgcgttcgcccacgcgttcggaagcggtggaagcatggcatgtttggtaaacataaggcgaagttctttggcaggaagtggaagtaaatagtcccgtctcccatgtcccatacgaatcttatcatactagtatgctcttttaacagttactgacatggttgccctctaataaacatggatttgtttcgcttgttatttgtgactggcatgctaatattatcacagtgcgtatatatgtgctgttggttttattttt

SEQ ID NO: 12147 - DNA, 290 bp, Gossypium hirsutum
  unsure (1)..(290): unsure at all n locations; Clone ID: LIB3135-041-Q1-K1-H5
gacccacgcgtncgaccacgcgtncgntttgagcaggttcataagaaagaaagagatccaatatggggtgcattctcgagagtgggcttctacctgctcttttagctgccgttgctcttctcatttcttcggaagaggcagctcgagatcccgctgaaaccaccactgaaaacaataatggcgaagcggctaccgctacaacccaagctgaactcgaagatggtcacggaagatatcacggaagaagacacggatggtaaggagggcacggaggtggtcacggagggtat

SEQ ID NO: 12148 - DNA, 351 bp, Gossypium hirsutum
  Clone ID: LIB3135-041-Q1-K1-H7
cccacgcgtccgtaattagcccttttcttcaagtttcatcatgtagagtcttggttagtaggtatttctcgttctggcttttttttaagtgatcctgagggggtgctggtaattggaaatgaaattcaatttctgagtttcatcttgagcttgtaggtagtatacttagtgtgtttcttttactacactctgttgtgtcactgttgcagtgtcagttcttttgtaattgtcagttgtgcagacttcacggctgcaattaagttgccagtggcattctgtgtcctcagtcagcttctggtgatggatattaatcgtgatgtttctctaagtgacaatatgttcttaagctta

SEQ ID NO: 12149 - DNA, 244 bp, Gossypium hirsutum
  Clone ID: LIB3135-041-Q1-K1-H8
gccacgcgttcgagcagtattgcgtctgcgagcgaagataaagtggtgaaccattcgttgtctgggtcagatttgagcaacaggaacaatgtcatccttagagaggcaaagcaaacacgtccaagctaagatagatgacgaatgcaagcacagcgacattcacattatctttttgacgagactatgagacttaaggaggcttggtcaaggcgatctacgtaagaagccctcacttacacttcat

SEQ ID NO: 12150 - DNA, 436 bp, Gossypium hirsutum
  Clone ID: LIB3135-042-Q1-K1-A1
atatcaaagcttatcttcttgattcaaaccaacccatttacactaatctgtattgaaaacccttgaaagacttgctttttcttcgtgggatttttgtgttctttattgggtttctttttttgtttttcttgagttttaagactccggggttttgttgaatgaaatcaagctttatgatggtggatggtggtggattgatggatcaaaggaagggtattatgaaaataagacatgtaaacaacaaggtgagatacgtttagagaccaatcaagaagaagaacaacagatcatcatacagggaaagaaaagatcctaaagtgctacaaaagctgtttgattcatgtaaagaagtgtttaaaggcccttgaactgttccatctgattctgatgtcaacaagctatgcagcattcttgatgagatgaagcccaaacatgt

SEQ ID NO: 12151 - DNA, 432 bp, Gossypium hirsutum
  unsure (1)..(432): unsure at all n locations; Clone ID: LIB3135-042-Q1-K1-A10
cccacgcgtncgatttcagagagggctaatggaacacacagctactgctcagcagcaatttgaaaattcacattcttcccttgccgttgctttaaaggatgctattaattctgcaagttcaatcacacaaagcttatgtggagaaatggccaatgcacaacgaaaacttctagctatagcagcagcaggtggcagctccaaggcaggaaatcccttggtgacacaattgagtaatgggccattggctcatctgcatgagatgcagcctgaggcacagttagatccaacaaaagagttgtcaagaatgatagctgagaagaaatatgatgaagcattcacctctgccttgcatagaagtgatgtctcaatagtttcctggttgtgttctcaagctgatctaacagggatattgtcaatgaaaccatgttcact

SEQ ID NO: 12152 - DNA, 387 bp, Gossypium hirsutum
  Clone ID: LIB3135-042-Q1-K1-A11
gagatatatgagcaatgggatgtggcgcctataactatcagccaccctgtggaggatgtgagtttagctacacttccttgagaagcggtgcatttctgggggggctttgctctttcatttgaggcatacaaatcttatcacttgtattgcagcttgtagaaagcctcctgtgttctgtataatcaccgagtatctggcaggtggctgattaagaaagtattcgcatcagcaggagccatattcaggccctcttcatttaactctaacagtagctcttgatattgcacctgggatgcagtaccttgattcacatggaatacttcacagggatctcatatcagataacttactccttggagaagatatgtgtgtgaaggtggcagattt

SEQ ID NO: 12153 - DNA, 75 bp, Gossypium hirsutum
  Clone ID: LIB3135-042-Q1-K1-A12
aaacataaaatttccttccgttgttagcttaaaagggctttatacaaattttacaccttgaaaaacaaaccattt

SEQ ID NO: 12154 - DNA, 278 bp, Gossypium hirsutum
  Clone ID: LIB3135-042-Q1-K1-A2
acgcatccagaaaggtacgacgaaatccaagctaggacaattaagttcctcaaatggttatgggagaggaaagaacagaagatagcagtggtgagccatggtatatttttgcaaaaagcgatgatcgaacttgttaagaataacaatttttaccgcttgccacttcgaggacatccgattaaattagaacgaaaaaattggtaccctttaatgctagatgagtatgctttaattgttcaaaaaaaaaaaaaaaaaaaaaaaaaaaaaccaaaatataa

SEQ ID NO: 12155 - DNA, 304 bp, Gossypium hirsutum
  Clone ID: LIB3135-042-Q1-K1-A3
cgaatgaccgcacgcgtccgcacgtccggaaagccataaatatatcaaagctaagacaattaacttcctaaaatggctatgggagatgaaagaacaatataagtacaggggagccatggtatatgttcgcaaaaagcgatgagcgaacttgttaagaataacactacataccgcttgccacttcgaggacattctattaaattagaacgaaaaaatgggtaccctttaatgctagatgagtatgctttaattgttcaaactaactatgtgaataatggctacaccacgggagatggacttggtg

SEQ ID NO: 12156 - DNA, 436 bp, Gossypium hirsutum
  Clone ID: LIB3135-042-Q1-K1-A4
aaaaaaaaattgtatattcaattcaaatcaacacattcaaaagaaaaaaagtgttttatttagcttcaagttttagtaagaaaaaaaaaaacatgtcgacaatagtaggggtgtggatggatgaatttgaaaggctcaaagagagagttcaatctaaaaggtcgttcatgttgaaggctaaaaaggatcagcagcttgttaaggaaagacatgttgaagaagaaaaagaagctggtaaagaaactataatgtcggaagctacactttgtatgcttatggacaggtttgcaccgtgttgattgaagagaacagaaaagaaaacgtatgagaagaagttccagtgtgtactatatttgatggagctttgagtgttgtatgtaaaaagataacaaggtttgtttataggttgcgtaattatgtggagatatggttcatt

SEQ ID NO: 12157 - DNA, 342 bp, Gossypium hirsutum
  Clone ID: LIB3135-042-Q1-K1-A5
cttcttctctcccagatcggagttccgggcggtccactggacttaacaacgcggacaatcctgaaggtcccgatgccaaaaatctacgcgtaaagctggtcttgttaggtgattctggagttggaaaaagttgtattgttcttcgctttgttcgtggccagtttgaccctacatctaaggtaactgtaggagcttcattcttgtcacagacaatagctttgcaagattcaactactgttaagtttgaaatatgggacactgctggacaagagaggtatgctgcattggcacctctctactacagaggagctggaggtgcagttattgtgtatgatataacta

SEQ ID NO: 12158 - DNA, 197 bp, Gossypium hirsutum
  Clone ID: LIB3135-042-Q1-K1-A7
attgcagtggtgagccatggtatatttttgcaaaaagcgatgatcgaacttgttaagaataacaatttttaccgcttgccacttcgaggacatccgattaaattagaacgaaaaaattggtaccctttaatgctagatgagtatgctttaattgttcaaaaaaaaaaaaaaaaaaaaaaaaaaaaaccataattaaa

SEQ ID NO: 12159 - DNA, 403 bp, Gossypium hirsutum
  Clone ID: LIB3135-042-Q1-K1-A8
gaaagccacgacgttatcgatgctagaacagatcataatctcttcaagaagagcggcgtgcacggccctccttttagccctgaacatcctgttcttttccctagtcagtgctaattgtggatcttgttcttattctggctctaacccaaggacaactcccacccctactacatctgcacgaggtaggtgccctagggatgccctcaaattatgtgtatgtgccaatgtgcttaacttagtcaatgtcaccgttggttcacccccggtgatgccacgttgttcccttctcaacggtcttgtggacctctaagccgctgcttgcctttgcaccgctatcagagctaacatcttaggcattaaccctaacataccagattcccttaacttgcttctcaacgtttgc

SEQ ID NO: 12160 - DNA, 334 bp, Gossypium hirsutum
  Clone ID: LIB3135-042-Q1-K1-A9
gaaaacgggtctaccatacatctatcacagcaaagccagcaacccctttgtgaatctaaggaaagaataccagggtatatcctggcacgatgagatcatgcctttcttccaacaagctgtgcttgcaaaagactgcaccactgttcaaaagtgctatgttgaacaggcttagcacgtgaaagaaaagcttatcaaagctagatcctcctatttggggcatgctcatgcacaaactgctcgcatgtttgcctgtcctggctcgaccctaactctgctgtagccgctgctcgtgatctagagtgtttaacggtattcaacaacctctcatgaacgc

SEQ ID NO: 12161 - DNA, 429 bp, Gossypium hirsutum
  Clone ID: LIB3135-042-Q1-K1-B1
cccacgcgtccgattcttcccagataatctaccaccctcattggtgcctcattacaagtacgctgaagtaattaattacctgtgtttctcttctcgatttttctgaaaaatcacaatccggttcaattataatccggactaataacttcaagtcaaacaggttttgcatcctgcagcaatgtctattaacataaataagctcatctgggacatgtacttcaacaaactgctaccatcgtttgtctctccgggcgatgacgaaaactatgctttgaccgctgctcgtgatctcgagtgtttacaggtatttaacaatctcttatgaacgctgaagatatgatattagaaaagtggctctaaaaatgcattgctgatccctttaggctatctctagaagaattcactatggaaaacttgtagctgaagtga

SEQ ID NO: 12162 - DNA, 261 bp, Gossypium hirsutum
  Clone ID: LIB3135-042-Q1-K1-B10
gatgcaatggatggcttatggcttttatctattaaggtgacctaccctattatggggatatgtattggccatggaaaggaccaggggagggttccttttgccatggtaagcgcgctcatcatttgaacctgtccccttggtcctatctcttgacaaggtttggttcttctccaacttaacactctaatcccttcggcaggccttcaataatttcaagatcatgatcatcttttgcaatggtttttttttccctccttcttc

SEQ ID NO: 12163 - DNA, 66 bp, Gossypium hirsutum
  Clone ID: LIB3135-042-Q1-K1-B11
gacgcacggactggatcattgggggcttctataacgttcactttcctttttgtggccattggtttt

SEQ ID NO: 12164 - DNA, 416 bp, Gossypium hirsutum
  unsure (1)..(416): unsure at all n locations; Clone ID: LIB3135-042-Q1-K1-B12
cccacgcgtncgagtggtttcagatgatgttggaaagatcaaggcagctttgcggacatggagtgatagtgataagctggatctcatccttacacttggtggcaccggcttcactccaagagatgtgacccctgtagcaactaaagaggtgagtgtaaaagaaacacctggtctttagtatgtcacgattcaagagagcttaaaggtaacaccacatgctatgctatcacgctcaggagcaggcataagagggtcaacattgatcatcatcatgcccgtgtatacaaatgcagtcgcagaatgcatggaagcattgttgcctgcccttaagcatgcactaaaacactgtaagggtgacaaaaagagagaaacatccccgggcacattcctgatgaacatgctacaccagtggatac

SEQ ID NO: 12165 - DNA, 431 bp, Gossypium hirsutum
  Clone ID: LIB3135-042-Q1-K1-B2
cccacgcgttcgcgaagccaacgctcatcacgccctcccactcaataactattgccatcagtttcagtttcaggtaaccgcaacaaaccaaaccacgcttgaaccagccaggaactcacccaagaagcattacaggggagtcaggcgtcgcccatggggtaaatacgccgccgagatccgtgactccactcgacaaggggcacggatgtggctaggcacattcgaaacagctgaagctgctgctttggcttatgacaaggcagcttataggatgcgtggttcaaaggctttactgaatttccctgctgaagttacggtggaaccatgatcggttcaaagattacggccgaatgtaagctcaaaaagattggaagaaacaacctgtggttcaggtagtagctccaccgtgatttcatttggggcatccatat

SEQ ID NO: 12166 - DNA, 321 bp, Gossypium hirsutum
  Clone ID: LIB3135-042-Q1-K1-B3
caaggtttgaatcgatgaagacgacgatggttaatggtcaccatggttgaaaaaagcagtgatttgcatggcctcaaagtgggttttttttttaaatacagttttatatatgttcttatgagttatgttgctttggttcctatctaaaaatatttgtatttgtattctcttttttttttaatgaaaacagcttttttttgaaaaaaatagatagaaacattaaaaacaaatgaatgatgatgattttgctattgacaaggtaaattataatagatgcgtggtttaaatgctttaacatgaaatttactgatgaagtggggg

SEQ ID NO: 12167 - DNA, 354 bp, Gossypium hirsutum
  unsure (1)..(354): unsure at all n locations; Clone ID: LIB3135-042-Q1-K1-B4
ccgacccacgcgtgctgccagcgtcacacacaatttttattttttgtttccaacccaaaattgnctttagggatgaagtttgtttagtttccgagacaagctcttttcgataattttattctaagctcacattccccatctcgtcgttcgcagctcttgcattttctttcttattggatgctccatagatatggttggtgaatgcattccttaaagtaaacatctcgtttaaacctgttttccccttgttgaatgatttgtggagtataaattagatgattcaccagtctttaaaataactggaaaaaaggtgtgactcgatatgcttatttcaattttcaaattggttacttt

SEQ ID NO: 12168 - DNA, 439 bp, Gossypium hirsutum
  Clone ID: LIB3135-042-Q1-K1-B6
ccacaatacccacacccgactgattctttactttatcgtaagcaccatcaaaggtgatctggatgaaactttcctgtggtggcgaccatctctttttctctaagagtgcacaacaaattacgcgactttgatcaaggttgagctgctctattgcctagcttcttctccacatcaggggcagctcggatttactactaacttccgatgttgaagattcacctttgtaggcagataattcctagatagcttccatattgtaaccttaattttagctggtagattcaggcaccatagttttttataaaaattcccatagatggtctgttaaagcataagctctaggattgtcagtcaatttttgtaatagttgataggcacttctgaccgtaaactcaccctaccgttcgccttcccatataataaaatcatcatgcggtgt

SEQ ID NO: 12169 - DNA, 429 bp, Gossypium hirsutum
  Clone ID: LIB3135-042-Q1-K1-B7
tatttacaaaggatccaaaggcactgactgatagaacctcatagtggaagtgcttatctatgccagatgtcagtttgcattacatactcatcacctcaatccttgctgggaggcttgatctggaatcactggggcacaggtctatttctggtgcgtatcatttgctaatcatatggaacagttgaaagcccggaattattatatgttcagttacatggatacttccgggtagtgccttaattatttatggcttgtacctgtaacactcgcaagcagtcatgccatgaagctggatgagtttcaaatcagtataaatgtagattgaacttataggttaaatttagcttatgatccgaatgattattaatctaagaattttagattgtgtacgaggcacatccaacataagttttgcaccatggtcacaaa

SEQ ID NO: 12170 - DNA, 421 bp, Gossypium hirsutum
  Clone ID: LIB3135-042-Q1-K1-B8
aaacggaagaggatattaaggcagcaaacgaaagagaagcagctaataagtctgctaagaagaaagagagtgggaaatcttcagtactgatggatgttaaaccatggtgtgacgagaccgacatgaagaatgtggaagaagccgctcgatctgttgtaatgcctggacttttattgggagcatcaaaattggttgcgggcggatttgggattaagaagctccagatcatgcttacaataactgacgatcttgtttctgttgatacccttatcgaagaacactcgacagtcgatcctcacaatgaatatattcagagttgtgacatcgctgcattcaacaaaatttatacaaggacgaaccggcttttattcttcttcttcaagaaatgttgaagcgaaagccgattttacgccatgtttta

SEQ ID NO: 12171 - DNA, 247 bp, Gossypium hirsutum
  Clone ID: LIB3135-042-Q1-K1-B9
aaaaaaggaggatctgaatgctgtagatgataaagcagcacctaactagtcttgtaatacgagggagagacgccaatctccaagactgatgcatgttaaaccatggcatgacgagacctgcacgaacaatttggcacaagccgttcgatctgttgaaaagccaggacttctatggtgagcatcaaaactcggtgcggacaaccactcaattaacaagcttcagatgatgcttacaattggtgaacaa

SEQ ID NO: 12172 - DNA, 426 bp, Gossypium hirsutum
  Clone ID: LIB3135-042-Q1-K1-C1
aaggaatccactttgcacctggtccttcgcctccgcggtggttttaagtgttgtgccgaacacctgtccagttattgttgatgtgttaagtttgttatgtttgcgggtcgtatgttgatgtgagctggccactaggcaggggaagcttacacgtaaaaataattgctttttataaacgcttttagttgttttttaggtttgaataagttcgtttttgcattcaagtttctctcttgttcgaatttacatgaaggtgctaataatctattattaagctattaatggaatacagttttgttctatatttttttagtctctgttggttctctgaaaaattgttttcatgtaaagtgtttttaaaattttttttagtttttttatcttgtgttattttttattatattaccttgtgtataattttttttg

SEQ ID NO: 12173 - DNA, 417 bp, Gossypium hirsutum
  Clone ID: LIB3135-042-Q1-K1-C10
gctaaacgcacgtcatagtctatagtggttacacccgtatatctaggacggtatgatgtggggaatggggatgacagtaatcaaagaaaaagattgcggagctaaactctattagattggcttctaagcttatgtataacttggtttgagtgtcatgttagtcgtatgctctttctaagttttatcttagtgctggcggttgcagtagcttggcgagatgccaaaaccatgtacatgtatagttgaacttgtaccatgcacattatcttgcatcacataaggttacagataacatcggagcctttatttctgtggcatacatcttggttctttactgcgaacacgcatccagaggaaccgctttaaacattcctttatcgagtcgcatctttgatcgttaaaaaggttatatgggga

SEQ ID NO: 12174 - DNA, 306 bp, Gossypium hirsutum
  Clone ID: LIB3135-042-Q1-K1-C11
gccatgcataaagcacattttcatcacaaattatcaagtctgatcacgatttcaatggggcggtaagtgccttggatgaccagaatgtatgttatagttctcaacttacaactccaacagaagctgattctggtgaaaggttgtcaactcctacctttgatgtgccaatgtcaccaaaaaaggctcttcgtgctgcaatgctgaaacagtcttttgcagacactattctgtatagctataataaggcactactggatcattgtgataaaactgatccagtaaagctgcagcatgaaaaggaaagat

SEQ ID NO: 12175 - DNA, 350 bp, Gossypium hirsutum
  unsure (1)..(350): unsure at all n locations; Clone ID: LIB3135-042-Q1-K1-C12
cccacgcgtncggactatgtagaaacttctcattgagatttctgacctcagaagcgccgcgcgggaaaagatcaacactgatacaaccgtctcacaagcagctgtcagtctgcgcaccgacaaccggatcaaaaccatatagattgaatgaaggtacaagatatattgactatgatcagctatggaaagagcgcttgccttatgaaaccagcccctattattggttattcgcatgcttagactctcgtgtgtgatcatgccacattacgcatgggcaaccataagtagcttgtattgcttttaacatttccacgactgtggcgccagatgacaaggaataaattctgaaa

SEQ ID NO: 12176 - DNA, 409 bp, Gossypium hirsutum
  Clone ID: LIB3135-042-Q1-K1-C2
attcgaacagttcaaggcaagggctactgaaatgtataatcaagctaaagatccgtctgaaaaagataaacttccaagacctgaggacttttcaaaggcgctttacacctttgacattggccaaaatgatctttctgttgggtttaggaaattgagctttgatcaactgcgtgcttccatcccagatatcataaaccagttagcatcagctgtccatcatctgtatgagcaacgagggaggagtttctggatacacaacacgtggtccgatcggttgcttgccggttaactatttctacattcttaatcccgaacctggttatgttgatcagtactgttgtgtcaagaaacaaaatgaaatggccatggaattcaatagacagcttaaggacagagttatcaagtttag

SEQ ID NO: 12177 - DNA, 424 bp, Gossypium hirsutum
  Clone ID: LIB3135-042-Q1-K1-C3
ggaaaaagggggaaaaaagtgaggatcaagcatagatggaaaacatgggagttctaggcaaggtggtggattaccttctattgttatcattcttcagcatcacattaacagctcagttggacatccccgagtccatcctcccccacgcctacaatcccttctatcaagtttataccacgttaacccaagattatttggtgcttgagcagcctgcttttttcaaggcacttatgacgttggaacttgtttaccaactccctctcgctttgcttaacatctatgggttgttatactctaagccctggttcaacaccacctgcctcctctttggtgcctctatcgttgcctctacgacagctatggtgggagacattctcaattcccagaaggcatcagccaatttgatggccatgtattatccacc

SEQ ID NO: 12178 - DNA, 433 bp, Gossypium hirsutum
  Clone ID: LIB3135-042-Q1-K1-C4
tgaagaaggtgcataatttagctttgggtatggcggttctggtgatattattgtcgtggatggcttttccagctctagcttgttcctataatggcggcggtagtaataataaagggtgtaaagactgcattgccgagcaaatgaaatacggttgtccaaggtgtgtgccgcttctacggtgcatggcacggtgcttgtggggcggaagttccaggtctaaatgcatgaggcggtgtgattgcgacggtgggaagccgacactttccgattgtaagaaatgcatgtcacggtgcaaatgtagttgtgttgcttgaatccactcttttcatgcaaaactacgtttgtatttgttgtttttttctattctaaactcttttctttcaactgttgttttgcttcaagcttaattaatattggaatctaaattctatcc

SEQ ID NO: 12179 - DNA, 441 bp, Gossypium hirsutum
  Clone ID: LIB3135-042-Q1-K1-C5
cccacgcgtccgggatcatcgttatatccagataaggaggtcttcataccatgatgtgataagagtatctgagatacaaaaatacctagacatatctggagtccaaacttatataatcaacagtgctaagatcgtttttcttaatgaaaggccacaacccaggccaggaaaaggtgttaccaacacttgtgaggtctgtgatcgcagccttgtcgattccttccgtttctgctctcttggctgcaagattgttggaacatcaaagaatttccacaagaagaaaaggcagccaggtatgaacatggcagcattagactctgaggattcatacagtagcagttgccatgagaagattaacaacaaagtgcagagctttagaccatcaacaccacctccaactcgaactgccaaacgaagaaaagggattccccacagagcacc

SEQ ID NO: 12180 - DNA, 436 bp, Gossypium hirsutum
  Clone ID: LIB3135-042-Q1-K1-C6
tccacgcgttcgcccacgcgtccggcgaattatggcactagatttaccccatggtggacatctttcacatggttatcagactgacactaagaagatatctgctgtgtcaatattctttgagacaatgccatatagattgaatgagggtacaggttatattgactatgatcagctagagaaaagtgcagtgctttttagaccaaaacttatagttgctggtgccagtgcttatgctcgcctttatgattatgctcgtatacgcaaggtctgtgataagcagaaagcaatttatgttggctgacatggcacatattagcgggttggttgctgcaggtgttattccatctccttttgaatacgctgatgttgtgacaaccacaacacacaagtcacttcgtggtccacgtggtgctatgatttcttcaggaagggactc

SEQ ID NO: 12181 - DNA, 433 bp, Gossypium hirsutum
  Clone ID: LIB3135-042-Q1-K1-C7
aagtaagaaaccctctcctcatctccaccgtttcgaactttaccgatttattcttaaaaccggtgcccagacttctaccacggctaagcgtgcacagatctaacggtgtgcttcaagaaggtaaaacccccctctcttttctcttttatttttcgccaagtaaagagaaaaaggaaaaaaaactaaaagaaaacgaaaaaagatccagagaaaatcgagaaatcgcctttccttattcagatgttctgtatttcgtaacgatttctccctttttattcaacaataaataaatttcataacacagaagctgaaacaatgaacaatccaaaggagaaaatcaaatctctgatccttttgaaactttttcttgcttttgtttgtattcaatatctgagtctgcgtaaaaaaaaggaaccaaaaacccttttacaaa

SEQ ID NO: 12182 - DNA, 438 bp, Gossypium hirsutum
  Clone ID: LIB3135-042-Q1-K1-C9
tcgcccacgcgttcgcccacgcgtccgcttgctggtgttggcattggtcttcctgcaaattccttctttcaacttccatacaatgcttttcgaacagccagaacccgggcactggattttgtctctaccaaaattacacctgctcttgcctcctatagatttgcacctcctcaccttcccgaccttcaaagagaagccactacaagactctcaaccatgttgccttcacaaactatctctatttgggaaggtgtagaaagatttagcacccgctttttccatcctcgcaaaggtttaaaagattaggtgctttatatacataacgccatgtgaatgtgagagattgcaaattatatgatggagaaaatggcagtgcatttggtaggatcatggcaggcagaccatgtgcttctagatgataatgctaaacgcgaggaa

SEQ ID NO: 12183 - DNA, 143 bp, Gossypium hirsutum
  Clone ID: LIB3135-042-Q1-K1-D1
cccactcgttcgcacccggatttctttggcattcacccgttaccatgttctgcggcaaactggtgccaaagtgactgatagagagatcaatgtaaatgcagagaagcccagataatctgcgcatttttttgtctatggttaac

SEQ ID NO: 12184 - DNA, 397 bp, Gossypium hirsutum
  Clone ID: LIB3135-042-Q1-K1-D10
catagactctcttccacggttaaacccttttcaaacaatagtcaaatggcttccaatgatcaccatgggcatcaccatgaccatggccatgaccatcaccaccaccaccaccatcatgaccatgataaatcaacaaaatcatcatgggggggagctgatgggaaagtttaccataaccatgatggccttatcgcctcactcacatgaacccatttactcacctggatacttcagcagaagagccccaccgcttgttaacagggatttcaatgagagggctttcactgctggaattggtggcccctgttggtactgggaaaacagcttttaatgctggcactgtgcacgttcctgcgggataagtacagtcttgccgctgtgacaaatgacatattca

SEQ ID NO: 12185 - DNA, 363 bp, Gossypium hirsutum
  Clone ID: LIB3135-042-Q1-K1-D11
cccacgcgttcgcgaagccaacgctcatcacgccctcccactcaataactattgccatcaggttcagtgtgaggtaaccgcaacaaaccaaaccacgcttgaaccagccaggaactcacccaagaagcattacaggggagtcaggcgtcgcccatggggtaaatacgccgccgtgatccgtgactccactcgacaaggggcacggatgtggcttggcacattcgaaacagctgaagctgctgctttggcttatgacaaggcagcttatatgatgcgtggttcaaaggctttactgaatttccctgctgaagttacggtggaaccatgatcggttcatagattacggccgaatgtgagctcaaa

SEQ ID NO: 12186 - DNA, 93 bp, Gossypium hirsutum
  Clone ID: LIB3135-042-Q1-K1-D12
cccacgcgtccgcccacgcgtccggtcttgttaagttatatatcgtggcaaatagtgtgatatttgggtcttggcccaggaaaaagtttgaat

SEQ ID NO: 12187 - DNA, 321 bp, Gossypium hirsutum
  Clone ID: LIB3135-042-Q1-K1-D2
gcatactttgtacttttgctattatctattatcactaagcaaacctactaaacggatcaggcaaaattaataaccgactatgtatactttttaatagacatgttctttcctcaccttcttcaccatttttatccatgtgcttttcatttttattttaatcttattaatatttccttttttattattttaattacactttatctttatatgctttgtatttttatttattattattcttttacttttcatatgtctttttttttattttttataatgatcttttttattaatattatatttatattcattattttattattt

SEQ ID NO: 12188 - DNA, 421 bp, Gossypium hirsutum
  Clone ID: LIB3135-042-Q1-K1-D3
cccacgcgtccgcgaaaatttaaccccttcatgaaccagattatttctatgtaaccaaagactccacataaatcttgcaatgattcgcttttgttggtcatctactgccaaacgagttctaacaaagcgaatcttatctcacatagactcttcataggtcgaaatctttacttgcagcgatgcccacacccactacagttcaccaccagaccacaacatgtgatcagaatcctccagctctgccttacacagaggacaagatactttcacacgcaaagtactacgcgccaaattatcaaagtgaggcaccagattatccaccagtctccaaatacgtattttaattttccctagaacgttcaacgaccatgacactctgtacaaatcttcgtcatcctccataattagtggacatgtatat

SEQ ID NO: 12189 - DNA, 405 bp, Gossypium hirsutum
  Clone ID: LIB3135-042-Q1-K1-D4
agaaaacgaaaaaagaaaaatcaatagctggttgggacccccgaaaacccgatttcgaaaccctaatcggatctcccaaatagcttcgaagcagaagaaagaagatgacgggagtaaccaatcaggaggaagacaagaaacccgctgatcaaacggctcacatcaatctcaaagttaaaggccaggatgggaatgaagtgttctttaggattaaaagaagtactcaactaaagaaacttatgaatgcttattgtgatcggcaatcgggggagttcaactctattgccttccttttcgacggtcgccgtctgcggggcgagcagactccggatgagttggaaatggaggatggggatgagatagatgcaatgctgcatcaaactggtggtaccatggcctaactag

SEQ ID NO: 12190 - DNA, 425 bp, Gossypium hirsutum
  Clone ID: LIB3135-042-Q1-K1-D5
cccacgcgtccgtgtggtttcagatgatgtgggaaagatcaaggaagctctgcggagatggggtgatattgataagctggatcttatccttacacttggtggcaccgcattcactccaagagatgtgacccctgaagcaactaaagaggtgattgaaaaaagaaacacctggtcttttgtatgtcatgatgcaagagagtttaaaggtaacaccatttgctatgctttcacgctcagcagctggcatatgagggtcaacattgatcatcaacatgcccgggaatccaaatgcagtcgcagaatgcatggaggcattgttgcctgcccttaagcatgcactaaagcaggttaagggtgacaaaagagagaaacatccccggcacattcctcatgaacatgctacaccagtggatacttgggagcgc

SEQ ID NO: 12191 - DNA, 301 bp, Gossypium hirsutum
  Clone ID: LIB3135-042-Q1-K1-D6
cttgcattaagtctcaaagatatcactgcaagaaaaaaaaaaaaccagacatggcttccaacactgttgcatccgctgctcttcttcttaccttgaacttgttgttcttcactttggttagctctacctacgtgccttggccaccaccaccaaagagccacaagcctacccacaaaagcccaccctcggcacctgaacaagccaggcacttgccccagagatgcactgaaactaggcgtttgtgctgatttgttgggctcagtgcgcgttgttgttggaccgtctaggaccaatgctgctc

SEQ ID NO: 12192 - DNA, 175 bp, Gossypium hirsutum
  Clone ID: LIB3135-042-Q1-K1-D7
aataaacattagatcttaaggatcccgctggtccatcgtctaatacatatttcccaaaaatggacgacgatgatcttcatttttgcgcttcaactgaaggctcgcatgtgccacccactaacgggcccacgctcgagccatcaatgcgtgtcgtgatatcgtccaatcaatgatg

SEQ ID NO: 12193 - DNA, 351 bp, Gossypium hirsutum
  unsure (1)..(351): unsure at all n locations; Clone ID: LIB3135-042-Q1-K1-D8
tcgtccacgcgttcgtccacgcgtccgagaagcttatgatgaagatgaggacatgcatggtggtgcgcagagagtacaatgcgctcagcaatgataaaaaaaagccgaatgtccgagacacagacggtggtttttggcgatggaatgtactgtggttaaaaaaaaaaagaaagaacatttgagagtaagattctcaaaacattgttgtgttttggtaagcctttattttttgtttttaatagtgcaagtattttagtaattgaaatggtgttatatgctttgaaacctgatgctttctaagtatgcaaagatttatgcacacnntatatttattcaaaaaatactttttgt

SEQ ID NO: 12194 - DNA, 55 bp, Gossypium hirsutum
  Clone ID: LIB3135-042-Q1-K1-D9
cgcagacagtctttcatacatcaatgctttttcggctttagtcagaatgctgcat

SEQ ID NO: 12195 - DNA, 435 bp, Gossypium hirsutum
  Clone ID: LIB3135-042-Q1-K1-E1
tccacgcgtccgccaaaatgaagatttgcatgcttggagatgctcaacacgttgaagaggcagagaagataggtttggattatatggatgtggaagcattgaagaaactaaacaagaataagaagttagttaagaagcttgccaagaagtatcatgcctttctggcttctgaatctgtcatcaagcaaatccctcgtcttttgggtcctggtctcaacaaagcaggtaaattcccaacccttgtcactcaccaggaatccctagagtcgaaggtgaatgaaacaaaggcaatggttaagttccagctgaaaaaggttctatgcatgggagttgctgttgggaatgttgcaatggaggagaagcagatcttccaaaatgtgcaaatgagcgtcaatttcccttgtttctttgctgaagaaaaattggcaaaatgtg

SEQ ID NO: 12196 - DNA, 443 bp, Gossypium hirsutum
  Clone ID: LIB3135-042-Q1-K1-E11
gtcccatgcaactttcttggaactacaactactggccgtgtggaagggccataggggtggacttgttgaacaacccagacctgctatcaagtgatcccacagtttccttcaagtctgcgttttggttttggatgactccacaatcaccgaagccatcttgccacaatgtgatcatcggagcatggtcaccctctagtagcgatcgcgcagcaagtcgggctacagggtatggtgtgatcacaaatattatcaatggaagccttgaatgtggtaagggttggaatgcacaagtagaagaccgcattgggttctataagaggtattgtgacattcttggagttagctatggtaacaatcttgaatgctacaaccagaggcctttcgggaatggagtctcggtggactcaatgtagctttttggctcaaatgaaagtaaacgtgca

SEQ ID NO: 12197 - DNA, 220 bp, Gossypium hirsutum
  unsure (1)..(220): unsure at all n locations; Clone ID: LIB3135-042-Q1-K1-E12
ctcacacttactcctacacgctctaacttaaatgcgacattactaacagagaaggggggttggctgctctatcccattgcctatatcaaccctaaaaacaccttcactcgaatccgataaactgccactacgaccactgtntgctagtactatggcagacactcgctcatctatcatatcccatctttgacacataactactcgcgcacattgtggatga

SEQ ID NO: 12198 - DNA, 390 bp, Gossypium hirsutum
  Clone ID: LIB3135-042-Q1-K1-E2
ggcaatagttgccgtttggctatcatctattcttgttggcgccattaactcagtgcccttgcgttccaaagataatggagttggttggacttggatattcaggatggtttgtctatagataccttctcttcaagtcaagcaggaaagaactagctacggatattgaggcactgaagaagaagattgctggaactgaatagatgtacaggattggcaatggcatgctaatctggccttcttgtatcctctaaaagagacatctttattctgtaattgtagggattccttgtatgaattcttgtcacctttatatttcccctgttcctggaataaaacttgtcaattttatgcgcaaaatataaaaaaaatattaaaaatttatattaaaaa

SEQ ID NO: 12199 - DNA, 234 bp, Gossypium hirsutum
  Clone ID: LIB3135-042-Q1-K1-E3
gaaaaccaattggattatgcacgagtatcggttagctgacgtggaccgatcggctcgcaagaagaacagtttaaggttggacgattgggtgctttgccggatttataacaagaaaggcgccatcgagaaacagtcaccgcaaggaagcattggcaaaagctctgccgtgacggagatcgaagacaagaagccggatatagcgacacttggcgtggacacgcgccaagttgcccc

SEQ ID NO: 12200 - DNA, 440 bp, Gossypium hirsutum
  Clone ID: LIB3135-042-Q1-K1-E4
gattcctttgtacatgctgtagctgagaatctagtacatcgcttggaggactgcaagaaaacatttcctactgcattatgtttgggaagctcgttgcaagctgtgaggcaaatgctgcggggacgtggtgcaattcaaaagtttattatgatggatacctcttatgatatgttaaagctgtgcaaaagttctcaactggattccggcaatgagaatattgagacttcatatgtggttggtgatgaggagtttctgcccatcaaagaaagttcagtagatttggtaatcagttgcctagggctccattggacaaatgatcttccaggggccatgatacagtgtaaactggcattgaagccggatggcctattcttagcagctattcttggaggagagaccttaaaggagctgcgaatagcttgcactgtagctcaaatgga

SEQ ID NO: 12201 - DNA, 180 bp, Gossypium hirsutum
  Clone ID: LIB3135-042-Q1-K1-E5
acgcttgtttttttgatatacaactatattcacttctgtaatgtccataaccttggagttgttgagcaacccatacctgctgtcaattgatcccacattttcctttaagtctgcgttttgttttttggatgactccaccattcactgaagtcatcttgccacatttggatcatcttagca

SEQ ID NO: 12202 - DNA, 444 bp, Gossypium hirsutum
  Clone ID: LIB3135-042-Q1-K1-E6
gtaggattagcaccaacaggcttcaacttcaatgcaaaattacggagagagagtacagatgttcaggacttgctcattgctcatattaacggaatggacaccttggctcgaggactccgaaatgctgctaagctgattgaggatggtactttggctgagcttgctagtcaacgatattctagctttgacacataacttggtgcccacattgaggctggttaagctgattttgaaatgcttgagaagaaagccatgggaatggggagagcccaatgttgcttcatacaagcaggaacttgcatagatgattttccaatctgcactgtaagataccttgattgaccgattatggtcaatagtttcggtttttccttttagatatgaataagtcatgatgactatacaaataattagatttttgtagtttataacaatgcattagtg

SEQ ID NO: 12203 - DNA, 361 bp, Gossypium hirsutum
  Clone ID: LIB3135-042-Q1-K1-E7
gtcaggctttgatgaagaagcatatggcacggccggctgctgatactaatttgttgctaatgaaaaaggaggctcttgatgcgttgccggataaactcatagaggcggctgtgataccaaatttgtccccatctgcggcaaatcgattgatggcgtgttttactccacctattgaagggtatattgagaacgctatagaagcggctcagaaaagttccaccaatcagaagcttacgtgaaggcgatgtgtaagtatgcaaaggacaaacttcactcgtgaaactgatgatcaatttcagctgcaacgtagtgtgattctctctgatggcaatgagtctcataacaagtattatttaacatt

SEQ ID NO: 12204 - DNA, 351 bp, Gossypium hirsutum
  unsure (1)..(351): unsure at all n locations; Clone ID: LIB3135-042-Q1-K1-E8
gtgaaacctaagatgggagatgcattgctgttctggagcatgaggcctgatgccacactagattcttgaagtttgcacggtggatgccctgtgatttcggggaacaaatggtcctcaacgaagtggctgcatgttgaagaatacaagttgtaaactgctatatagaggataacagggtacatcagtatgtcataatcgtacggtgctgagaaagtattgagtgatgcaaccnctatgtgatgggggcatttgtatctttgtaggttnggagtacttgtctcatttttttcttaacgccgtggaactatcgccatttcataggagaatacaatatcatcgtaaaatagacgt

SEQ ID NO: 12205 - DNA, 302 bp, Gossypium hirsutum
  Clone ID: LIB3135-042-Q1-K1-E9
cccacgcgtacgataaaaaataaataaaatattctggaccattatagactatcgccacactcggtcgctggcgttcgcacgctggatgctcctttatttccacctacaatagattctcagcgcgacgttttacatctgaagaactcaagtaacactctggtttctcaactatatcagcttgcatcacattgtcattttcgcacctggcttaataagtattaagcgatgcaacatctatcttatgaacacatgtgcatccttaatagctaatgaaacactccctgtaatttttcattaataaa

SEQ ID NO: 12206 - DNA, 394 bp, Gossypium hirsutum
  Clone ID: LIB3135-042-Q1-K1-F1
cttggatcctcctcattttctacgctgccctaattccctctgagtgaacatgactactttgagccttacttccccttgcattgttaaagttgcaattcccgaacgattttcaagtgctatcgtcaaagccccaacatctcttggatctgttaaaagcatcttcaagtcttttggcttgaaatgttccttcaatttcagaacctcaatggcaacttacaagattaagcttgtacgaccaaaaggtgaggtgaacgagtttgagtcccctgatgataagtacattctagatgcagctgaggaagcacgggttgagctaccatattcttgcatagctggagcttgctgcacatgtgccgagaagatgatttcacgttctgtggatcaatctgatggt

SEQ ID NO: 12207 - DNA, 313 bp, Gossypium hirsutum
  Clone ID: LIB3135-042-Q1-K1-F10
atgatggttgcttaaactacattgaatagaatgatgaggtgttgattgccggatttggacgaaagggtcatgctgtgggtgatattcctggtgttaggttcaaggttgtgaaggtctcgggtgtttcactgttggcacttttcaaagagaagaaagagaagcctcgatcataaattttgagggagaggtctcatcgtgttctgttagttctatttagaataaactatagagatttttattgctatgtagttatttggtcaacctgttcactttatcttaattaatattttgcgcttttgtactgtttaataaa

SEQ ID NO: 12208 - DNA, 377 bp, Gossypium hirsutum
  Clone ID: LIB3135-042-Q1-K1-F11
cccacgcgtccggctcgttaaacgagttaaaagatgttgggataagcttaagaaatggttgaacaaacaatttcccggaggctgaagcgacacttataaggggtgcatcggaatctgatattgaacaattacaaacacttttaaaagtcaaattgccgcttcccactcggcttctctatcgctttcatgacggtcaagaactgccggacataatgaacccgaagacagcttctagtagctggttgggaattataggtggttactctttctatcaaaattcagttaatgtttacttgttaccattacatcaggttattgccaagacatgatatgtcattcgttacctatgtttttcgagccgatccaagtgcatcatc

SEQ ID NO: 12209 - DNA, 349 bp, Gossypium hirsutum
  Clone ID: LIB3135-042-Q1-K1-F12
atctggcaccatttgtagttagcgtgagcggagatcgtctcattgacatggtaaaggataatggaattatcagagacgttgtatggcaagatgaagcctctggacttttgcttgaagcccccacctcagttgccgaacctgacagtatgcctctttatcttactttagtcgagaacgaagaagagcaggaaagtcagttaaacattggcaaaagaaggctcggctgcatccatgtcttgatttttcttcccccgatgttccatctcttgttacaaatggaagtaagtgatgcttcgactatagttcgtattcgcaccgatcattggccatgcttagcttacatcgatga

SEQ ID NO: 12210 - DNA, 401 bp, Gossypium hirsutum
  Clone ID: LIB3135-042-Q1-K1-F4
caagagtgttgaggttgaagctaatcctggccctggaagtatcgtaaagatcaactttgctgaaggccgtccattccaatatatgaagcaccagatcggaggacatgacgacaagaatttgtcatacagttatagtttgatcgaaggtggacctttgggggacaagcttgagaaaatcagctatgacaacaagtttgaagcagctgcaggtggaggaagcctttgcaagagctcgatgaaattttacactgttggcgactatgtgatcactgaagatgagatcaaggctcaaatcaaagggagtgaaggagtttacaaggctgttgaagcttacctcttggctaaccctgatgcctgcaactatatatatgttggttgctttaattctaataacttgaatt

SEQ ID NO: 12211 - DNA, 396 bp, Gossypium hirsutum
  Clone ID: LIB3135-042-Q1-K1-F5
tccggaattgacccatccatccaaactgagagtttgcatagtggtgttagcttgcgtggtggtatcggcggcagcccaaagtgcttccaatgtgagagctacttatcatctttacaatccgcagaacataaactgggacttgactgctgcaagtgctttctgcgccacatgggatgccagtaagcccttagcatggcgtcaaaaatatggatggactgctttttgtggtcctgctggtcctcaaagtcaagctgcttgtggccgatgcttaatggtgaccaacaccgccactggaactcatgcaacggtgagaatcgtggatcaatgtagcaatggagggctggatttggatgttaatgtatttaaccaacttgacacaaatgggattgggaatgc

SEQ ID NO: 12212 - DNA, 342 bp, Gossypium hirsutum
  Clone ID: LIB3135-042-Q1-K1-F6
cccacgcgttcgaacggcgaatgctgatagacatgctggtaatatcttgattggcaaaggagatgatggtcgcaccgtgcttatttcaatcgatcacggctactgcctgcctgagaattttgaggattgcacatttgattgggtttactggccacaatcacggctgccttactctccagacactcttaactatataaaatcactggatgccgaacaagatatcgcacttctgaattattacgggtgggatgttcctgttgagtgcgctcgcacactgcgaatcttcaccatgcttttgaaaaaaggtgcagagcgaggtctaactcccttcaccatttggag

SEQ ID NO: 12213 - DNA, 426 bp, Gossypium hirsutum
  Clone ID: LIB3135-042-Q1-K1-F7
tcgccacgcgttcgaccacgcgttcagaatgcttccgtgaactgttatcgttgatggactgaagaattggaaagctcacacttgctagattactgatggcttatgatgtaatgtcatatccatttgctaacaaactggtgcattcagaagaagttcttgagctgcgtagtgacttgatgaaattggatccaacacattaccagttctacaaggatgaacatagcatggtctcgctacagaaggtgacttctagtaaagagtcattacttcaacattgctttcagtataaggactcagtttcatcagccatatgtggagctatctgtatccggctgaacaacttatcgctatcacggatgggagcttttgagaaattattgtgggttcaaatgttagatctcagccacaatgaactacaatcaattg

SEQ ID NO: 12214 - DNA, 439 bp, Gossypium hirsutum
  unsure (1)..(439): unsure at all n locations; Clone ID: LIB3135-042-Q1-K1-F8
cccacacgtncgggcaccagtttatcctccaactaagccgcgaactgcgcccccgactaagggaccagtgcagtcaccgacatatgctccaccatcgtcttgtccagctaagccgcctacttatcctaaaccacaaaagagcctagtggctgttcatggccgtcgtttttgcaagtcatgcatatacgctggatccaacaccctgttgggagcaaaacctattttgggcgccactgttaagctgtcatgcaggaacaccaaatacaagcaagaggccactgcgaatactgacaagaatggctatttcttgctgcaagcaccaaagaccgtcaccagctttggagcccacanatgcacagagtctctagtatcatcgccaatggctaaatgcagcagaccatctaaatctccatgggggattgaaaggcagctaccttga

SEQ ID NO: 12215 - DNA, 344 bp, Gossypium hirsutum
  Clone ID: LIB3135-042-Q1-K1-F9
ccttaacatcccagtttcccttagcttgctcctcaacgtttgttcaaggaacgttcctactggcttccaatgctaaaccatcactgttccctacactttttatcgtctttcttatggtgtttgtgtttgattttagaaagctattatttacagagtgttttcagttgtaactttccttgcgggattgatatagaataagtctaatacttttcttcaaatgttttcttagggaactttaatatctctaagggacgcgaaaagacttgcattattcaccttgttttatttccttacttcttgttttcttaccaacttatttataaaatctctgcatctagttatgg

SEQ ID NO: 12216 - DNA, 173 bp, Gossypium hirsutum
  unsure (1)..(173): unsure at all n locations; Clone ID: LIB3135-042-Q1-K1-G1
tcgtccacgcgttcgtccacgcgtncgcatcgaggcatgaattaaaggtggcaaagcagaacatgaagggtcccggaagcctctgagttttaccattttctcgtttaagtgaagaaggctttgctgcttggtatcctcaaaagctgttggtgctattgggtgactttagcttg

SEQ ID NO: 12217 - DNA, 332 bp, Gossypium hirsutum
  Clone ID: LIB3135-042-Q1-K1-G10
accacgcgtccgtgaagattttgcattttgatatcaagccacataacattctttgagatgagaattttaatccaaaagtttcagattttggtctcgcaaaattatatccagtggatgatagtattatttctctcacagcagcacgtggtacatttggatatatggctcctgaattgttttataaaaatattggaaatatcctcgtataaagctgatatttatagctttggaatgatgctaatggaaattgtaggaaggagaaaaaatttgaaagattctgttgaccattcaagtcaaaattatttccctacatggatttatgatcaattttg

SEQ ID NO: 12218 - DNA, 146 bp, Gossypium hirsutum
  Clone ID: LIB3135-042-Q1-K1-G11
cccacacgatcatgtcagcaaacgactataatgacgccgggactagcatcagagggggcggggcagctggttcccgcatgcttacgctacacttaccaggggcgcatcggatacctgatggtgaacacatacaaacactgttaaaa

SEQ ID NO: 12219 - DNA, 164 bp, Gossypium hirsutum
  Clone ID: LIB3135-042-Q1-K1-G12
tcgcacgcttggtatgtatccaagcccaagaaaaaaggaacgaggggaagaatcgagagggaatccctaccatataccaaaagctagatgcaacaattaaaaagggtgcaactaaaataggtcagacgacaattacgaacactgctaacggtcaaatagacgct

SEQ ID NO: 12220 - DNA, 303 bp, Gossypium hirsutum
  Clone ID: LIB3135-042-Q1-K1-G4
gatcatactacagatggcaaggcgagttacacttttatggcagatctcaggcggaagctgattggaacaggaccacttaaagatttaagatgcttctaattgcaaattcgagttctggaggaaacacatgccagtttttttgaaagatgataggcgtgagatagaggggggccgatgtgtcacgctgaattgaacttattgcagcatctcagaagtttggttaccgacattatgggatttgaatgcaaatgcaaaggagtgcaataaatatgcggcttaatccacacattgatggtctcgatg

SEQ ID NO: 12221 - DNA, 97 bp, Gossypium hirsutum
  Clone ID: LIB3135-042-Q1-K1-G5
aatagagagtatgactggcggtgcttgcttacatggtggtaaaagctgcatcgccaaaggcgttgaatgtgatagcgtcctttcttctgtacaatcc

SEQ ID NO: 12222 - DNA, 357 bp, Gossypium hirsutum
  Clone ID: LIB3135-042-Q1-K1-G6
ataattttgatttctccaactgctttcagtggaagcgaaccggataggagaggcgccgatcccattgtgaaagccgtaatcggagcacatgagcgatgaaatggaaacggcaacgggaacggcaggaggcggagaagagaagtggaagaaacggacaagggtttgatctggaaacttccgcagctgaagttgaaggaagtgggtaaggttggtcctgctttcgggctcggcgctggttgcggtctcggctttggtatcggccttgttggaggtgctggctatggtcctggaattcctggcttgcaagtctgctttgttttggtgctggatgtggcgttgggttaagattttgctatg

SEQ ID NO: 12223 - DNA, 271 bp, Gossypium hirsutum
  Clone ID: LIB3135-042-Q1-K1-G7
tgacgcgtgggcggacgcgtgggttgtggtgcaccacccgttgcatctcttgcacactttgagacagggaatggtggtgggaacaatgtcacttaatttcctaacactgttgatgttagtagttacagcggggagcagcataatcatgttatgggggaacatgaaatgtaagatgaggaatatgctgaagaattatgggagaattttttttcaggcacccattagatatttgcactttgaaaaggaggaaattcttgcaccccacactcat

SEQ ID NO: 12224 - DNA, 63 bp, Gossypium hirsutum
  Clone ID: LIB3135-042-Q1-K1-G9
cacaagcgttcgtactgcagttaatcttatatctagacttttagctacgatcatatctacggg

SEQ ID NO: 12225 - DNA, 436 bp, Gossypium hirsutum
  Clone ID: LIB3135-042-Q1-K1-H1
cccacgcgtccggctgggagaaaaaatatgagaagggagatattgctatttttaggaaaaaggttaatgacaaatcctgccgcaggaattctgccaatatgtgtaaacctaggggttcagatgatgtttggtacaagaaaatggaaacatgcataacccctttccctaaggtaagtagtgcaagtgaagtggcaggaggggaactgaagaagttcccagctaggctttttgctgtccctcctcgtatatccaaaggacttgttgagggggtctcagttgaaacttaccaagaggacaataagctttggaagaagcatgtaaatgcttacaaaaggataaatagattgattggtactgcaagatacagaaacgtgatggacatgaatgctggtcttggaggatttgcagcagctctcgaatcacccaagtcttgggt

SEQ ID NO: 12226 - DNA, 156 bp, Gossypium hirsutum
  Clone ID: LIB3135-042-Q1-K1-H10
acgttctattcttctggtcttcatcttttatgcagtgtttgctgtgcggcgttatgggggtgcgttgtgtttgtttagcagttgtattcttaattgtaccctcatgttttgcttgatcatcttttctatcaataaaatttgtttagacttcccgtt

SEQ ID NO: 12227 - DNA, 411 bp, Gossypium hirsutum
  unsure (1)..(411): unsure at all n locations; Clone ID: LIB3135-042-Q1-K1-H2
tcgaccacgtcgttcgtccactcgtctcgaccacgcagtccggcgattnttccacactttgggtagtcgacgcgacggcgtgtttgacgctcaccaaacccgaaactctcgctcggattggaccgttcgttcttggtttgcatcgcagtatgtatatccaggcacggagcttccgattgaatccatcttctacttataagatcctaacatagcatatatatttaaggctagtgagcagaatgaatcaacactagccctatgagtttagttgtcatcatcccatgacttctgttggtctaaccggaccaccactcccgacgcattttcgggaatcaccatgatgattagtgtacgcttgcttccccactagagggaagggaaggaaagcgttgcaaagctgtatcttaataa

SEQ ID NO: 12228 - DNA, 246 bp, Gossypium hirsutum
  Clone ID: LIB3135-042-Q1-K1-H5
caagatcaagactcggttgacacaaagccatgacgatgctaacctataattgctcccgggtgcgcacagattatcgtgtatctcaagggtcattcaaaacatgctcccatataccatacaacatcattcttacataccacatctgcgattgtctaaagaagaaacaggatggagcatatgttaccagatatgagtctgaccgaaggcatcattcaacgtaatcgtaccatgcctacaattcaaaac

SEQ ID NO: 12229 - DNA, 282 bp, Gossypium hirsutum
  Clone ID: LIB3135-042-Q1-K1-H6
ttcttggctatcgtagatgaaagactctggtatcaacctgacgtttgttggggacaagcaagtcaaagcatcctttgatgcccaagggctggccattgcattataatgacacattttgttaaagcttgtccgcgtggtaccgataaccgaatggggttacaagttctcgtgtgatcgacttgatccggcacatggcttctgcctaagtgagtgattttggtgaaccaaactcatttcataatggactttttaataatagccctcgtcttcagctttagcaaa

SEQ ID NO: 12230 - DNA, 83 bp, Gossypium hirsutum
  unsure (1)..(83): unsure at all n locations; Clone ID: LIB3135-042-Q1-K1-H7
tcgtccacgcgttcgtccacgcgtncggcttcgattcgtcnntttaaaaataaaatttgatagggggaaaatttaaaattatg

SEQ ID NO: 12231 - DNA, 408 bp, Gossypium hirsutum
  Clone ID: LIB3135-042-Q1-K1-H8
ggaagtggcagctcgagatcttgctgaaactaccactgaaaacaataatggtgaggtggctaccgaaacaacccatgctgagctagaagatggacgcggaggttataatggaagaggacacggagggaaaggagggtatggaggtgggcacggagggtatggtggtggtggccacggagggtatggtggtggccacggaggatacggtggtggtggccacggcggtcacggtggacatggaggaggttataaaggaggctgcgcctatggctgctgtcgttcagatcatcacggaagaggctgccaaaggtgctgctcttatgctggcgaggctgtcgaagttgaaactcacgcctaatgtagccttttgcatttacagttggcatgtatcttaataaataaatgggc

SEQ ID NO: 12232 - DNA, 363 bp, Gossypium hirsutum
  Clone ID: LIB3135-042-Q1-K1-H9
aggcgtgcgttttttttaaaaaaaaaatcacgcatccggtgattatacacacatttatatgaagacgcgagggcttgtttgactctcaccatacccgtaactatagatcgggttggaccgctcgtgcttggggaggattggattatataggctcaatcccggagcgtctgcttgaatgcatcttatacttacgacatcctgcaatagcatttatttttgaggcgagtgcgctaactgcatcaacactttccctatgagttatacggcatcagccgatgactcttggcggtctaaccggaccaccactgcttacttctttacaggtattaccattatgattacagtacgcttgcttaccactat

SEQ ID NO: 12233 - DNA, 302 bp, Gossypium hirsutum
  Clone ID: LIB3135-043-P1-K1-A1
gagaatccaatccaggatgaacgcttttttcgttcgctatgtgctgactggatgcgtagtcgcgtgatcgatcaatggacgggggaattgcgtgaatgacgagaccggcctaacctaaagtaaaggctcttccctctctggatggcgaatcttgattgactgacactaggaaccgattcggagaaacaagaagcatgacatgagatacgcggcggataaatttccgatagcgaattacttgactcgatggatggaggggggcctccaactcaagcacgaaatcaatgttgagttcacaatca

SEQ ID NO: 12234 - DNA, 387 bp, Gossypium hirsutum
  Clone ID: LIB3135-043-P1-K1-A10
aattgatatgctcagccttgagacctaccctggcgtcaagcgcatcaccatcaggccccacactgaccgctgggtgttccccgagaccaacactggcatcattgtccttgctgagggtcgcctgatgaaccttgggtgtgctactggccatcctagctttgtcatgtcctgctcattcactaaccacgtcattgcccaacttgaactgtggaaggagaagagctctctcacgtatgagaagaaggtgtatgtgctccccaagcaccttgatgagaaggttgctgctctccacttgggcaagcttggtgccaagctgaccaagctcaccaagtctgaggccgactacatcagcgtgccgatcgagggtccctacaagccttgccacta

SEQ ID NO: 12235 - DNA, 199 bp, Gossypium hirsutum
  Clone ID: LIB3135-043-P1-K1-A11
gcgaatcctgagctctgcatgtacttggcgtattgcatgcagtgaataatttggctggggtttgtttgttgggggcagtgttggggacggatttggattggggtttatgcttggcatcgcgtcgtatcgaaactcagctgctgtttcgctgagtaatgtacatttccctggtaatggtacttgtggactctgatgcttt

SEQ ID NO: 12236 - DNA, 338 bp, Gossypium hirsutum
  Clone ID: LIB3135-043-P1-K1-A12
tcgatcggcggcgatgggcggcggcggcgcacatggcggcaccacctacaagggctgcacgcatcccgcacaacaagcgctggcacaccgtcgccggcaagggcctctgcgccgagatgtggttctgggttttctacagggctaagcaggatggtgctacgctcttgggtttgcgtcatccttgggagggacatgatgaccactctcatggtcatggacacgggcatgaggcatcatcatcgtcatcttcacattaagttccttactggctgcggacgatgtttggcatgttccaacaactaaagtttgagttaataaattctatcaccctgcatggg

SEQ ID NO: 12237 - DNA, 416 bp, Gossypium hirsutum
  Clone ID: LIB3135-043-P1-K1-A2
ctctctctctccaggctcctgtccgggtagaattctcttcttcctttgcgtggggttctttgttgttcaatcgccatggcttcaaagcggattttgaaggaactcaaggatttgcagaaagatccacccacttcttgtagtgctggtccagtagctgaagacatgtttcattggcaagcaacaatcatgggaccctcagatagcccttatgctggaggtgtgtttttagttactatccatttccctccagattatcctttcaagcctcctaaggttgcgtttaggaccaaggtcttccatcccaacatcaacagcaatggaagcacttgtcttgatatcctcaaagaacaatggagccctgcactaaccattttcaaggttctgctctcaatctgctcgttgctgaccgatccaaa

SEQ ID NO: 12238 - DNA, 264 bp, Gossypium hirsutum
  Clone ID: LIB3135-043-P1-K1-A4
gctgttatgtattcaaaacaccactgaacctattaagcaccataaactcaggaactagaggacgcattgatagaatcttcagagcttgaaaaggtttggacgtgttggagacaaagatttacatgcattttgttattcttttgctatgtactgcgtggccctgtcggaaagctgacaaatgaaggttgatatataccattgaagcttgatgaagacaggctatatatgagtacacagtgtactgcattgtgtgtgtatagatct

SEQ ID NO: 12239 - DNA, 187 bp, Gossypium hirsutum
  Clone ID: LIB3135-043-P1-K1-A7
attattacctttctattttctgtcaactttcacaactacttgaaaaacaaaatcactcggaaagatcttgaaaaacctcttcatattctcacaaccaaatatgaaactaagaaaaacccaaagccttaaatccaatcaattcaaacaatattctctgcttccaaatggcatccccttattcaaaccc

SEQ ID NO: 12240 - DNA, 284 bp, Gossypium hirsutum
  Clone ID: LIB3135-043-P1-K1-A9
cggtggaaacggcgggccacgcgtcgatgtaaaaagccctggctcacgatcatgaaccaacaagaaacttgtcgagctcgtatggaatcaaaccaacagtgctgattggaacatcaggagtaggaaggacatttactaaagaagtggttgaggcaatggctgcgttgaatgaaaaacctattatattcttcctttctaatccaacttcacaatctgaatgtactgctgaagacgcatatacatggagtcagggccgagccatttttgtcagtggaagcccattt

SEQ ID NO: 12241 - DNA, 222 bp, Gossypium hirsutum
  Clone ID: LIB3135-043-P1-K1-B1
ggggatcccacctaatcaaatcacataccttaatttctgccgagacactttcgaaatgatctaggtggtgttggcaatgccagcaacagacctgttcatttattttgggggttttgtttatcgtcaatgatgttattcaagagtgtataaagatcacttcggccccgccttttttttttgattaaattagtttaatagatggcgtatgctttcatctttttt

SEQ ID NO: 12242 - DNA, 345 bp, Gossypium hirsutum
  Clone ID: LIB3135-043-P1-K1-B10
cccacgcgttcgataacacgttctttcaggcgctcaacaactccaccaagattaagagagggactgtggaaattatcacgctcgcaccgcttatcaagaaggggacgacgaggctttcctggccgactacacttaggagccagcagagcctgcggccacactcaaagtgctgcatgatgtgaagtgcgaagacaagctgagcaccggcagcggcaggagcgcggtggtggacgcggacgcgctgctgtacggcaggttcgccgcggcagttgatagcagcgtggagtcgtactttcccggcggcgaggaccactaccacgactgcgggacgatgggccccgtgaa

SEQ ID NO: 12243 - DNA, 408 bp, Gossypium hirsutum
  Clone ID: LIB3135-043-P1-K1-B11
ctggtttattgcaaaatacaggagagaatgatccgacaactagaacttttgttgagggttacaagtcaggatcagtggggagatccttggacatcacccggttctctaattatgctgaacttcgagaggaactgggtcagatgttcggcattaagggtcagttggacgaccctgatagatcaggctggcagcttgtatttgtcgacagggagaacgatgtgcttctccttggagacgacccgtgggagtcatttgtgaatagtgtatggtacatcaagatactttcacctgaggatgtgcataagatgggaaagccaggaaacgatccacgctacctatcttagctacctatcttaaatcgatacatggagctctttctggctcccatgacgattctgcggcacactg

SEQ ID NO: 12244 - DNA, 359 bp, Gossypium hirsutum
  Clone ID: LIB3135-043-P1-K1-B12
ctttctgagatggctaatcttttcatcagccttcacttggcggtcgctcctggggtggataacaacccgaacaatctggttgcatgcacgacattcttttatgaagcaacacgggccatgctttgtctgataagacttgaaacagatccacaagataggacccaactgccgctgacagttgcctcgggcgatcaacatttgacattcgagttgaaagagttcgccaaggaacatttgattgatataccaaggactcaagctgccccacctatggcaatggtacagacacagttgcttactgcagcacctggcacatacaatgaccctgttgccatgcttgctggattgctatgagaagt

SEQ ID NO: 12245 - DNA, 193 bp, Gossypium hirsutum
  Clone ID: LIB3135-043-P1-K1-B2
gagaactatgtgttaagctgggatgttgtctaatgtctagaatatttaatgtctgtcatttagactcttttatggtgctgtttttatcgtcactgggtttggtggctttcaagaacttgctttatgtagttcttatgatctaactaccagataactaagatactctttttcatctttacaagcaagccactgt

SEQ ID NO: 12246 - DNA, 293 bp, Gossypium hirsutum
  unsure (1)..(293): unsure at all n locations; Clone ID: LIB3135-043-P1-K1-B3
cggacgcgtgggcacgggggcaccaangtctgtagaattaatactcatattgactaccgcttttgtggattcctttcttttatatatataaaaaaacagaatacagggtgagttcttcaactcaaccaggtaactcatgttttaaaattttaagatttttgaacttcacatggaacttggaccttggagattttcaaagaagcggctgcgtttgtctaatcgttgccgatcttaacatacttgtgctcgctaggtttggtttgttctttttttacctcgtttttacacttaaa

SEQ ID NO: 12247 - DNA, 387 bp, Gossypium hirsutum
  Clone ID: LIB3135-043-P1-K1-B4
gttatgtgaagctgctgatgaatcatttgcataggcgaagcaccaagcagtcaatgcgatttattgattccaaatgtcctatctgctgcaattagccgaactgtactatgcttatcctgggtatggttccttgctgagaatgcggttttgtagaaagtgcagagatcacaggatcaactttattggcctaaccctgacagattcggttatgggtgacaaatcaactgcacgagaacaatgaaacgcggtgttcctactgtcggaagtgatggatgttacagagtacagaggaagcaatcaagcttgcccatgagattggctttcctggatgatcaaggccagccggtggggagggcgggaatggctttgctatgagcctgatgagtt

SEQ ID NO: 12248 - DNA, 208 bp, Gossypium hirsutum
  Clone ID: LIB3135-043-P1-K1-B5
agagtccgcagcactaatcaaatagcacatagcatgtataatataactactaggatccaagggagacttctataatagcttataggcactcctgactaaaaaatccccgaacagtcccctcacaaattgaaaaacttaaggctgcccggccaaggaacggcaggtctttcccgggccaaaaaaaaaaaaaaaaaaaaaaaaaaaataa

SEQ ID NO: 12249 - DNA, 381 bp, Gossypium hirsutum
  Clone ID: LIB3135-043-P1-K1-B7
cacactcctcccttcaatctgatgaagaaatcatgaaaacagtcgcagaagcgaaaggggctcctccagaataacggactatagacggcttaagctgcagcaggcatacaagatgctgatgcaagggaagaagaaacacagcaagaagaagaggaagaccaagaagagaaccagaagacagaatagagcgcacatgctagaggacaagtatatgagttctaaaacgtgaatgctataccactgaaccatacgcttgtgagccatccagtgtgccaaaggatgctgcctggaaagacatggctgttaaattgagagctgaataagcctgatggttaggagggctagatagcaatagtaatgccttaaatggcaccaggagaa

SEQ ID NO: 12250 - DNA, 387 bp, Gossypium hirsutum
  Clone ID: LIB3135-043-P1-K1-B9
gcgcgatcctattgtccctgagattgttcacatgtacaagaccgatcggcctaagtggaaggcatcatcccgcagctggacccataaatatgccatgggatgaaaaagaaatgaagtcgaaactccatattcgtcattactgcttaaatgcagacgattgtggtgttgccccatgaaactttttgtggggacgtatgttcttacattccttgtcgcccgtatgcattctgatccatctaatgatcgcgtgcttatccaacattaacctaccattgccgtcgataatgagatgacttgtgctttctgttataactatgctagtgtcgatgttattaggtaaatgattctcattgaaggcttgttcaagcctcaaggacaagagtcttg

SEQ ID NO: 12251 - DNA, 227 bp, Gossypium hirsutum
  Clone ID: LIB3135-043-P1-K1-C1
ccgtccgaatccggtcgcccacgcgtcgggacctggcggaccgtggcggaccttggcaggagggaatgctatgtgaggactcccagtactatggttgaggaccatatacatgtgatgggtgtcatcttgtgaagtcagttcgcctgccatactcctataactcaagacgctgatgacgctatcatgctcacgtataccattcaacatcatgactacatgataagcat

SEQ ID NO: 12252 - DNA, 189 bp, Gossypium hirsutum
  Clone ID: LIB3135-043-P1-K1-C10
gccaaaaatctaaagtcacagtacaatattaatgcataaaaaacctaaacaaccctggggtggatagccttagccattttcagcttatcccatgcgggcacagttgttatgaagaatcacgtgaccttactccgggggggctggcggatcttcagcgggcgggatgtgactcttgctggtacaaggatg

SEQ ID NO: 12253 - DNA, 395 bp, Gossypium hirsutum
  Clone ID: LIB3135-043-P1-K1-C11
gcgatcgagcgccgcctcaaccggaatcttaaagaggctgtgaagattcaggcgcttgaggacaacatgggggatgtcgacatgatctcaactgaagggtcttcctaagctgcaaagggcacgttccaagagaagttcagcgtgaagaaaaactcaagaatacggattaagagattaaagggcaaaggccggaagaaagccaaaaattcaaaaccacctgccaaggagagagttgatgccatggtagaatgacagttgatgccatggtaccatgacggacaagactacatacatccctttgtatgttttctcagagtttgcagcatggaccgacctcaccgaacactggcgcgtgtctcttgcatcttctgcctgaatgttaaattgaagctact

SEQ ID NO: 12254 - DNA, 237 bp, Gossypium hirsutum
  Clone ID: LIB3135-043-P1-K1-C12
gcggacgtcattgtactcctattgaaggttgacgcctacagacgacgttctgcaaacagtggcgcttctacacgcttcttgaggtgatccgctgaacacacatgggtgattggaaccatcctcccttgccccgttggggctgccgcatctccgggtggtggcaagagacttgaccaaggtcaagcatggcaaatcactgcagcctctggaaccacacaagcccgaatttgggctcgg

SEQ ID NO: 12255 - DNA, 210 bp, Gossypium hirsutum
  Clone ID: LIB3135-043-P1-K1-C2
cccacgcgtccgacaactctttcttccacgcgttcatccacacgaccaaggttactagcggggactacatctgtactactcacgtatgacttatcaaaaaagatattgcttagaaagcttgaaaatatgcacttctctaacactattgtatttatccacacttaccctgatcgaatatatggtgtctacatccaagagtcattccattta

SEQ ID NO: 12256 - DNA, 146 bp, Gossypium hirsutum
  Clone ID: LIB3135-043-P1-K1-C3
aagaaaacccgacccaccatcctaccatcatcctacaatcttctaaactttttttcttaccaataataaacccactccttatgctattttttacaaaatttcacctcttaccttataatactattatcattcctataaacttatta

SEQ ID NO: 12257 - DNA, 371 bp, Gossypium hirsutum
  unsure (1)..(371): unsure at all n locations; Clone ID: LIB3135-043-P1-K1-C4
ttttacgttacgcttcaatagaatgaattcagtaagggtagagccccatggttgatctagcnggctatgccacttaaactcaaatctatcttaccttcaatccatctttgttcagccagctcataacaaaatgttagaccgggctgacacaaccaaattgcttgaagaaaaggaaaccccagcgaccaagcactcccacccccaaaagtggagaccgaacaccgccaggttgtcgaggacacgtctgaagaggaggcgggcgcactctaagttgaccaccctacccactaatggactatgaggggggcaggcgaaccggaaccgaccgagaacccgaaccgcttgactggctgaccccttcatacttcgtt

SEQ ID NO: 12258 - DNA, 393 bp, Gossypium hirsutum
  Clone ID: LIB3135-043-P1-K1-C5
cccacgcgtccgagaagctgctgttctctctctctttcccatagtttcacccgtctttgaatccatcgctcacaaaattatgggtttgaaggaggaattcgaggagcatgccgagaaagttaagaccctcccggccgccccttcgaacgatgacatgctcattctctatggactgtacaagcaagccactgttggaccagtgaataccggccgtcctggaatgttcaacatgagggaaaggtacaagtgggatgcatggaaggctgttgaagggaaatcaaaggaggaagcaatgggggattatatcaccaaagtaaaacaactgtttgaggctgctggaaagtcttgatgtgtgtgtgtatggccaatgaaaaatggtgtaatttcaagccc

SEQ ID NO: 12259 - DNA, 167 bp, Gossypium hirsutum
  Clone ID: LIB3135-043-P1-K1-C6
cccacgcatccttcttactatactctttaatataataaattttttttacacaaaaccccatccttcacccctgctcttatttcacttaaactccaatctatcttaccttcaaatcatcttctttcatccacctcataacaaaattttatacctctctttcacaacca

SEQ ID NO: 12260 - DNA, 378 bp, Gossypium hirsutum
  Clone ID: LIB3135-043-P1-K1-C7
cccacgcgtccgatttcgctgattgaaaggcttctgtctcttaaacaagacgacccttgcttctgttccgatcaagtcatcaagaccatggttttgatgatgttcattgcaggaactgaatctacggctattacaatggagtggacaatggcactcctgctgagtcatccagaggctttgcagaaggcaagagacgagatcattcgccatgttggaaatgagcgcctgctaaatgaatcagatcttcccaaacttccataccttcgttgtgttgtaaacgagacactaaggttatatcccgcagcaccgcttttattgcctcattgcccatctgaagattgtgtgggggattggatttgagatacctaaaggcacaat

SEQ ID NO: 12261 - DNA, 167 bp, Gossypium hirsutum
  Clone ID: LIB3135-043-P1-K1-C8
tatttcacttaaactcacacctatcttaccttcaatccatctttctacatccatctcataacaaaattttagacctttctatcacaaccaaattttattaattaatcaataccctatctaccaatcacttccaccctcaaaattatatacctaacaccttcttctct

SEQ ID NO: 12262 - DNA, 437 bp, Gossypium hirsutum
  Clone ID: LIB3135-043-P1-K1-C9
gcggttggttacgtcgtggggccatccgtgattaaagttctgatatcaagaatggcggggaaggatggtgagttacagtttcacatccatccacttgtgatggattccatttagtcagatgtacatggaccaactgaacacccttcatgggtaaatacacgtttcctatcttgcagccctgccttcccttgccttcatatttactacgttctacgtgggcgttaaggtgattcctcgctaatcaattccgttcaacaatgtgtaccccttttgccgacatcttgtcaaattattgcagcttatgttccatatacgggatgctagcaagaaccaacgttgagggagctttaagatgatgtctccagttttgactcgcaagcaagcagattgctttcccgtggctgaagatgatagcttcgtctttttttgttgcatat

SEQ ID NO: 12263 - DNA, 374 bp, Gossypium hirsutum
  Clone ID: LIB3135-043-P1-K1-D1
aaaagtttctttataactctaggacaacctgcgtgcatgcggactgcaagatagaagggaatcatgtgtcagcagaggagcttggtacggtgattacacagcatcatcaaatcattctcaattacgcgatgatagtgtatcagagtctggaatatgcactcattgcttatgcaccctatcgttcagttgaaggccttgtcaatgacatggagaagctacacctgtcgaacatgaagagacagatgcatcagaggcaaatctcttctcaggcaaatatatactacatccaaatcaagctccgcgaaagcaagtaaaaccggtcgctcgacttcagatgattctgaagttcagattgttactcgacgaggatgttc

SEQ ID NO: 12264 - DNA, 297 bp, Gossypium hirsutum
  Clone ID: LIB3135-043-P1-K1-D10
cccacgcattcgttgtatgcccggacttatggcttccttaacccgattcctagcgtagacttaaacagtaccgcttaggaaacgtcattgtatgcgcgatgatcgaatcatgcctctggactacttcgcactgttattttctgtaaccccagattattatctgagacttatgcggacatttggtgagccctatatgggttctaactttggttcttagaaaaaatccctgcgttaatgaacaaatatttttttttgaatgggcggcccgtttttaaagatccaatctttccttcccct

SEQ ID NO: 12265 - DNA, 427 bp, Gossypium hirsutum
  Clone ID: LIB3135-043-P1-K1-D2
ctctagccactccctcttttggtacctatgagtctcccaactatgggaagccccctacgggggtttataagcctcctaaggtgaaacccccaccttatgaacataagccacctgtctatgaacctccaaagaaggaaaaacctgaacctaaaccaccagtttatacaccaccaaagaaagagaagccagaacccaagccaccagtatatgaatcaccaaaaaaggaaaagcccgaaccaaagccaccagtttatacacctccaaagaaagagaagcttgaacacaaaccaccagtatatgaaccaccaaagaaggaaaagcctgagcctaagccaccagcttataccccaccaaagaaagagaagcctgaacccaagccaccagtgtatgaaccaccaaaagaggaaaagcctaagcctaagccacc

SEQ ID NO: 12266 - DNA, 374 bp, Gossypium hirsutum
  Clone ID: LIB3135-043-P1-K1-D4
cttatgccaactgtcttatttcatactcaaagtactcaggggcactgtaatctttctaggagacatttgatcccgactttattagcattaggactaaggcccgagaagtgcttcagagggaagatgattggaatgaaattgtccagcttgtaggaaaggatgctctagctgaaaccgataagatcacactagaaactgctaaacttttaagggaagattatcttgctcagaatgcttttactccatatgacacgttctgtccattctacaagtctgtttggatgatgcgcaatattgttcatttcaatgctttgtccaaccaggcagtggagaaagctgtcgtgatggacggccagaagataacatacagtctt

SEQ ID NO: 12267 - DNA, 368 bp, Gossypium hirsutum
  unsure (1)..(368): unsure at all n locations; Clone ID: LIB3135-043-P1-K1-D5
gagatggtgtctaagcttacaagtgagtgctgggacaagcgtatcacaagtagtccttggaataaattcagctcgagtgaatctgcttgtctttctaattgtgctcaacgatacatggacttgacactcatcattatgaaacgcgttcagtcaatgcagtaacctggaggagactatgcctgcagtcgtggttacaagttgtgagcttttcttgcaaaatctgctgtattttttaaaccaatactcgtattctgttaaaattcctacagaaggacatcctttgcaatgggttacaaattaattatctcaagattctatgcgggcttaaaagagtttgctttggcatcaaannanaataaaaaattatt

SEQ ID NO: 12268 - DNA, 372 bp, Gossypium hirsutum
  Clone ID: LIB3135-043-P1-K1-D6
gaaagagagagtttcttcttcgctgctgcggaaggtttattttctttcccaaagaataggagctttttctgcagtagcgttcaagtttttaccaatccaaaatttcaatttaaagaaaaaggagaaaacagaaatggctcgctctttctcaaacgctaagcttttctttactttcgttgtcgatgaaatctctaacgttatcttccaacgaagatattccggggcgtcacaaggaattggttctagtggaataagaaggaggagcaggaaggagcgctgctgcggtagtcaagaaaacaggggaagagatgtcttgcggagctaaagagacggttaaatgggttcccgacccggttaccggatgctacagac

SEQ ID NO: 12269 - DNA, 219 bp, Gossypium hirsutum
  Clone ID: LIB3135-043-P1-K1-D8
cacgcgtccgcttatgacaactttcttattaaatacttaatttactcaggaacactgtaatctttccattgcacatttttatcccaactttattaccatcattactaacacccgtaaagttcttcaaaaggaacatcacttgcatgaacacttccaccttataataaaacattcttcatcctaaacccatattaacacactagaaacttctctactttt

SEQ ID NO: 12270 - DNA, 399 bp, Gossypium hirsutum
  Clone ID: LIB3135-043-P1-K1-D9
atcgactccttgaacccactcatgcatgctgggggtgtggacttcatggacgaggactgctccacaactgctcgtttgggatctaagacgcggacaccacactttgattacatcttgacccaacaggcgatggtgactgttgacaagaaagcgccgatcgaccaagacctcatcagcgagcttcatgtctgaccctgtccacggagccatagaagtctgcgctcagctgaggcccactgttgacatctgagtgaccgctgatgctgatttcgtgcgtccagagcttcgacagtcttcataagcttgtatggatccgcagtgtgactgcaatggctagtttgtaagaacttaatatgcctgggcttttgaactcttagattgtgcctgtattgctcatgt

SEQ ID NO: 12271 - DNA, 222 bp, Gossypium hirsutum
  Clone ID: LIB3135-043-P1-K1-E1
gtttgttagatgaagtgaaaaaaggaagttctttggatgttaatggatcaatcatcgcagctttggtagttcatggactttgtttctcatcaagagaatcagaggctttttgggcattggatgagttgaggagcagaggttgcaagcctgattttatagcttatagcattgtagaagaagcgttcagaatgaccaacaatgtggttgtgagggagttgtttt

SEQ ID NO: 12272 - DNA, 316 bp, Gossypium hirsutum
  Clone ID: LIB3135-043-P1-K1-E10
ttgcattcgaatctcgcttctaaaatttcgtcttcaactgataatcggtaataaatgagtatgaagccaggtgcgacgtttctcctgggggctatgttcggagcccttttaactggaggattcaatcgctgccgccatcttaaagaaacaagcagtagcggtagcaggggagaaaacaggcgctgacctcgcaccaaaccaactcaaaacaaacctgctgatgccaacccaggcccccaagtggaacagcaatcggaggcaacgcttgttggctcgtgattgaagacatgggtgtgttttgctttgtagatcgtat

SEQ ID NO: 12273 - DNA, 355 bp, Gossypium hirsutum
  Clone ID: LIB3135-043-P1-K1-E11
ctagctctagcctctagccctagcccctactagtagctagccactcgatcggggggcataccttctgatcgtcacccatggccactgccgaggtccagaccccgaccgtcgtggcgaccgaggaagcgccggtggtggagaccccggctccgccgcgtcggcccgaggaggtgccccgcgcgagccaagtggaggagccagctgccgcgtgacccgaggcggccccgtggcggcggagaagagacgccaaagaggaaagacggcaaggaccggagccggcggcggctgaagagggaagagaaacgagccccgtgcgagacaaacagaaccgagcgtgacccgagctgtgtgcgag

SEQ ID NO: 12274 - DNA, 376 bp, Gossypium hirsutum
  Clone ID: LIB3135-043-P1-K1-E12
gcggtcgccgagcagcctcgctacatttgctctgaagttcaaggacacggccaccatgtaggaattcaaggatgcggtggagtctcacaagacaagcaaggcacaggaactgccgctgaagacgcccgagaactctccgaaggcagcagaagtctgaagccgcacccgagtcacgcttgctcgtgtcttttgtacgtgtccaggaaggaaggaactgagagagtttctgttgttgcggagtttttaagaatgtcgcgtcatgacatgatgtcctgagttgtattttgcgtacgggttccctagtgctgtttttgtgaacttaccattactacaggcgcataatcttgggatcctggacaagggacttcgttttttt

SEQ ID NO: 12275 - DNA, 252 bp, Gossypium hirsutum
  Clone ID: LIB3135-043-P1-K1-E3
attcatacatgatggctatcaagagccaccattgctgcctcagctttatctttttgtggtaccattactcctacagcttcattctgtcaaaggtaatctccagttgaactactatgctcaaagttgccccaatgctgaagagatcatcaaacaacaagtcatcaagctctacaacaaacatggaaacacagctgtttcttgggttcgaaatctcttccatgactgcatggttaagtcatgcgatgcatcgtt

SEQ ID NO: 12276 - DNA, 109 bp, Gossypium hirsutum
  Clone ID: LIB3135-043-P1-K1-E4
aatgtattatatttatacacaattcttttctttcaaaacaacctatattaacaaaaaactgcagtttacatcctccttcatctactacacccaacaatttaatattaaa

SEQ ID NO: 12277 - DNA, 419 bp, Gossypium hirsutum
  Clone ID: LIB3135-043-P1-K1-E5
cttggagaggatagagagaaagtaccagtagctggagcagtggctatttgctccccaggggaccttttgattggtgataggtttatatgccgcaggctacttcagaagttatatgatagagcccttacaattggccttcaaggttatgcaaaattaggaggcatacagagtgaggcctcaggaatagtgtacctagtaactggtttctgttccaattcttttaccctttggagctttacagtacctataatacctgtttctgttttctttgtggggagaatggggttcttggacatgtctcaattgatgaatgtgtaataatatttatatattagctttctagagttgttattgaccctcacatgtttattggagtcatgggccttgctatttttggatagtttatttgttagttattt

SEQ ID NO: 12278 - DNA, 425 bp, Gossypium hirsutum
  Clone ID: LIB3135-043-P1-K1-E6
ctgctcttctctgtacccatttttctttacttccaaaacatcccatggccccaaagaaggacaaagcccctcctccttcatctaagccagccaagtctggaggtggaaagcagaagaagaagaagtggagtaagggaaagcaaaaggagaaggtgaacaacatggtactgtttgaccaagctacctatgacaagcttctctctgaagctcctaaatacaagcttatcactccttcaatactctctgatcgtatgaggattaatggatcacttgcaaggaaggcgatacgggagttgatggcaagagggttgattaggttggtctctgcgcattcaagccagcagatttacactagggcaacaaacaactagatctttagttatatttttgcttaattagttctatgaagtattgccatggttgag

SEQ ID NO: 12279 - DNA, 280 bp, Gossypium hirsutum
  unsure (1)..(280): unsure at all n locations; Clone ID: LIB3135-043-P1-K1-E7
aaaacctcccgaaccacgcgtgcgaaagcagttagtttgtacaaactactttttctgnctatctttgtagtttattgtaattcgcacactatatgcaatagctgtgataaaaccacaaattttgtctgcattatgttaaacatccttattccaaattgaaccacacattatcttatgtctatcgtcccaaaatatcttctattattttctacaaccaggtcttatacatgttcctagatgagaaattttcctcgtcatttatcgtttgcatcactattaa

SEQ ID NO: 12280 - DNA, 433 bp, Gossypium hirsutum
  Clone ID: LIB3135-043-P1-K1-E9
cccttacctctttttacattattgacccactctaaaattcctctacgcacgcctgaggaggtctcctttggacatgtccaaaccatctcaaccgatgttaaatcaatttctcctcaattggtgccaccccgaccctatcctggatatcttcgttttggactctatcccttgtgtgctcacaaaaccaaagtaacatgcgcatctcagttgttgacttgttggacatgttgcctttttgtcggccaacattcagcaccatatagcatcaccggtgcgctagagtgatgaatatatttcttaaatgacttgtattgttatatttcgataataaaccttatttagactaattccaattggatggactactgtgctgagtgcacgggaatggtgaacagtcattttttaggactacagagcttgcctagatttttta

SEQ ID NO: 12281 - DNA, 421 bp, Gossypium hirsutum
  Clone ID: LIB3135-043-P1-K1-F1
ggaaatccgttagtgggatgaactactacgcctgtctatctttgttgtctcttgtaatggtcacaccttttgcaattgctgtagagggaccgcagatgtgggctgcaggatgggaaacggccttatcccaaattggaccacagtttatctggtgggtagcggcccaaagtattttctatcatctctacaaccaggtctcatacatgtcccttgatgagatatctcccttgacatttagcgttggcaacaccatgaaacgtatatcagttatagtctcttccatcatcatcttccacacgcctgtccagccaatcaatgctctaggagctgccatcgctatcctcggaaccttcttgtattctcaggcaaaagcgtgagaaaaaccaggggttcgagaattttgaatcatcatacaacatag

SEQ ID NO: 12282 - DNA, 341 bp, Gossypium hirsutum
  Clone ID: LIB3135-043-P1-K1-F10
cccacgcgtccgcaaaagcaaagccctgatacagatgttggacaagaagctgggcaggtagaagcagatgctgaagtggagactgggatgatagacggtgagacagatccagaagccgaatctgatcatgtaggatgagattcaaccttcaaggtatgaagaaatagcttctgctttctagttgttcattaagggttcttaacactagatactggtgaaaaaaaaggagagttgagtgtttgactgaacttaatccaatgttgaactataagctctgtagttattattctcaacctgaattgaattacttgcttatcttatacttacagtcgttctacttg

SEQ ID NO: 12283 - DNA, 403 bp, Gossypium hirsutum
  Clone ID: LIB3135-043-P1-K1-F11
caaccgcaaaggagatgatgtctacaccactcacaatggcatcgtggggcgacagtagtcatgttcctagctacgagtctgttagccgcaagtttcactcgaagtgagaggatccagcatcggacttgcatgacctgttccaacaactgatgtgaagcctgcaacggccctcagctgggacagttactccccccacagaataaaaaagcatgtggtttctagcgccccccctaattactccctctgcatgtatacgccaaacatgtttttttttttgtggtaagaatcatcaagccccttggcgactcgtttctgagtttcgcagcggcgctagattttattttatgtggacaagcgagctttcggggtgcgctcgtgcagaaatattttgcaacgtattttg

SEQ ID NO: 12284 - DNA, 308 bp, Gossypium hirsutum
  Clone ID: LIB3135-043-P1-K1-F12
gcgcaattcggcatatctttaccagatctccaccacctcaccaggctgcagtcgagtctatcgccgcacgcgcacgggcttcgccaccagctcgaccacggcgcgcggccgaggatcgccggcggcctcatcgtcggccacccggcagctcgggacgacatctcgtgcttgctcaccattggcaccgccccgcacaagaaaccatcagacgtcaagtcggccgcggcggcgccggcgccgcagctgatgctgtttgggaaaccgattctaaccgagcagcaaatatttttaggctttcggccgttgcc

SEQ ID NO: 12285 - DNA, 425 bp, Gossypium hirsutum
  Clone ID: LIB3135-043-P1-K1-F2
ccacagtgtatctgtctttatacaagctttcttcaatttcaacattcaagaatcaagtgggtgcaaagatgagttctacaagcagagcatggcttgttgcagctagtattggagctgtggaggctctgaaagatcaaggtatttgcagatggaactacacagtaaggtcagttgtgcagcatgccaagaaccatgtgaggtcagcttcacaggccaagaacctctcctctcaatcctcagctgcaatttcaaagggactgaacacgtctaaacaatcagaagagtctttgaggatggtcgtacacttgccgactacaatatccagaaagaatcaacattgcatctggctctgaggcttcgtggtggcattatcgagccatctttgatggccatggctggaaatacaaccaggacaagatgatctg

SEQ ID NO: 12286 - DNA, 332 bp, Gossypium hirsutum
  Clone ID: LIB3135-043-P1-K1-F4
ggaaaccgccgacccacgcgtcggaaaatcttgggaggaggaggcttttctcactataaaatcattaacatccctgcactggtgtcatcatcgaggcgtatcctgatgctcagagctttttagcataatgccagtggtggggatttaatttcctattttatgaatcgtccttttttcgtgtaggcgtcaataaatgtatgtgattgtattattcaatctttcttattctctgtgaagggcaattttatttgcctaaaaaaaaataatataaataaacaaaatattaagtccaaaaaaatattgggtagacttttcggccgatcaagagcatt

SEQ ID NO: 12287 - DNA, 264 bp, Gossypium hirsutum
  Clone ID: LIB3135-043-P1-K1-F5
gttaatcccacattgaaagccactacattttcatgcatatcatgatgggttacaaggggggggatgaaagcttgacagtgcttaacaatctccttgggtttaatatcggtagatggatggtgacaattatgtatatagtatcctatttattacccatggtgtatttgggaaatggatagaatatttccaatttctgtatatcatgtcatcatttagcaatgactttgaaaaagttctattcctgctttaaaaaaaaaaattata

SEQ ID NO: 12288 - DNA, 427 bp, Gossypium hirsutum
  Clone ID: LIB3135-043-P1-K1-F6
ggtttaagggatttttttcattcgtttcttctcacgctcgattaccttacaaaaagagaaaatgaccaagtgttacccaactgtgagcgaggaataccagaagtcagttgaaaaggccaagaggaagctcagaggtctcatcgctgagaagaactgtgctccactcatgctccgtttagcgtggcactcagctggaacttttgatgttaagaccaagaccggaggtccattcggaaccatgaagcatcctgctgagctcgcacatgctgctaacaacggcctagatatcgccgtcagacttctcgagccgatcaaggagcagttccctaacctcacctacgctgacttctatcagcttgctggtgtcgttgccgttgagattactggtggacctgaaattcccttccatcccggaagagaggacaag

SEQ ID NO: 12289 - DNA, 438 bp, Gossypium hirsutum
  Clone ID: LIB3135-043-P1-K1-F7
caggtacagggtgcgtggcgctcgggtacggggctgtgctggcgtgtgtacgggagccgtgctgacgtacggggacttggcgtggttgctggaggtgttgtacagtgcctagaggttgtagggtctgttgtggtgcatgtagaaagctactaggttttattggtatagacaatgttcttattaggctaatattttgtctagtatagtttttgtaattatattagttttttttttttttattttatttattttatttctttttttatttaattttttttatactatttattattatcttatatttattttgattatcttattttttatttttttataaatttcaatttatatatgtatttttatgttatattatttttttttttattatatatttagtgtatttaattttatttttaagtaaatttattaattatttat

SEQ ID NO: 12290 - DNA, 365 bp, Gossypium hirsutum
  Clone ID: LIB3135-043-P1-K1-F9
ctcggcacgcaggctagcagcacagcagcagccagagccatcccctctcctcgctgcgcttcgcttcctcggcgccgattcctcctcctgctcctccaccctcgtccgtgcccttccggcgcgcgagctcgcccgagatggcgaacgcgagatcgggtgtcgctgtgaacgatgagtgcatgctgaagtttggcgagctgcagtcgaagaggctgcaccgcttcataactttcaagatggacgacaagttcaaggagatagttgtggaccaggtcggggatcgcgctaccagctacgatgacttcacaaacagcctccctgagaatgactgccgatacgcgatctatgatttcgactttgttact

SEQ ID NO: 12291 - DNA, 297 bp, Gossypium hirsutum
  Clone ID: LIB3135-043-P1-K1-G1
agttaaaatgatcaaatacccgatgtttttttagaaagtacagaaaacataactgtgggtatgaatctatttgagatcgacagaaaaacgatgatcgatgtacatgtatcagactgtcaagccatcaactctttatagctgtttcaatcacaaaggctaatctcctggaaaaaacagtgattaacctaaaggcgaaccacgagggcatactccttagacatgatatgagtatcatcaacgaggaccatattcatatcataactttcattatcaacctccttatggaggctacccttt

SEQ ID NO: 12292 - DNA, 303 bp, Gossypium hirsutum
  Clone ID: LIB3135-043-P1-K1-G11
atccggtcgacccacctcggcagggaataaaaacagtggcagtcaaccagctgcaggggctggggcctgcactgcaatgcgggcagctgtttacaaacactgtgtcttgatcgttgttaatcacatatgtgatggcacaagcaaacttaaattggtgctccctgtacattaacctattactgtcccaaaactcgagtattatgatctgaagttgtctatactgaaccttaacaatatggctgttattcctgtcttatcaggctatggagttcatcaaaaaaaaaaaaagggcgcgtctaagat

SEQ ID NO: 12293 - DNA, 273 bp, Gossypium hirsutum
  Clone ID: LIB3135-043-P1-K1-G12
ggaggccattccaagttatgatgatccatatatcaaagtgccaagagtgctgaacagagaatgatctgtagcatgtatatcagaattgttagaatattaatactctacaatgcagcatggttaaacataatgataaaatttgcagaaagattgaacgagtcaccagcaagcttaattgattctgtgcatttcaatttgataatgctgtgattgaacagagcaatcagcaaccttgcattgggacaggataacaggaaagatttgggagatcta

SEQ ID NO: 12294 - DNA, 426 bp, Gossypium hirsutum
  Clone ID: LIB3135-043-P1-K1-G2
cggacgcgtgggcaggaatgaaccaccatgctctgcaggcacagagaagggagatgaagcacaaaggaagaaatgtagtctggtcaattgcaatggacaagtgtctaattgaagctctggcagttcaggctaaaaatgggaataaaattgacaaatgctttaatgaaaatgcatatactgctgcttgtattgctgtgaattctcgttttaatttgaacttgaacaatcaaaaagtcattaatcgccttaagacaattaagaaaaggtacaaggtaatgagggatatgctaagtcaagatggatttaggtggaatccaaatacaaagatgatcgaatatgacagtgaacatctatggaaaagatatatagtggcacatcccgatgcaaaagggattcgtggaaagcacattgagatgtatgatgagc

SEQ ID NO: 12295 - DNA, 282 bp, Gossypium hirsutum
  Clone ID: LIB3135-043-P1-K1-G3
cccacgcgtccgcccacgcgtccgggcccctgttgaccaaaccattaagactctctctgcatacttggagaaaggtgattgtatcatcgatggtggcaacgagtggtatgaaaacactgagagacgacagaaagagatgtcggcactgggtttgttataccttgggatgggagtttcaggtggtgaacaaggtgcacgaaatggtccctctttaatgcctggagggtcctttgaagcttacaaatacatagaagacattctttttaaagtcgccgctcaagt

SEQ ID NO: 12296 - DNA, 387 bp, Gossypium hirsutum
  Clone ID: LIB3135-043-P1-K1-G5
cccacgcgtccggctaaaatgatcaaataccccacttcattcaacagttgcttcacaaacggaaagagggtgatcatgaaaagaagtttaaaaaaaggaggagattgcttgagacccaagccacaacgaaccctatagaagaacctatggacccaattcaagatgaagagtttttggtttccatggatgatagggttgtaccagagatgtcaacaaatgaaagaggtagatgtgaatgattcaaagatttatgttgaattaaagcagttggtgaattggaagccatgtagctagggtgggtttccaagtgagccagtggagcaaactggctgttgaataatatatacatatttttgcgtgtatgtatatgtaatgtatatgaatgga

SEQ ID NO: 12297 - DNA, 426 bp, Gossypium hirsutum
  unsure (1)..(426): unsure at all n locations; Clone ID: LIB3135-043-P1-K1-G7
cggacgcgtgggcgaaatctctcactcataaccaaaaaacaaaaacagagcatccactgtttttttcttgagtttcctttgtaaattacttcaagctggcgatcgaaaataaagaaaccactgttcgttaaatcaagcccaagaacagaaggataatgggagctggtgggcctgatgaagaagataacaggtggccgccatggttgaaacctttgctgaaagaacagntctttgttcagtgtaaacatcatgttgcacttcacaagagtgaatgcaatatgttctgcttgcattgcgtcaatggcgctctctgattctttttgttagcttattatcaggatcattgttatatcctgatattgtgcgtctttaatccatgtctttctaattatattcttttttacattaattactcttttcatattt

SEQ ID NO: 12298 - DNA, 399 bp, Gossypium hirsutum
  Clone ID: LIB3135-043-P1-K1-H1
tgctgtcatcaattactgaaagaagatggacttttcgttcttcagttcatatctatccggaggagctttccaaagaaatccagcaaacagctgcttttcttaaggaatatatattccctggtggaaccctgctttctttggataggaatttatcagccatggctgctgcaacaagattcagtgtggagcatgtggaaaacataggaatgagttattaccacacactgagatggtggagaaaacttttcctgaaaaacacatgcaaagttctggctttggggttcgacgagaacgtcatgcggacatgggaatactatttcgattactgtgctgctggttttaagacaggaacccttatagattaccaggttgttttttctcgagccggtaatttcggtt

SEQ ID NO: 12299 - DNA, 191 bp, Gossypium hirsutum
  Clone ID: LIB3135-043-P1-K1-H10
cacccattcctgcaattacgtcaaaccattcaaagttttacatagctctgaactggttcctgacagcagccagttttagtctactctttatttcgctaaataaactccgtctgctttgtccctcgttaagaatgagctttgagttttctgtactgcaattgttggagcttcgcctgttttcatattggaat

SEQ ID NO: 12300 - DNA, 362 bp, Gossypium hirsutum
  Clone ID: LIB3135-043-P1-K1-H11
agaaggtgaagctctccgtgctgcagttctataaggtggacgacaccactagcggggggacccgcctccgcaaggagtgccccaactcagagtgcggcgcgggcgtcttcatggccaaccacttcgaccgccactactgcggcaagtgcggcctcacctatgtctacaaccagaaggcgtaattgcttgccccgatttgctttatccgcctaccctatcgagcatccagctgttggttactcgaactgtatctcatgtacatctgtctgaggttgaaacttaaatggagcagtagtatctgacatattggtacccctgttactgaattgacgtgatgctgagtttaattttgttttcgtatc

SEQ ID NO: 12301 - DNA, 234 bp, Gossypium hirsutum
  Clone ID: LIB3135-043-P1-K1-H12
attcccgcatagacacaacacgtctcttcactcttatcttaccatgacattgctggttttgttcatactgttactgcgtgatgttatacccagagctattggagacacatctcaaacctcataccatctgcaacgactctagaagtactgccgaataacgccgaacaccatgtcatttacatcctgataaacacacttaatgccgcccaccaatttgccttgtataacaccatc

SEQ ID NO: 12302 - DNA, 386 bp, Gossypium hirsutum
  Clone ID: LIB3135-043-P1-K1-H3
cctgaattcaagagcaagcttacatatctgcctgtcaacttcttcaagatattaccatggaagtcagacactaattcgagaacctaatgttacttccatcattatcattcgattaatcaggatgggaataaagatgattcgacgaataactttcagcacatcttacctggagatgggggagagaagagcaatctactaccccattacaaagaatctcacttttcctggtccgaatatgcactttcacagctttcttcagattcatctatgaaaccccaccattcttttcggacgctattcaagatattgctttagatatcatgtgtactttcatgactgaaagcttattatgtccacatgggtgctttaaaggagtgaaaaaggtg

SEQ ID NO: 12303 - DNA, 399 bp, Gossypium hirsutum
  Clone ID: LIB3135-043-P1-K1-H5
gcagtagtccagatctatttggataatgctggtgacctggaacttgttgccaggagcagtgaatcttcagatcttaacttctcaagatacggtgacaccttctttgaggttgtttttgctggaggccgcacacaaccgggcacacttaaacctgatgaaggggagcgccacccttactctatcatagagtgtgaggctaaacgtgatgccattttaccatctgtgatttacattcagaaaatcttgcgccgaagaccttttctgataaagaatcttgaaaatgttatgcgaaggctcttgcagtccttggagcttttcgaggaaaatgagaggaagaagcttgcaatttttacagcacttgcttttttccagaaattatcagggttgccacctgagact

SEQ ID NO: 12304 - DNA, 316 bp, Gossypium hirsutum
  Clone ID: LIB3135-043-P1-K1-H6
cccacgcgtccgtctttctggcatcaaaaacgctgtaagtctgtttctaagagatggtgttgcaaaacgatggtggagaagaagagtaagcatgtttatttctttccatgccctttttggctccacttttatgacttctttttgattcactgagttgtgtacagaaattttcttgtagttatatatatttccctcagcttactaaaattcaagtcatagtatgcctttcctatgtaaattggttagtactttcaagttcaacgctcaacaaaaattcagtttgcaatttgatatagggataatgtaatttttgact

SEQ ID NO: 12305 - DNA, 275 bp, Gossypium hirsutum
  Clone ID: LIB3135-043-P1-K1-H7
ctttccttaaaaacaagctcaatcaatttccccattaaccctaaacgaaaatcaccttgaaaaaaaaccacttatttttcttcacctctaaacgacaacaacaatggctggcttcaagaaagccactgctttgattcttacagtggcttttcttgtgaatcttgctttaatggatgatgctgatggtgatgattatatcaacataccagtcaggaaacataatgctttgtagcagcgtatactttgatggttacgttcctactgttctaaaataa

SEQ ID NO: 12306 - DNA, 365 bp, Gossypium hirsutum
  Clone ID: LIB3135-043-P1-K1-H9
tgcagttcatctctcccgaatcaagaggctggtttatggggccaaggcggaggcggccatcgccattgggttcgacgacttcattgcagatgctctgagaggcactgggttctaccagaaggccaacatggagatcaagaaggccgatggcaatggcgcgctgatcgccgagcaggtcttcgagaagactaaggagaagttccagatgtactgatgcttggctgaagagggatttcggatttgtacaatgctcacccagaaggaataaatacatcgcccaaatgtccattgtttcgaaaaaaaatttacctcaattccaatgcttagcattctgatgatgtctgaattccttgtaaacagacaca

SEQ ID NO: 12307 - DNA, 427 bp, Gossypium hirsutum
  Clone ID: LIB3135-044-Q1-K1-A1
cccacgcgtccgaaaaaaacagagaatactcccccacccctttttctcttggagttaggggttcaacacccatcattgtcggcggttcaccgtgtcaaacggagaggggagctctgacgacgcggccacggtgtacatccggtaagactctcttcccctcctctttcctttgtctattttcgtataaaaataaaaataaaaaaacaaataatacaaaaaataaatgaaatcagaacatagaacaagactagaaataaaatcaaccttcctgtttttttgctattgtgattttgtttgctaaagttcgtgtcccccaaaaaaaaaactacaaatggatgtttccacttttgtaatccgagtgccgccaaagtagctcgtggatcatcgcctacgtcggagaagtcagtcacactatcatttgaagcac

SEQ ID NO: 12308 - DNA, 417 bp, Gossypium hirsutum
  Clone ID: LIB3135-044-Q1-K1-A10
gttcggaggaaaaaaggaaaatggtgagaagggtgatgatgcaccttccaaggcaggaattgttgggagcatgcaaaacctctatgagacagtaaagaaagcacaaatggttgtccaggttgaggctgtgcgagtgcaaaaggaacttgccgcagcagagttcgatggctactgtgaaggtgagctgattaaggcaactttatctggaaatcagcaacctgtacgcatagagatcactgaggcagcaatggaattgggtgcagaaaagctatctcttttagttaatgaagcatacaaggatgcacaccaaaaaagtgtccaggccatgaaggaaagaatgagtgaccttgcacaaagtttaggtatgccacaaggtcttagtgagggattaaaacaacaatgatctctcaactagca

SEQ ID NO: 12309 - DNA, 237 bp, Gossypium hirsutum
  unsure (1)..(237): unsure at all n locations; Clone ID: LIB3135-044-Q1-K1-A11
aaatgcattgtacaaataccttagtttgtattttacctttagttaccattcctccccattgtggaaaggacgaaataagaagaggggtggccaanagtgttgcaatgtaagattttggggttttttatagaagaagaaaagcaaagctacaataattaatttaattattatttggatttaatgtatctttttaatggattgaaatgaagttattccaatgtagttgctattctagtt

SEQ ID NO: 12310 - DNA, 177 bp, Gossypium hirsutum
  Clone ID: LIB3135-044-Q1-K1-A12
atttcaatcgaatgtagcaggtcagagtcaaacagatctaacgaactcagtgccgagtgacagcttggtgcatcctcaaccaacaagccaacctcaattgaatgaaacacgtcagtaccagactctgattcatcactcgaactctcagcatactgggcaatttcaatcaaatgtacc

SEQ ID NO: 12311 - DNA, 448 bp, Gossypium hirsutum
  unsure (1)..(448): unsure at all n locations; Clone ID: LIB3135-044-Q1-K1-A2
cccacgcgtccgctctgaggcaaaatttctgagaagggccactttcttgaaacataatctgtgggtgacgccgtattcacgtgaagaaatgcatcccggaggggagtttccaaatcaaaatccacgtgtcggggagggattagctacttgggttaagcagaatcgatctttggaagaagctgatatagttctgtggtatgtctttggagtgacacacattcctcggctggaagactggcctgtcatgccagtggaacgcattggtttcatgctcatgccacatggtttctttaattgctcaccagccgttgatgttcctcctagcgcaactgatctggagctcaaggacactgacattgcaacaaagcctatccaaaacgggataattgctaagctttgaattgatcttcaactcggattntagcaaacattatgctttgcagtttgc

SEQ ID NO: 12312 - DNA, 360 bp, Gossypium hirsutum
  Clone ID: LIB3135-044-Q1-K1-A3
ggaggacagcctacgttgtcgtgacagccgtggtagccatgattttcccattcttcaacgggttctgtggtcttatcggggcgggctcgtcttggccattaacagtctacttccccatagagatgcacattgctcaaacgaatctgcccaaatactccttcaggtggacgtggctgaaaatactaagctgggtttgcttgattgagtcgctcattgctgcagccggatcggttcacggactgattcaaagcctcaagacgtataagccgtttcagactcaggaatgaaggcattacggatccttttgcctacagtgctttgattgtatgtaaaatataagaaattgtggacaactgtaat

SEQ ID NO: 12313 - DNA, 441 bp, Gossypium hirsutum
  Clone ID: LIB3135-044-Q1-K1-A4
cccacgcgtccgccgataagtaccgaaactacttggttttcgctggcgttgcaacccttctgtctgtgttgggatggtatctcaactctaaatacaagaagcaagaggcctgaaatgggggttaatgattgcattctctaggtggaacatggcatgaatggattaccccaatgccctcatcgcgtgcatagtaactgaaaaataaaacaaactttgtaaagcaccttatcatgttttctgataacgtctgtgttttaatcagtagtggtcttatataccttgataccaatcatggttttctgcattgtcttttaaagaatctttgatgccaacttatatttttttcttttctaaataaaagtgtttgtgacttcctaccctataaaaaaataatatattggttatctctttctggtgttttttcctcctttttttttttta

SEQ ID NO: 12314 - DNA, 380 bp, Gossypium hirsutum
  Clone ID: LIB3135-044-Q1-K1-A5
ctttagttccttgataaatataagttcagctggtaggcaaattgcccctaaaacgtagcattgagtttatcagaacatcttgtagttcaacgacttaccctaaactttgttacgaatctctcttaacacaggctagcatgatccaaacaagcccccaactcatcgcccatgcagccctaaacgtgaccctttcaaccgccaagtcaacctcggccatgatggtgaagcttgccaaaagccaaggattgaagcctacagaggtgggcgccatgcaagattgcgtggaggaattggaggacacgatagatgagctgagaaagtcaatcagcgagatgggtcagattaaaggctccaattttggactaatgattaacgatata

SEQ ID NO: 12315 - DNA, 296 bp, Gossypium hirsutum
  unsure (1)..(296): unsure at all n locations; Clone ID: LIB3135-044-Q1-K1-A7
nccacgcgttcgtttacacctattatctttattggtttgacgcttttacaaatagatcacggttctatataacttatgaatcttctaatcagtctatgttgatatactatgaattagattctcaaggaaaattcgttttacgaaaataatatgtcaagaaagtggactgtagtaaaaatcaccctactattcaaacagattgcgatgtttatgggaactgtagagcattcattatttgtgattcaatgaaacgaaccatctgcagttgcttaaaaaggtttgagcctacccatata

SEQ ID NO: 12316 - DNA, 447 bp, Gossypium hirsutum
  Clone ID: LIB3135-044-Q1-K1-A8
tcgaaaaagacgactcttggcccccctttatcctctcggatccgacggccacgaacggggagaggcctccgacggcaaacccgaaaggcgtttcaagtgagccccgctcccttttgtttcttatttattatatgtaaaaaaaaagaaaaacaaacagaaagagcaaacaaagggaaaaaaatcgaatctaagaaaaaacctccgctttgtattctgttttttcaaatcttttttccttcgtattttcccttctattttcgtatctctttacaccgaattcccccccccccctttacatgatttaaatcggcctttaaatagccgaaatggaaaagataaatcaacaaaatcaaaaaagagatttattctgttttgttggcatgatttttgctatcttgttgctgcaagtactgttggaggagactacgcgcgacgtggaggcgcaac

SEQ ID NO: 12317 - DNA, 402 bp, Gossypium hirsutum
  Clone ID: LIB3135-044-Q1-K1-A9
cccacgcgtccgaaaagaacccctgtggaccaccttggtaagctgatccacacacaagtgtgcgttctcccaaaggtacagcacatgctcccactcgtatcgccgagtcacagtcgccccagtagaagagtttctgctctttcccaacacccacgcaagatctaggacactggctctccttccaagcttcctcaattcgtctccattcgcccgtcctcaaatccatcaactccgcgctcccctcgaatcctttgattatccgttctatatccgctcaccacccagaattccgacccaatcaccatcccttgacactcatctcgctcctgactcatccgagccaactcggtccattcatccctgttcacgtcgtattcccacgcctgtacttaaaagcggttc

SEQ ID NO: 12318 - DNA, 443 bp, Gossypium hirsutum
  Clone ID: LIB3135-044-Q1-K1-B1
gccacaagcaaagacgccagaagatactgttgaagaactgaaaggcacgattcatgatacgatcctgattcaaaataaaactgttaaaaacattcccgatacaaatgaagattgcggacctagaaagcagccattacgagagattgggaacacaatggtcaaaccagctgctgtaaaacttgaccctagaaagaaaggccaaaaaacagtcattcaacctgatactaaggatcagccattacctgtgatggaaaatacaagaggaacaagaagaacaaacaaaatttcaggttagcccgtatagtatatatttccaagtaccctggaaaattttctgaaagtgtacgagttacttgctcgaaagcattgtagtcaggcgaactatagcattggctactagagttattcctttactaagtttcacatgggatttgagtgttttt

SEQ ID NO: 12319 - DNA, 268 bp, Gossypium hirsutum
  unsure (1)..(268): unsure at all n locations; Clone ID: LIB3135-044-Q1-K1-B10
caaattcttaattaaaattttaatattttacccacggaaatcccctcaggaccctgttaaactattccttactctcacaaaaccatcttctttttcaaatctctgcttcatctactcacaaattaaataaaaactttctcaaacccttcattatcttcaactacatcttaatttgattattattttcaacaatcctcctctggctctcaaactttcatatttttctaagataaaaanacccacatctaaacacttgctttactttctt

SEQ ID NO: 12320 - DNA, 359 bp, Gossypium hirsutum
  unsure (1)..(359): unsure at all n locations; Clone ID: LIB3135-044-Q1-K1-B12
ccacgctctctcatcacccttccttgtacctgacttgtcagagagataacccggaccgttttttaacttcgacccaaacccccaacttgagatgctattccattaccttaacaactccttgaagcttcgggctggttcaagggaaagttcaccaataaatgattgggcccatggatgggctcattcgacttatgcgcgaggcctggtcctaaaaaaattnnnnnaaaaaaaaaaaaaaannnaaataattgaaaaattttgtttttttttttttaaaaattttnaaanaaaaattagggggggggggtagaggttttttttttttttttttggggggttttttatggtatgtaaatttt

SEQ ID NO: 12321 - DNA, 438 bp, Gossypium hirsutum
  Clone ID: LIB3135-044-Q1-K1-B2
cccacgcgtccgctgaaagatttgggatgatggcaagggtaaatcctcctgatagtaacaggacgggagaggagtcagatgacgattggcattttcgtgaagttgcctacgaacatctaattgttgatggctttattcggggtataaaaaatggattttccatggagagtgtacacctaatagaatctcttcaacgattaatccagcttatccttatagtgcttaccatcagtctgttagagaagatgacatggagatgttaaccgaaggatagctgttatttacatttcatctttggcatactcaggattagcacttaatttgatgagaatgtccttttcagggatgtaatgaaaacaagtcctttgtacaactaaatgttagtcgtaaattctagtggttaactgttgcagcttgtcttgcatacgcgttttacac

SEQ ID NO: 12322 - DNA, 311 bp, Gossypium hirsutum
  Clone ID: LIB3135-044-Q1-K1-B3
ctcaaatatcaaatccctctaaaaatcctcttcatcctatcaccacccgaaaccatggccgctccttgtccactctaataaaatgtctacattgccaaactctcctagcaagcctatctctactaggagattgtcaagttcatggagaacgtcttcttctccgtccccgctccctactaactctccgtctaggaacgtaacctcctctcttttgcctacaagaacgtcatcagctcccttcgtgctttctgtaggatcgtttttttcatttagcataataatgaatttcttttcatctcctaccacttttt

SEQ ID NO: 12323 - DNA, 338 bp, Gossypium hirsutum
  Clone ID: LIB3135-044-Q1-K1-B4
tgaagattccacctctatctatgttcacagttcatattgtttgaacacttgttgcagtctgggatggaccatatcatcatggttgctaatggaaaaaattcccaatctttgtgataccttcttgttaccacatgacagtccattgacttgtccaatggaccgcgtgttttttgacgcatcccttatatggtgacttttcggacctcgtaaaatatttggaacaaaaagcgaatacgggaatgtcaatactatctttttcagtggagctctatctcctttcctagtatggctggcacacaaattattctcagataaagaatggatccgcctcattcaca

SEQ ID NO: 12324 - DNA, 156 bp, Gossypium hirsutum
  unsure (1)..(156): unsure at all n locations; Clone ID: LIB3135-044-Q1-K1-B5
gaagtgaggtggcaggtangtcatttgccaatgatcggggtttaggtgttcaatggaccagttattgattccagttagatgttcaataaaccatttattcaagtgaaaatattcccggaaaataagaatgttgctgccgtacggcattgaatcttg

SEQ ID NO: 12325 - DNA, 307 bp, Gossypium hirsutum
  Clone ID: LIB3135-044-Q1-K1-B6
cggaatatatgctccctgttctccaggcctttcttgcatcttggacatactcccgcgttggtgtaatcttttgattcttagattcactagagtaggcaaataatttaaggtggctctcgaaactgtaataagtatttttgaagggaggtcactatcccatagcttgtaactattattagtaagcaagttaccatgtaataacaatttatacccacttcgcactgagtattcacctgttgactcccccctccaagccagaaagttgtcgtggggaattgtagtgagtgggatttggagaattttttgg

SEQ ID NO: 12326 - DNA, 235 bp, Gossypium hirsutum
  Clone ID: LIB3135-044-Q1-K1-B7
gcgatagactttgtgcttgtagttggttcaaaactcatctaatacaataattcacacgtgctgttgaaaaaaaaaaaaaaaaaaaaaaaaaaaaaaaaaaaaaaaaaaaaaaaaaaaaaaaaaaaaaaaaaaaaaaaaaaaaaaaaaaaaaaaaaaaaaaaaaaaaatcaacaaaaaaaaaaaaaaccgaaaatcgacaaaaaaaaattttaaaaagaccacctaaattaaatat

SEQ ID NO: 12327 - DNA, 418 bp, Gossypium hirsutum
  Clone ID: LIB3135-044-Q1-K1-B8
cgcggagtgttgaacgtgggacggtgtggatactgccgaacgtggggcatgtggggctgcgaattgttgctagggtttttgctgttttaggccaattgggccctgtaattgggtttagcttgacccaagttttattgggtttgggcccaggtatatttgggcttgtacagttgtccctctttgctcgttgtcgtgtaactggaacagagtaaagactaaaagtccaattgtgctcggtcttactaagccttgacttcttcggtgcttttcttctttaaatagtctcattccttcctattgcatcttcagaggtataggaactggtgcttctatgtactctactgcaatgtcggggtgataggatttctacgttgtagctcctcaaaaaaaataaaatttgctatctttaatttgctcc

SEQ ID NO: 12328 - DNA, 76 bp, Gossypium hirsutum
  Clone ID: LIB3135-044-Q1-K1-B9
tacatacacaagctgatcacctcaattaatttttttattagaaataaaaaacctatttactagtcagctttacaac

SEQ ID NO: 12329 - DNA, 404 bp, Gossypium hirsutum
  Clone ID: LIB3135-044-Q1-K1-C1
gcaagaccaaggtctaccatccaaatattgacttggaaggaaatgtttgcttaaacatcttgcgtggagactggaaaccagtgctaaatataaacactgtaatctacggattataccatcttttcacggagccaaattatgaggatcccctcaatcatgatgctgctgcagtgttgagggataatccgaagatgtttgaatcaaatgtgaaaagggctatgtatggtgggtatgtggggcaaacctatttcccacggtgcatgtagcttttacgaggtagctgaaagcgcaaactcgctatgttatggacagttgggtttctgtgggttgtataatttgtctggaaattaccctttgtcatcccctttgattttctcagtgaatctgagtgaaatattttctac

SEQ ID NO: 12330 - DNA, 421 bp, Gossypium hirsutum
  unsure (1)..(421): unsure at all n locations; Clone ID: LIB3135-044-Q1-K1-C10
caatccgacactcacagggaattaataataatatctccctctggcgctgactatgctttcgagaggcattatggatgtgagacttgggctcttattcctctttgtattgggtgcaagctgggtttgcgatgctagacaactagaagccgctccggtagtactctctggtgcatcagttgtgcagacaaaccaggggcaagatgaggaagtagtagaaaacattgtttggaaggacaatgtgtgcacattgtgtgaggaatttgctactgaggcaattaatttcctttcacanaacaagacccagactgagatagttgaggtgcttcacaagagttgctctcgtattccttcttttgagcagcagtgcatcacactggtggactactatgttcctctcttctttgtggaaatctctttgata

SEQ ID NO: 12331 - DNA, 431 bp, Gossypium hirsutum
  Clone ID: LIB3135-044-Q1-K1-C11
gttcaactgcttaaagcaggcaaagttacagtgtgggaatcaaatttgaagaaattaggaggtacccgttttaagtatggggtacctgatcaacattttgaggtaacaaaatttgctcttttggagaccataaaagaagcagtaccagatatgtggtcagatgagatgaagaatgcatggggtgaagcctatgatcgtttggttgcagccattaaaatagaaatgaaggcatgctcactagctgcatgatttcacaagttccctacattattgcttgttaattttgggtccaataagattgaaagttttcaatcatttaaacatgtaatgtaacatagctattgctcatcactactgttttttccccctagtttgttcgctcctgttctttttggccccttgtatctccataaataattggtaacgtaaca

SEQ ID NO: 12332 - DNA, 410 bp, Gossypium hirsutum
  Clone ID: LIB3135-044-Q1-K1-C12
aaggttataaagaacctgatcctgatgctatttcaaatgaaatactacaagcagagccggagccaggtgataagctattaccacaattgggaatatccaatatgaaaattgatgagccacatctggatgatcaagaattacagagaattcaagacactgtgactggtgtttgtagccgtctgcaaaaggccattgagatgttgcgggctgaagtcaatcccaccaaggcaactgttgttctgcaaactctttttaagattattagaaatgtgattgaacacccagatgaaatgaaatttagaagacttcggaaggccaatcctataatccaaagaaatattgcaaattacaaagctgccatggaaattcttcttttgattggtttcagtgaaaatgttatatttgatgaa

SEQ ID NO: 12333 - DNA, 409 bp, Gossypium hirsutum
  Clone ID: LIB3135-044-Q1-K1-C2
atccttcaaagcttttcatcaccgaattgggcaaatctcgtacacaaagcatagccgaaggagctgggtttaacattcaagctttcctcacgtttccattagatcagtgttcggaggtagtctgaaagggctttttaaggataaggctgcgtttggattcgattttttttattccttccaaaaagaacgtcccggaaacactcatcaattacagatctagtcatctccaaaaaccattcaatccccgatcaaactatcaacagtcatggccactcctggggttcttcaaagagaaaccgaccttctcttatcatctcccttgattgagcttcgtaaaggttacaaaccgacgttctagaagatggttaaatgatagattgttgatggaacttgttcctcgcttgaatgc

SEQ ID NO: 12334 - DNA, 236 bp, Gossypium hirsutum
  Clone ID: LIB3135-044-Q1-K1-C5
cccacgcgtccggaaaactcggtttcctcttatttgtaagcttgctttttttttgatgatgtccacttatgtcggcagttgttgcctatttgcctaataagagtctgctattatcttctaagttgtcaacatttcgaattgcttctcctctatatttaaaagaagaatcccatgactggtgagtgttggaaacttaaaaaaaaaaaaaaaaaaaaaaaaaaaaaaatattgggcaa

SEQ ID NO: 12335 - DNA, 299 bp, Gossypium hirsutum
  Clone ID: LIB3135-044-Q1-K1-C6
caattctttcaaaaagtggggtcttcaagtctggcatttgataaatcatttatgcggggagaagcagctttcttatcaagttgattctgcgcccatatcagcatctttagcaagctgggaagctttgggtctgtcatccagcaagcatatttaagccaaaacttactatttcttgaagattggagaaataatctcaagttttaaatcaaactgcccaatgtacgtataaacttaaataagtaaaaaagctagaatttgacaaaaaaaaaaaaaaaaaaaaaaaaaaaaaaaacaaacat

SEQ ID NO: 12336 - DNA, 441 bp, Gossypium hirsutum
  Clone ID: LIB3135-044-Q1-K1-C7
ccctttcttctcttctttcaactcaaagaatactcccaagtaatattagaatcgggggtggggtcacttataactatgagtctacctctccagtcgcccctgccaggcttttcaaagctttttctcttgaagctgacaaggtttggcccaaggctgctcctcaggcagtcaagagcgttgaggttgaagctaatcctggccctggaagtatcgtaaagatcaactttgctgaaggccttccattccaatatatgaagcaccagattggaggacatgacgacaagaatttgtcatacagttatagtttgatcgaaggtggacctttgggggacaagcttgagaaaatcagctatgacaacaagtttgaggcagctgcacgtggaggaagcctttgcaagagctcgatgaaattttacacttgtggcgactatgtgatcactg

SEQ ID NO: 12337 - DNA, 408 bp, Gossypium hirsutum
  Clone ID: LIB3135-044-Q1-K1-C8
cccacgcgtccgggaagaatggtgagggtgttcgttttgaatgatgcactcaagggcatgggcaatgctcaaaagaggggcaaactacaggtcatgatcccaccgtcctctaacgtgatcattaagttccttttggtcatgcagaaacatggttatattgtggagtttgagtatgttgatgatcatacatctggtaaaattgtggttgaattgaatgggaggctgaacaagtgtggggtgatcagtcctctctttgatgtcagaactaaagaaattgaaggttggactgatctcttgcttacttcaacacagtattgttatattgtgctcacaacatcagctggaattatggaccatgtagaatccacaagaaagaatgttggttggaaagtacttgactttttctac

SEQ ID NO: 12338 - DNA, 412 bp, Gossypium hirsutum
  Clone ID: LIB3135-044-Q1-K1-C9
gaaagaacgtgaacaggcccctgaggaagtttatacgggtggtaaaaggaaggttgaacaggctgatgcttcaaggccaccgttggataaaccggaaaactccaatgatgaagctactgtggctgagcatgacgggcaagagggggaaagtgtaaaaaggaaaggtgatgacaataaaccagaaggcgtatcagaacctaagaaaccaagagttgttcttaagcatctcagtgaagatgacactcaggaagatgacgataccccataaggacaacgctagagtggaatccatgagcattgcttgaaccaaaaattgttacaagatggtgaatcagttaatgcaacgctaacaataggagtagtgccttacgattagattgtttacgctaagttttggtttttgtgtgtttga

SEQ ID NO: 12339 - DNA, 74 bp, Gossypium hirsutum
  Clone ID: LIB3135-044-Q1-K1-D1
cgacccacgcgtcctcttttcaattcttttatttaaataaaaaatttttttatttttaaaaaaaaaaaaataat

SEQ ID NO: 12340 - DNA, 345 bp, Gossypium hirsutum
  unsure (1)..(345): unsure at all n locations; Clone ID: LIB3135-044-Q1-K1-D10
cccacgcgtccgggaaacagtagtaatttattttccaattctgatgctcgtaagccacgtagaaagaggagaccaaaaaagagaaagcaacaggcatgacaaaaacgcagctttggttttgtccatgagaaaacaagtggtgttatacccagacttgtattgaaattcaacaacgctttttgtagtatgttccaagaatagttttagttttggtttagctgaaatttaattattatactacctgttttttttttttgatggatttaattgtatgttgaacgctttgtattgtattcactacaattgataattggagagggataaatgatccttgatttgagccnc

SEQ ID NO: 12341 - DNA, 414 bp, Gossypium hirsutum
  Clone ID: LIB3135-044-Q1-K1-D11
gctgttgataatactggtaggactgtggtattgggattggatttcgagacaaatttgattggtatgcctgtttttggtggcgataagaagtttttggttgattcaaagggtgagttattgttggttgatatgtatttgagcattgaatctgagccaggttcgtcttcttcttcggccggtttcgggttcgtcgaggagtattttgaaaaccttgctttgtatatgaacgagaggatggttaagtttaaggtttttaagttggatgatgctggtaagcagtgggttgaagctaaggatttggacgatcgtgtgttgtttttaggtgatggttgcaccttttctgcttcaatagaagatttatccgtgtgtagagggaattgcataatctatgtggataatttcttttattcgctc

SEQ ID NO: 12342 - DNA, 290 bp, Gossypium hirsutum
  Clone ID: LIB3135-044-Q1-K1-D12
ctttcattagcatcgaaatcactccagttttctttatcacttgaaaatgtcttgctgtggggggaaaggggggttgcggttttggctgcaagtgtgccattgcctgtggaggatccaaaatgtccccaacctgaaccttgcccagatgaccacaactgaaactcttgttcttggtgtagcaccccagaaagcacactttgagggagctgagattgaattcggggctgagaaccgcttccagtgtggagacaactgcacctgcaacccttgccattgtgaatgattagaga

SEQ ID NO: 12343 - DNA, 190 bp, Gossypium hirsutum
  unsure (1)..(190): unsure at all n locations; Clone ID: LIB3135-044-Q1-K1-D2
cttttaccctttttttctaagatactctgattttgcattgttttcacgtgcttatttctggttttgtgctcactgatgtaagattgaattactttaaaaatgttttctgctaatgggtattgtttagcactcttcagtctnaaaaaaaaaaaaaaaaaaaaaaaaaaaaaaaaaaaaaaaaaggacgacc

SEQ ID NO: 12344 - DNA, 413 bp, Gossypium hirsutum
  Clone ID: LIB3135-044-Q1-K1-D3
gcgaatgtttttcgacgtagaatcaacacttcatcttgttctgaggttgagaggtggaattatgtagccttctttgatggctttggctcgcaaatacaaccaagacaagatgatttgccgcaagtgttatgctcgtctgcatccaagagccgtgaactgccgcaagaagaagtgtggtcacagcaatcagttgaggccgaagaagaagatcaagtagataccgactggtgttatcctgtctgctttaaaagaaattgaatgtcagactaggaaaatatttccattgagttcttttgctattattctattttgttgagattttgtttgtgggttctggatttgatgttccaatgtatgtttggacaatcttatgtcttttgtcttggaattttgataaagaggtggaaatttta

SEQ ID NO: 12345 - DNA, 428 bp, Gossypium hirsutum
  unsure (1)..(428): unsure at all n locations; Clone ID: LIB3135-044-Q1-K1-D4
agtgtacggccgacattgtcggacaatgccctaaccagttgaaggttcccggaggttgtagcgggcgttgcccagtgttcaaaactgaanaacattgctgtaattctgggaactgtcaacctaccgacttctcgaggtttttcaaggagaggtgccccgatgcttatagttacccaaaggatgacccaacaagcttgtttacatgccccacagggactaattacaaggttattttctgcccattaagagtatttgggatggttttaagtcctttctatacacaaattagtaggtttatatcaataaatggaataaactcgaatgctatttgagcacatttcttgatgtgcatatgttctgatttgtaataatagtgtttgtcatgaatgaaaaatttgagtctctatgggtttcggtttgtgttcatc

SEQ ID NO: 12346 - DNA, 300 bp, Gossypium hirsutum
  unsure (1)..(300): unsure at all n locations; Clone ID: LIB3135-044-Q1-K1-D5
gcgcccacgcgttcgctaagtgagttttatgatttcctgcagtatgattatccgcatgtgtccgtacatacaagcaatggtagagaaacaaggtttatcatcttccttgcaaaaataaatgtcaactttcacgtaacgcaattccgagaccttgcataacatgattattattgctagttattactctttcgaccnaaaaaaaaaaaaaaaaaaaaaaaaaaaaaaaaaaaaattatataatnaaaataaaaaaatattattaataataaaaaaatattcatttaattaaaaaaataaaaa

SEQ ID NO: 12347 - DNA, 447 bp, Gossypium hirsutum
  Clone ID: LIB3135-044-Q1-K1-D6
tcgcccacgcgtccggtgggccttggtggttggtattggctggttttgaagaatggggtggaggtcaagttgcaaagaaacgcattgagcgtgttggaacatcctaccggtaacgaagtagacggtgatcatgatttcgataactcgagcagtggctctgacattggtgagaaagaccatgatttccctagtagcattgagttccagaggccagcgaaacccagagttcgacatacgaaaccttgggttccatctgcatccatgaaatcaacgaatcgtagcggttacagagacgtccgatccattattcacacgccacaatcagtaaatttggcaagactcgataccaactcgttacgaagatattgcaaacacttcaaactcggtggcatcaatgcttattcaccacgggaacaagtgcttaataccgtgcagcagcattttatg

SEQ ID NO: 12348 - DNA, 443 bp, Gossypium hirsutum
  unsure (1)..(443): unsure at all n locations; Clone ID: LIB3135-044-Q1-K1-D7
gggtcgacgccacgcgtgcctnggtttaacatccccatggagttttgtccttctaanggcggatgtcacaacatgcggtggtctgctgacatcaacgcacaattcccaaatgagttaaaagctcctggtggctccaataacccatgcacggtgtttaagaccaataaatattgttgcactcaacggttccgcacctgtggacctacccgccattcaacgttttttaaggacctgtgccctgattcatacagttatcctcaagatgatccttcgatcacctttacttacactgatccttacaattacatggtcatgttttgcccccgaggctcacctcatatacacatagtctgaacttagagccaataaaaataaatgcatcatctctttttctagataatatgcgccttgtaactaaaaataaaaaaagtcattttttcttc

SEQ ID NO: 12349 - DNA, 429 bp, Gossypium hirsutum
  Clone ID: LIB3135-044-Q1-K1-D8
tttcaattgtagtcatgttctattttgcgatggtatgggatccttggcttattggagcccgaattgtttgccttcaatgcttatactacctcacccttggagtctttttgtcctttcttgttggcactcatgtttctcatatgagcttagtctatttctttgactttgctactatcacatcctcaaccgttgtcggccggtgtgtcattgcttcctttctgttcagctctgttgcaggagctggatacatgatttatttgattgaaagggcaaataagtgcttagatttttcagccaccctctatattatccatctttttatatgccttgtatatggaggttggccttcctctggaacctggtgggttgtgaatggtactggagttgcagtgatggctttgctaggtgaatatttatgcattaaacggg

SEQ ID NO: 12350 - DNA, 419 bp, Gossypium hirsutum
  unsure (1)..(419): unsure at all n locations; Clone ID: LIB3135-044-Q1-K1-D9
cgcggagtgttgaacgtgggacggtgtggatactgccgaacgtggggcatgtggcgctgcgaattgttgctagggtttttgctgttttaggccaattgggccctgtaattgggtttagcttgacccaagttttattgggtttgggcccaggtatatttgggcttgtacagttgtccctctttgctcgttgtcgtgtaactggaacagagtaaagactaaaagtccaattgtgctcggtcttactaagccttgacttcttcggtgcttttcttctttaaatagtctcattccttcctattgcatcttcagaggtataggaactggtgcttctatgtactctactgcaatgtcggngtgataggatttctacgtttgtagctcctcaaaaaaaaaaaaatttgctatcttttaattgctcc

SEQ ID NO: 12351 - DNA, 389 bp, Gossypium hirsutum
  Clone ID: LIB3135-044-Q1-K1-E10
ggccaaaattatcgtaaccccaacaagcaataacgaactctatgccaccaaattgaagacagagtggggtgagctcctttcgagtaaagagtctcttgttaagtatgtattcaaaccgaataagaagactggtggagcttgagcagttactttgcctgataaaaagtttgtcttcaaagataaactatgtgagactatttgagcttgagattttaagttatgaattcattgattgcctctactttctatcatctcgactatgaatttggttcgtgtgggtcgatatggatggcgataacctcagccgataatgacacacgcctccttccagatgacccgaaagattgctggcattttcgtatttgaatgtcgcatccatatatgaacat

SEQ ID NO: 12352 - DNA, 433 bp, Gossypium hirsutum
  Clone ID: LIB3135-044-Q1-K1-E11
gcttgtggcctcttctcaaagagaaaggtggtcttttgatagtgaacactttggttctggggatggcgagataagtggatgtagcagcaggttctcgtattctccatccataggtatgcgaacttgtggggcttgctcaaagcttttggctgagagatcttcgtgtagctgcaatgaaatttcagtggtagctgtacttgtatgtggacatgtttatcatactgaatgcttggaaactatgacgccagaggctgacagatatgacccagcctgcccaatatgtatgggtggagaaaagcaggtctcaaagatatccagaaaagctttgaaagctgaactggagttgatggctaaacatcttaagttattcaagaatagagttaaagatagttttgcggaaagtgattgtaatgattttaaccaatcacaaaat

SEQ ID NO: 12353 - DNA, 405 bp, Gossypium hirsutum
  unsure (1)..(405): unsure at all n locations; Clone ID: LIB3135-044-Q1-K1-E12
cgagaaccgagccccctgcgacgccggcatttacgtatctaaaaagctcttggtcttcgagggcgtctccttcagcttcttccttttctcctccctggtggctcagggtctaaagctcgccatcaatttgttgaacagcaaagatgtggatgaagctttcagggcacacattaaccttaaagtattgaggtttgggatgatgggctccgccgtcgggtccgtcatggggtgcttgtttctgatgctttcgatggtgaacgtgatcgacatccggctggggttgttgtcttgcggcagccagtcctccattcatgccacggcggctttagtcattctggtttcttctgctctcttgattacatttccactgctgtttatgctttcttgcattgaatcatntaaaac

SEQ ID NO: 12354 - DNA, 345 bp, Gossypium hirsutum
  Clone ID: LIB3135-044-Q1-K1-E2
cccacgcgtccgcagaaactgaattaggtatctggggcacattttcttgcccaccacctttacttgagtctgttgatgcttttatccagtcaccaccaccaaccagcatagcagagtcagatagcctttcaccccataatagtggcctgctggatgctttacttcacgaggcaaaaactctaagcagcgcaaagaaccatgcatctgagaagagttcaaattcagctactcccggtgatgtagctgaaagttccaccttcaacatctgtgagacagaatgggaaaactgtggagagcctctttcttcaatgggtcattcagcaacttctcttttaagtgagtgta

SEQ ID NO: 12355 - DNA, 447 bp, Gossypium hirsutum
  Clone ID: LIB3135-044-Q1-K1-E3
gtcgaaaactggtacgtatataaatctcgtgtcaaattcaaatctccgagacgaacacgggggatagtcaataaaaaattggcgacgatggcgagggcaagctctggcctcgcgtacccggaacgattctatgcggcggctgcttacgttggcttcgacggatctcccaattccaacgacaaggacattggctccaggttctccaatgacgtcgctttgatcctgtacgccttataccagcaggctactgtaggcccttgtaatgttccaaaaccgagtttgtggaatcctgtcgaacaaggcaaatggaaaagctggaagcagcttggaaatatggtgtctgcagaagctatgcgtctctttgtgaaaattttggaggaagaagaaccaggatggtattcacgggcatctaactctgttttggagcctgttacagatgtacaaatg

SEQ ID NO: 12356 - DNA, 381 bp, Gossypium hirsutum
  Clone ID: LIB3135-044-Q1-K1-E4
gggagtagcatcaggcgaagattagtgaccttaggttaggacaaaatttatatattctttgtgcaaattgcacgtgcagtggaattgatgtggggttctcaagccggggggtgtttttcctgtctttggtaggagaaccttagtgtagaaaatttggattagtgacttttgtttctgttggtatattatttgcttattctatacatatatattcattgaatgtatatgccaacgtaacttgttctgtgctttgtagtttaagttaagaaacgaagtcctttgattgggttgtaatttttagatttccactaagttagggagagaatgattgggttgtaatttggcccatattgatatcaaatttatttcaattctttcttt

SEQ ID NO: 12357 - DNA, 413 bp, Gossypium hirsutum
  Clone ID: LIB3135-044-Q1-K1-E5
ggagattggatcaactggaaaggttcttattttagggaacaaaaccttctttgggacacgcgggtttcatatgacgcaaatgaaactttggatgccttgtaacttgctcaagagtcccttaaatctgaaggggttacagtttcaaatgccagctcttctaatcctgtacttcctccatcatccttgatggcatttctgagaaagaactctttaacttctgggattgtgttataggattttgataccgtttttgccaacaagttctataatagtcatcttgatgattcagcaaatataaactctgcagcaatagttgcagctgcttatcttgttgctcggactctctatgttcttgcaagtgataaaaaggattgcaccagaacagccctaagtttactaatgtgaatgcctct

SEQ ID NO: 12358 - DNA, 99 bp, Gossypium hirsutum
  Clone ID: LIB3135-044-Q1-K1-E6
gcggtccaacaacctaaagctaaagattttcgttatcctcagcagaaacgggcacgggggtgagtaagccataatctggacatgtgccgcctgctaatc

SEQ ID NO: 12359 - DNA, 453 bp, Gossypium hirsutum
  unsure (1)..(453): unsure at all n locations; Clone ID: LIB3135-044-Q1-K1-E7
gcgcccacgcgtcctaaaagagatgcctatttattgatgcacatganaaggcatgggggtgagggcaaaacaccagcagcgctagctaaacccaataaagaatccacttctgaaccaactcttattaagagatattcatgcccttttgctggttgcaagaggaacaaggatcacaaaaagttccagcctctgaaaaccatcttatgtgtcaaaaaccattacaagacatcccactgtgacaagagctacatctgcagcatgtgccacaccaagaaattctcagtgattgctgatctcaaaactcatgagaagcattgtggtaaagataaatggctatgttcgtgcggcaccacgttttccaggaaagataagctgtttggtcacataactctttttcagtgtcacactccatcaattcccttggatgaaactaaaggacccactgtcccatct

SEQ ID NO: 12360 - DNA, 419 bp, Gossypium hirsutum
  Clone ID: LIB3135-044-Q1-K1-E8
gttttgttggttgacctgaaatgatgatcatggatagcttttttgccatgggatgtgttggttcaccaatgctttgaacgcatggggaggctggtagtagtggtatgtgctgtaaaaacaaggcccctcctgagcccccaaggattcagtgcatgcgcgttaggtgaaactgggtcccatttcccaccctgttcctcttttattattacctttgaaaacacgtcatgtttgatattttaatctttgttacaagcatgaagacaaaagtttctagggtggggatgtacatgtacatgcatgcagtgaactgaagagagattatttagtttcttcttttcttttcttcttttcaatgttccaccttccatcaaatcctgtagtaaaaaaaagttcgtctttttctttttctggttcatgta

SEQ ID NO: 12361 - DNA, 379 bp, Gossypium hirsutum
  Clone ID: LIB3135-044-Q1-K1-E9
caccctttggccctctctccttcccctctggttcagtcaccggaccgtccccgtctgccacgccggcgaccgtcggccaccgtcggccaccgtatccggccccgaaagcggtggccggagtttaaaaaaggtggatgaggtcaatggtggcaggtggagcgacggtatggtggctgatagaggctagggcgtctgacctagggttttttttagtttcttttttttaattgttgtgggctagggttaaaagaattttgggctgcattgttttgggcttagtgggtttaggttcgtttagggttagtgggttggttgatgggtttagctaatgttggggtttgggtcttgttttgagttagtgggtttaatttaggtgggg

SEQ ID NO: 12362 - DNA, 392 bp, Gossypium hirsutum
  Clone ID: LIB3135-044-Q1-K1-F1
cccacgcgtccgcacccatggatgtgaaccacgctgttcttgcagttgggtatggagtcggaaatggcgttccatattggctcattaagaactcatggggtgcagaatggggtgacaatggctacttcaagatggagatgggcaaaaacatgtgcggtgtggcaacttgtgcatcatacccaattgttgcttgatccagtcgatgaaccgtgttggatcatgtcattcctttgtgttatagaaggcgtctagttatggtctacaaatgttgtagttgttcagggttatggtctagttgaaacccatgggttcatgtacaataaggatccaaagacatgtaagatgcaaatctgatgtacacaacaaaggtgtaaatttttatgttgtaatgc

SEQ ID NO: 12363 - DNA, 240 bp, Gossypium hirsutum
  Clone ID: LIB3135-044-Q1-K1-F10
caacttgaataccgacaaatttgtttcagctgtagaaatgcaatggggccggggtgtatctcatactgcatgccttatacacatcattctcctttataagcttgagaggattgagaaccattcattaaccctaaagcaagacgaatatctacgtcgaaaaatagaaccaaattcgctaatattgtgaaagatcgagagactaaacctacacacgacccagattaattctgaactctgccc

SEQ ID NO: 12364 - DNA, 390 bp, Gossypium hirsutum
  Clone ID: LIB3135-044-Q1-K1-F11
ggaaatggcatccctctaggcgctgtgataaccactcccgagatcgcggaggtcttgaccggacgaagttacttcaacacctttggtgggaaccctgtatgtacggctgcaggattagccgttttgaacgtaatcgaaaaagaaaagcttcaagacaatgccttcgtcgtaggatcttacttgaaagagagactaattgcactaaaagataaacatgaccttatcggggatgtgagaggacgtggattgatgctcggagtcgaacttgtcactgatcacgagctcaagacaccggcaaagcttgaaacacttcatgtattggaccaaatgaaagagatcggtgtattggttgggaaaggtggattttatggcaatgtatttaagattaca

SEQ ID NO: 12365 - DNA, 424 bp, Gossypium hirsutum
  Clone ID: LIB3135-044-Q1-K1-F12
gaccacgcgtccgggctgttaagcctgtgttaagcaaggagcatgatgagcctgggatcaacttgggcctaatgctcgggatcattggaggcgttgttgccattgcaagacctattgctttgttgatgtttgtgattattcgaagatcacgaacaactgaagacgcaaattatgatgaaaggtccattgtagacaaaatgtctgttcgtagctctcccaaaccacccattgattcaaggcgtgttccacagacaatgagatcagctgcaattgggcttccacgatatcgcgttttcagcttggaagaaattgaagatgcaaccaacaactttaacccatcaaattttatgggggagggatctcaagggcagctttataaaggttgctttgtaaatgggccaggggtggtggtaaaatgtttgaa

SEQ ID NO: 12366 - DNA, 156 bp, Gossypium hirsutum
  Clone ID: LIB3135-044-Q1-K1-F2
acccacgcgtccgcccggcacatattgcttcttacaggaaacatcgctgttatattctctcataatccacctttgtatctgtgtaaatattaaaattccccatactcttcaaaaattttactatacctttcattataatcttttacgtctttctga

SEQ ID NO: 12367 - DNA, 445 bp, Gossypium hirsutum
  Clone ID: LIB3135-044-Q1-K1-F3
cccacgcgtccggaagagttggaaaagaaggctaggcctgttaaaggtcgtgatgatatcgaagctggggcttccatttctgctggaaatgatgaccttattggaacaatggtagctgatgctattgacaaagtcggtcccgatggtgttttgtcaatcgagtcatcgtcttcatttgagaccaccgttgatgttgaggaaggaatggagattgacagaggttacatctcaccgcaattcgtaacaaatcccgagaaattaatttgtgaattcgagaatgcaagggtgctagtaaccgatcaaaagattacagctattaaggacataattcccctcttggagaagactactcagttaagagctccattgcttataattgctgaggatgttaccggagaggctcttgctacacttgtagtgaacaaactccgaggtatccttaatg

SEQ ID NO: 12368 - DNA, 383 bp, Gossypium hirsutum
  Clone ID: LIB3135-044-Q1-K1-F4
cgggcgacccacgcgtccgcccacgcatacgccacccgtacagaaatattaaaattttgctcagaacttcaaccccatgcgctcagtgtggtcaaatctctccaccatacctgatgcttaccatagccctatagactttaactcaatagattccaactcttgttcttactcttagcattgattgggagttacaatattgtcaactgcacccacaccagagctttacatcttttataatcaacaatactccccacatactcataaaaacaaaccttacccacataatacatttacaatatagaagaagaacatgttttcagaatcaagtgtacatctagtgaccatagcccaagccatgcactggttcgaactttctgtgtttt

SEQ ID NO: 12369 - DNA, 446 bp, Gossypium hirsutum
  Clone ID: LIB3135-044-Q1-K1-F5
cgagaaactcaaaaggactgttaattatcctttaaaggctcctcctcttgccaatggtgtgggtagctttaaaaatggtatcattcttaatcttttgggaatgggtgctctattcttgtcatgcaagcaacagtcggcttactactctcgaaggcacttacctcctccacaactccttattaccaaggaattgctcccggctctagtccagttcttgccttggatgtattctttgtgcaggcatctgcaaacactatcctttcgcactttctggggctggtgttctcgctggaactgttacgctcggtgacattgcctaatacacagagcattccaattaccaagcttgcataaattctgcctttcatggtaaatgtagaatagttgaacgtgattttactgctgataacttgtttacaagccacccttagcattcttttaataaa

SEQ ID NO: 12370 - DNA, 337 bp, Gossypium hirsutum
  Clone ID: LIB3135-044-Q1-K1-F6
cccacgcgtccgcaagatgaaagggttggtgacgatgaagatgttgtggaagaggtggtagttagttcggatgaagatgaagatgaagatgaagaagatactgccgaggaagatggcaatgaagagcagctaggtggtagcaaacagcagaacaagaagcaaaaacctaagaatttatcaaacaagaatgtaagatctcatcatcacgcaaaaaataataaatcaaagaagagaaaaagagcgaagctaaattaaccaaatcttgtaactcatcatcagctggagctgctcttttgtttatgtttttatagataatggcatttcaaacttatttgag

SEQ ID NO: 12371 - DNA, 456 bp, Gossypium hirsutum
  unsure (1)..(456): unsure at all n locations; Clone ID: LIB3135-044-Q1-K1-F7
cgacccacgcgtgccgttgaaggcaatcttttctttattctcccattttaacaanggacgttttgttgaggaaaatgccaactacaaatgccgatattgctcaacccatttcctgccatcaataatattgcattccacaaactaagaacactgaaaatataataaaactacatgaaaatgctgatttgaattcatcatcacctatcgatgaagacttggtttatagcaaggaggatgatgaactttaatctgcaaaaacttacatggattaagtgatggaagaaaatgaaacattaaagaacatgttggataacatccaggagaattacaagtctcttcaattaactttctttgaaatccttcaacaatgagctgtcaagaaatctaaatgttcatcaatttcttcggatcacaatgattaaccagttgttgtaaaacctgaacttgtttcacttt

SEQ ID NO: 12372 - DNA, 458 bp, Gossypium hirsutum
  unsure (1)..(458): unsure at all n locations; Clone ID: LIB3135-044-Q1-K1-F8
ccgggccgacccacgcgtgcggnaatgcataaaaatattaaagattttttttttatcaacaccaatagagaatggggaagtgatacttttttaaataattttgaaagaatatagaaatagagtgttttatgacattacatttgtgatggacctcgtaatgattgcacataccaatggtaaggagagaacatatgcagaatgtaagaaaatcttgagaggaggatgcttttctcactataaaatcattaacattcctgcactgttttccatcatcgaggcgtatcctgattctcagtaactttttagcataatgccagtgatggggatttaatttcctattttatgaatcgatcttttttcgtgtaggcgtcaataaatgtatgtgattgtattattcaatcttttcttattctctgttgaaatggggcaattttatttgcctaaaaataaaataatta

SEQ ID NO: 12373 - DNA, 435 bp, Gossypium hirsutum
  Clone ID: LIB3135-044-Q1-K1-F9
gcgcccacgcgtcctattttggcaggaggtgccttctatggagcctcaatgaacccagctgtttgattcggaccagccttggttagctggacatgggacaaccactggatctactgggtcggaccccttatcggtggtgggctcgctggtctcatctacgagttcatcttcatcagcaacacccacgagcagctcccaaccaccgattattaagcctaatcagggtttaattgatttgtctgtcactttgaaaccggattttctccgatcacatttgagtctcctatctctttccttgtattttgtgtttaatttgtggcccgcgatcttgtttacttttttgttttttttcattcccatcctctatcatgatcatcatgaatggcagatgtttacaattgcatgccctgaaaaaatggtatatgagtgacttac

SEQ ID NO: 12374 - DNA, 202 bp, Gossypium hirsutum
  Clone ID: LIB3135-044-Q1-K1-G1
cggacgcgtgggtttttttattgtaaaataattatacatccctttagtttcagtttcaatgcagcccgtcagtttgtaatatgttgccatatagtccatttggtgacacccatccattgaaattctttcacccttctgtacatgttgaacttctagtgtttctttttttctcaatacaataataaggcccagtatttctctt

SEQ ID NO: 12375 - DNA, 341 bp, Gossypium hirsutum
  Clone ID: LIB3135-044-Q1-K1-G10
ggccaaagttatcgtatccccgaaaagcaatatccaactcgatgccaccaaattgaagacggaattcggtgagctcctttcgattaaagagtctcttgctaagtatgtattccaaccgaataagaagactggtggagcttgagcagatactttgcctgataaaaagtttgtcttcaaagataaactatgtgagactatttgagcttgagattttaggtgtatgaattcattgaactcctcttctttttatcatcttgtttatgaatttgcttcgtgtgggtcagatatggatggcgataacctcggccgataatcacacacgcctactcccagatgacccg

SEQ ID NO: 12376 - DNA, 359 bp, Gossypium hirsutum
  Clone ID: LIB3135-044-Q1-K1-G2
gggagcttgaacaatctatttatgctgaatttacagtatggtctttccaaagggagcaatgaggcggtgtttgtgattgaagcatataggacactaagggataggggtccataccctgctgatcaggttgttaaggatcttgaaggaagctttgcctttgtgatctatgacagcaagactggaaccgcgtttgctgcactggggtctgatggtggagtgaagctgtattgggggattgcagctgatggctctgtggtcatatctgatgatttagatgtcattaaagaaaggtgtgccaaatcctttgctccttttccaactggattcatgttccacagtgaaagggggctgatgagctt

SEQ ID NO: 12377 - DNA, 333 bp, Gossypium hirsutum
  unsure (1)..(333): unsure at all n locations; Clone ID: LIB3135-044-Q1-K1-G3
cccacgcgtccggaaatgttgtgatcaatgatggctgttgctgctgttccttctctagaagatatgagcccgtggaatgccttaatttttatcatgtagggagatgagttgcggctgattacaccgcagagtccttgtgaatctagggagtgccttaaaacttaaagccccccttccccttccccttacccttccccttccctttccctatctctttctatttttatttattttgcttttaagtggtagtgttcttttgtattcgaaagcgttttggttctggttttgtttagtagtgttttgagtagcagtctcatatcatcataacgnctc

SEQ ID NO: 12378 - DNA, 345 bp, Gossypium hirsutum
  Clone ID: LIB3135-044-Q1-K1-G4
ctcttattggtttaaattctgcccttgaatcccattaattactactgagtatgacattgggcgtacgcacttcattatgagctcaatccacctattgcaaaagccttgcattttcatcatgctttcaaggtagttccattccattctgccataggctttgctcatatccaattttaaagcaaaataccctgtgcctcctcttttcttttctttttttgaaagagtgtagtaattcataagcaatcattatgttgtcagttatttgtcttcctaggacaaaagcactttgtgtttcttcaatacataagtgtagcacccttcgaaatctattaaccactattgttt

SEQ ID NO: 12379 - DNA, 421 bp, Gossypium hirsutum
  unsure (1)..(421): unsure at all n locations; Clone ID: LIB3135-044-Q1-K1-G5
tttaaaaaattcttcattttcttgttttgtcttcaaattaaatattttttgcaccattaaacatatcttcgtatggttcttaatattgaattttgcaaattctcttttttgttgtttagatctattatctttaaaattaccatctttatgctcataggttgaataatttgagcccttttttgaacaccgcatctttctatttatgggctttgatggtaaactcactccttgacttttcattactgtttcacctctaatataatctcactttcattttatacacataaattttttacccctttcttttctttttccttttggattctcataacactactcttttaaataatttgttcatattaaaaaaaacaactttttttttccaaaaaaaaaataancccacttatattaaacctttttc

SEQ ID NO: 12380 - DNA, 442 bp, Gossypium hirsutum
  unsure (1)..(442): unsure at all n locations; Clone ID: LIB3135-044-Q1-K1-G6
cgctgtttattcgcttcagctcatcacttcccatagtctctcctcctccctcaccaaatcgaaatgtctctggtggcgaacgaagactttcagcacattttgcgtgtgctgaacaccaacgttgatggaaagcagaagatcatgtttgctttgacctccatcaagggtattggaaggcgtttcgctaacattgtttgcaagaaggctgatgtcgacatgaacaagagggctggtgaattgactgcacaggagctggacaatctcatgaccattgttgcaaaccccaggcagtttaagatccctgactggtttttgaataggcagaaggattacaaggatgggaagtattcccaagttgtgtctaatgctctcgacatgaagttgaaagatgactnggagcgattgaagaagatcaggaaccacccgtggctgaggcactatt

SEQ ID NO: 12381 - DNA, 361 bp, Gossypium hirsutum
  Clone ID: LIB3135-044-Q1-K1-G8
cccacgcgtccgtggagaaaatgttagtggttatggaggaaagaaggaagagaggagcctgtaagatatttgaagcaatcgaaggtgtattgattaataaactaaaagccaaagaagaagagattgaaaagattgggaaattaaattgggcactcgaagaaagggtgaaatcactatgcgtatagaaccaaatatggcgagatttggctcaaaccaacgaggcaacagccaacgcgttacggaccaacttagaacaagtactcgccgccgctgccaacaaccgtgaggaaacggaagcggcggcggcagacgatgtgcacgatgcacaatcttgttgcgggagcaactgggaagcaacagc

SEQ ID NO: 12382 - DNA, 428 bp, Gossypium hirsutum
  Clone ID: LIB3135-044-Q1-K1-G9
cccacgcgtccggaaacagctcaaggatggggaaaaggaattttctcaggctatccttgaggagcgcaccaagaaagcagaggcatggcatcgtgatgctgcagctcgtgcacggtatactcaacctgcagcacaggttttccaacctgcttatcggatgccaactataagcatcgaggaagctggtctgagggagatggaaatgatgaataagtggcaggagaggaatgcaaaaatgtttgaagaagctaactcagcatggtacaaggacaaaccaaagatgggaccaagtgaagatgatgaagacgatgatgctgcccaagagaaggcacgagcatgggatgactggaaagatgacaatcctcgaggtgcaggcaataaaaagcttactccctgcgggtgaaagtgaccagtagttcccatactta

SEQ ID NO: 12383 - DNA, 440 bp, Gossypium hirsutum
  Clone ID: LIB3135-044-Q1-K1-H1
caaactctctttgtctctctgtttctactttcactttgcatttttcttgattccttccttgaggacctcaatctctaggagtgtttgtaataaatggctttggtgacaactgctgaagtctgtgatgcaaatccacagctaattgtgagcggtgaacttcgggcccttcaaccaatattccaaatatatggtcgtcgcccagtattctccggacctatagtcacacttaaagtgtttgaggacaatgtattgatccgtgagttccttgaggagaaaggtaatggcagagttctggttgtagatgggggtggtagtttaaggtgtgccatacttggaggcaaccctgtagttcaagctcaaaacaatgggtgggctggaatagtggttaatggctgcgtaagggatgttgatgagataaaacggtgtgacattggggtgag

SEQ ID NO: 12384 - DNA, 398 bp, Gossypium hirsutum
  unsure (1)..(398): unsure at all n locations; Clone ID: LIB3135-044-Q1-K1-H10
caaagattgcagaagctatatagcatgcgctttcatgatggggtgctaaagtctgtaattgggtatggatgtggttggtttatgtgggttggcangactgtgttttatgggcagtacaaatgcactggaccaggggcaagctttgcaggcagggtttcatggtcaagagaactgacagatgaagaagccaaaccttttctttctcttagtttcattgatggctccgaatggatcaaattgtaatcatcaaagaagcttttgtacaatctaaccaacaaaaataatacatttctacatgaaggaagaatattataatcaatgataaaatcgataattagaatttggaacccnnnnnaaaaaannaaaaaaatattattaaatataaaaaaaaataaagg

SEQ ID NO: 12385 - DNA, 286 bp, Gossypium hirsutum
  Clone ID: LIB3135-044-Q1-K1-H11
gcaggagcagcagccatgtttctcaagacgttgcttttccgattcagtggtgccaaaatatgcccttgtaaaggcatcatatttgttcgtggaaattctcatgttttactcttttccaattcgaaatgcaagaggtacttccacaaccgtctgaagccctcaaaacttacatggacagccatgtatacgaagcaccataacaaggatattgcccaagaggccgttaaaaataaaagacttgcattaaagaagccttactcccgatccattgttggtgccaccttat

SEQ ID NO: 12386 - DNA, 219 bp, Gossypium hirsutum
  unsure (1)..(219): unsure at all n locations; Clone ID: LIB3135-044-Q1-K1-H12
aaccaaaaanaattctgattcaccattacaattcaagtagaaagaaccccaccgtggctgttgtcattttcaacaaagaaatgcctacctactcctttaaacattactttcttccagaataatatcaaatctcttttccattgcaatttgggttaacttccgttccctctcctttaaataacaactcatcttcacacttctttttcaaataataattct

SEQ ID NO: 12387 - DNA, 381 bp, Gossypium hirsutum
  Clone ID: LIB3135-044-Q1-K1-H2
cccacgcgtccgtgaccacatatcataaggctctctgaagttctttcttcgaatacatcgaggccagtgtatttatatccaagtttttctgctagctcagatgagaaatcatcctgccgtctctgagcctggtcagtgctcgatgtttctgtaagttttgtattttggttaatcgttattcatatttttcttgtgttgtgtatcttatgttagttcatctcgacgaaaatgtctgtgatggccttcatgtcatttccttttacagtagatccctacaatttccttatctctttcaacccactgttaaattgtttgtttttcctatgaatggtagtattatcatgaacactcaagctttatgaaatatgatcttttcaaata

SEQ ID NO: 12388 - DNA, 347 bp, Gossypium hirsutum
  Clone ID: LIB3135-044-Q1-K1-H3
gcaaaaatccttatgtaaacggtcgtctttctatggagttctagtactttcgtttgaaattgggcttgacttttgatttcgagtttcacattcttcatcatcaaccgatgaatgattttgaaatgattaactaaatctcaaaataattttgtgggaaaaaaaataaataaaaaaaaaaaaaaaaaaaaaaaaaaaaaaaaaaaaaaaaaaaaagaaagaaaaataaaaaaaaataaaaaataaaaaaaacataaatacaacttaaaaaaaaataaaaaaaatgggggggggcccttttaaaggacccaattttacttccccgttcatgtcaaaaaaaacttttttta

SEQ ID NO: 12389 - DNA, 292 bp, Gossypium hirsutum
  Clone ID: LIB3135-044-Q1-K1-H4
gacacaatgaagacagcttcaataatatcaatttctgccacaacctttttctatctctgtggtggagcgcttggatatgcagcctttggagataagacaccagggaatctcttgactggttttggattttacgaaccatattggctcatcgactttgctaatatgtgcattgttcttcacctagttggaggatatcaggtttacagccagccactatttgcaaacgttgagaaatgggtctcagtgaaatttccggacagtggaatcatacacaaggatttcaagttgaaac

SEQ ID NO: 12390 - DNA, 365 bp, Gossypium hirsutum
  Clone ID: LIB3135-044-Q1-K1-H5
cccacgcgtacatcctctcttacaccatcattctgtttatcattatccaccactctcacctaaaatggaacggtttttattaacatacctttcacattacttatcaattttctgaaaaactatctaaaattctcacactaaacctcaaaatactttttaaggagctcaaaatctttcacaatttttttacaaatattattacaattattataaacattcttctcaccaatcccactttttcttagaatccacctctttaaccacttcttgtactgtacatgcacaagaccgtccctcttactgttattaatagcgttatcaataaccttccaaccaatgctccattcaccacttatactaccaaa

SEQ ID NO: 12391 - DNA, 440 bp, Gossypium hirsutum
  Clone ID: LIB3135-044-Q1-K1-H6
gtagcattagaatcatgggtgttgttagttttgagtttgaggtaacctccccagttgctggagccattcttttcaaggcttttgttcttgaagctgccaaaatttggcccacggctgcccctcatgcagtcaagagtgttgagctcgaaggtgatgctagtcctggaagtattgtaaacatcacctttgttgaaggccttccataccaatatatgaagcaccagattggaggacatgacgaaaacaatttttcatacagttacagtatgattgaaggtgggcctttatgggacaagcttgagaaaatcagctatgagaaccagtttgtggcagctgcagacggaggaagcatttgcaagagctcaataaaatattacacccgttgcgactatgtaatcaccgaagatgaaatcaagactctcattaaaaggagtgaggta

SEQ ID NO: 12392 - DNA, 452 bp, Gossypium hirsutum
  Clone ID: LIB3135-044-Q1-K1-H7
acggttagttcatcgacgcaccctcgttcagattcaactatagaagcgaaatggctggtggcagggttgctcatgctaccttgaaaggaccaagtgttgttaaggagatagttatcggaataacacttggcctttgtgctggtgggctttggaagatgcatcactggaatgagcagaggaaagtgagagcattctacgacatgctcgagaaaggtgaaatcagtgtcattgcagaagaataaatgttcttttagtcttgtgaaagtgtggacagcttcagctgtgtttcgttatatgcattctcttcatttggctcttagatagaagatgagcaaaacacaatttggagcttctaagaataatgtcatcattttgggatcttgatttcatattgcatagcaaatccaagcgatttttcaatctagtgcctttgctgtttttcatttgacatt

SEQ ID NO: 12393 - DNA, 327 bp, Gossypium hirsutum
  Clone ID: LIB3135-044-Q1-K1-H8
aagaacagtcaagacttggttctcaggtacttgtctgtgatcaatgatgggtacaaattggatcttcgccagggtcttgccatagaaaaggagaggggtcatgaatactacgatggaatgacaccggagcagtttaagaagatgcaagaattcatagctaggcggagttccaagaaaccatcttccaagttgtaatatgatctcctccatgcatcttctgatttgttgtttagtcactgttttataatgaaaacataatgtggggaaataaagttgttggttactggactcttactaatacataagtatcaattctgtataatgagt

SEQ ID NO: 12394 - DNA, 286 bp, Gossypium hirsutum
  Clone ID: LIB3135-044-Q1-K1-H9
gccacgcgtccaactttttcaggaggtgccctattattatcctcaatgaacccacctgtttgagtcagaccagccttgaatagctggacatgggacaaccactggatctactgggtcaggaccccttatcggtggtgggctcgctggtctcatgtacgagttgatcttcatcagcaacacccacgagcagatcctaaccaccgattattaagcctaattagggtgtaatcgattagtatagcactctgaaaccgaattatctccgatcacatgtgagtcatctatc

SEQ ID NO: 12395 - DNA, 397 bp, Gossypium hirsutum
  Clone ID: LIB3135-045-Q1-K1-A1
ttatataggaattcttgaacccaagagttaagaataagaagttcttcattccccaaaatagaataggcacttagaataacgaaacagattagattggtcgagaagtgcaaaatcgtatggatatgatcctcattgtgcagcttgatcaattggatcgtttctttttggattcctatacgaagcttttgtagatgtgtttccgggtattcttttatcatttcgtccaacaggaagagttcctctacttctatgaattgttctagaatactcttttcttgaatatcattcaaaaaaagtttcggattgcctagtatcccaccaattagtaatccaagatttcagacttttattaaatgagagagagatccaccagggcaaaaatactatagatgcaaga

SEQ ID NO: 12396 - DNA, 210 bp, Gossypium hirsutum
  Clone ID: LIB3135-045-Q1-K1-A10
gacccacgctacccactcattcacttgtcttggaaatttctacttaatcgaacaccacttatttcctgagcatgcgtatctttcatcatagcctactcatcttgattctctcacactaactacagtcacctatcaagctattattaacgctattatacaaagaaaccctatctcatcgatgcacattaatcttatttttgacattgcttt

SEQ ID NO: 12397 - DNA, 382 bp, Gossypium hirsutum
  Clone ID: LIB3135-045-Q1-K1-A12
tcgatttaactttcatggttaccaatgcaaattcaacattgccattggtgcgaaaggggatgaaaaaattgtctccctcgatagaacgattcgctaagaatgcagttgtgccgagtctcaaaagttgggggatcattttcaacacgtttttggaattagatggtgataaaatggagatcatcaaagaggaattcactgaacacgaccgattgtgggctataggaccattgctacccattaaagctactaacaacgagagaggtggaccgagttctataccaagagatgaagtcattgcatggttagattcttgtaaacgagtcaactcagtagtgttcattgggtttggatcccagatttccttgaccaaactacaaatgga

SEQ ID NO: 12398 - DNA, 399 bp, Gossypium hirsutum
  Clone ID: LIB3135-045-Q1-K1-A3
gtctccctctctctcagcctcctttcccacaataagcttaagctttcggccatggttgccaccgtggcttcgccgtggaactgccgcgtctagcaaccagcatcgcacgaaaggggctattttgagcctcccctttgagccctgttccaaggccgaatccttcaggcccgaagtttgaaggaaaagagaaacccgtgccctccctcggtccaatctccgcggccataaagggcttccggcgagggtatcagtagggcaattctgggtacggagcctgtacgagctgtggatgtggcgcagcgcgtggaggcgtggtacggttgctgcggcgctgggaatttctggaaaccatatgagttttcctgttctgatatttcttggtgggctgcctcgtgattg

SEQ ID NO: 12399 - DNA, 150 bp, Gossypium hirsutum
  Clone ID: LIB3135-045-Q1-K1-A4
ttgtattccttttaatgcccttcttacttttactttaacctaattgcccttaaaatggggctcgcgcctttattaaaagtggccacacctcctccctgcctctaccttaatgcaaggaattataatccccattaatatcatataccttct

SEQ ID NO: 12400 - DNA, 426 bp, Gossypium hirsutum
  Clone ID: LIB3135-045-Q1-K1-A5
cccacgcgtccgaaacaacaatggctacctatgaaggtaaagttttcactgaagaacaaggggctttggtggtcaagtcatggactgtaatgaagaagaatgcagctgaattgggtcttaaattcttcttgaagatatttgagattgcaccatcagccaagaaactattctcattcttgagagactcaaatgttccattggagcaaaacacaaagctgaagccccatgccatgtctgtctttgtcatgacatgtgaatctgcagttcaactgcgtaaagcaggcaaagttacagtgagggaatcaaatttgaagaaattaggagctacccattttaagtatggggtagttgatgaacattttgaggtaacaaaatttgctcttttggagaccataaaagaagcagtaccagatatgtggtcagatg

SEQ ID NO: 12401 - DNA, 431 bp, Gossypium hirsutum
  Clone ID: LIB3135-045-Q1-K1-A6
ctccacatttcactctctttttcaactttcccttcttctctttgttttaaagaggggcttgagttttagccaaagaaaactccatggctaaacttgttgctactttcttcttggctctcattgccatctccatggttcaaactttggttatggcatcacatggacatggtggtcaccattatgataacaaacgttatggacctggaagtctcaagccttaccaatgtccatctcagtgcacaaggaggtgtagccagacacagtaccataaaccatgcatgttcttctgtcagaaatgttgcaggacatgcctttgtgttcctccagggtattatgggaacaaacaagtttgcccttgctacaacaactggaaaaccaaaggaggaggccccaaatgcccttaaattaactaaaaaaaagacccctttttt

SEQ ID NO: 12402 - DNA, 102 bp, Gossypium hirsutum
  Clone ID: LIB3135-045-Q1-K1-A7
cccacgcgtccagaccctccttatttttttttttttataagaaaacactaataggggcctgagttttatctaaaaaaaaccccttataccaaacaattttat

SEQ ID NO: 12403 - DNA, 384 bp, Gossypium hirsutum
  Clone ID: LIB3135-045-Q1-K1-A8
cccacgcgtccgctgagagatcagttttttgtggggtatataaaaagacggatatggatgggatttcaacttcggaacaattagatgttgatgatcttttggatttgtccaacgatgagttttttccctctgcttcggccgccaccagccatgatcagttccctccttctgagacccatttcagcgacgcttccgccgcttcctcctcctctgtcgccctcactccctctttctccttagactttaaccaccaatatttgccttcctagtgatgacgtggctgagctggagtggttgtcgcagttcgttgaagattccttcaccgactttccctcatactcgctccccgaatccttaaccctataaatgataactcgtccgttt

SEQ ID NO: 12404 - DNA, 434 bp, Gossypium hirsutum
  Clone ID: LIB3135-045-Q1-K1-B1
ggcgatattagagatgagagtacatatggactgtgaaggctgcgcggtcaagataaagaaggctcttggaaaactcaagggagtggacagtgtagatgtggatatgaggatgcaaaaggtaacggtcatggggtgggcagcgtcagaccagaagaagatgttgaaaagagtgagaaaaagcggaaaaagagcagagctgtggccgtatccatacaaacctgacaaccaattttactacgaatactatgaaagacaacccacgattacttaccatgcaaccggccattcatcgtcctactactactacaagcatgggaatgatggccatgatcatggttactatcagccaccaccttattcaactcttgttgatgaacaagccagctctatcttcagcgatgaaaaaccacacgcttgctccataatgtgatata

SEQ ID NO: 12405 - DNA, 258 bp, Gossypium hirsutum
  Clone ID: LIB3135-045-Q1-K1-B10
gaaaacccgggccgacgcacgcgtccgctcacgcgttcgttcaataatatatttccgttggggttctacatcttgctcagggtacctgtcggttcttacattgatgaatgaattataatttattaagatcgtgaagggaatcattaaaacaatttcaaaatcattacacatttaataataacaatctctattaatatttgttttctgtgtaaatgtaaaaattgaaaaaaatccaattaatattttttaatctttaaa

SEQ ID NO: 12406 - DNA, 169 bp, Gossypium hirsutum
  Clone ID: LIB3135-045-Q1-K1-B11
cccacgcgtccggtcgagaagttggctaataagcatggatgtagccctgcacagttagcagttgcctgggttcttcatcaaggggacgatgtagcaccgatttccggaacaaccaagataaagaatctcgatactaacagtgattcactaaaagtaaagctcacaggag

SEQ ID NO: 12407 - DNA, 306 bp, Gossypium hirsutum
  unsure (1)..(306): unsure at all n locations; Clone ID: LIB3135-045-Q1-K1-B12
acccacgcgtgcggccacgcgtncggngtttcttggccaatatataagtgtcctcaaatgctctgctacaaaggaaactggcttctggtacatagagatgaaattttcaatgcattttgggtgtgggggaaactttgagttactcacattatcattccttattaatctgccaagttatattaaaattttgagttcataggaagaatgcataaatttaatgtttgttgagatttactttattgtttaaaattattaatttttataataagtttatatctaagaagataattttagcccggggaaaaa

SEQ ID NO: 12408 - DNA, 403 bp, Gossypium hirsutum
  Clone ID: LIB3135-045-Q1-K1-B2
cagaactcgaagcgaagagacaaagatcgccatggcacctcctgcaaaagcaataactagtgccgtgcctgatgcgtggtatccaaccctagccgtcttcatgctcgccattggtcttgtcctcactgcttccttcttcatctacgaagcaacttcttccaaacgaaatcgcagtcttgcaaaggagctcacaactgggggagtggcatctgtcttcctgggattcgggtcactgtttttgctactatcagccggcgtttatgtctgattttcatatattttttcaaccattttaaaaatttgctgagcagaatggtgttgaatggaggatcatggcttcgaccctgttacctatagactttttcttttttggtattaatcagaataagagtgcttctttggg

SEQ ID NO: 12409 - DNA, 229 bp, Gossypium hirsutum
  Clone ID: LIB3135-045-Q1-K1-B3
gcggccaatcttaaacccacacatacagatcgtttatgttttctatcccaagaaaaaattaacgagggtagattatttacaaagaatccataacaaaccaaaataaaatattatcatacaaaaaattgtcggtccttctatatgaaccaacctaacatactcattcattctacaaaatatcttttttatagtatcacacaaatttttttcactgttcgttcctatacaa

SEQ ID NO: 12410 - DNA, 412 bp, Gossypium hirsutum
  Clone ID: LIB3135-045-Q1-K1-B4
ccaagctatgggacacaagaacgttgaatcttatcaagacctatgttactgaacgtccagtgaatggtgttgctatgtctccacttctcgaccatatgtagagggtcagcccgagagcatcgtgcaagatattgagaacatggttcgctcttacattgagaaggaagtacagctttgtcttacgtatatatggtctgcactactttgagccactcgattccaaagtccattgtttattgtcaagtccgtgaagctaaaataagcctgtttgactttttctacacggaattgggtaaactggagcaaaaatgattatcggcattattgaatgaggatccagcaatcatggaatgccgatccgctcttgcgaagagactagaattatataggagtgcacaagctgaaatcgata

SEQ ID NO: 12411 - DNA, 318 bp, Gossypium hirsutum
  Clone ID: LIB3135-045-Q1-K1-B5
tccacgcgtccgtttgctggaacttcttgctcctactgtctagtgtcggctttatgatccgtgagtttatttttgattagcctaaaggatgttgggttacaggaggtacagaaagtggtgggtttacaagtatgcatagcaagcttggcatttgccacattaagtacatcatacagcaatttaccatctgctccttcaagccaagctaatattgatcttccatattttacaactgagataacaaaggaatcacgtccttttgcgctttctcttgcaaggcatctacattctatatgaactaagatgtatggtgctttt

SEQ ID NO: 12412 - DNA, 368 bp, Gossypium hirsutum
  Clone ID: LIB3135-045-Q1-K1-B6
acagtcgagaaaggcctgaaagctctgtttcagctccaccttctgaacctgtatcgatggggcagtcctgctccctcgtatacctgacctatgcgcttctattatcagcactcctccattcctatctgatcgcatgtctatgtacaaaacagctccatctaaacattatcatcgtcttgcaaatgatcttacaactgctacaccggcatatttctttcttttagttggttcacttgttttcataatatcagacccctttcattcttgattttcatatatccctcaacgcattttatacaactgctgatcagaatattgttgaatggaatatattcgcttataccttttctcctatactacttatggtt

SEQ ID NO: 12413 - DNA, 404 bp, Gossypium hirsutum
  Clone ID: LIB3135-045-Q1-K1-B7
ctggagacgattgtgtagctgttaagagtgtctgggatgagtacggtatcaagtgggggagtccaacgaagcagctagtgatcagacggctcacgtgcatttctccattcagtgcagtgattgcactaggcagtgagatgtctggcggaattgaggatgttagggccgaagacataacaggcattaattccgagtcggctgttaggatcaaaaccgctgtaggaagaggaaactatgtcaaggacatatatgtaagaaggatgactatgaaaaccatgaaaatggtgttttggatggcagggaactacggttcgcaccctgacaacgattatgatcctaatgcaatccctgttatacaaaatatcaattttcgtgacgtcgttgccgagaatgtaaccatggca

SEQ ID NO: 12414 - DNA, 369 bp, Gossypium hirsutum
  Clone ID: LIB3135-045-Q1-K1-B8
gggccgacgacgcgtccggcccattacagagctgttttcagcatttcctcacgggctggccacacgcccatgtgcgcaggcgtgtctatttcgcaacctgcttccttaacacgtggaaaaacccaatttttaggctttcttagcattctaaagtctataaataacaataaaaagaagacctaatggagcatgtagagaagattgaagaaattactcgaagtacactatcagagccaactcagaagcacatctccttcaaaattgaatatctcattttaactcttttcgaagtttatttgaatttctttatatcttgtaccttttctgactttgagatgtttttttttttaaattatgaactaaattccc

SEQ ID NO: 12415 - DNA, 163 bp, Gossypium hirsutum
  unsure (1)..(163): unsure at all n locations; Clone ID: LIB3135-045-Q1-K1-B9
cccacgcgtccgcccactcgttcttcctattctaacgnntcaaaccacactcccgttaccgcaaaatctctctccttttctttcttttgcagaaagaaaattaatcccgcttataacactgaccacccttaactttcaactatcaatatccaccaaccattat

SEQ ID NO: 12416 - DNA, 432 bp, Gossypium hirsutum
  unsure (1)..(432): unsure at all n locations; Clone ID: LIB3135-045-Q1-K1-C1
cccacgcgtccggcaggttcaggcccaacatcgactgagggaagggctgaaactaatgccggtgccaggggtcatggttcaaatagacaagaatcacatcaagctaggaagcagagcactttagaaactcgagctatagcttgggatgaagctgaacgtgccaaatatatggcaaggtataagcgtgaagaagtgaagatacaggcctgggaaaatcacgaaaagaggaaagctgaagtggaaatgaagaaaatagaggtgaaggctgagagattgaaagctcgggcaaaagaaagatatgcaaacaaagtcgcagccacaaggagaatagctgaagagaaacgtgcaaatgcagaatcaaagctaaacgagaaagctataatgacatnctcaaaggcggattatataaggagaactggtcattttccttct

SEQ ID NO: 12417 - DNA, 300 bp, Gossypium hirsutum
  unsure (1)..(300): unsure at all n locations; Clone ID: LIB3135-045-Q1-K1-C12
cccactcttcctagactccttgtttttgatacatagnaaaagcaccttaaataggtagaaatcaaaatggaaaaaattctgtgacaaaataaaaaaatgattctacaaagtaaagagaggagagcacttatactatttattagaaacctagtaatttctttgcttacacttgttagcataggatttctaggagcagaaaaaatcgcctattaatggatctttcttatattcattctattaataagtttcattattttatatcgtgtaatttatactttattaatttttatttttaattta

SEQ ID NO: 12418 - DNA, 414 bp, Gossypium hirsutum
  Clone ID: LIB3135-045-Q1-K1-C2
ataaaatttttaaaaaaaaacactaaaaatttttttttttcttcaaaaaataaaaaaattatgttcgagccgctaatgaacaaaataacacactattccaatctttaaacattttctgcattttaccggattcttactttaaaagatgttatattttagttctcaatgatttatgcatactttgttcttttttaattgttgtgaaaccttatttctgtttaaatataacatttttaagagtttgtaaacaaattcatatgcattatatttccttgttatgacttaatttgagagatttatattcattctgtatgatttatcttaaaattgtttattattgtctttaccaacttttattttccaaaacttctttttttttattaccttttatttttttccaatttttcatttttt

SEQ ID NO: 12419 - DNA, 430 bp, Gossypium hirsutum
  Clone ID: LIB3135-045-Q1-K1-C3
ctcttctttcaactcaaagaaaactcccaagtaatattagaatcatgggtgttgtcacttgggacgatgagtctacctcccagtcgcccctgccaggcttttcaaagctttttctcttgaagctgacaaggtttggcccaaggctgctcctcaggcagtcaagagcgttgaggttgaagctaatcctggccctggaagtatcgtaaagatcaactttgctgaaggccttccattccaatatatgaagcaccagattggaggacatgacgacaagaatttgtcatacagttatagtttgatcgaaggtggacctttgggggacaagcttgagaaaatcagctatgacaacaagtttgaggcagctgcacgtggaggaagcctttgcaagagctcgatgaaattttacactgttggcgactatgtgatcact

SEQ ID NO: 12420 - DNA, 404 bp, Gossypium hirsutum
  unsure (1)..(404): unsure at all n locations; Clone ID: LIB3135-045-Q1-K1-C4
gcgcgttactctagaatagtangaacaacaggattaattttatctttaaaggtagagaaaatgaggcaggtgtggtgtgggaaagggctaacaatctcagtcaagattttagaatccataacctacttgagctgccagcgattccaactacccctatttataaaacttggactaagcccctgaatgattacattaaaatcaattttgatgcctcagtctccaatggtaaggtgagctttagtgttatcgtaagagattcggacgatttcattgtcggcagtagcggtggctctaaagaaaaaataatgtatgcagaatggactgaaatggaatcgcttgatgaaagattgaagattgctaccacattaaaagtgtcgaatgtaattttcgaatctgattgtact

SEQ ID NO: 12421 - DNA, 333 bp, Gossypium hirsutum
  Clone ID: LIB3135-045-Q1-K1-C8
gcgtccgatacgacaaaagtgactgcttctcataacttttatggttgggctgcttgggatgggcccagatatgttttatatgatactttctataaccgtgcatctgataaaaatgccgttcgtcgtaatggaaaatcatatgccgcatggactggttgaggctttctttaaagttggtgaacttgaactacatttatgagaatcgtacccacaaactgtaatttatagcacaatggattcctcaagggataatgatattaaatttcatgaatttcgtataccttttatcattttacccccttttcttatgtattctatctttgaaattttcac

SEQ ID NO: 12422 - DNA, 400 bp, Gossypium hirsutum
  Clone ID: LIB3135-045-Q1-K1-D1
cccacgcgtccggacccctggttccgactccccgaaggttgccccagaggttattgctgagtacactgtccgtgccttgcagcgtaccgtccctgctgcagtccctgctattgtgttcttgtctggtgggcaaagtgaggaggaggctacccttaaccttaatgccatgaacaagctccagaccaagaaaccatggtcactctcattctcatttggacgtgcccttcagcagagcactctcaaggcctgggctggaaaggaggaaaacgtgaagaaagcacaagatgctttccttgttaggtgcaaggctaactcggaggccaccttgggtacatacaagggtgacgcaaagattagtgagggtgctgcagagagccttcatgtttaggactaccaatac

SEQ ID NO: 12423 - DNA, 373 bp, Gossypium hirsutum
  Clone ID: LIB3135-045-Q1-K1-D12
cccactctccgcggacgcgtgtgtcgggttacatggtaaaagcacggtaaatagatagagatcaaaatggaaaaaattctgtgacaaaataaaaaaatgatgcgacaaagtaaagagaggagagcacttagactatttattagaaacctagtaatttctttgcttacacttgttagcataggatttctaggagcagaaaaaatcgcctatgaatggatctttcttatagtcattctattaataagtttcattattttatatcggaaaatcttaatattctttttttttatttttatttattttggggtgtgtttgttttttatatttcatttttttatttcactctttgtttttatatttttatttactttct

SEQ ID NO: 12424 - DNA, 358 bp, Gossypium hirsutum
  Clone ID: LIB3135-045-Q1-K1-D2
cggacgcgtgggttaaaatcccagaattacttaaacaacaatggctacctatgaaggtaaagtttggactgaagaacaagaagctttggtggtcaagtcatggactgtaatgaagaagaatgcagctgaattgggtcttaaattcttcttgaagatatttgagattgcaccatcagccaagaaactattctcattcttgagagactcaaatgttccattggagcaaaacacaaagctgaagccccatgccatgtctgtctttgtcatgacatgtgaatctgcagttcaactgcgtaaagcacgcaaagttacagtgagggaatcaaatttgaagaaattaggagctacccattttaag

SEQ ID NO: 12425 - DNA, 417 bp, Gossypium hirsutum
  unsure (1)..(417): unsure at all n locations; Clone ID: LIB3135-045-Q1-K1-D3
atttcattcattgttataacttgtgcattctaatgggtggtggcaaaggtggaagtggcggtggcagcaaaggtggttgcggaggcagcggtggtggctctggaaatgttggaggaggaagcacatccaaaggcggaggtggggcttcgggaatgatggtagctccggggagtggaggtgcggccattatatcgaggggcgcattcgagagcaaccctcagggatactttgctggtctgcattcaagtgaaaagggcaataaataaataaggaatggtattgctggaaaagcctaagttcatgtattatttatagtaaagtaatgcatgactaatttaataaaatttatggcaatatctcttttttctccnannaaacattttnatgaaaaaaaatttgtctttttggagaccataa

SEQ ID NO: 12426 - DNA, 104 bp, Gossypium hirsutum
  Clone ID: LIB3135-045-Q1-K1-D4
tggcttggaggctgtgccgtgcctaccttatgactatgttgttttagaaattccagcctgatctatggttcgacattttatgatatgaactctctatattaact

SEQ ID NO: 12427 - DNA, 364 bp, Gossypium hirsutum
  Clone ID: LIB3135-045-Q1-K1-D5
ggccgaccgacgcgtccggaatgacctaactttgaattttcctccgtgtctcatgacgaacttctatatgtcggagaagagctgctccagaatggtgaccgctgccaaacttacatcgcagagaatctcacatccgaaagcctttatcgctgatgttgttcctctactttttttcttgctcagttgctgaaaataaaatgatacatgcatgttctcgcaatggcatataccatgttcttagggcattgacactgtgaatctatgatttgaaatattttgtttttgctacattttaatgcaattaccgattataaaaccatgtggaaatcccagcctcattgaacaaattttcaaattttttata

SEQ ID NO: 12428 - DNA, 367 bp, Gossypium hirsutum
  Clone ID: LIB3135-045-Q1-K1-D6
ggccgacggaggcgtgcgcataaaaatggccagacctgtttatttcctttttccaaggccaactgatatgcaggggatgcaggatcttcttaaggagcttcgataacttgttccaaatggtgctaaatatagcattgatgctcatttgtaccaaactgttaaacacatactgtttttaatgagtgttaccaaccaagctgagaaattgaggcaatgggttcatcgtgtggtatctgatctcaataatacaaggtcattttaaaccatatatggttaccaaactattacaagcttttctttttagattgtaaattaacgaaaagtattccccatcttttttgaataacttacatatccaggacatttt

SEQ ID NO: 12429 - DNA, 414 bp, Gossypium hirsutum
  Clone ID: LIB3135-045-Q1-K1-D8
cacgcgtccggaaaaatcctcttttcgttatcctggggtgagttctcggagtgggatcgttccttcgtccaatgggctgcacgcgcttactcgccactgtcaatgccgtcacatatggcggccggaagccaaaaaacctcatcgtttaccccgcatcaaaaggtattccattctttatctatttttaatatttttatatgtataaaatgcaaatattttgaaaaagaaaaataaaaaacaaatcacctttgctttctttgtgaaatctttctgatgtcttattgcaaaaaaatatttggtgtacaatcatccctttctgtgtgtgcgtatatctttatacatcaaagaaaaaggcttattaacctcagtctattacatattttggaaagaaatccttgatttccttacatattt

SEQ ID NO: 12430 - DNA, 425 bp, Gossypium hirsutum
  Clone ID: LIB3135-045-Q1-K1-E1
gaatatctcatgagctgatggaaactgtggagaggctgacaaaggagcactacagaaagtgcatggagcaaaggttcaaagaaatggtggccagtaagggtcttgaggctgttcaatctgagatcaatgacatggactgggaaagcaccttctctttgcgccacttgcctgaatctaacatgtctgaaattcctgatcttgaagaagattacagaaaggtgatgaaggaatttgcagtggagttggagaagcttgcagagcaacttttggaccttttgtgtgagaatctggggttggagcctggttacctgaaaaaagtgttttatgggtccaaagggccaacctttggtaccaaggtcagcaactatcctccatgccccaaacctgacttaaatcaaaggactcaggctcacactgatgctggt

SEQ ID NO: 12431 - DNA, 261 bp, Gossypium hirsutum
  Clone ID: LIB3135-045-Q1-K1-E2
gaatttctggacgacccacgcgttcgtccactcgttcgcccactcgtccgaaaaaatataatattaaaaaaaaaaaaaaaaaaaaaggggagagagataaaaaataaaaaaattaaaaaaacctacataaaaaaaaaaaaaatattatataaaataaactaaaatacaattaaatgtccatggtttttcaacctcttgaatggaaaaaaccttttcttacataactaattatacttttaaaacattcccctctatataaaa

SEQ ID NO: 12432 - DNA, 263 bp, Gossypium hirsutum
  Clone ID: LIB3135-045-Q1-K1-E3
gagcaaggctactataggcgcacctggtacttctactctggacgcgaagataaacatatggggcgggctctattccggtagccttaatgttcccaaccaacccaaagttgccccagaagaactctatgctacacaattctctcacccacatgaaatgcgtttttacgacactggatagaacctttgagcacttcgtgctacttgtggaataccacacactagaaatgatagacttgtccttaacactgatcactaatgcctac

SEQ ID NO: 12433 - DNA, 191 bp, Gossypium hirsutum
  Clone ID: LIB3135-045-Q1-K1-E4
gcggggaggcatcattgtctttggatcgtcatctctttttatcttcctgttcttcattatttaggagtgtgtattttgcctctggcaattgccctacaattattgtgaaataatgggtccgcatgacaatatatgatctgaacattggtacatcaaataaatgcttcttgccttatataaaaaattttaac

SEQ ID NO: 12434 - DNA, 191 bp, Gossypium hirsutum
  unsure (1)..(191): unsure at all n locations; Clone ID: LIB3135-045-Q1-K1-E6
ccacgcgtncgaaaaaaaaaaaaaaaaacttacatttttttttttttaaacccaaaaaaaacaaaccagaaaaagaagaaatctaaaaaaagacatgcccacccatatatttactatacccattgtttttaattaaaaaaaaatataataaaataaaatatttgtcatcccctctttaagaaccaatctaa

SEQ ID NO: 12435 - DNA, 335 bp, Gossypium hirsutum
  unsure (1)..(335): unsure at all n locations; Clone ID: LIB3135-045-Q1-K1-E8
ggaacttgaacttgacaagttcatttctcactcagttcccttctctgagattaacgggncgttggagtacatgcttgctggcgagggcctgaggtgcatgattcgcatggatgcataaggattggctggccatggatgaagggctttttgtcaagtatatgtgcattttaagggaataaataatgtaatgtaatgctacatcgttttgctgtatttaatggcaaatttttatcttatcaaaaaaaaaataaaaaaatataataaaaaaatatattaataataataataaaattaaaaaaatagtggtttggtttggaaattatattttaataatt

SEQ ID NO: 12436 - DNA, 315 bp, Gossypium hirsutum
  Clone ID: LIB3135-045-Q1-K1-F1
cccacgcgtccgctgcttcttcttcttcattctgttggctgctgctgctgctttggtggcgtgatggagaagccacaactcaatttcatataaagaaaaaaaaaagagtgagatggatccagacgcagtagccaaggccttcgtcgagcactactactccacattcgatgccaaccgggccggtttagccaatctctaccaggaaggttccatgttgaccttcgaaggtcaaaagatccagggctctcagagcatcgtggctaagctcaccagccttccttttcagcagtgcaagcacaacatcaccaccgtcga

SEQ ID NO: 12437 - DNA, 117 bp, Gossypium hirsutum
  Clone ID: LIB3135-045-Q1-K1-F10
tcttcttgcttaccttctcaaattaatttccactctattcctctatttcgttctccccgatttcctttaacccgacattccttgtctccaatacgctccttaaacccaccacgcttt

SEQ ID NO: 12438 - DNA, 223 bp, Gossypium hirsutum
  Clone ID: LIB3135-045-Q1-K1-F11
gctacttaaccatttcccaaatctcctcctttctcttctttagcgtccttttcggttccggtcatgcatcgcgctttgaaatcctcaatgagtgctcctacaccgtctgggcagcagcctctcctggtggtggccgtcgcctagaccctcggcaaagttggaccatttatgtgcctgctggcactgctattgctcgtatttggggtcgaaccaattgcaattt

SEQ ID NO: 12439 - DNA, 390 bp, Gossypium hirsutum
  Clone ID: LIB3135-045-Q1-K1-F2
gatttatgcatcgtgcttttcaatcgtatgagaagcatcgaggccctcttggaaatgtcaggaaaggagtgttggtatcaatgggttatggtacaatcacagcttatgcattgatgagtttggaagctcgtggaactctttttgtgacccctgggatggagacatacgatggcatgatagttggtgagcattcacgtgatacagatcttgatgtgaatccagtaaggagtaaagaactgtcaaatatgcgtgcagctggcaaagatgaaaatgtgaaactatctccgccaaaacttatgactctcgaagaagctattggttatgttgcttctgatgagcttatagaggttacaccaaaggccatccgattaaggaagagatatctggatg

SEQ ID NO: 12440 - DNA, 328 bp, Gossypium hirsutum
  Clone ID: LIB3135-045-Q1-K1-F3
gcccgtcttcattccactcgtgtacttggatcctttggttatcatgctcctgaatacgcgatgactgggcaattaaatgccaagagtgatgtatacagctttggtgttgtgctgctggagcttttgactggaagaaaacctgttgatcatactttaccccgtggacagcaaagcctattgacatgggctacaccaagacttattgaagacaaggttaggcagtgtgttgatcaaagactaggaggagattatcctcccaaggccgccgccaagatggctgcagttgctgcattatgcgtgcaatatgaagctgattttaagccaaata

SEQ ID NO: 12441 - DNA, 439 bp, Gossypium hirsutum
  Clone ID: LIB3135-045-Q1-K1-F4
taaacgtgaaccaaagaccagggaagctggtgacagtggatggggaaacagagctggaggtagagacattgttgaaggcatcggcttatatattggggacgagtgggtggagcattgtttacaaggcagtgctggagaatgggactgcattcgcagtaagaaggataggggagagttcagtggagaggttgaaggattttgaaagccgcgttaggatgatagccaaattgaggcacccaaacttggtaaagattcgagggttttactggggagatactgagaagcttgttatctatgactacgcctccaatggcagcctcgcctgcaccactaccgcttacagaagatcaggctcatcatcagtttggcatttacctcttgaagcctgtcttaaaatagcaagaggagtggctcggggactggcctacattcatgaaaa

SEQ ID NO: 12442 - DNA, 430 bp, Gossypium hirsutum
  Clone ID: LIB3135-045-Q1-K1-F5
cccagggaggatttgaaagatgaagttcttgcttcaattccacgaggaacagtacccgttggaggacctgttgatgcacttccttattacatgcctgcccaacatgcacctcaagttggaactccgggtatgattatgggaaagccggtcatggaccctgctttgtatgctcagcaatctcatccgtacatggcacagccgcagcagatgtggccaccaccaggtcccgagcaacagcagtcatcctctgatcattagcaactctattcatagaagacatgctcctcgagatatctcgagaatgttgtacggaaacggaataaggaggctttgtcttgttgaaaagcatggtcaagattctagctcatagatcagactgtgtaaatatcactctgaacaattttcatttcatttcctttgttttctctat

SEQ ID NO: 12443 - DNA, 271 bp, Gossypium hirsutum
  Clone ID: LIB3135-045-Q1-K1-F8
aaaaaaaaaaaaaaaaaaaaaaaaaaaaattttaaaaaaaaaaacaaaaagacaggggaaagacaaaattcaaaaaaaacaaacaccaacacacaaccaaaaaaaaaaaaaaaaaaaaaaacagggccgccccctataaaggccccaacctaccccccccggacgggcaacgccaaagcccttcaaaagctgaaccaaattgcaaaacacggcccggcctttaaccaccttgagacacggaaaaccccggccagaccccaccttaaacccc

SEQ ID NO: 12444 - DNA, 382 bp, Gossypium hirsutum
  Clone ID: LIB3135-045-Q1-K1-G1
cccacgcgttcgcccacgcgtccggtgggcaaataaggcactctgcatataaaggctggggttctgtggactgcggattctaatgacatgtttcttttgccaaccctactgatacttgatcaccggaaagaaggtagcgtggaatgatgagatggtctttttaataataatgcatttcttggggtattatatatcgatggagtccaaatatcggaatgagcaagagagctttggttttatcatttatgtcttccgcttgtgtgttttcttaacaataaccataatatgatacatgtgttgtgttctgttacaaataattgagagagtggctttttgtttctattgacctttgctttgataatgaagtgccagtttgtcaatg

SEQ ID NO: 12445 - DNA, 144 bp, Gossypium hirsutum
  Clone ID: LIB3135-045-Q1-K1-G2
cccacgcgtccgattcagtactgttttggaacttgaaaaatactgtcactgttatggggttatagttgtgactgaacttggtttttcactcttcatttttatcttttttggatttggaatttttattgtgtgcctttttgggtg

SEQ ID NO: 12446 - DNA, 434 bp, Gossypium hirsutum
  unsure (1)..(434): unsure at all n locations; Clone ID: LIB3135-045-Q1-K1-G3
caacaacatggttgctgcggccaagctgcttctcgctcaacttgccagtgccaagtgagaggatcatgatgagagattggagatccttactccattaatgatttattatacccaagaagagaaagaattaaaattgaaagaaatttctgtgttacaatttgaataactctgtgtctttgatgatatatttgttaggcatgatttgccctcgaggccaatttatttccttctttcttggttgtttctatttttttaccaactattttgtatttctggaatatattcaagtaatgaatttcaaannaaaaaaaaaaaaaataataaaaatannntttaatataataaaaattaaatttttaataataatttctttatttttaatataatatattttttttttttattttaataatttttttatcttccaatttaaa

SEQ ID NO: 12447 - DNA, 257 bp, Gossypium hirsutum
  Clone ID: LIB3135-045-Q1-K1-G5
acgcccacgcttccgcttccacacacttattaatattgctactcatataaaagcctcggggcaggtggccgtttaatacaaatacatctttcttttttcaaacccaccgaaacttgatcaacaaaaagaagaaagcgtaacaccaacataatgaacatctaataaaaaaacattccttggggaaacatatacctaatgaacacaaatatcccgattatcaacaaacctataaggataacacttatccctatccacca

SEQ ID NO: 12448 - DNA, 418 bp, Gossypium hirsutum
  Clone ID: LIB3135-045-Q1-K1-G6
cccacgcgttcgcccacgcgtccggcagccgcctcagagtcatcctccacctatgtggccggcacaacaaggttcggctggggtaccagctcaacaacagccagcgggtcaaccggctaacgcagatgaggttcggactttgtggatcggagatttgcagtattatatggatgagaattatctcttgagctgttttgcccaaactggagaggttgcttctgtaaaagttatccgcaacaagcaaaccggtcaagtggagggctatgggtttattgagtttgtttcaagagctgctgctgagagagttttacaaacatacaatggtacacctatgccaaatggtgagagcaactataggctgaactgtgcatcctttagttcaggtgataggcgagatgagacccctgagttcacaatc

SEQ ID NO: 12449 - DNA, 211 bp, Gossypium hirsutum
  Clone ID: LIB3135-045-Q1-K1-G7
gttggctactgaaacaaccgatgcttaggctcaagtagaagaggccaaatatggatggtgggtatacgtgatccgtggaggttattgaggatacggatggcgcggtggttacggaggatacagaaggcgtggtgggtatggtggtggttacagtggacgaggacgtggacttggacgtttatgttatggaggtggttgtgcctttggatgc

SEQ ID NO: 12450 - DNA, 170 bp, Gossypium hirsutum
  unsure (1)..(170): unsure at all n locations; Clone ID: LIB3135-045-Q1-K1-G9
cccacgcttcctcccacgcgttctcccactcgtccggaggaaaccaaggttggagctattgatggctatcaagatgtanagcaatcanatagtgcttctttatgttccgttgctcatcaaccttttattttgggaaattgatggtcccgccattgattttcaacttttac

SEQ ID NO: 12451 - DNA, 409 bp, Gossypium hirsutum
  Clone ID: LIB3135-045-Q1-K1-H1
ttttctttagccaaggacagtaccatgccaaattgaggaagcttgtgctccgtgccttcgtgcctgaggccgtcaaaagcttcgtttctaacatcgaatccattgccaaagattctctccagtcattggaaggcaggctgattaccactttccaagaaatgaaaacgtacacattcaatgttgcgctgctatcgatattcggagaggatgaagtgaagtacagagaagatctgaagaggtgttattacatattagaaaaagggtataactcgatgcccattaatattccgggtacacttttcaacaaatcgatgaaagcaaggaaagagctagctcacatcctggccaaaatcatatcgaccagggaggaaacgaagcaagagtacaatgacttggtggtttttttcat

SEQ ID NO: 12452 - DNA, 256 bp, Gossypium hirsutum
  unsure (1)..(256): unsure at all n locations; Clone ID: LIB3135-045-Q1-K1-H11
ggaggactcaactattatcgagctatgaatctaaactgggaactgatggcaccgggggcgtgattacaaatccaagtaccgggtaagttcatcgtacgcgacctgtacattacctaccacattcctggcgttaaggaatacttacaaaatggcggattcaagaaaaatgtgcctttcttgcaggaactagttgtcaatgaaggagtagcccattntatcaaccaaagaaaagccttaggagattagcatgcacatt

SEQ ID NO: 12453 - DNA, 231 bp, Gossypium hirsutum
  unsure (1)..(231): unsure at all n locations; Clone ID: LIB3135-045-Q1-K1-H12
ttcaaattcttctacgttcttgtatttttttttggtgaaaaataaaacagaattacatcgaatcaactattaagagacgctganaaaaaaaaaaaaaaaaaaaaaaaaaaataaaaaaaaaaaaaatttaaaaaaataaaaaatataaaaagaaaaaaaattaaaaaaggtaccctctttttataagaaaaaaaatttatattcaccttctttgcgggtgggggacctttt

SEQ ID NO: 12454 - DNA, 391 bp, Gossypium hirsutum
  Clone ID: LIB3135-045-Q1-K1-H2
cccacgcgtccgaattattgttaccgatcccgtttctagctgaggagagtgcacttgtgtcggttgaaggtgatatgagtgtgaaagggcacaaggctgacgtgggtgttaatgatatggagggttcggtaggattttcggattcaaacgattttgggtttgtgggtaatgagagtcattcacagggagtgggagatgaggagattccagggtttaatttgaattctgctggactacttgggagaccacaggtaaacaaacagatcaataaattgggaatctttttgggggaaagtttggtacttgaatttatgaactttgtttgtgttaaatccttgaaaaattactgttttagcttgtaagattgatttagtaattgcggcgagtgctc

SEQ ID NO: 12455 - DNA, 317 bp, Gossypium hirsutum
  Clone ID: LIB3135-045-Q1-K1-H4
cccacgcgtccgcccacgcgtacgctctggcgttcttgacaggtttgccgccatgggtattgacggggctggagtccttgccctcctaggagctcacagtgtcggcagaactcactgtgtgaagctggtgcatcgtttgtacccagaggttgaccctgccctcaaccccgaccatgttccacacatactccataaatgccctgatcagatcccagaccccaaggccgttcagtatgtgagaaacgaccgtgggacacccatggttttggataacaactactacaggaacatactggacaacaagggtttgttgattg

SEQ ID NO: 12456 - DNA, 214 bp, Gossypium hirsutum
  Clone ID: LIB3135-045-Q1-K1-H6
tctttctacctataaacttattcaacccaaaaacaaacacaaaaaagaaaagaaggcttctaaatggacaacctccactcacaatactggctgctttttacaaatacgtagtccttcctgaatccatggttgatgctattatttactcccctcccaattatgattctcccaagaagggcaaatcccctaattaacttttctatcctggtatctt

SEQ ID NO: 12457 - DNA, 273 bp, Gossypium hirsutum
  Clone ID: LIB3135-045-Q1-K1-H8
tcgccacgcgttcgcccactcgttcgtccactctttcgtccacgcgttcgtccacgcgttcggaggtcttcaccaccaccttctgctttaccacctccaccatactattacaagtccccaccaccaccaaaacacgtataggagcccccatacatttacaaatctccttcaccaccatcaccatctcctccttcaccatattattacaagtccccaccaccaccagtccactctgcaccaccaccatactattacaaatgccctactccacca

SEQ ID NO: 12458 - DNA, 444 bp, Gossypium hirsutum
  unsure (1)..(444): unsure at all n locations; Clone ID: LIB3135-045-Q1-K1-H9
cccacgcgtccgtccagatttcatattgcaaacgatggcgtcattggattcaaaagaatgagctgccaataacccaggccttcattttccccctgacgaagccaccaaaggctacatcatgcagcaaaccatgtttcgtattaaggatccaaaacgtactcttgaattttatagtcgtgttttgggcatgacgttgcttaacaaagtggatgttccatatatgaaaatgacattgtatatgatgggatatgaggatgtttcatcagcaccaaatgacccagttgagaaaactatttggacatttggaagaccagctactatggaactaacacacttttggngtaccgaaaacgatcctgaattcaaaggataccacgatgggaattcagaacctattggcttttggcaccattgcatcactggggatgacatgtacaaggcatg

SEQ ID NO: 12459 - DNA, 384 bp, Gossypium hirsutum
  Clone ID: LIB3135-046-Q1-K1-A1
catactcatttagcccctttcattagcatcggaatcactccagttttctttatcactgaaaaaggtcttgctgtggtggaaactgtggctgcggatctggctgcaagtgtggcagtggctgtggaggatgcaagatgtacccacacctgaacgttgccgagatgaccacaactgagactctggttcttggtgtagcaccccagaaagcacactttgagggagctgagatggaattcggggctgagaacggctgcaagtgtggagacaactgcacctgcaacccttgcaattgtaaatgattagagaccaaagccaaagctccctggaagcagagacgcccttgtctttaagaaaaaaatatgtttcgttgtttatgtgttttta

SEQ ID NO: 12460 - DNA, 322 bp, Gossypium hirsutum
  Clone ID: LIB3135-046-Q1-K1-A10
gcgtccgtttctaaaatttaactttttttataatgaaatcatcgcctttctctctatgtgagggtctgttagttcaatacaatccaatattttcttacctacaagaaaaaggacgatgattaataatgatttctgaggctatccttgacttaaatccctacaatactctttttctgcgcccgaaaaaaaaggaaacatttgaatattcccggtgttgaaagattattatcaagactttgttattaaaatgggggacatgcatcccacgaagctgattaggtacaaatagctcacctacaaaaaaaattttcttttttttatc

SEQ ID NO: 12461 - DNA, 296 bp, Gossypium hirsutum
  Clone ID: LIB3135-046-Q1-K1-A12
gcgtacgcccacgcgtgcgctttttttttaaacgtaggagcatgactaataaataaatattacgacgggatagacatatcacatatgacatacaaatagaaaggacccctcctatttctttttgtttacccaaatatacatggaatgcgctgcaaaacaacacaccatcacagattatttaaccttacctagctactttatatagctgagctgaaaccttgtgccactccttcttacatatcatcatcatcaacctcactgcaccttgttgcaaccaatgtaggggctgatgttgt

SEQ ID NO: 12462 - DNA, 201 bp, Gossypium hirsutum
  Clone ID: LIB3135-046-Q1-K1-A2
gcgtattgtcaatggttgatccatcgagagatcctaccaaatctggtgcttctctagtcgttgcaactcggaaggataacgttgtcgcagaatctgtcgcttcaaaagaaattaggagttcaaatggagaattgaccaggaatcaaaaaaagaagatttgcaacagggctaagaaggcagctcaaggttgtgtaggaaggg

SEQ ID NO: 12463 - DNA, 368 bp, Gossypium hirsutum
  unsure (1)..(368): unsure at all n locations; Clone ID: LIB3135-046-Q1-K1-A3
cccacgcgttcagagtcggctgtggtacctgctttacaacatctanctggtcaaccggctagggcagatgaggttcggacttcgtggatcggggatttgcagtgttatatggatgagcattatctcttgagctgttttgcccaaactggaaaggttgcttctgtaaaagctatccgtaacaatgcaaaccggtcaagtggagggctatggatttattgagaatgttttaagagctgctagggagagagtcttacaaacatacaatggtacacctatgccaaatggtgagagcaacatataggttgaactgtgcattctatatatcaggcaataggctatattagacccctgagttcacaatctttgat

SEQ ID NO: 12464 - DNA, 307 bp, Gossypium hirsutum
  Clone ID: LIB3135-046-Q1-K1-A4
gttggactagaaggaggtggaaattcaaagatgaagggaaatggaaccattattggcaaaaacatgatctttagagctgatcaatttgatttaaaaagcttaaacatgcagctggagaagcacctgacctgagtttggtctaggaccattgagaaacaaaggccagctgaggaatgggagattgatttggctaagttggatttaaggaatgttatagctcatggcacctatggaactgttaatcgggccactaatgataataaagatgttgcaggctgttgttgagttcatggctgatctcgttgcc

SEQ ID NO: 12465 - DNA, 341 bp, Gossypium hirsutum
  Clone ID: LIB3135-046-Q1-K1-A5
cccacgcgtccggcagcttaggcaaccagagcgcagccatggtgaagtaggcgaaggagtcagagaaacccaccaagacccgcaaggcaaggggcccagaacacaggggtcacttcaagaacacaagggagactgcgatcgctaacaggaagtcggccaaggagaaggctaagacgcatgaggaggacggaacggctcacaaacaggccagacccagcagacgcttcagaggtggtgtaggacgtacagctcaggcaaagaacaggcattcgaatggacaaggacgcgggcctggaaaaacagccaaactcattctagacgggccgaagaatgcagagagc

SEQ ID NO: 12466 - DNA, 417 bp, Gossypium hirsutum
  Clone ID: LIB3135-046-Q1-K1-A6
tattgtcaatggttgatccatcgagagatcctaccaaatctggtgcttctctagtgcttccaactaggaaggataaggttgtcgcagaatctgtcgcttcaaaagaaattaggagttcaaatggagatttgaccaggaatcagaaaaagaagatttggaaaagggctaagaaggcggctcaaggttgtgtaggaagggaagcttctgaggagaatgagatagattccaagactggtggcacggaagacactaatgctgatgcaaaatcaaatgaagtttgtggtgatgaacaggcaaatagttctgaggttaaagacgatgcaaagagagatggaattaacaatggtaaccaaggaaaggagcgccatagaagggggagccgtgctacaaggaaaaagctattggcagaagttgatc

SEQ ID NO: 12467 - DNA, 414 bp, Gossypium hirsutum
  unsure (1)..(414): unsure at all n locations; Clone ID: LIB3135-046-Q1-K1-A7
tcggaacccaggtgtaccttgcttcctttttggtcactctaccggtggagctgtggttgtgaaggcagcttcccatcctcgtattgaaagaatgctggagggagttgtgctgacctctccagctttgcatgttaaaccagcacatccaattgttggggctattgctcctcttttttctctggttgctcctaagctccagtttaaaggtgcgaacaagaagggcatcccagtttcaagggaccctgccgcactcttggccaagtactctgatcccttggtctacactggtccaataagggcccgaactgggcatgagatattgcgcatttcctcttatttgatgcggaactataagtccgtgacagncccattctttgttctgcatgggactgcagacaaagtcactgatccact

SEQ ID NO: 12468 - DNA, 293 bp, Gossypium hirsutum
  Clone ID: LIB3135-046-Q1-K1-A8
aggcacgagccacgcgtgcctataatgaggggggaattcaaagatgaatggaaatggaagcattagtgggggaaacatgagctttagagctgatcaatttgatttaaaaagcttagacatgcagctggagaagcacctgagctgagtttggtctaggaacattgagaaacaaaggccatgtgaggaatgggagattgatttggctaagttggatttaaagaatggtatagctcatggcacctatgggactgtgtatcgtggcacttattattattaagatgttgcacgctgtt

SEQ ID NO: 12469 - DNA, 434 bp, Gossypium hirsutum
  Clone ID: LIB3135-046-Q1-K1-A9
gaatggggtagcactggcccaactgatgctgttcactacaacaattggccagaggatgggccttttttcaagaaagactgcggtggctggcatacgccatatggtgaattcttccttacctggtactctcagatgctgttagaacacggggagagaattctatcgtccgcaacatcgatttttgacggtgcaggtgtgaacatctctgcaatagttgcgggaatccactggcattatggaacccgatcccatgctcctgaactcacagctgggtactataacacaaggtaccgagatggttacctcccgatcgctcaaatgctagcacgtcatggtgccgttttcaacttcacttgcatagacatgcggcatcatgagcagccccaagatgccttgtgtgcacctgagaagctagtgaagcaagttgctttaac

SEQ ID NO: 12470 - DNA, 155 bp, Gossypium hirsutum
  Clone ID: LIB3135-046-Q1-K1-B1
agcatctccttattgtcgttaaaggccagatctacgaccactcttcctacaacgtggttcatgggcgtggcggggctgattccatgtttacagggagggatgcgagcatggcatagacacagttggctctttaacctgacgacctgactgctaac

SEQ ID NO: 12471 - DNA, 298 bp, Gossypium hirsutum
  Clone ID: LIB3135-046-Q1-K1-B10
gcccccgactaatccaccattgcatccaccgacatattctacaccatcgccttctccagcggagcggcctactgatcctaaaccacaaaggagcctagcggctgttcatggcgttgatttttgcaagtcttgcaagtactctgtatccaacaccccattgggagcacatcctatcttgtgcgccgctgtttagtttacatgcgataacaccatatacaagtcactgttcaatgtaaacactgtcaagaatagttcaccttttctgctagcaccgaagaccgtcaccagctttggagcc

SEQ ID NO: 12472 - DNA, 421 bp, Gossypium hirsutum
  Clone ID: LIB3135-046-Q1-K1-B11
gcggattaccattctcaggggaaatcatgaaagtcgccagatcactcaagtttacgggttttacgacgaatgtctgagaaagtatggtcgtgctaatgtttggaagatctttacagacctttttgactattttccattaactgctttggtggagtcagaaatattttgtctgcatggtgggttgtccccgtcaattgaaaccttggataatgtaagaaactttgatcgtgttcaagaggttcctcatgaagggcccatgtgtgatttattgtggtctgatccagatgatcgatgcggttggggtatctcgccacgtggcgctggatatacttttggtcaggatatatctgaacagttcaaccatacaaacagcttaaagttgattgctagagctcatcaactggttatggatggatttaac

SEQ ID NO: 12473 - DNA, 423 bp, Gossypium hirsutum
  Clone ID: LIB3135-046-Q1-K1-B12
acgcacgcgtccgcacaaccctagcattccccctttaatcctttcagccgaaccctaacattcctctaagaggggatctaccaccatgaatggccatcagcccatcctagcctcaaagttatttttagccttaagaccccttatatactccgatttcgacgaagaagaagaagtttcatggtgtactttcaaggttaagtcttatttccttattcctttcgattttttaaatgctaaacatatgaccaacataaaaattattggcataaaagaaacttgagttaagaatcacctttaaggattttaataactttctctgcattctatgagagtgcgtatgcgttcggcccttgcaagtacattcgacagcttttttattttcagatttacagagtaaataaaaactaaaaatacattttcttg

SEQ ID NO: 12474 - DNA, 379 bp, Gossypium hirsutum
  unsure (1)..(379): unsure at all n locations; Clone ID: LIB3135-046-Q1-K1-B2
cccacgcgtccgaatttatgtgatgtcggcattgttcagccgtatcctcctctctgcgacatcaagggcagctatgtttctcagtttgaacacaccatcctactgcggccaacctgcaaagaagttatatcgagaggtgatgactattaaggtggaagaccaaaaagtttagttggtaatcatctcctcaaatattttgcgaataattttagttgtgtactttttgtgttttttaacataaggaaggtccctaaatagtggatgatacccatgtttgtcacttgtctgtactcttgctttgccgtgtttgatgatagatggtgtgattgagacttgaatcangcaatatatggtgatgggaagactagaattttcattg

SEQ ID NO: 12475 - DNA, 356 bp, Gossypium hirsutum
  unsure (1)..(356): unsure at all n locations; Clone ID: LIB3135-046-Q1-K1-B3
cccacgcgtccgggaatggaagagatgggaattaagagtgggatgtacactgtctgatgggttctccatatgttaccgggaaaaaaagaagagaaaagaaagaggcaagggaaacctagtagtgcggtcattgatatgcatatttatactttgaacgagtaaattggtagagaaagcattagttgtgtcttggcttacatcttacatttcttcatcaaggaagagttttaagaaaagcaaacatagaattgcaaattatttgctaaaaagtattcttgtttgagttccctcaaaangcannggggaacccgatgataaaaaaaacgccttcgggacatccctttcttgattttttt

SEQ ID NO: 12476 - DNA, 235 bp, Gossypium hirsutum
  Clone ID: LIB3135-046-Q1-K1-B4
ctggattcaactttaggacccgtgggcctcaggaaaaaccaagtttagacaacattttaaatcagggcaatgctccaagaagactacgcttgctaatgaaaatttctaacgtaccaatgaaagtgtctgcaggctgttttgatgatggcaaattgacaagtgctggtctcggtgaagaagaagaagttcaatctactctaactgaggtcacagaagcagaagctaccggacagac

SEQ ID NO: 12477 - DNA, 409 bp, Gossypium hirsutum
  Clone ID: LIB3135-046-Q1-K1-B5
ctcttctttcctcctagcccaaaaaaaaaaaaccctctttcctttctctcgttctttttcccgttcaatcatgtcttgcttcattagcaaatatgccgatgagttggctaaaaacgctgcttacattggaacccctggaaagggtatccttgctgctgatgaatccactggcaccatcggcaagcgtctttcaagcattaatgtagagaatgttgaagataacaggcgtgctctccgtgagctcctattcacaactccaggagctcttcagtacctcagtggtgttattctctttgaggaaaccctttatcaaaaaaccgcttcgggcaagcccttcgttgatgttttgaaggaaggtggtgtcctccctggcatcaaggtcgacaagggtaccgttgagcttaacgga

SEQ ID NO: 12478 - DNA, 355 bp, Gossypium hirsutum
  Clone ID: LIB3135-046-Q1-K1-B6
gtatattttaaggctggcagattcattccagataaagttttcatgatgcagaacaaatgggcggttctaagaagaaagctgctcgtgaactcagtgagatcaacgtcgttgatgaacaagaacttacagaagcttcagctagtattgaaccaaagcatcacaacgacgttgcagatttaataaatagttacaaaagtttatacccaaaatgggtttttgatctcagcaggccttacaccagggactgagttgattctgttggctggaatgattatggggaagagagtatgttttcttgaagcaacttacttctgggctcctttttggcaccggtggtcattacatattctactga

SEQ ID NO: 12479 - DNA, 335 bp, Gossypium hirsutum
  Clone ID: LIB3135-046-Q1-K1-B7
gtctattttactgctagccgaaaaaaattaaaccctctttcctttctctggggcttgttccctttcattcctgcctagctacaatagcacatatgccgatcagtggggtttaaacgcagggtcctttggaacccctagcaagcttttaaccagctgatgaggaatccagtgtcaccataggcaagtcgtttacatgctttaatgtagaaaatgttgaagataacaggcgggctctccgtgagctccgatttacaactcctggatctcttcattacctctgtggcgttattctttttgaagaaactctctatcaaaaaaccctttctgacaagccc

SEQ ID NO: 12480 - DNA, 315 bp, Gossypium hirsutum
  Clone ID: LIB3135-046-Q1-K1-B8
ggcgaactggcgaaacataagtcttacttcgaatatctgcttcaacagctatttcgggcgaagaatatacatttaagggagggggaaacttttaagggagtagtagaaaatcatttggtttttgaagagcccttaaaagagcaaattgatgggctctatcaaatctggtgggatcttattctaaatggggccaacagtagctactttctaaaaattgtggaattttatggatccacgcttggtatgtagccaagcccaagaaaaaagggacgaggggaagaatcgacaaggaattcataacaccttatataaaaa

SEQ ID NO: 12481 - DNA, 369 bp, Gossypium hirsutum
  Clone ID: LIB3135-046-Q1-K1-B9
attctggttaagcgaaagggtctcaagttaaaccctatatctatcatgtattatgttagtccttgcagtgctctttgtctgtttattccttggatctttctggagaaaccaaaaatggatgcccatgggatgtggaaccttcaccctgttgtgctaacgctgaactctatctgcacctttgcactcaacttgtcagttttcctagtgatctcacacactagtgctctaaccattcgcgttgctggagtcgtcaaggattgggtggttgttttagtatcggcccttctctttgcagatacaaagttgacagtcataaatttatttggttatggcatagccattgctggtgtggcggcatacaataatcac

SEQ ID NO: 12482 - DNA, 410 bp, Gossypium hirsutum
  Clone ID: LIB3135-046-Q1-K1-C1
cttcggtcccaatcctaccccatctaagaaatctgtccttaccaatctgatacaggagattgaaccactggatgttagccttattcaaaaagatgtaccccccacaactgtgggtgccatgaaaaggactatctcgggaatgttgggtttacttccatctgataggtttcaagtctttatcgaggcactatgggaacctctctccaaattgttggtttcttctatgatgactgcttatacattgagaaatgctgaatataggctttgccttgaacggaaccttggttgtgaaggagatttggaaaatcaaacttcagaaaaggcaaacttcgatttacaagagatgttattggacagtacaaaaataaatgaattttcagagaaaaatgatttgtcctctgaatctgaaa

SEQ ID NO: 12483 - DNA, 172 bp, Gossypium hirsutum
  Clone ID: LIB3135-046-Q1-K1-C10
cttagctataacaggattatccgttggcgtaacgagaaaaaactatgatcaagcgtcgcgtggacggcttctgtggggcgtgactggcggtgcatctgttagcgcgtgaaagtccatcagcatgcgcactaacatagccttccgtagggtctcacgcctgcttccgggactg

SEQ ID NO: 12484 - DNA, 431 bp, Gossypium hirsutum
  Clone ID: LIB3135-046-Q1-K1-C11
gatttctcgatttttttcgattccatttttgcaatctctatctctaggttttaggtcatggacaaaaaaggggacgattagctgaaagaaagaaaaaaagcaaaaacaatggcgtcgtcaagaggaggaggaagccaacaagtgatcagaacgggggatatggagaagatgagcttacatcagctcatagcagtcaaagaacaagcagatattgaagtcaatctcttacaagacagtcttaataacatacgcgccgtcaccggccgcctcgagaacgcctacgccgttctccacgacctttccctccgccctcaagggaagaaaatgttggttcctctcactgcttccctctatgttcccggcacactcgacgatgccgataacgttctcggtgatattggcactggatacttcgttgagaaaacaatggc

SEQ ID NO: 12485 - DNA, 213 bp, Gossypium hirsutum
  Clone ID: LIB3135-046-Q1-K1-C12
acgctttcgcagagtatgcttttgccttacgtttattgtagtttgttcctactaagggggcagggctctgaaaagacatgatcatacttaccttttagagtatgaattggctcaagacaaactcgatggcgaatgctgtttgatggatacagttatgcagcttgtgactggataaacagtcgagcttgtgatgagtggacacactttggctgt

SEQ ID NO: 12486 - DNA, 356 bp, Gossypium hirsutum
  Clone ID: LIB3135-046-Q1-K1-C2
cttaggtcccaatcctaccccatctaagaaatctgtccttaccaatctgatacaggagattgaaccactggatgttagccttattcaaaaagatgtaccccccacaactgtgggtgccatgaaaaggactatctcgggaatgttgggtttacttccatctgataggtttcaagtctttatcgaggcactatgggaacctctctccaaattgttggattcttctatgatgactggctatacatcgagaaatgctgaatataggctatgccttgaacggaaccttgtttgtgaaggagatttgtgacatcaaacttcagaaaaagcaaactttgatttacaagagatgttattggaca

SEQ ID NO: 12487 - DNA, 291 bp, Gossypium hirsutum
  Clone ID: LIB3135-046-Q1-K1-C3
cttcccaatgcttaaagctcaacaagatgcacatattgaaaaaggctctcgaggaggggttggtatactgacaactcttgtgataaacaacagacagtgtatagggactttggacagacgagctgatattaaggcaattagcgcaggtttacaagagaccacaaagcctgcaatacttttaactgaagatgtacaaactaacgagtgcttagaaaaaaatggtgtttgctgtcaggacaagagtggcaacataactgcatgcacggataccttgcggagaagagtgtgcga

SEQ ID NO: 12488 - DNA, 420 bp, Gossypium hirsutum
  Clone ID: LIB3135-046-Q1-K1-C4
cccacgcgtccgcatttgtacaccagcttagaccaaagtgaaatcagaacagaatgagctaagtttctcggagcaatgcaccaactgcgagaaggaggcagtgaatgtatcactggggaacctattgacgtatccatttgtgagagaagcagtggtgaagaaaacagtggccctgaaaggtgcacattacgatttcgtgaatgggaagtttgatctgtggaatctggatttcaagatttcacccactttagcaatatgaggatgcatgcagcatttttttcgactgatcaaagctcttctatttgcttctagtcaaactaaatgcctgccttcagcttttatgtttcttcatgcgcattgctaatcacaaagaataaaagtagtgctggtgttcctatcttgggtcatttaaataattta

SEQ ID NO: 12489 - DNA, 388 bp, Gossypium hirsutum
  Clone ID: LIB3135-046-Q1-K1-C5
atcattttctctcatccttctgatttcacgcctgtgtgtacgacggaactggggaagatggcggcttacctgccggagtttgaaaaacgaggggttaagcttctaggtttctcttgcgatgatgtgcagtcacacaaggagtggatcaaagatgttgaagcctacacgcctgggtgcaaggtggcatacccaatcgtggcagatcccaagagagggatcattaagcaacttaacatggtggacccaaatgaaaaagactcttcagggaacgagctcccatctagagctctgcatatcgtgggctctgataacaagataaagctgagcattctgtatgcagcaaccacagggcgaaacatggatgaagtgatgcgggcagtggactcac

SEQ ID NO: 12490 - DNA, 331 bp, Gossypium hirsutum
  Clone ID: LIB3135-046-Q1-K1-C6
atcattttctctcatccttcttatttcacgcctgtgtgtacgacggaactggggaggatggcggcttacctgccggagtttgaaaaacgaggggttaagcttctaggtttctcttgcgatgatgtgcagtcacacaaggagtggatcaaagatgttgaagcctacacgcctgggtgcaaggtggcatacccaatcgtggcagatcccaatagagggatcattaagcaacttaacatggtggacccaaatgaaaaagactcttcagggaacgagctcccatctagagctctgcatatcgtgggctctgataacaagataaagctgagcattc

SEQ ID NO: 12491 - DNA, 318 bp, Gossypium hirsutum
  Clone ID: LIB3135-046-Q1-K1-C7
atcattttctctcatccttctgatttttttcctgtctgtacgacggaacggggggggatggaggcttacctgccggagtttgaaaaaccaggggttaagcttctaggtttatcttgctatgattagcaatctcacaatgagtggatcaaagattttgaatcctacactgcctggattcaaggtggcctactcaatcgtgtcacattccaatatagtgatcattaagcaacttaacatgttagaccctaatgaaaaacacttttcatggaacgagctcacatctagagcttttgatatcgtgggctttgataacaagat

SEQ ID NO: 12492 - DNA, 374 bp, Gossypium hirsutum
  Clone ID: LIB3135-046-Q1-K1-C8
gtaagagtagtggatctgttgtccgtcacattctacagcaatagcaaaaggtgaacatcattgatattgatcctaaaggtggaaggagaatcacatcaaacggtcagcgtgatctggaccaagtagctggaaggattgcggttgccatctgagaaattttaagagagctgttgccgaaggctgtgttaatcaattttcgtgttggtatatccgctacgtgggaattttttttttttaaattttaattttagaaaccaatgtggttggtgtttaactatgaccatgaattttgaattctaatggaagattgaatggtgaagttgcccttctgcatgtttacagctttcattctcaaaaagaaaaaatataaaaag

SEQ ID NO: 12493 - DNA, 454 bp, Gossypium hirsutum
  Clone ID: LIB3135-046-Q1-K1-C9
gttcattctagtaaccatggtggatgatatgctgtacagactgacccttgcatggtccgtgtcgttcacgtacatggatgctctgaggcctcagaatccaccatcagtctcaagatgcagaacaaaaccttgatgtcatcaaggatgcagccactgatatttctcaaaccgtttcaagacgagacatggccacccaaatgagcccacagagtatcacccactcgtctcccaaaggaaggccttccttctatccctcttccccttcagctctacctatcatggaactgcaaagcatccatggctctaaatcagtactgagagatgtgccagtagatgaaagagtgaccctgactaggtggtcgaagaagcatagagctcgaaacactgggaagagctcagaaattgttgatgattggagaaagaaagttgtagatacttgtacattaacatggga

SEQ ID NO: 12494 - DNA, 271 bp, Gossypium hirsutum
  Clone ID: LIB3135-046-Q1-K1-D1
cgagccacgcgtccggtggtgcttaattacttgcatgatttttttgataagtgaaatattattcggagtatgggatcatgataaggagggtcttgagcaatttactgctactgatggatatgattacagtggtggaagcaatgtgttgaaggtgtaggggtacttcattatggagggtttgttgcgagttcattgacttttgggtgattaccaaaccgggttgaagtgcttgctttctattgacatcagccaattagatctttactccatt

SEQ ID NO: 12495 - DNA, 272 bp, Gossypium hirsutum
  Clone ID: LIB3135-046-Q1-K1-D10
acgctatggatgttccgttctgcggagtctactatctcaacttcgtcagattagtatgggggacaggggacggtatggtaacagagtgtgctagcaatgatattagctttgtttagcgagtcctcagggtagatacgagctggctcgcgatcgccattaacggataactttcccacacataggcacattgcgcacacgacagatccgagagaatgattcaggggggtgtgttttaaaatactaagctgggcttgcttgccaatatcacttat

SEQ ID NO: 12496 - DNA, 471 bp, Gossypium hirsutum
  Clone ID: LIB3135-046-Q1-K1-D11
aattccggggcacgacgccacgcgtacgcccacgcatccgcttgaattgtagtatgatgtccaccatgatttgtatcatccatgtggggagtctgtccagggtgcagatcattcacataatcttaatggcattcttcaactgactgaattgagtgaccccgtatatgctgaagcatatgtgactgtccattactatgatattcgtcttgatgacactgatatcaatcaaaccaatgaaactcttcacaacttgcgcttggacttgtctaccatgtgcgatctcgaaacttgttgagcgtacacataactataccgtcgctcctgcttctagcgagctgataaacgctaacatcaacgtgtcttcaactgagactggtgtcatatttgtcaatatcttttacgagacttcacatgtgctcgaaagaactgatgttgttcttaatgacattcatctcgatatattggactaca

SEQ ID NO: 12497 - DNA, 201 bp, Gossypium hirsutum
  Clone ID: LIB3135-046-Q1-K1-D12
gaccgcacgcgtcacgcgtaccttaagtatatctattggtgatcctttcttatcaaccatcttctttctaaactgggaatgggaacgctccattttttgttccttttacttatcggacggtggattgatttctcaaatgatcctgtggtctgtcggacaattcttcccttttttcctttacttcttgcttcaataactttt

SEQ ID NO: 12498 - DNA, 289 bp, Gossypium hirsutum
  Clone ID: LIB3135-046-Q1-K1-D2
tttactttaaaaacctgaatcttggcttgcttttgcttattagggatgacaaactagccctttcccctgcggatcctctggttttgggggattgcgctttcagttatttggtacttttattatatgagcactactgggcattttgttatgtcataatcttcggggtgattgcctttctatcaaatgacagaataccaaactaaaataaaaaggggagtgcggccgcattataagatgacaatgtacttacgcaagattgcaagactgtggataaactatatgggcactt

SEQ ID NO: 12499 - DNA, 102 bp, Gossypium hirsutum
  Clone ID: LIB3135-046-Q1-K1-D3
aaaaaaaaaaaaataaaaacataaaaattaaaaatgaaaataaagaaaaaaaaaacgaggaaaaggaaaaaaaaaaaataaaggggcgcctgttttaacgct

SEQ ID NO: 12500 - DNA, 303 bp, Gossypium hirsutum
  Clone ID: LIB3135-046-Q1-K1-D4
gtcaatcttaaggcatcgacattacatttccaaaggggaccatgttcgacacacaagttcagtgtacatagttactgctatgacacgcaagtgaacggtgaaccctgttggaccatatgatcttgtaaacaagagcgtatgacctgaatcttatattcttgtgcgaagcgtggccgtggtacacagacttgtttaggcaggcactcacatgaaatgggagctaactgagtaccgtgctagagtgaaccttgaccctcgcttcatataacccgcgtcgcaacaaacgatatagtgcctggagcg

SEQ ID NO: 12501 - DNA, 170 bp, Gossypium hirsutum
  Clone ID: LIB3135-046-Q1-K1-D5
gcgacgcgtgcggtcgacacatttcattaggcatgtgactaatgttggggacccaaattcagggtacaaagttactggcatgccacctagtggcacactgctgacggttgagccaacacagcttgtttttatgagggtaggccagaaatgaaatttacttgtgagagtgg

SEQ ID NO: 12502 - DNA, 418 bp, Gossypium hirsutum
  Clone ID: LIB3135-046-Q1-K1-D7
cccacgcgtccgcccacgcgtccggcggcgaggtgccgattatcatcgaggccacacctatgcaagagggcatgcgggacatgttgtgcacgctgcaactgtgttccaccggggacagccggtaaccaagaaatgtgtccttgctatgctagcttgaccacccacggtggccgacgcaagtgcccttgagtgttaaccgacaatcggaacgaatctttctcttttgatgttgttatgaaattaataaacgtatgcatggtttagttaagaataattctaaaaaaaaaaaaaaaaagtgtcctttgtaaagcacgaatcattttacttaatcactagttttttttagcgatattatatgatgtatgatttcttattttgagtttgaatatataataaataaataatcgaaattttcttt

SEQ ID NO: 12503 - DNA, 412 bp, Gossypium hirsutum
  Clone ID: LIB3135-046-Q1-K1-D8
gaaaaccctgcactgttcgacaatctgttcctcaggttcttcgatccccttttcaactccgatgacgacggagagaaagaagatgcggccaccaggtatatgactctttaactcctattttcttttatttttttacactgaatatggaataagtataaaaaaacgaagcagaagaaagaacgaaaagaaaaaggaaatctgcaatcacctttcaagtttttgatttttctaaatctctttctttctatttaatatttttttttgtctttgtattgatattctgtgtgtgtcaactttacagatgctgaaaaatggctttatatagccgaaaaaatgaaaattacaaaagaaaatgtggtttgctcttttttctatttttctttttttggggtcgatttttgctcttttggtc

SEQ ID NO: 12504 - DNA, 366 bp, Gossypium hirsutum
  Clone ID: LIB3135-046-Q1-K1-D9
tcgtccacgcgtgcgcccacgcgtacgaggacgcgtgggccttaatcatatcatcgaggcgacgaatattaatagactacaccataatctgcgctataggatagagtgcggatccatgtcacatgacctttacgcgaagtgtgattggtgtggatgcctttaaaaatatgagcgcataaaaacaagctaattgaaatcttagagtgtacatatggataaggtgcatgacccagggtctcgctcttagtctcggagataatattactctaaaacaaatcgtatgcgggagatctgtgggatgttgacatcatttgtttaaccaatactggtagtcattctggttttcgcttttgtcagctgctgtct

SEQ ID NO: 12505 - DNA, 419 bp, Gossypium hirsutum
  unsure (1)..(419): unsure at all n locations; Clone ID: LIB3135-046-Q1-K1-E1
gccatgggagccacaaatgcattttgccgattgacaatcggtaatggaccaccccggcaaaccaaggtcgtgaaccacagcactactcccgagtggaaagaaggattcacatgggcttttgatgtgcccccaaagggacaaaaactccatatcatatgcaaaagtaaaaatacttttgggaagacaacattaggaagggtgactattcagatcgacaaagtcgtaacagagggagtatatagtggtttattcagcctgaatcatgatagcaacaaagatgggtcttccagaacgcttgaaatcgagataatttggtccaacaggacagnaaatgatgaaaacatatgaaaggcgtgacatanctcattcttacaagcaccataatgaatcangtgaggacaatatatangagtttggtt

SEQ ID NO: 12506 - DNA, 328 bp, Gossypium hirsutum
  unsure (1)..(328): unsure at all n locations; Clone ID: LIB3135-046-Q1-K1-E11
nccacacatacaaccactcgtcctttaatttcctgtgtaggaaaatgagaagtggggtcgctgatatcctcggcaccataaacccatcgacctgaaaagtcaaccagagaacataagttgccccgtcatataaaatttactttcaagaatcctattagatatcgcatcgtttgcataacactgccccttcatcggcctgcttcaagctctgtaaatttcgggaacgacttcattttattatctctggatgaaaatccctttacacaagatactcgacgtgcctcttttgtaggatcaactgaaagtagtccatgccttcatgccaaac

SEQ ID NO: 12507 - DNA, 417 bp, Gossypium hirsutum
  Clone ID: LIB3135-046-Q1-K1-E2
cccacgcgtccgcccacgcgtccgcccacgcgtccggggagtcggagttggagtaggagtagtaggagtaggagtaggagtaggagtaggagtcgaagcagaagcagaagcaggagctggtcacgtggtcgtagccgcagctacagccgtagtcctggtcgagggcggagccgaagccatagccgtggccgccgcagtcgaagccgtagtcacagctatgagcggaaggatgttgcaaagcgggcatttgattctcctcctggttccaacgaacataacttgcaacagaaggatgttgcgaagcgagcatttgattctcctcctccttccaacgaacagaactttgagcagaaggatgttgcaaagcatgcatctgattcacctggtgcacaaggcaattcagtgcctgaaaataat

SEQ ID NO: 12508 - DNA, 389 bp, Gossypium hirsutum
  Clone ID: LIB3135-046-Q1-K1-E3
cccacgcgtccgggtagatccgaggaagaggaagaaggatataggaagccaagttatggtagatccgaggaagaggcagaaggatataggaagccaagttatggtagatccgaggaagaaggatatggccgcaagaaacatggcgatgacgacagtgatgatgatgatgaagagaagcgtcaccaccaccgctataaggcccaccaccataagcgccatgatgactatgacgactagtcagactggccgttccctctacaaatggaaatctgcagtaatagctattaaataaatgatcgaggcatgccacctttgatcgtttcttctaccatttacgagtgcttattgtgtgtgtgtcagtgtttgatcgtcaataaaatgcccgaaca

SEQ ID NO: 12509 - DNA, 357 bp, Gossypium hirsutum
  Clone ID: LIB3135-046-Q1-K1-E4
cccacgcgtccgagtttatgctggttctccgatcgtgttttctgcaaacagatatcgagttggcgaatcaacccccaaggtcatgctttatggcatctcttgaggggtttcaattcatattttgcaaacacgtttttaatgttctgtcctgctcagcaacggggatgggcgccgaacgtcgcttatcttatgggcattctcccgtatgtgaagactgagaaaccgaagacacaatgacaatcggggggggaactctgaaatataagattcctttccccgctatgggaggtaatcaagaaaagcagtgaacaaagcctcaaggattatttattcattgaagtttgttgtcaggatctc

SEQ ID NO: 12510 - DNA, 336 bp, Gossypium hirsutum
  Clone ID: LIB3135-046-Q1-K1-E5
gaagtcgagccacgagccacgcgacccgtacttgtagatccgtcgaactatgaaaatgacttaggcacccaatctatgggtggtgcgaggaagaggcattaggatatttgctgccaatgcttggtaaatccgacgatgaaggatatggccctatgaaacatcgtgatgactacagcgatgattaatattaagagaatcgtcatcaccaccgctgtatggcccaccaccataagcgccatgaagactatgactactagtcatactggacgttccctctacatattggatatctgcaataataagttattaataaatgatcgaagcatgccaactttg

SEQ ID NO: 12511 - DNA, 316 bp, Gossypium hirsutum
  Clone ID: LIB3135-046-Q1-K1-E6
ccacgcgtccgaaaaactgctcagcaacagtcggacaggtggggaatgttggggtgaaccagaaaagtttgggtagagcctgatctaaatgttggctaggtaagcgtcctgtgtaagaggagtagttatgaaccctgtagaccatccccatgggggtggtgaagggagggctcctattggtagaaaaatacccgcaaccccttggggttatcctgcacttggaagaataagtataaaagggggtacttttagtgataatttgattcttcgtcgactgagtaaatatgatagaatatatctttcttcgtctttacga

SEQ ID NO: 12512 - DNA, 301 bp, Gossypium hirsutum
  Clone ID: LIB3135-046-Q1-K1-E7
gcctttgcaagagctcgctgattttttacactgttgccgactatgtgatcagtgaggatcaaatcaaggctcaaatgaaacggagtgaaagagtttacaaggctgttgaagcttacctcttggctaaccacgcagcctgcaaacaacatatatgttggttgctatgaattctctcgcttgattttaaagaatggcgtgcttcaggtactctactttgtacttttaaaacttaaacacgtgttccggttgtcttaataaaaatggcggcggtaattgatctttaatcatgtttgatgtatga

SEQ ID NO: 12513 - DNA, 314 bp, Gossypium hirsutum
  Clone ID: LIB3135-046-Q1-K1-E8
agccacgagccacgccacccgtcatacattatgctagttcttttataacagtctattgcaaacagatatcggggttggggcatcaaccccccaggtcaatctttattgcatctcttgataggtttcaattcatatttttcaaacacatttttaaagatctgtcacgctaaacaacctggatgggcgcctaaagtctcttatcttataggcattctcccctatgtgaacatttagaaaccgaaaacacaatgacaatcgaggggagaactctcaaatataatttttctttttcccgtttttggaaggaatttaag

SEQ ID NO: 12514 - DNA, 275 bp, Gossypium hirsutum
  Clone ID: LIB3135-046-Q1-K1-E9
tacgtcaccatgcaaacgcaatctgtattctaccaatccttctacattgggtagcgcacgctctattgataatgtacttcccgaaatggactgctcaatatatcgtgtactattttcgaccctctcgtctaatcctatccatatattcgttactactcgcttcatgacactgtttctccatccgcactactacaacccccaacttcttcttctcgaccctttatttttggttgttttcttttactacgactttttcatttaccatacctgataag

SEQ ID NO: 12515 - DNA, 287 bp, Gossypium hirsutum
  Clone ID: LIB3135-046-Q1-K1-F1
ggtcactctcttttgtatgaggttagcatgtgaagggatgtagttccaagatattcgccatgcgagaattaagatttttgttggtaactgtaaactccataatttcctgtagaaatctttggtatcggcctgtaataaataattactaggatccaagctagcttcttgtaatagtttgtaggcacttctgactgtatattctccggagagttcccctttccatacttcttgcaatagtatatgaattttaataaacaaacaaaacacacttggaaaaagattgtaaa

SEQ ID NO: 12516 - DNA, 414 bp, Gossypium hirsutum
  Clone ID: LIB3135-046-Q1-K1-F10
caattaagacggtggcgtagaggaaaatgttcaggaaccagtacgatacagacgttaccacatggagtcctgcggggcggttgttccaagtggaatacgcgatggaagctgtgaagcaaggttcagccgcgatcggacttcgatctaagacccatgtagttttgggttgcgtcaacaaggctaactccgagttgtcttctcaccagaaaaagattttcaaagtcgacgaccacatcggcgttgccatcgccggtctcaccgctgacggccgcgtcctttctcggtatatgagaaacgagtgtattaactacaacttcacgtatgaatcgccacttcctgttggcagacttgtcgtccaacttgccgataaagctcaagtctgcacccaacgctcttggaaacgaccttatgggg

SEQ ID NO: 12517 - DNA, 373 bp, Gossypium hirsutum
  Clone ID: LIB3135-046-Q1-K1-F11
gcttccaagccaatgcgtatgctttaaaagttagacttggaacaacaataacccgtatctgtactttattaatgggttaggaattcgtagtggggcgttcttttcatagatcctttgagcgagaaaggtgctgcaccttaccggggcctttgaccctcaaggtcatccggagccactttaaagcagtttattggccgtagcaacgcaatgttcagtggtggggcaaagcactagcgagaagcttcccttgggatttttttcccaggcaagaaagaagtgaacggaaggaaaggaaggccgtcgtgagagctgttagtggtttagtaaggaaggtcattaggctcagtccgttgcttgttccctcactgcacac

SEQ ID NO: 12518 - DNA, 376 bp, Gossypium hirsutum
  Clone ID: LIB3135-046-Q1-K1-F12
gcttccaagccaatgcgtatgctttaaaagttagacttggaacaacaataaccggtatgtgtactttattaatgggttaggaattcgtagtggggcgttcttttcatagatcctttgagcgagaaaggtgctgcaccttaccggggcctttgaccctaaaggtcatccggagccactttaaagcagtttattggccgtagcaacgcaatgttcagtggtggggcaaagcactagcgagaagcttcccttgggatttttttcccaggcaagaaagaagtgaacggaaggaaaggaaggccgtcgtgagagctgttagtggtttagtaaggaaggtcattaggctcagtccgttgcttgtttcctcactgcacacaaa

SEQ ID NO: 12519 - DNA, 417 bp, Gossypium hirsutum
  unsure (1)..(417): unsure at all n locations; Clone ID: LIB3135-046-Q1-K1-F2
cccacgcgtccgcccacgcgtccgcccacgcgtccgcccacgcgtccgattcattcactcatccctttcttctcttctttcaactcaaagaaaactcccaagtaatattagaatcatgggtgttgtcacttataactatgagtctacctctccagtcgcccctgccaggcttttcaaagctttttctcttgaagctgacaaggtttggcccaaggctgctcctcaggcagtcaagagcgttgaggttgaagctaatcctggccctggaagtatcgtaaagatcaactttgctgaaggccttccattccaatatatgaagcaccagattggaggacatgacgacaagaatttgtcatacagttatagtttgatcgaaggtggacctttggggacaagctngagaaatcagctatgaca

SEQ ID NO: 12520 - DNA, 385 bp, Gossypium hirsutum
  Clone ID: LIB3135-046-Q1-K1-F3
gagcaacaaaacagataaacattggatttccaagatgcaaatccagaaggaagaacaggcacgttccagtcttcctggtgaaagcacaatccgggtgataattcatgggcatcatccaagccaaggaacgtctagtgacagattgggaaagctcgtgtatttgcctgactcacttcaagacctcttcaatctagcagagaagaaatttggaaagagagggagcactattcttatggctgatggctcaaaagttgaagaactgaatgttctgagagagaatgatcacttattcgttgtttaaagattaaagtaacttttggcttggtatccatacattgatctgcttaagagatgatgctaaatgtgtaataagttatgcgtcaat

SEQ ID NO: 12521 - DNA, 419 bp, Gossypium hirsutum
  Clone ID: LIB3135-046-Q1-K1-F4
cccacgcgtccggttgattttctgcagcataaaacaatgcaaatgatgtatgacataatttacaaggcattggtggaaactggacttgagaatagatatgagcctcatgattttttaaatttcttctgtcttggcaatcgagaagtaggagattctttggttgctagagatgccactgcatcaagtactcctcaggtaaatagaccttttcagctctctttaatattccagtcttgctcatccatgagaaaatatgaaccaaatgttggtaacacaggcacttgctaagaagaaccggcgctttatgatttacatccactctaaaggtatgatagtggatgatgagtatgtcataataggatccgcttacataaaccagcgctcaatggaaggcactagagacactgaaatagcaatgg

SEQ ID NO: 12522 - DNA, 397 bp, Gossypium hirsutum
  Clone ID: LIB3135-046-Q1-K1-F5
cgcataccaaaccctagcgcctttatttagtgttgaaaatctcgagcacaagggcggccggtgaactcgcctgtacttacgccgcgttgattctccatgacgatggaatctcaatcaccggcgagaagattgctacattggtgaaggcagcgaacttgagcgtcgaatcttactggccaagccttttcgccaagctcctcgagaaagtcaacgtcgatgatctcatcaccagcgttggctccggtggaggtgctgcccctgttgccgatgatgctgcttatggtgcagctagcggtggtgctgctgcagctgccccggctgttgaggagaaaaaggaataagagaaggaagagagtgatgattacatgggattcagcttgtttgactagacacaatt

SEQ ID NO: 12523 - DNA, 414 bp, Gossypium hirsutum
  Clone ID: LIB3135-046-Q1-K1-F6
attagaggaaaacaacttctttttgaaaacagactgacttagttcaacaaaaggtgtttaccaacgcaacgaaaagagctttttccaccagtcttttaggccgggcatcctctttctatccatttcatttcaggaagaggaagaaaggcgaagttcttccatccagcaaggaagactagccaagtcgtacaccccattcttcaacccccccctttttttgccattgtcactactggtacctgaccccgtcggctcaacatttttgcaaacaccgacccttactcaatagggcaatgaaaagaggagaacgaggacagctgactaccactaaaagtcagactacgagtacacattgtatgattgaaaactgccgctgcgtactatccggtgcttgcaggtctgactggagccttc

SEQ ID NO: 12524 - DNA, 282 bp, Gossypium hirsutum
  Clone ID: LIB3135-046-Q1-K1-F7
attataggaaaacaacttctttttgaaaacagactgacttatttcaacaaagggtcggtaccaacgcaacgaaaagagctttttccaccagtcttttatgccgggcatcctctttctatccattttatttcaggaagaggacgaaagggcgagttcttccattcaggaaggaagacttgcccagtcgtacaccccattctttaacccccccctttttttggcattggcactacttggacctgaccccgttggcttaacattttttggaacaccgacccttac

SEQ ID NO: 12525 - DNA, 58 bp, Gossypium hirsutum
  Clone ID: LIB3135-046-Q1-K1-F8
cccacgcgtccgtaaaaaaaattaaaaaaaaaaaaaaaaaaaaataaaaaagaaagag

SEQ ID NO: 12526 - DNA, 291 bp, Gossypium hirsutum
  Clone ID: LIB3135-046-Q1-K1-F9
aagtaaaataatcttgctaacaagctaaactaaaatgccttgccaaagagaaagcggagtgtggtcgaataaaatgttagcatactcaaattttttttccagtagacaagtttgtttatgtgcaggtgagcaatggtgcaattttactgctttgtatcgacagttccattgcatttctcttttagcatattccaggatgccttctctcgatgtttaacatgggcttagacgatgtaaggattgatgtcatttatatttgtaaggatggtgaaatctttatatgattcatga

SEQ ID NO: 12527 - DNA, 378 bp, Gossypium hirsutum
  Clone ID: LIB3135-046-Q1-K1-G11
gcctggtcggcgctcctgcttgcggtgatgttatgaagttgcaaatcaaaatcgacgaggagtccggcaaaatcgttgatgcttgctttaaaaccttcggttgtggctcggccattgcctcttcttctgttgctactgaatgggtgaaagggaaaagcatggacgaagtgcttactattaaaaacacggagatcgcgaaacatctatcacttccaccagttaagctgcactgcagtatgcttgctgaagatgcaattaaggcagctgtgaaagatgctgaagctaaacgtggcaaaatgaatggtagttccaaggctgctgatgcctaatgtctgtggatttgctaaggaaagaactctggaaactttgattatcatc

SEQ ID NO: 12528 - DNA, 406 bp, Gossypium hirsutum
  Clone ID: LIB3135-046-Q1-K1-G12
gaccaatcccctcgagtttatgaacaagcttttagagtctatgcgggtaacctggcatggggtgtggataatactcgattggaacaaattttcagtgaacatggtaaagtattggaggctcgtgtagtctatgacagggagaccggccgttcgcgcggtttctgttttgtgactatgtcctcggagactgaactgaatgatgccattgctgctctcgatggacagagtctggatggaagagcactaagagtaaatgttgcagagcaaaaaccaaggcgaagcccctcttgagctgaaatgattatagattaagactatatgttgctgatggctttttatttcatatttgccctttcctatttgtatttcttttcattttattaacagttgcgaagctttgtaaata

SEQ ID NO: 12529 - DNA, 169 bp, Gossypium hirsutum
  Clone ID: LIB3135-046-Q1-K1-G2
agtatattagttttggtttgcgtgatttgaccccacactcctccatgcatgccctatttgaagcagtttaccgtagccatgttaagtcaagctggtatttttcaatttgtttagtgggttcacatgtaaacctgatttatcttagttgtcatcttacttttctttgatt

SEQ ID NO: 12530 - DNA, 232 bp, Gossypium hirsutum
  unsure (1)..(232): unsure at all n locations; Clone ID: LIB3135-046-Q1-K1-G3
gttatagatcgcgagctgccgcccttgctttttttcttttttttggctaggcntggggcacagaagaggccaaacaaattagaataaaataaatcattaaatgggtttttgaggtgataataaaccacaaccatatgccattgatgcctcaattgttcctttaatgaaacgtctcaaaagatatctttaccaacttcttgttatagaatctgatgaaaaattggtcctactg

SEQ ID NO: 12531 - DNA, 367 bp, Gossypium hirsutum
  Clone ID: LIB3135-046-Q1-K1-G4
cttgcatgtaaccactgctcctcctacatgactggccaaaccctccatccaaatggtggtaccgttgtgaatggttgatatgcgccatacagggtttactcgagcttctgcttttcgttcctttttatgtttatataaatacggtgtgggtgttttgagtcttgctgcatgcaagagtggtaatagtaaacagtcgtatctatttccaactgtatgtataactctaggcaaggcaatctcaaggatactaggaggagcctaagcccaactagtgcggtttgtgtaaaaaacaactatgaaactttgggtcttttataagaagcaagaaagtataataatggaacaaagcaggagccatctttacgac

SEQ ID NO: 12532 - DNA, 392 bp, Gossypium hirsutum
  Clone ID: LIB3135-046-Q1-K1-G5
gatcaattcacgaagaacagttattttaatagttcatggcatattgctcgaagctgctttttgatgctttttggtggaacactcgcattctttatggttttaacagagtacatccttgtttctataacaagcgcagttacagtgacaatagctggggttgtgaaggaggctgtcaccatattggttgccgtattttacttgcatgatgagtttacgtggttaaaaggtgctggactcctcactatcatggttggtgtcagtttattcaactggtacaaatacctaaagctgcagaagggcaaactagaagaagatgaagcggcaatagcgctcacagctaatcatgccgctaagtatgtcatccttgacgagatggaggattaagatgatgt

SEQ ID NO: 12533 - DNA, 355 bp, Gossypium hirsutum
  Clone ID: LIB3135-046-Q1-K1-G6
tttgcaagagctcaatgaaattctacactgttggcgataatgttatcactgaagacgaaatcaaggctctcattaaagggagtgaaggagtttacaagcctgttgaagcttacctcttggctaatcccgaagcctgcaactaggatataagttgctttaaattcttatgcttgcttttaaagaggggtttgattttaatgttgtgcttttgatattttctttttcatcttaaaacctatattgtcttctggttgttcagtaagaatgatggtggtggtgatcgaactttgatcatctttgatatataatgaaataaataaatatataaactggcaaacaaaaaaagaaccatctt

SEQ ID NO: 12534 - DNA, 233 bp, Gossypium hirsutum
  Clone ID: LIB3135-046-Q1-K1-G7
cttttaacaacatgggggagaaaatcagtactagacaaagtttgtagcagcagcatgatggaggaacaagtattaaggtaaataccaccttttacaccattggtgacattcgagtactcaaacctaatgctgcaaatcaaggaagcatctgataagcgagcccttattttgaaagctattgagaattatgtgttgagaaataccgatagttaatttgtcttactgaaaaactg

SEQ ID NO: 12535 - DNA, 319 bp, Gossypium hirsutum
  unsure (1)..(319): unsure at all n locations; Clone ID: LIB3135-046-Q1-K1-G8
cccacgcgtncgatggaatgttacttatttgaatgaaactataaacaacatttcttacacgtatgtcaactaactcctcaataaatgtactataaaccacatatcgacattttatttgatttttatactttagatgctattagtattaagcatcggcagaagcagaagattgctgactgagatgttgacgtggcattgggagtcaccaatctggttggtgaccccagttgtgtacgaggcttaccgggtgctacagctaatgatgggattgaaactgggagatgcactcagtgcaccatcatggatgatgcacactatc

SEQ ID NO: 12536 - DNA, 257 bp, Gossypium hirsutum
  Clone ID: LIB3135-046-Q1-K1-G9
ggttgaggcacacaatttcaacccaccaatttacgccttgaccctacatttgatgtttgcttccaagatggggttccctcctgatgaaaatttgatcaaggaaagcgaggaaaagctaggcaaagttctggatatttatgaggagaggctgtcaaagaacaagtacttggccggtgatttcttcagccttgctgatctgagccacctaccatttactcaatacttggtgggtcaaaagggaagggaaatacatgata

SEQ ID NO: 12537 - DNA, 389 bp, Gossypium hirsutum
  unsure (1)..(389): unsure at all n locations; Clone ID: LIB3135-046-Q1-K1-H1
gtgatttctcagctggtaaactctaatgctattgggaaggaagccaatgttaataattcagaacagggcacttcattttcagattcagagctggatcaggtgctgcattttagctaacaaatgcttaatatctggatacctactaatgtaggactcttaaccatttctttttttttaaaatgttatgacagaataccaactcagatgaaaaggggaatgaaaccacatcatcagatgacaatgaagtaaaccaagataatatgactgtggaaaaacttatggacacttatgaggtttgcatatccggcttgcgaaagacccaaacacgtcgacgtatagcttccttgaagagaatctcacctgcanacttcactaaggaggcacgtaat

SEQ ID NO: 12538 - DNA, 447 bp, Gossypium hirsutum
  Clone ID: LIB3135-046-Q1-K1-H10
cttaaccatttcccaaatctcctccctcctcttctttagcgtccttttcatttgcgctcatgcagcgcgctttgaaatccgcaatgagtgctcctacaccgtctgggcagcagcctctcctggtggtggccgtcgcctagaccctcggcaaagttggaccatcgatgtgcctgctggcactgctatggctcgtatttggggtcgaaccaattgcaatttcgatgccagtggtaggggtcattgccaaaccggtgattgtggtggactccttcaatgcaaaggttggggtgtacctccaaacaccctggctgaatatgcacttaaccaatttggaaacatggatttctacgacatttccttagttgatgggtttaacatccccatggtgtttgtccaactaatggcggttgtcacaacattcggtgcactgcagacatcaacggacaa

SEQ ID NO: 12539 - DNA, 162 bp, Gossypium hirsutum
  Clone ID: LIB3135-046-Q1-K1-H11
gcaaattcttctctcttcaatgcatctgctttagcagaaaaaatccagacattgggccatgttgttattgcctcacctgaaaaaaccattttttcatcactaacaacacctttctatgaaataatgattaaaatgcaattacacccaattacggtcctacca

SEQ ID NO: 12540 - DNA, 345 bp, Gossypium hirsutum
  Clone ID: LIB3135-046-Q1-K1-H2
ccagttctaaaatagtttatgatgaatacaaccatgaacgttttcctcctggtgaccccagcaagcgggcatttgcctattttgtcctgacaggtggtaggtttgtgtacgcatctgttatccgtctgctcatcctcaagcttgtcctgagcatgtcagccagtaaggatgttcttgcactggcttctctcgaggttgatctctccagcattgaacctggcagcaccgtaactgttaaatggcgtggaaagccagtcttcatcacgcgccgaactgacgaggatatcaagttagcgaacagagttgatctagggtctcttcgtgatccacaggaggatgcagcaa

SEQ ID NO: 12541 - DNA, 374 bp, Gossypium hirsutum
  Clone ID: LIB3135-046-Q1-K1-H3
ataactcttcgaccattcaagctagaagacgccgatgatttcctcttgtttgcaggcgacgatcaagtcaccaattaccttcgatggcaaacactgagctcaaagcaagaagctctggatcacatcaaggatgtatgtattccccatccatggcgtcgatccatatgcaacgacaactgttcgatcggcttcatttcgatctttccgttctccggggaagaagacaggttcaaggctaatattggattcggtgttgcagtcaagtattggggacatgggattgcaacgaaagcagtgaaaatggcagtgcctcagttctttgttgacttcccagatgtggtaaggcttgaagcatttattgatgcacaaaattt

SEQ ID NO: 12542 - DNA, 304 bp, Gossypium hirsutum
  Clone ID: LIB3135-046-Q1-K1-H4
catttttcttctctggagacttcttcttcacttcccccatccagccgagcttgatccatttgcataatctggaactcccctatccagtctccttcaaggatcaaatgtcgccatcccctcctgattcccatttgaacgcctttccggcaggcaattgcttcagcagcaaaggctgatggaataccaaaatgaatctctgaatatgaaaaaagaatagtaccattcgaatctctggccacaatacccacacccgactgattctttactttatcgtaagcaccatcaaagttgatcttcatgaaac

SEQ ID NO: 12543 - DNA, 407 bp, Gossypium hirsutum
  Clone ID: LIB3135-046-Q1-K1-H5
gccgaagatggatactctggtgtcgaagtcagagttactcccatgcgtactgagaggattatcagagccactcgtacccaaaatgttctgggcgagaaagggaggaggattagggaactgacctctgttgttcaaaagcgattcaagttccctgaaaatagcgtggagctttacgctgagaaggtcaataacagaggcctttgtgccattgctcaggctgagtcccttcgctataagctcctcggaggtctcgccgtccgtagggcctgctatggtgtgcttagatttgtcatggagagtggagccaagggttgcgatgttattgtagtggaaagctaagggcacaacgtgccaaatccatgaaagttcgaagacggatacatgattttcttctggtcacccagtga

SEQ ID NO: 12544 - DNA, 303 bp, Gossypium hirsutum
  Clone ID: LIB3135-046-Q1-K1-H6
aacatcccaatttcccttagcttgctcctcaacgtttgttcaaggaacgttcctactggcttccaatgctaaatcatcactgttccctacattttttatcgtctttcttatggtgtttgtgtttgattttagaaagttatgatttctattatttactgtgtgttttcatttgtaactttgttgtttaaatttccttgtggggattgatatagaataagtctaatacttttcttcagatgtttttcttagggaactttagtatctttaagggacatgaaaagacttgtattattcagcttgttt

SEQ ID NO: 12545 - DNA, 100 bp, Gossypium hirsutum
  Clone ID: LIB3135-046-Q1-K1-H7
cagaaatatgaatattggatggttttataaaaaaaaacaaacaaaaaaaataaaaaaggaaaaaataaaacataataaaaaaatatttcaaacgcttcta

SEQ ID NO: 12546 - DNA, 271 bp, Gossypium hirsutum
  Clone ID: LIB3135-046-Q1-K1-H8
ccatttttcttctttggagacttcttttttactttccccatccaacccaacttgatggattttcttaaatttgaacttccctatccaggtttctttaaagatcaaaaggcgcccttcccttctgatttccatttgaaccccctttccgccagccatttctttaacagcaaaagcttatggaatacccaaatgaatctcttaattttaaaaaagaatattacccttcgaattttttgccccaaatcccacacccgactggatccttacttta

SEQ ID NO: 12547 - DNA, 342 bp, Gossypium hirsutum
  Clone ID: LIB3135-046-Q1-K1-H9
gccagacgtaaactcattcgtactaacacacatacaacgactcgtaagcattactgataggacttaaccccattcccatcaacacatactaatcacatggctacacattaattcaccccatcaatccgcatacgttacaacaaaaccatcaaacacacgcacaaccaaatctatatcatataattccaaggctaagcgtacaaaaagtattacacgtcattccgccaaaaatgccacgaatgccgttacttacaacaaatttataagatttcactttacgctttatatgtaatcagtaacttatctttgtgaatacatggttgctaattcggtgcttgtgtt

SEQ ID NO: 12548 - DNA, 422 bp, Gossypium hirsutum
  Clone ID: LIB3135-047-Q1-K1-A1
gtttgtgagagcttctaatacaccagctataaagatgtatgagaagcttggatatgtaatatacagaagggtgctacgctattattccggagaggaagatgggctagatatgaggaaagcattatctagagatgttgaaaagaaatcaatcataccccttaaacggccagtgacacctgacgaattggagtatgattagatccacttcctatggaacttctccctgctattttttattgtgttgcttcagaacattttcatgtttttgcagagatgggatatcagagagctttaggtatgccaaacatgtggacaagaaaatgttcttagtaatgaacacatttaatgttttcagtgtggttgtgacctttatctttcattgtaccttggatttgtataactcttggattatgcttttatac

SEQ ID NO: 12549 - DNA, 444 bp, Gossypium hirsutum
  unsure (1)..(444): unsure at all n locations; Clone ID: LIB3135-047-Q1-K1-A12
cccacgcgtccgtgccttatttttagcaattacttcccttgttttaggctcaacaatagccagtgatgaatttgatcctgtgcttgacatctcaggtcaagagctccgaacaggcattgactactacattttgccggtaatccgcggtagaggtggtggcctcactctagccagcactggcaacgagacctgcccacttgatgttgttcaagagcagcaggaggtgtcaaacggtctcccattaacattttcacctgtgaatgtcactcaaggcgttgtacgtgtatccactgatctaaacatcaagttctctgctgcttcaatttgtgtccagaccactctctggacactgcacttcgatgaatcggtacaaaagtatatagtaacaaccggtggagttgaaggtaacccanggcgtgaaactctgagcaactggtttaaaat

SEQ ID NO: 12550 - DNA, 280 bp, Gossypium hirsutum
  Clone ID: LIB3135-047-Q1-K1-A2
cggacgcgtgggtggaaatgttgtttacttggtggcagataagaaaagtaacgaattggctttttccttggctattgctggcgtttatagggagaaaatgtttaaagcttggtagttagatttttgttttgtcgctctactgatgttgttatggtggtatgcgactttgttatctgatgtaattttgtttttattttgctattttgtttgtcttttgacaacagcacagttcgaatgttgcaaaaagaaaaagtatgaagtataactatctggttatttc

SEQ ID NO: 12551 - DNA, 407 bp, Gossypium hirsutum
  Clone ID: LIB3135-047-Q1-K1-A3
cgcctacaagaacgtgatcggcgctcgccgtgcctcttggcggatcgtttcctccatcgagcagaaagaggaaggacgtggcaacgccgaccacgtctctgtcatccgtgagtacagggccaagatcgaggccgaattgtccgagatttgcgccggaattttgaagcttctcgacgagaagctcgttccggccgccgggaccggtgattccaaggtcttttacctgaagatgaagggagattaccataggtacttggctgagttcaagactggcgatgacaggaaagcggctgccgagaatacgctcactgcgtataaatctgctcaggacattgcgaatgcagagctggccccaactcatcctattcgattaggattggctctcaacttttccgtcttctactatg

SEQ ID NO: 12552 - DNA, 411 bp, Gossypium hirsutum
  Clone ID: LIB3135-047-Q1-K1-A4
cccacgcgtccgcccacgcgtccgctaaaaaccctttcactaaaaattgaagatgcagtcaatgaaggatgctgctgcctctgctaaggccggcatggagaaggccaaggcctccatgcaggaaaaggtggaccaaatgaagacaagggaccctaatgagaaagagatggcgagggaaaggaaagaagagagacaagaagatgcagagctgaggaaacaagaggcccgccatcataacgccacggctggccatgctggtggtggtggtattggtggtactggctacaccacagctgggtacaacagaggggatactggtggctatggcggtaccggtggacatgacaaccgtgggtaccccaccgcaggtagtgggtatgatacaggcaggcaagatgacctcagcagtat

SEQ ID NO: 12553 - DNA, 236 bp, Gossypium hirsutum
  Clone ID: LIB3135-047-Q1-K1-A5
gacccacgcgtacggagtgactttactttacctaaccacaaccttttcttttattagatgtgatttattgtaaacgcgggggtttattttacgagttcattgtccccttcacacttgaagaaaaaataacggataaaattcgttgaaacgtttccattcttgtatctatacaatgtaaggaatagtaaaaggaagcatttaaagttcgtaaaaaaatcgaaaaaaatagggttggt

SEQ ID NO: 12554 - DNA, 382 bp, Gossypium hirsutum
  Clone ID: LIB3135-047-Q1-K1-A7
tgaagttacatataatgtttccataatcaattaggcgacactaaaccctctctgccggcctgctcccttactccattgtggtaagtaaaatggcgacggttccaggacagttgatttgggagatcgtgaagagaaacaactgtttcttggtgaaggagttcggtcgaggcaccgccggcattcagttcagtaaggagagcaacaatctctacaatcttaactcttacaagcactctggtcttgctaacaagaagactgtaactgttcagcctggtgggaaggatcaatcagtgttacttgccaccacaaagactaagaagcagaacaaacctgcaagtgtgcttcataaatcttgtatgagaaaagagtttcctaggatggc

SEQ ID NO: 12555 - DNA, 424 bp, Gossypium hirsutum
  Clone ID: LIB3135-047-Q1-K1-A8
ctcaactttgcctaatcgatcacaaggagcaagtaatggccattcagagtcatcaccggagagttcaacttgtggaagagatatatcatattcaaggtatacgccctcaatgccccaaaggcagctgttcggacaggtgcaaatcgaccgctcccttggatctgacaatatttgctccgaacatggggatggattcagctgttctaactttgttgacatagactggctttcatctgccggaaattcatgcgatggcgaaccattcgagaggtcactagtgctcacaagctctctagttgatggcccgtcatctgaaaatgttgtcaatggaatattaggcgaaacaaccccatccacctgtgaaaacggatcgagtatgaaagaaacacagcagaaaggaaccaagctatcctttgctgatatg

SEQ ID NO: 12556 - DNA, 398 bp, Gossypium hirsutum
  Clone ID: LIB3135-047-Q1-K1-B1
cccacgcgtccgagcaaatataccctgaaaaccctttcactaaatattgaagatgcagtcaatgaaggatgctgctgcctctgctaaggccggcatggagaaggccaaggcctccatgcaggaaaaggtggaccaaatgaagacaagagaccctaatgagaaagagatggcgagggaaaggaaagaagagagacaagaagatgcagagctgaggaaacaagaggcccgccatcataacgccacagctggccatgctggtggtggtggtattggtggcactggctacaccacagctgggtacaacataggcgacactggtggctatggcggtaccggtggacatgacaacccggggtaccccaccgcaggtagtgggtatgatacaagcaggcaagatg

SEQ ID NO: 12557 - DNA, 427 bp, Gossypium hirsutum
  Clone ID: LIB3135-047-Q1-K1-B10
gctttcgccaagaagacgccgaggcttttcttgctcaggttcgattacggagaagggagctgagaagtaatgctaaagtcgtgccgattacacttgatcaggtatactcactgaaggttgaaggaattgcatttcgttttctaccggatccaattcaaataaagaatgcactagagctgaaatctggtgacatcaaaagtgggttcgatggagttccagttttccagtctgacctccttgttgtgaggaagaaaaacaagcgttactgcccaatatatttcaataaggaagatattgaaaaagaactttcaaaggtttcaagggcatcgagaggacctggtgtttctcagcaaatcatgtattcatttcatccaatatgttggagcaggttggaagcttggaagacgttcttgagaaaatggagatg

SEQ ID NO: 12558 - DNA, 321 bp, Gossypium hirsutum
  Clone ID: LIB3135-047-Q1-K1-B12
ggggggggaggggggagggggggggggggggggaagggggggggggggggggggggggggggggagggggggaggggagggggaggggagagggagggaggagggggggagggaggaggggggggagggggggggggggagagggagaagggggggggagggggaggaggggagggggggggaggggggggggggagggggggggggggaggggggaggggggggggggggggggaggggggggagaagggaggggagggggggggggggggaggggggggggagggggggagggaggggggggagggagggagggggggg

SEQ ID NO: 12559 - DNA, 116 bp, Gossypium hirsutum
  Clone ID: LIB3135-047-Q1-K1-B3
ctttttatgtgttgtgtttcgattggtatcttatagtcgcgtgatttctcaccaataatcaggtattagtattgtttccaccacgcactacgttgcttcaattaatttttttaatc

SEQ ID NO: 12560 - DNA, 444 bp, Gossypium hirsutum
  Clone ID: LIB3135-047-Q1-K1-B4
gtgacttcaccgccggaaacggtaccggaggtgaatccatctacggatccaagttcgctgacgggggcttcatcaagaagcacactggtcccggtattctctcaatggctaacgctggtcccggaactaacggatctcagttcttcatttgcacggctaagactgagtggctcgacggaaagcacgttgtgtttggacaagttgttgaaggcatggatgtggtgaaagccattgagaaagttgggtctagcagtggaagaacttccaagcccgttgttgttgctgactgcggacagctctcttagagaagaaaaagagaactatgtgttaagttgggatgttgtctaatgtctagaatatttaatgtctgtcatttagactcttttatggtgctgtttttatcgtcactgcgtttggggggttttcaggaactttgctttatgt

SEQ ID NO: 12561 - DNA, 315 bp, Gossypium hirsutum
  unsure (1)..(315): unsure at all n locations; Clone ID: LIB3135-047-Q1-K1-B5
ctctggagactatgagaaaatgctgcttgcgttgattggagctggagacgtctgagctgctttcctatattgagttgttggtatgaaaatttagtttgcaatttgaggtgtgagttatgtttgtttggttgggttgtgtgaacatggcttttgtatgccgctgcttccgtgttagaacgttcaaagatgatgtgtttgtggatatatttcccaataatacgagagataagtgttgctgcggttnaaaaaataaaaaaatctagtatttctttttaatttaattttatattattaatattattataaaaatttatg

SEQ ID NO: 12562 - DNA, 417 bp, Gossypium hirsutum
  Clone ID: LIB3135-047-Q1-K1-B7
cggacgcgtgggcggacgcgtgggcggacgcgtgggcggacgcgtgggaaaaaactggagacctttaaaagctcttcttctaaaaccctactcccacttcccaaatatcaaaagcgatttgttttctcttcttattcaaatggctccttctttatcattggcacttcctttgcaatccaagaagatttcatgcacaaggcagcagctttccaatatcatatatgtcgtgtttctaattacacttcttgctggctctagttttgccactaggcccggcaaaaccataatttgtggacgatacagtttccatgaccgtgttcccgagaaagttctgagacgggcttttcgattccaaaggacaggatgtttaaacctcttttccccaaaagggattcccctatacccacccttttgggt

SEQ ID NO: 12563 - DNA, 437 bp, Gossypium hirsutum
  Clone ID: LIB3135-047-Q1-K1-B8
cccacgcgtccgttcagaacaatggatgcattatcgtatgcttccccaggacttgagggaacgggtgaggcgttatgaccaatacaagtggttggaaacacgtggtgttgatgaagagaacttggtccagagcctcccaaaggatctgaggagagatattaagaggcacctctgtctggctttggttagaagggttcctctgtttgagagtatggatgagagattgcttgatgccatttgtgaacggctgaaaccatgcctgtttactgagagcacctacatagtccgagagggggatcctgttgatgagatgctattcattattcgtggccgtcttgagagtgttacaacagattgtggaaggagtgtgtttttcaaccgtaatttgctgaaagaaggagatttttgtggagaggaacttttactttggcattgga

SEQ ID NO: 12564 - DNA, 400 bp, Gossypium hirsutum
  Clone ID: LIB3135-047-Q1-K1-B9
aaataaacataataaatatatataattataaataaaaaaaaaaaaaaaaaaaaaaaaccgtgggattaaattaaaaaggtcagctcctctatataaaaccattcttacatacccaaccaaactacaaaatttcctctattattttctcaccttaaaaaaaactctctgtctcttttttaacaactcctttacttttaaaacccttcctttactcatcctatttttttttatatccacatatcccttttcccctctgcttatattatccattaggcccttacaaatctccctttctatcattttcccttcctttttactttatatttacccccccttcttcttctctttttcctcttccttctttttttttccctttccactacttactgttatccttttt

SEQ ID NO: 12565 - DNA, 255 bp, Gossypium hirsutum
  Clone ID: LIB3135-047-Q1-K1-C1
gccacgcgtacagacacatattcattctggaccctgtctctaaagatcgtagaagcaatggaggaagggtgctgatgactttgctaagggcgtcatggggaaagatatcgtctgcatgcaaggaaaggtggaccaaatgaagacaagagacccttatgtgatagatatggcgagggaaacgaaacgaagagagacagaagatgcactgctgatggaacaagaggcccaccatcatatcgcctcaacttaccatgc

SEQ ID NO: 12566 - DNA, 415 bp, Gossypium hirsutum
  Clone ID: LIB3135-047-Q1-K1-C10
cccacgcgtccgcccacgcgtccgcccacgcgtccgggtggacccacaaaggaaaagggcggggatgggattacattagagatgggtctgcattatacaaagatatgaaccgtttagaggcctacaacaaagggcttgcaacatgggctaattgggtcgacaccaatgtcgatcaaaccaagaccaaggtcttcttccagggaatttcccctacccactacgagggtagggagtggaaccaaccaaaaaagagttgttatggagaacaagagccactatccggtaccacataccaagcaggggctccaccagctgcttccattgtgaacaaaatattggggtcgatgaacaaaccgggttacttgcttgatattacgacgttttcacaggtgagaaaaagagctcaatctttgac

SEQ ID NO: 12567 - DNA, 354 bp, Gossypium hirsutum
  Clone ID: LIB3135-047-Q1-K1-C11
cactaacataccacacaacagccttttgattagcctctttctatttgtcaaaaatgggagacgtcagcagtttctgcaacttctcttctgcttttcatcttcggtttttgcttgcgaggcgcctttggtgattatgggggaggatggcaaggtggccatgctacattctatgggggcggtgatgcatttgtcacaatgggaggcgcttgtggatatggtaacttatatagccaaggttatgggaccaacactgcagcacttatcactgctttgatcaacaatggccttaactgtggttcttgttatgaaatgaggtgtgttagcgacctccaatggtgcctgcctggatccatt

SEQ ID NO: 12568 - DNA, 328 bp, Gossypium hirsutum
  Clone ID: LIB3135-047-Q1-K1-C12
cccacgcgtacggaaagatgtcatcgtgttatcacgcttttgcagaatggtgctgggggggtgaattgttcacagccatgcttctgccaagccccattcggaggcaccaaatggagtggctttgggcgtgaactaggggaatggggacttgaaagttacttgagtgtaaaacaggtaacagagtatgtctcacatgaacaatgggcgtggtaccatcctccaaagcattgaacttcaacatggaaatacaaataatatttactgctctaccaaaaataacggtgattaagtgtgctgagagccaatttgatcttgagtatgtatgttt

SEQ ID NO: 12569 - DNA, 394 bp, Gossypium hirsutum
  Clone ID: LIB3135-047-Q1-K1-C2
aatacaccgttgcgacgacgaatggtcgcgttgctgcgtttccggtgaaaatgcccatcagatggccactaatggaaaggcagggaacatactatggcacacaaggtcagctgataaaggtcatcgcctggagttactttagcaaaagggttgtatcatatggattacgggtctcagtggttcaagaaagagcacattggcatgcgcgctgcgccatgccttgaattcaaagggaaagttaactcacatccttgatggtgatcatgttcggcatggcctaaaccgcgaccttacttttaaagctgaagatcgggcatagaacattcgaatgattggagaggtggcaaagctcttcgttgatgctggcatcatctgcattgtcagtgtgatatct

SEQ ID NO: 12570 - DNA, 343 bp, Gossypium hirsutum
  Clone ID: LIB3135-047-Q1-K1-C3
ctcacggcagctcccatggtcattcaggagtaaccaatagaggaggaatcggtaaccgcaatgctgttccaggattgggagtatccccaattctgggaaatgcaggtcctaggataacaagttctatgggaaacatggtaggtgggggcaacatcgggaggacattaagctctggtggagggttatctgtgcctggtcttgcatctcgtctgaatttaagtggcaatagtggatctgcaagtttaactgtgcaaggacagaatcggttgataagtggtgtgctttctcaaggatcttctcaggtactttcaatgttaggcaattcttatccaactgctggggg

SEQ ID NO: 12571 - DNA, 396 bp, Gossypium hirsutum
  Clone ID: LIB3135-047-Q1-K1-C4
cacacacttgcggagcacactgatgcggctgttattatagacaatgaagctatgtatgacggttgcaggcgctcatttgacattgagcgacccacttacaccaatcttaaccgactggtttcccaggtgatctcctctttgactgcttcacttaagttcgatggtgccttgaacgtggatgtaacagaattccagaccaacttggtcccttacccaagaatacacttcatgctttcttcatacgctccagtcatctccgctgagaaggcttaccatgagcagctatcagttgctgaaatcaccaatagtgcctttgagccctcatctatgatggccaagtgtgatcctcgccatggcaagtatatggcttgcttgttgatgtaccgcggtgatgtt

SEQ ID NO: 12572 - DNA, 443 bp, Gossypium hirsutum
  Clone ID: LIB3135-047-Q1-K1-C5
cccacgcgtccgcccacgcggccgatttgatgttaagacggtcgttagaaacatttatattctcttctgcagaagtgagttacaagtagccggcgacaatgaggagataatggatttggttgatccatcaactccattgcctccatggttcacagaggaagatcttgatgtctatgcaacttcatatcaaaattctggtttccgaaatgcactgcaagttccctacaggtgcattcaattggattgtggtataaccaacccaaaagtgatagctccatcattgctgataatgggggagaaggattatgttatgaaatttccaggaatggaagattacatgaggaaagggatagtgaagcagtttatgcctaatctggacatcactttcatgccagaagggaatcactttgttcaaaaacaacttccagagcacgtgaatgagc

SEQ ID NO: 12573 - DNA, 163 bp, Gossypium hirsutum
  Clone ID: LIB3135-047-Q1-K1-C6
caaacaaaaaaaaacccgctgctgacaaatttcttcctctgtatgatcgctcatgtctctgcgggggagtgctcctgctaagacattaactatttgcgttttatcctcctaccgtttaattgttcgctcctttagctaagacaggtttcaatttctatcgact

SEQ ID NO: 12574 - DNA, 68 bp, Gossypium hirsutum
  Clone ID: LIB3135-047-Q1-K1-C7
cccacgcgtacgggcaatcttgctcgtaataataatttatgctccaaacatccagcggcgaggggaat

SEQ ID NO: 12575 - DNA, 401 bp, Gossypium hirsutum
  Clone ID: LIB3135-047-Q1-K1-C9
gccacgcgttcgctaaatattagtcgttcaatatctaatgaccgtaaatgagtcacgtgggggaatatatggaccactaatatacgtacatggggtatgcttggtcaatgttcatggttgccattttatactcataaatcaattcacaaactgaagcattctccttgaggtaccatgttggggctcacatagattgaccaatctattatctgtacattttgtattcacggaactcttcattgaaacaaatatttgttcaatgaaaacttgtcttaatgttattagcagaatttcttatacaatttttttcctttttcctgcccaaaatttccatattgactatgaaaagaagcattaatggtggttggtaaaataaaaatataaaattaaaaagtgggcgg

SEQ ID NO: 12576 - DNA, 444 bp, Gossypium hirsutum
  Clone ID: LIB3135-047-Q1-K1-D1
cccacgcgtccgctccgcccatcgtctgctctcgccaaaagacacccaaagacaccactttgaaacccggaaatgtcggacgaggagcatcatttcgagtccaaggccgacgccggcgcttccaaaacctaccctcagcaggccggcaccatccgcaagaacggttacatcgtcataaaaaatcgcccctgcaaggttgttgaagtttccacctccaagaccgggaagcatggtcatgcgaagtgtcactttgttggaatcgatatcttcactgccaagaagctcgaagatattgttccttcttcccacaattgtgatgttccgcatgtcaatcgtactgactaccagttgattgacatttctgaggatggatttgtgagtttgctgactgagagtggagacactaaggatgatctgaggctcccaactgatgagaacttattg

SEQ ID NO: 12577 - DNA, 260 bp, Gossypium hirsutum
  Clone ID: LIB3135-047-Q1-K1-D10
ggaggaggttgtgcctatggatgctgtcattcagattattacggaagaggttgccgggggtgctgcgcttaccttggggaggctgtgaatgttgaaacacatgctgatcctctctactaaaataaaatcattccaagttgcatgtatctaaaaaagtaaagtggcatagcaaatcttacaatttgctacgtcctaaataaagaagctttcttaatattcaggaattatattattataagataaacttttttaattttatt

SEQ ID NO: 12578 - DNA, 139 bp, Gossypium hirsutum
  Clone ID: LIB3135-047-Q1-K1-D11
cccacgcgtacgtacacacgtacgttttatatacctatatctcccacaaatgaacgggcggggcgtttcatcacatttaatcaaaatttatcttcttcataaaccagtatatttttatgaacttaaacacaccacatgc

SEQ ID NO: 12579 - DNA, 283 bp, Gossypium hirsutum
  Clone ID: LIB3135-047-Q1-K1-D12
tcgcagaaacgttatcgacctggaagttttaaccttaccaatgtcatctcatccacggggaggtgtattctgacacagtaccataaaccatgcatgttcttctgtcaaaatagttgcatgacatgcctttgtgttccttcagcgtattaagggaacaaacaagtttgcccttgctacaacaactgtaaaaccaaggaaggaggccctaaatgcccttatattactcaaaaaaagacctctcttttttcttttttacattaataatccctataaatattcctat

SEQ ID NO: 12580 - DNA, 262 bp, Gossypium hirsutum
  Clone ID: LIB3135-047-Q1-K1-D2
taaggaccccaccaatagcaggcagtaaatctttcttatcaaattctagggaacacgattcaatttttaaccaaaaaaaaaaaaaaaaaaaaaaaaaaaaaaaaaaaaaaaaaaaaaaaaaaaaaaaaaaaaaaaaaaaaaaaaaaaaaaaaaaaaagaaaaaaaataaaaaaaaaaaaaaagaaaaaaaagggggtattaataataaagtaaaccaaaaataataaaacaacaaaaaataaattataaaggctcttaattt

SEQ ID NO: 12581 - DNA, 440 bp, Gossypium hirsutum
  Clone ID: LIB3135-047-Q1-K1-D3
ggaacctgcagatgctgcaaagtattgtgaggaaaacaaggtgcaaagtgctcttccaaagatcatcaagactggtttctctactattaatctcatatatttcttcacagcaggaccagatgacgttaaatgctggcaaattagacggcaatccaaggctcctcaagctgcaggagccattcatactgattttgagagaggatttatatgtgctgaggtcatgaaatttgaagatctgaaggagcttggcagtgagtcagctgtcaaggctgctggaaaatataggcaggaagggaaaacttatgtggtccaagacggagacataatattctttaagttcaatgtttccggaggcgggaagaagtgaaatgagactctctggtgctgggttcggacttacatccctggattatcaaatccggacgcattttgatcccatc

SEQ ID NO: 12582 - DNA, 437 bp, Gossypium hirsutum
  Clone ID: LIB3135-047-Q1-K1-D4
gtctgggtgcaggataatgtgagttggggatggggttttggaattccagccattgctatggcgatagctgttgtatttttcttttcaggtactcgtttgtaccgcaaccaaaagcctggaggcagccctctcacacgcctctgtcaggttgtggtagcctccttcaggaaatgccgagtggccatccctgctgataagtctctcctgtatgagaccacggatgctgaatctaatatcaagggaagccggaaggtcgagcacacagaagatcttagtttcttcgacaaagcggctgtggaaaccgaatcagacgaaaaaaagggtacagtaaactcatggagactttgcacagttactcaagtagaggagctaaaagctgtaattcgcttgcttcccatatgggccaccgggatcatctttgctgcagtctacagtca

SEQ ID NO: 12583 - DNA, 351 bp, Gossypium hirsutum
  Clone ID: LIB3135-047-Q1-K1-D5
ctccaaccctcatgataaggaatcaacaattgcgagcttgaaagaatggttagcagatccagcgattggaagcaatgccttattaaggttgattgctggaatcgttttcatgcatgaagaagattatattgaagctcttaaacacaccaatgctggtggcaccatggaacttcatgcattgaatgtgcaaatcttcattaagatgcaccggtcagattatgcagagagacaactgagggtcatgcagcagattgatgaggaccatacactgactcaacttgcaaatgcatggttgaatctagcagtgggtggttcaaagatacaagaagcttatctgatctttcaagattt

SEQ ID NO: 12584 - DNA, 182 bp, Gossypium hirsutum
  Clone ID: LIB3135-047-Q1-K1-D6
cttttgcagcatgttatccttcaaccaaatttattctgcactggcctttggttgttggggggcgggtgagctgtccactatatgactctttttattcttctcttgaaagagtgggcctccccaacaacttttatattattgctttgcatcttgatgcctttgatgtgactctctggtctttt

SEQ ID NO: 12585 - DNA, 358 bp, Gossypium hirsutum
  Clone ID: LIB3135-047-Q1-K1-D7
gaaaagttggtgagcatgggtttcagtggtgatcatgttgccagtgtgattcagagggggggggagagcgggcagcctccggatttcaatgctgtgcttgatagattaaatgcacattcctctggtggttctcaaagaggaggatggtaaagggcaatcgcatacctgagttgggctttggatattattcgaataaagggtggtagagttctcgtttatatgttgggagggatatgaatatttgtatgttacctcctaattaaaacttctactgggaaatgttttcttttatttggggttaatttcagtttttattatctaatgcattaacccctcctgttgcttaaaaaaaatatat

SEQ ID NO: 12586 - DNA, 230 bp, Gossypium hirsutum
  Clone ID: LIB3135-047-Q1-K1-D8
attttgaattatggtgttaatgtgtgtaaattatccctagagttgtgctgtattcaggtgggattaatggaggattcttttatgtatttcctaaaaaaaaaaaaaaaataaaaaaaaataaaaaataaaaaaataatatttaatataaataataaataaaaaaaaatataataaaaaataataaaaaaaaaaatattaaatataaaaaaatgggggcgtctcttttatag

SEQ ID NO: 12587 - DNA, 318 bp, Gossypium hirsutum
  Clone ID: LIB3135-047-Q1-K1-D9
tcggcctggtcaacctagaccaccttaccttgatgggtcagcaccaggtgactttggggtgcagggattaagactaggtgaggtccctgagaacctagagaggtacaaagaatctgagttgatttactgcagatgggctatgcttgctgttccaggtatattggtaccagaggcctcagggttaggaaactgtgtaaaagctcatgaatgggcagctatttcaggtggccaaaccacttacttagggaacccagtcctatggggttcccttcttaccatctttgtcattgaattcttatctatctgtcttcgttgagc

SEQ ID NO: 12588 - DNA, 340 bp, Gossypium hirsutum
  Clone ID: LIB3135-047-Q1-K1-E1
gccagcgtacgtccacgcgtacgggaaggggacatcatggacttgaagcagcatctcaagagcaaagctggtttatctcgattgataacaagagtaggtaatatagcatataactttaaagcagaggtaacgaggaaaggctttggtattgtatgaagccatcgagatttccagacctatgtttggagggtttagcaaagcaggatctgttgccatttggctttttaaacctgggtttgctttctcccaggggtagcatgttcagggatacctgttctagggttaaagctctttatgcattgtgctgctcatgatatcgcaatatataatcattcctatg

SEQ ID NO: 12589 - DNA, 310 bp, Gossypium hirsutum
  Clone ID: LIB3135-047-Q1-K1-E10
gtcaatctcgaacaatattcgtcaaatgacttgatgcatcactcgatgaggatacggggaggaattccttgcaagaacactttggttcctgtggagagatttctagggtggctataccaacagatcgggattccggtgctgtgaaaggttttgcgtacttggatttcaaagatgagggtagtttgaacaaagctctagaacttgatggatcaacacttaataatcaatccttgttcgtggatgaggcaaaacctaaaggcgattttggcagtggaagacgtggtggtaagagttttggatggagtggagg

SEQ ID NO: 12590 - DNA, 93 bp, Gossypium hirsutum
  Clone ID: LIB3135-047-Q1-K1-E11
gctacacgttgagacaggcggaggttttatataaagattaagtggatattgatacgggggggtctgacgtgcatgatgaataagaatataagt

SEQ ID NO: 12591 - DNA, 339 bp, Gossypium hirsutum
  Clone ID: LIB3135-047-Q1-K1-E12
tccacgcgttcgcgtttatggaaaatcctttttttctcgacggcaacttgccctagcgcggggaaatagttactatgacggcatgtttcgaaagttctgtcccagcaaaagccataagcaagcgctttcgaaccggatgccgagtttggtcccttgttgccaccccttctcttacagaatcctcttcgagttctactttatcatctttcttctcaagcccttgtccttgtatgctttgccccaacagtggttccgtcttcaatcttttaactgtctgaacctttcttttgttaaaaagccgccgttttataagcattaataagagactgtcaacctatt

SEQ ID NO: 12592 - DNA, 122 bp, Gossypium hirsutum
  Clone ID: LIB3135-047-Q1-K1-E2
gtttaattcaataaatgttgatgggttgtgtttccatttcgcaatgtttgtgtcagtgtgattttcatttcattatatgtactgtgtcgttcaatgataaaatttgcttttggttttagttg

SEQ ID NO: 12593 - DNA, 425 bp, Gossypium hirsutum
  Clone ID: LIB3135-047-Q1-K1-E3
cccacgcgtccgtccacgcgtgcggaaaaaaaaaatggcaggaagattgagcaatgtaacaggaaagatcatgggcggaaacggcatcgattcacgctccgctgcctcctctctacgtctccgttccggcatgggtctccctgttggcaaacatattgtgcccgacaagcctcttcctgtaaatgacgagctaatttgggacaatggaactgccttcccagaaccttgcatagatcgaatcgctgatactgtcggaaagtatgaggcattggcttggatgtgtggtggtttgagcttctttgcatcggtgggattcttagcttggtggaatgataaagcctctaagattccatgtgcacctaaagtatatgcatatgacaacctgcgagtggagcttggtggagaaccatatgtagatctgtatg

SEQ ID NO: 12594 - DNA, 433 bp, Gossypium hirsutum
  Clone ID: LIB3135-047-Q1-K1-E4
ctggttttgctttcactgttaacgggtgggtccaatcttacggatctcgctgtgttaagccaccaatcatctatggtgatgttagccgccccaagccaatgactgttttctggtcatcaactgctcaaagcatgactcaacgcccaatgaagggaatgcttactggccctgttaccattcttaactggtcctttgtcagaaatgatcagcccagattcgagacttgctaccagattgccttggccatcaaggatgaagtggaggatcttgagaaggccggtatcaacgttatccaaattgacgaagctgctttgagagaagggttgcctcttcgaaagtccgagcacgccttttacttgaaatgggctgtccactcctttaggatcaccaactgtggtgtccaggacaccactcagatccacacccacatgtg

SEQ ID NO: 12595 - DNA, 445 bp, Gossypium hirsutum
  Clone ID: LIB3135-047-Q1-K1-E5
cccacgcgtccgcacggatctctagctcgtgccgggaaggtgagaggccaaactcctaaaggggccaagcaagacaagaagaagaagccccgtggccgcgcttacaagcggatgcaatacaaccgacgcttcgtcacagcagtggttggatttggcaaaaagaggggacctaactcatctgagaagtaagagatctatgtaggtgaagaaggcaagaagccttgttgaaagctttgatggattttaagtctttgttttcttttgataatgtttttatgatattggtttcaaggattggattgaactgccattttgtttgctagatattatgtgatattgttatcaattatcttaatttttggtttactatgagtttcgattcctcttcatccatgctgtaattgacttgccgatccccatcctgcattcactggcgaaactaatt

SEQ ID NO: 12596 - DNA, 452 bp, Gossypium hirsutum
  Clone ID: LIB3135-047-Q1-K1-E6
atcattttcttggatttattgataacaaggtagatgaggtttcacacacatttgacgagcatgctccagcaccagccaagcaagtgggtaacctggcccacgatttggtccaaaaggcaacccaaaaggctcagaaactagtagaggaggctcgaaccaatggagcacgaggggctttgcactacgctgcagctgagtacaagaacttggcgttggtaagctcgaccaagttgcgggttaaactgaacagcaacttgactttcaactcactgacagaaaacgttgttcccaaagcagctaatttgtgtgagaaatacaacagttggttaaaggagaagagcgagaaacgatatcctgtggttgggtatttaccatcgattccacgtgatgccgttgggaagcctgttaatgaagctgaacgaaaagagaaagcaaacgcggatgatcataaa

SEQ ID NO: 12597 - DNA, 375 bp, Gossypium hirsutum
  Clone ID: LIB3135-047-Q1-K1-E7
ggaccattacagatcccattgagattaagaccaagagccatgttcgttcaatggggacaagagttcacggtcgaagaagtcggaaactaaaaaaggaactaacgaaactcttgtcccaaaaccgaaccccgacacaaaaaaagaagtagcaagtttaccattggatagatttcttaattgtccatcaagcttggaagtggatagaaggtttaacaatgcggtttgcagtgatgcaagggatagatcggaggaagacatcgttcgaaccattagcattatccttcgcagatgtaaagacatatgtggtgaagataataagaaaaaggccattgggaagaaatcaatttcttttcttttgaagaaaatgtttgtttg

SEQ ID NO: 12598 - DNA, 320 bp, Gossypium hirsutum
  Clone ID: LIB3135-047-Q1-K1-E8
catattcgtccgcgacattaccatcttttttaaggaggaactaatcattaactctccgaagggcatctatggtcgttgtgccagtttttacattgcatggggtcctcgtataaccattcattatgtgaccaacattttcattcatggacttaacatccattacttcatgcatggaggtaatgctattgtgagggacttcccacgtcattactgttggcgaaccttatcatattgggattgtgtgtctattttctgtggtagtctttttttgtgtggattatatacttcttgtataatctcatttattgttttttttgatt

SEQ ID NO: 12599 - DNA, 280 bp, Gossypium hirsutum
  Clone ID: LIB3135-047-Q1-K1-E9
cccacgcgtccgtgccttatttttagcaattacttcccttgttttaggctcaacaatggcgcagtgatgaatttgatcctgtgcttgacatctcaggtcaagagctccgaacaggcattgactactacattttgccggtaatccgcggtagaggtggtggcctcactctagccagcactggcaaccaaacctggccacttgatgttgttcaagaacagcatgaggggtcaaacgggcttccattaacattttcacctgggaaaggtaactcaaggcgttg

SEQ ID NO: 12600 - DNA, 412 bp, Gossypium hirsutum
  Clone ID: LIB3135-047-Q1-K1-F1
gaaaaaggagaaaagagaagagaggaggaagaagctaagaggaaagaagaagaagaggcccaaaagagaagggaagaggaagaggaggccagaaggagagaggaagacgaagaagctaagagaaaggaagaagaggaggccagaaggagagaggaagaggaagaagctaagagaagagaagaaaaagaggccaggaggagagaggaggaagaagaagctaggaggagagaggaggaagaagaagctaggaggagagaggaggaagaagaagcaaggagagagcaagaggaagcttggaaacaggaagaagaaaggcaaaggagagcagaagaagccgcagcaaagggttggagggagagggagaaacaaagaggacaaccagaggaaaaagaaacggaagaaggtggcgacg

SEQ ID NO: 12601 - DNA, 405 bp, Gossypium hirsutum
  Clone ID: LIB3135-047-Q1-K1-F10
gaaagtgccaaggaagaatggagatttgtacattaacgcagtttcttgtctaacaccagcggggaaagattttatcattacattgtacacatacaatttttataattcatgcctacatattactatcacttctttggttgccatgtaacacattcttctctatttattgtaatgccataagaaggaattcaatctcttaaaaaaaataaatattcgccttaattattaatttattctcgtatataaaccaaaccttccttatgattgatgcatctcttactatctatttttagacatgcatatgctattatggggataatattatgttccatgtacattattaatatttatatatttttattttttttaattttcaatctttaatctatctttactattatttta

SEQ ID NO: 12602 - DNA, 351 bp, Gossypium hirsutum
  Clone ID: LIB3135-047-Q1-K1-F11
cccacgcgtccgcccacgcgtccgggttgaggagcctggtgaaaacctctcatatggggatgaagatgaagaggaggaaagttatgaaggttgctccaaagtcaatgatgaagatgaaactgaagatggcttttttgtaccagatggatatctctcggaagatgagggtgtacaagttgacaggatggaatctgatgttccagttcaggatatccaaagttcccatatcagcaagcaagatgggcggaatgaggagtttagtgcattgcttctgcaacagaagtgtctaaacaatataactgagcatgcactaaggaaaaatcaagtgcttgttatattaaatttgtttca

SEQ ID NO: 12603 - DNA, 175 bp, Gossypium hirsutum
  Clone ID: LIB3135-047-Q1-K1-F12
aaatgtccttcccctttaccctttcttttatttcacttctcgccacctcatccaccagcggggttaatactggatcattaccgctcacaacaaaagcttcattccttacacggaacaaacttactatctgtgacaaagtacacataatcatcctttctcaccaacatttccagtg

SEQ ID NO: 12604 - DNA, 435 bp, Gossypium hirsutum
  Clone ID: LIB3135-047-Q1-K1-F3
cccacgcgtccgcccacgcgtccgcccacgcgtccgttccccaaggttttttttttttaatcatctctttgagttgatcttttagtgtcggttgactcgtaatcttgttgttctcaaggctggaaccttttacacgaatgacaaaggtttttcccaacgctagttttaccatcggtgatgccatctcggagaaacagccaccgcagcataagctgttaccggcgggtgaagcaaggtcgataattacatggatggcaataagggtgagatccttctcatggatgccagtggcaaccctctcctcactatccgccgcaagaaaatgagcctcggtgatagttggctggttttcgagggagaatccatggagaagccccgactttgcgttaagaaatcagtgaatatcttaagcaagtgcttggcttacgttagctt

SEQ ID NO: 12605 - DNA, 386 bp, Gossypium hirsutum
  Clone ID: LIB3135-047-Q1-K1-F4
gtacatagaaagccaacagatgcttagacaaggatacactcatgccttcttgatgacgttcgaaaagaaagaagattacactggatttaccagccatcccagtcacattgaattctccgcacttttggtactgccattgacaagttcgtggtgcttgatttcccttcggttcttgcaaaatctccggcttgatctgcaagaaagaaaaaagctacccaggaatttaagtgttttgagtattcgttatgtttaatctctctgttgtttgcatctctatgttttctgcttatgtgctatggctttctgccattgctatcaattccccaataatcacaatgtggattattgatatgcaaaaactcacatgcattttgcttctttttctc

SEQ ID NO: 12606 - DNA, 409 bp, Gossypium hirsutum
  Clone ID: LIB3135-047-Q1-K1-F5
cagaagttgaagtccagcttgggaaacgtttgcaggcctctatagttaggcagctgaaagaggcagagatggctatgcaatggaccttgatttacaagcttacaagtcgtctgcgagttctactacaatctgcaccttccaaacgtcttcttttcgagtattctgctacctcgcaagactaatctgctatcagttgtttgttttagggcaaacctgctacctgccattttcagggctttgcacaggtaaaagtgccacagtgatgcttatccttcaagtaaaacgaacggtaagagaggtcttagggaaggggtagtagtttttgaaaatgcaaaggtaggtttaattacgtatttcattctttgctcaaaatgaagagcttgtttatatttgaataaccttcattttt

SEQ ID NO: 12607 - DNA, 140 bp, Gossypium hirsutum
  Clone ID: LIB3135-047-Q1-K1-F6
atcacgcgttcggattatttgtttacatggtagaccaggttccatacacgtgtaacgagcgggcggtatgactagacaactaagtgcgtaatctgtcatacgtttttttgaaacatgcgtcccaataagctcaccaactc

SEQ ID NO: 12608 - DNA, 201 bp, Gossypium hirsutum
  Clone ID: LIB3135-047-Q1-K1-F7
gccacattaaagaggttcccattgatattttagaccaagagccatgtacggtcaatgggtgggaggagtttacggacatgaacgtctgtaaactgaaataggatctaacggaacttttgtgccgaaaaccgaacctattctcataaaatgaagttgcaagtttgcccttgcagggatttagcgtaatcggccatcatgctc

SEQ ID NO: 12609 - DNA, 349 bp, Gossypium hirsutum
  Clone ID: LIB3135-047-Q1-K1-F8
ggtatatcaattttaacatatgcaccatcaaatgcagtatggtgggcatcttactcaggtgctcaaagacttgtttggggaggcattggatgttacttaaaaggcggcggggatgaaacaattcggcctgattcaaagacggtaatggcggttcaaggagcgagtgcggcaatggcaggtgggatatcggcattgatcacaatgccactcgatactatcaagacccggttacaggtcttagacggagaagagaaccggctgcgcggaccgacaatcgggcaaaccgtgaggatatttgttaaagaaggaggatggcttgcttgttatagagggttgggaccaatgtggg

SEQ ID NO: 12610 - DNA, 437 bp, Gossypium hirsutum
  Clone ID: LIB3135-047-Q1-K1-G1
ccataacaagggatggaaaacacacgccatccgtctcaccactaaaccccaactattgtttatcatggcttcctcaactttctcccctgcagctctttcgcagctatgctccggcaagagtggcatgttctgcccatcacaagcgtttcttgtgaaaccaacgaggacccatttggtcaaaaacgaaaagggaatgaggatcacatgccaggccactagcatccccgctgatagagtgccagacatgggcaagaggcagctcatgaatctgcttctgttgggagctatttcactcccctcaggtttcatgttggttccttatgcagcattctttgtcccatctgggggacggggtaccggtggtggcaccgttgccaaggacgcaatcggaaacgatgtaattgctgaagaatggctcaagactcatgggcctgggg

SEQ ID NO: 12611 - DNA, 436 bp, Gossypium hirsutum
  Clone ID: LIB3135-047-Q1-K1-G2
cccacgcgtccgcggacgcgtgggttagggactaagggcatacatgaatattcgtttagcacgatgtctactcatggttttacttgttgcacaagtaattaaactcttaaaaggttcgttggttcgttgcagaggtgtcggatcagaactttgttgacgaggaacagggtgaaaaggctagaaaaggatgtagcagcccaaagaagctgaaaaccccggtaaccgatgcttcatgcaatgatcaggtaaaatttaataccattaatcctctatttacattagccaatagtcacttatcttagtccctaagcatcaaggcatttctctcattttgttttcaagttgttccataaggtgaaacccacggagcatccaccggtaaggctccgtttcgaagaaagaaatttgtaatcaccatcctaataccgacagcaaa

SEQ ID NO: 12612 - DNA, 339 bp, Gossypium hirsutum
  Clone ID: LIB3135-047-Q1-K1-G3
aaaaaacttatggttccctgtatctgtatgatcctgtttctggcatgaaggaaacttaattgtttcctgtatgtgtagttttatgttattgtattagatagttaatcaatcgattaattagaatctgtttcctgtattaggccatattaaaagccattgtaatgggggggggggagtatttgggaatggatttggtggcaaataaattggtgatttggtgtatgcatttgtatcatatggcattgcaatgaatatgattatgaacaaactcagatttttctcaaaaaaaaaaaaatatataaatataaatttaaaattattataatattattattattt

SEQ ID NO: 12613 - DNA, 336 bp, Gossypium hirsutum
  unsure (1)..(336): unsure at all n locations; Clone ID: LIB3135-047-Q1-K1-G4
ctttgttgtttaaatttccttgtggggattgatatataataagtctaatacttttcttcaggagggtttcttagggaactttagtatctttaagggacatgaaaagacttgtattattcagcttgttttatttccgtacttcttgtttcgttatcactttatttataaaatctctgcatctagctatggcaataaattttatataattttataatgtttgtacttactttttcatatttagngcaaaaaatgcctaccacttttatatttgttatttgggtataagttctattagtatgatacttagaacttatcaatcaacttttataaatgtat

SEQ ID NO: 12614 - DNA, 341 bp, Gossypium hirsutum
  Clone ID: LIB3135-047-Q1-K1-G5
cactgataggcttatacggtacaacccggatgatatcgaggcaaggattaacgagttgttggaagggaacaatggatcatctggtgtcaggaagtaaatgcacatttcaggtattctttttggtgttggaatatgaatgggtaaatgtaaaatgatttgcagtatggtacaacattaagtgttgttatatgcatgttgcacaatctttttcctgctttctatttgtgaattgaaaaaaaaaagccatggttagctcgcctgctttctaatcatataatggcgttatattcttggttttttgtatatatagcaaattctaatcatatacatgagatatttaa

SEQ ID NO: 12615 - DNA, 221 bp, Gossypium hirsutum
  Clone ID: LIB3135-047-Q1-K1-G6
gtacccaaccgtggatatggtaggataagtatggtgtcccttcattactccgaggggggcgttttattcccctgtaaagcttggaccaaaaactttcccgccaccttatggaactgcatctgcctatcccccttgcatgaacaatgggggtggtctaatgggtacagtgactggtggcttcaatgggattactgggaacccacgttatggaaaatcaaatt

SEQ ID NO: 12616 - DNA, 226 bp, Gossypium hirsutum
  Clone ID: LIB3135-047-Q1-K1-H1
gactggtgacagctaccaacagcgtgatgcacaacttgattcatggaggtcttctcacttagaggggcatcggaagctaacaaaggttcgatcactcgtggacatacccagcatattgctgcaccaaatggttatggccgagataaacaagaggcgcttattcaagaccgatagagcagtggataacataagttatcaagagctgcgagaagtttctggcaacata

SEQ ID NO: 12617 - DNA, 325 bp, Gossypium hirsutum
  Clone ID: LIB3135-047-Q1-K1-H12
gtgattacattggtgtccaagcttcgaagcatgctacctatgtgccacacactgctgggaggtactcaattaagcgtttcatgaacgctcaatgcccaattgttgaaaggcttacaaactcacttatgatgcatggccgaaacaatgggaagaagcttatggcagtcatgattgtgaagcatgccatggatattatttattctttgactgatcagaacccaaattaagtcattggtgatgctattattaacagtgggccacctgaagatgctactcgaattgggtcttcttgtgttgttaaggcgtcaggttgttgatttttttt

SEQ ID NO: 12618 - DNA, 412 bp, Gossypium hirsutum
  Clone ID: LIB3135-047-Q1-K1-H2
cccacgcgtccgcccacgcgtccgggcacggcggcgaatatgaacctctgttccaagtgttgccgtgacctccgtgccggggaggagcaagctgccaaggcgaaagctgccatggagaaatccctcagcgttaatacgaagcaggaagatgtcgttgacgagactgtgaagcctgttcttgagcttcctcatgtgggttcctcatcgacggtggtcgagatacaaccggctgctattgtctccgatgataaaccggcggaatccaaggcggcgaacaggtgctttatctgcagaaagaaggttggattgaccgggttcaagtgcaagtgcggaagtacattctgcggcgagcatcgttacccggaaaaacatgagtgctcctttgatttcaagggtactggacgtgatgcga

SEQ ID NO: 12619 - DNA, 254 bp, Gossypium hirsutum
  Clone ID: LIB3135-047-Q1-K1-H3
aaaaaacttatggttccctgtatctgtatgctcctcttggtggcatgtaagaaacttaagggggtagtgtatgtgtaagatttatgttattgtattacatagttagtcactcgattaattagaatctggttcctgtattaagccatattaaaagccattgtaatggcggggggggggggtttttgaaattgatttgggggcagttaaaatggtgatttgatgaatgcgtgtccattttatgggatccaaattta

SEQ ID NO: 12620 - DNA, 445 bp, Gossypium hirsutum
  Clone ID: LIB3135-047-Q1-K1-H4
gtttgtgttgttggtgttgcacgtactccaatgggtggatttcttggctctctgtcatcgtgggatgtgtcaccaagcttggttcgatagccatataagctgctcttaaaagggcaaatgttgattcattacttgtgcaaaaagggttcatttgctgtgtacataaaaaaataattggggcaagcttaaagaggagagggctttcactatttattagaaacctaataatttctttgcttacactttttagcataggatttctatgagcagaaaaaatagcctatgaatggatctttcttataatcattctattaaataagtttattattttatattgggaaataaataaaaaaaaagaatttgattcttttggtgctaatttatttttttgttgtgattttggcttttattttacgcttttttctattccagatgatttttactt

SEQ ID NO: 12621 - DNA, 345 bp, Gossypium hirsutum
  Clone ID: LIB3135-047-Q1-K1-H5
ttcttgagggatgcaaagaacgctgcatcttttattttagatgatcccaataatactggccgcggggttcaacttgctgcacgcaaagagcaatcatcacttcgggctgtcatcaagtgcattgaagagtacaaactcgaggctgacttttcacctgaaaacctcaagaaacgccttgagcagctagagaagaccaagactgataagagaaaaccacgtgtcgtccctgctaacaagcgaacgctgtgtaataaatggggtcccatgcctccctgctaaacctggcccctttaccaatgcatatgtcttatttttttcccggacccttcttcatttttaaaagct

SEQ ID NO: 12622 - DNA, 145 bp, Gossypium hirsutum
  unsure (1)..(145): unsure at all n locations; Clone ID: LIB3135-047-Q1-K1-H6
aaccactcccatattaaacattgttggtgaaacaatgacgtcttcagctctgacaggtaagcgtggggcagatgtagagattaaagcttctcctgagcagtntcatgaaatgtttgcccacaaaccgcaccatgtgcaccatact

SEQ ID NO: 12623 - DNA, 329 bp, Gossypium hirsutum
  Clone ID: LIB3135-047-Q1-K1-H7
cccacgcgtccgggcagatggtatattgggtcacccattcaggcgcctcttttggaggcctgcaatcttccgtgaatgggcagcatccccccctctcatggattggctcgaatcccccactgcccacatcttcaagttcaacgtcccaggatacaataaggaggatataaaagtgcagatacaagatgggaatattatgcatataaaaggagagggtattaaagaggagagtcacacgaaagatactgtttggcatgttgcggagagagggacagggaaagctgaattttctcagaaaattgaattgccagaaaatgtgaagattgagc

SEQ ID NO: 12624 - DNA, 447 bp, Gossypium hirsutum
  Clone ID: LIB3135-047-Q1-K1-H9
gaagttattgatgccatgaaggctgccttagagagtgcttgccccaacactgtttcgtgcgctgatattctcgctattgcatctgagcaatctgtcagcaccctggcaggcggtccttcatgggcagttccactaggaagaagggatgggttcacagcaaaccggacactcgccaactcaaacttgccaggtttcaacaatactctcgaccgattaaagaacaggtttagcaatgtggggcttaacaccagcattgatctagtagccttgtctggtgctcacacatttggcagagctcagtgtttaacttttaccagtcgattgtacaattttacgggagtgggtgatacagatccgaccttgaacaccacatacttggaagaactacgccaaatatgcccacagggtggaaatagtagtgtgttgacaaatcttgatcccacaaca

SEQ ID NO: 12625 - DNA, 447 bp, Gossypium hirsutum
  Clone ID: LIB3135-048-Q1-K1-A10
agcttcttcccttcagaaaacttcgactgaagctgctccaagattaaagaagcttcaatttataatactctgccccttaaactagcaagcctgatctgctgcataatcgtctaaagaaaatttgatggggataaataagttgctgtgttggtttgcagttttcttctttttgttgggtttctctgcttgcacttcgatttcggatggtgttttcgactctctcacttctactggaaggcacctccttcaagctaagaaagcttgccctgtgaactttgagtttctgaactacacaattatcacaagccaatgcaaaggaccaaagtatccgcctcaaaagtgttgttctgcattcaggggaattgcttgtccttatgcagaacagatcaacgacttgacgactgaatgcgcttcaactatgttcagcttcattaatctttacgggaa

SEQ ID NO: 12626 - DNA, 382 bp, Gossypium hirsutum
  Clone ID: LIB3135-048-Q1-K1-A11
cccacgcgtccggggtcaagtacttgtcgagccttctagcccaaaagaccactgcggttcgcattgcttcaggccaacaagtcctaaatattggcaactatgtcgtccgggtaaagattggcactccgggtcagctcatgttcatggtattggacactagcaatgatgtggcttgggtcccatgctccggctgcaccaggtgctcagccaccactttctcacccaacacttcttccacctatggttcgttggattgcggtttgccccaatgcgcccaggtccatgggctgtcgtgcccggctacggggtctgcggcttgctcttttaaccaatcctacggtggagattcatcattttcggccaacttgggtcgagattcctt

SEQ ID NO: 12627 - DNA, 316 bp, Gossypium hirsutum
  Clone ID: LIB3135-048-Q1-K1-A12
cttgattcggtcatcatgagtttcgaagaatatatcttaattccggaacaggtggctttagcggaaacggtattggattccggcgagtcgaggccggagttagggtttctgtatgaagcttcggatgatgaactgggtttgccaccgagtttaccggcggttgaagtggatcagagatttgagaccgcctttgatgtggatgaaagtggagggtcaggtggcgttggatttggggaaatgatggtgaatgagttcccgatttccatcttactaaccgtttgaattcggaatcggcgttgactcagataccaataac

SEQ ID NO: 12628 - DNA, 431 bp, Gossypium hirsutum
  unsure (1)..(431): unsure at all n locations; Clone ID: LIB3135-048-Q1-K1-A2
cccacgcgtccgttcagctcgtatactctcccgtgctctagagatgtgtgacaacaagataaaagcagaaactctgattgttgaaggaaatcctaaggataagttatgtgaaattagcgaggaaatgaaagttgacctcctttttgttggcaaccgtggccttggcaggattcaaagagcattcttgggaagtgtaagtgactattgtgcacactacgcanaatgtccagtcctgattgttaagccaccgaaagagatggccggccagtaaaagcaaggattaaaaatgttgacattgaacctggatttaataattaaattttattggttcatggtatcgtccgttttaagtccggtaacttttttataccaaaacaaggttgtcttgagtttgacacctattcatatatatacccatatataccaaggtt

SEQ ID NO: 12629 - DNA, 344 bp, Gossypium hirsutum
  Clone ID: LIB3135-048-Q1-K1-A3
cccacgcgtccggtgatattattggatcttatcttttgtagaactgcatttgatcactgcgaactgggggaaagcgggcacctactgacatattttacgagaatgctctttaactaggtgctgttcgaataagtcctcagcctcctcaattgaccccaatgcaggaacgctttccatcatcatctctcctaaagagttgacgctttattgcttagctacgaatccttattatagtaaatactaagctctattctctacaagtgtaaaccttattactgtaacttttataacttacccttcaacttgcttatacatataaagcctataccttcatacgttcttgc

SEQ ID NO: 12630 - DNA, 488 bp, Gossypium hirsutum
  Clone ID: LIB3135-048-Q1-K1-A4
gggagaacaggcagtggtaaatcaactctcatacaaacacttttccggatcgttgaacctgcagcagggcacatcataatcgatggtgtaaacatctcatcgatcgggttgcatgatttgcgttcacgactcagcatcatccctcaagagcctaccatgtttgaagggactatacgaagcaacctggaccctcttgaagaatacacagatgaacagatttgggaggcattggataaatgccaacttggggatggagttcgaaacaaggccggccggctcgattcttcagttagtgagaatggagagaattggagcatggggcaaaggcagttggtgtgccttgggcgtgttctattgaagaaaagtaacatcttagtgctcgacgaagctaccgcatcggtggatacagccaccgacaacctaatacagacgacgttaagggagcacttctccgattgtacggtcataacaatcgctcaccgaataac

SEQ ID NO: 12631 - DNA, 423 bp, Gossypium hirsutum
  Clone ID: LIB3135-048-Q1-K1-A5
atccaatcctttgaaaaaacattacctgggagacaaggctgcatcataacggggcagctgggacggaggtcagataaactgaatgtccaggaatggcgatggtgataacgtgattatgttgacgaatgattagacatcatcaatatcttgacggacaccatgcaacagatataactacttctgtataaacgtctcatgggcagcttagtttggctgaagcaaggtcgtatggataatgcataaccactgctcaactacgcggtattacgatcataagctctaggaaactcataagtgcactattttcttgtagggctatttgatatcacatgcttgattgtgtgcttgcaactcccgaatgtacatggctttgcatatgaatgtactgtcattgatcatacactgtaccaacacaggtcattt

SEQ ID NO: 12632 - DNA, 490 bp, Gossypium hirsutum
  Clone ID: LIB3135-048-Q1-K1-A6
cttcaatccctgcaaagaacattacctgtttgacatggctggatcataacagggcactgggtcaaaggtcagagaaactaaatgtccacgtttctgatgttaataatgtgattatttggggtaatcattcatcatctcaatatcctgatgtcaaccatgcaactgttatgactccatctggagaaaagccgcttcgcgagcttgttaaggatgatgcatggttgaatggagaattcataaccactgtccaacaacgcggtgctgcaatcatcaaagctaggaaactctcaagtgcactatctgctgctagtgctgcttgcgatcacattcgtgattgggtccttggaactcccgagggtacatgggttatcatgggggtttactctgatggttcatacaatgcaccagctggcgtcatctattctttccctgcaacttgtgagaatggagaatggacaattgtccaaggactggcaattgatgaattatc

SEQ ID NO: 12633 - DNA, 464 bp, Gossypium hirsutum
  Clone ID: LIB3135-048-Q1-K1-A7
gtgaactcaaataaaataaataaaatggataaattgtgtcgaatccattttctattggggaacgaggagacaaccaactaacactttgactttactttaacttattagattcagtagtgggtttattaattgcacataatatctcgaataagaagaaaaaaagtatcgcacgatcgctcgaagaaatcaaacctttatttgggtctaactcgattctaagactagtaattcctatgttcttttccttttaggttctacattttttctttcaatattttagagtaccatccttgtagctaggtcaagaaaaacctttggatctaatacagcaatgcttgcatcacgaatattaattgttgcaaatattttattgtttggtttgattcttttatcgaagactatatactataatacttgttattgtacgaccaaccaattccttagaatgaaaggattcgaacaaa

SEQ ID NO: 12634 - DNA, 490 bp, Gossypium hirsutum
  Clone ID: LIB3135-048-Q1-K1-A8
ctttgaattggctagcttttggtttgaatggtgctgagatcgttttcaacccatcagccacggtcggtgaacttagtgaaccaatgtggcccattgaggcacgtaacgcttcaatagcaaacagttactttgttgggtcaatcaatcgtgtagggactgagattttccccaacccattcacctcaggggatggaaagccacaacatccagattttggccatttctatggatctagtcatttttcagcacctgatgcttcctgcacaccatcactctcccgttttaaggatggactgatgatctcagatatggatcttaacctctgtaggcaaccacaacagtggcgacatcttatccgaacaagtccagattttcgcttcccactacactccagtggacagccaactcattcccaccggcaaattcgccaccgtcaaaggaaccccttacgatttcctcaaacctcacacggtgggaagccgaatcaaca

SEQ ID NO: 12635 - DNA, 439 bp, Gossypium hirsutum
  unsure (1)..(439): unsure at all n locations; Clone ID: LIB3135-048-Q1-K1-A9
cgttttctcttcttcccatcgaaaacttccacaatcattcactcttccgctcgatcgttcgtcaaaatagaagaagaaaatgtccgaaaggcccaatcgccatcaaaggagggcatcgcaaagcgtttttatgtccttcgacgacatcacggctcccatatccgataatgctacggctaataagcccgtaccatccaacgaagcgccacctcctcagccggttcgttctccggttccagctgtggcagcggcggagacttctgatattgtagccaaagacggcgagaaaccagaataaatgctataggttaattccgtcctattatttgactatttcgacgttgctntgtcttacttttatgttatgtttgatcggcttcacgacatcaaaaagagaatgctcgtttatcagntgtcataaatccatgttgaattctgc

SEQ ID NO: 12636 - DNA, 386 bp, Gossypium hirsutum
  Clone ID: LIB3135-048-Q1-K1-B1
ggattatgattcgtcgtataacgagctactaggatggataactactatgcgggagtacgtaccggggactatgattgagttacagacaagaccatattacgacccggacgaccaattacagccaaggaaaagaatttttcatcggatgttctggacgtttgatccatatgtgcgggcattttcctactgcaaactgtttgtgcaggtggataggacctcgctatatgaataatatacacagatcctacttcttgtggttgctcaagacagcaatagaaacatgcttccgatagcagttgccatcgtagataaagagaacttgaaatcttgagaatttttccttaccaatctgtggaggtatattattagcaacgataatatttgca

SEQ ID NO: 12637 - DNA, 359 bp, Gossypium hirsutum
  Clone ID: LIB3135-048-Q1-K1-B10
tttatctgcttatagatttttttctctatgttagtcttacttcactcagtttgttggtagctacaaatttcaatttttcatttcactgggtttggaagggttaaactcttgcagggcatagaaagaccaaaagaacctggtttgaagtctttgcgtactgctagacaactcctggagggaatggtgataacagtggagcctggatgctatttcattgatgcattgttggttccagctatggaaagcgcaaacacttcaaagttcttcaattgtgaaatagtggacaaatttaaaaattttggtggagttcgaatagaaagtgatgtgcttgtaacggccaacggtagcaagaacatgac

SEQ ID NO: 12638 - DNA, 419 bp, Gossypium hirsutum
  Clone ID: LIB3135-048-Q1-K1-B11
cttcttctcaaggccagacgacgacatggggaggagacctgcaaggtgttatcgccaaatgaagaacaagccatacccaaaatctcgatattgccgtggtgttccggatcctaagatcagaatttatgatgttgggatgaagaaaaaaggtgttgacgagttccctttctgtgtccatcttgtcagttgggagaaagagaatgtctcaagtgaggcgttggaggctgctcgcattgcctgcaacaagtacatggccaaatttgctggaaaggatgcgttccatttgagggtaagggttcatcccttccatgttctgcggatcaacaagatgctttcatgtgctggtgctgataggcttcagactggaatgaggggtgcttttgggaagcctcagggaacatgtgcaagagttgacattg

SEQ ID NO: 12639 - DNA, 493 bp, Gossypium hirsutum
  Clone ID: LIB3135-048-Q1-K1-B2
caaacctgatactgagtcaaaaagtaagattgaggctatacaaaagcagataaagcaaagactttctgaagctatcatctcttcagaattaatagagaagtatgaagacttgaaggaaaaaaattctgaagtcgaacggtcttctgctggggctgatgaaagtttgcaaaaggaaaccaagtatgaggaacctagactagagatcaatttgggtgcaaacagcagcttcgctcagtgatcttgattctgtcggaatgttactgaggtagatgttatagaaagagatggtgtttgaagtctgattgaagaactaaaattgcatcagatgaattattcaaaaactcaagcccttgcagagccaccaagtccacactcttctgcaggccagaggacacaaggttttgcatctattaaaacactgattggttatgacgaacaattactgtccagtctctttttctttttcttttctaagctgaatttctacgttctg

SEQ ID NO: 12640 - DNA, 482 bp, Gossypium hirsutum
  Clone ID: LIB3135-048-Q1-K1-B3
cccacgcgtccggttgatatactggatgatgggtatcgttggcgcaaatatgggcaaaaagtagtgagaggaaatcctaatcctcggagttattataagtgcacaaatgccggttgtcctgttagaaaacacgttgagagggcatctcatgatccgaaagccgttataaccacatacgagggaaaacacaatcacgatgtgccaactgcaaaaactggtagtcatgatacagcaggaccagtagcaatgtgtgggccatcaagggttagatcagaagaaaatgatgccattagccttgatcttggtgttggtattagttccgttcccgaacatgcttcaaatgagcaacaacaattggattctgaactggtccaaagccgcccacaagctggtggttcaagtttcaaatttgttcaaccaactatgatggcatattacggtgctctaaatggcagcatgaatcaatatgtttctagagaaaa

SEQ ID NO: 12641 - DNA, 462 bp, Gossypium hirsutum
  Clone ID: LIB3135-048-Q1-K1-B4
caaaagcatgtagggagaagttgcgtagggataggctaaatgacaagtttatggagctgggtgctattttggaacctggaaggcctcccaaaacagacaagtctgctattttggtggatgctgttcgaatggtgacccagctacgagatgaagcccaaaaaatgaaggattcaaattcaagtctccaggaaaggattaaagagttaaaggcggagaagaatgagcttcgtgaggaaaagcagaggctgaaagccgagaaggaaaagctggagcagcaactcaaaaccatgaatgcacaacctagcttcatgcctcctgcgccagcaatccctgctgcatttgctgctgctgcccaaggtcaagctcctgggaacaagttggttcctttctttggttatccaggagtggcaatgtggcaattcatgccacctgcagcagtggatacctcacaggatcatgtac

SEQ ID NO: 12642 - DNA, 409 bp, Gossypium hirsutum
  Clone ID: LIB3135-048-Q1-K1-B6
gtacaaggcgttcgaaaaaaaaatcaccttctagatctatgctgatgcctatatatcgcggcttgcggaactctctgaccctttgagtccccgattacgggggttgaaaaacaaactgtatagccgatgacaactgtccttaatgagccataacaccttttgatgtgatgaatgcactcactgctgatctggctcgaatgaccgcggtacatgaggtatacagccagctggggggatatgaaacactcctccttaggcgtacagaagcttagaaggcattcgtatgacgctaggacttgctctctgatgtaattgccttgcatacgtgaggagaaaaccctagggctaatttgtttaagcatttgggcttattgtgcctatgattggatcaagtatatgtatagtcatt

SEQ ID NO: 12643 - DNA, 239 bp, Gossypium hirsutum
  Clone ID: LIB3135-048-Q1-K1-B7
caaaacgtagatttaataatacctttggttctattttttctttttacttctctcaggaaggtggtcgaaatctgttgtgaagttgaagtaaaaaccaagctatatgcatgcataagccttgcctgcactgctttcagaggttcttagtatgtaccctttttttatgtgttgtttttgtggactatggactaaattttaaatttgagtgactgtctaaaaactagaatacctagttattt

SEQ ID NO: 12644 - DNA, 488 bp, Gossypium hirsutum
  Clone ID: LIB3135-048-Q1-K1-B8
ggaaaagattaagttgccagcttttttgtcaagttaagcacactcaatcctcaaggggctgctgcagaaagaagcaagtaagcgtctgggttgtggaaaaggaggtagtgaggagatcaaacgccatacatggttcaaggccattaactggaagaaattagaggctcaggaggttaggccgagttttctccctgatgttgcaggaaaccactgcgtatctaattttgaggagtgctggactagcatgccggttattgattctccagttgccagtcctacattcggtgagaatccctttaaggggttcacatatgtgaggcctgtcgccttatttcttcagagaaatgcttgatgttcgatggctgtgctatctagcttctctcctttagtttatagaaacaggtaactatatatgaactatatatttatgcttttggacttgtttaaaacgactctgctttctgcatttcgtgttgcagctgatgtta

SEQ ID NO: 12645 - DNA, 290 bp, Gossypium hirsutum
  Clone ID: LIB3135-048-Q1-K1-B9
cggacgcgtgggcgagcagaaagcattcaacccaaccccagctccacctgctgccagtgcgttcctaatctttggttcagccaatttcattgttaaaatgtagttgtcaatgaagggtaatttaataagagagctgggcaattaggttgttgtaaaatcatggtctatgtcggtgtgagaaaagggcccatcaatttcatgatattatatatagttatatacgtttgatttgttgctgttaggcggtctttattatttgcattttgtgtgcgtgtagattttgatatatt

SEQ ID NO: 12646 - DNA, 363 bp, Gossypium hirsutum
  Clone ID: LIB3135-048-Q1-K1-C1
cccacgcgtccgcggatctgagatttcagttgggcagttgcaaggaactgatgtcaggcatggaggtcgccaaagatcaagaactagtagacggaactgttgcacaggagtctggaaaatccatgccgtcatctcaacaggaggaggcagttgtaaagaaaaaatacggagggattatgcccaagaagcctccacttatctctaaggaccatgaacgtgcctactttgactctgcagactgggcacttggaaagcaaggtgttgagaagcccaaaggtccacttcaagccctccgtcccaaattgcagcctacacaacaacaaacacgatataggaagtctccatatgctccatcagatgtcg

SEQ ID NO: 12647 - DNA, 250 bp, Gossypium hirsutum
  unsure (1)..(250): unsure at all n locations; Clone ID: LIB3135-048-Q1-K1-C10
gccatcttgttggtggtcctcaccatgttctccaccttcgcactttacaaaaagatccggtgatattttttagaaacacagttcttaattactctcatgtctgaatttgtattgtgtgttcatcttttgactatataggtggcaagtgttattgtctgtaaatgatggcttagtttgtattttgttattttcttagattagtttgtatgttttttttattacatactaaattgaattgtttcacattntt

SEQ ID NO: 12648 - DNA, 424 bp, Gossypium hirsutum
  Clone ID: LIB3135-048-Q1-K1-C11
cccacgcgtccggacatctagctaagcttatcctctcgtcttctcacatcatggccatgcttagagctttcagcacaagaagaaaccgtgatggctatgaaaggttacttcttgaaaccgaagttgaggagcctgtaatttccagcaatggtcaattcgaagcacagttgaagagagctagaagtgtgccagctcgagtttttggcttatccagaaagtttaacggccccgaactggggttgccggagaagtgtcaagagaaatcttcgacaatgaccaactccaacaaaaagggcagcaagtccaagactattcacccacttttcagcctatttgatggtcgtcgtaagaagaaaactacagctaaaccagagtttgctagatatattgagtatctcaaagaaagagggatgtgggacatgaa

SEQ ID NO: 12649 - DNA, 80 bp, Gossypium hirsutum
  Clone ID: LIB3135-048-Q1-K1-C12
aaaaaaaaaaaaaaaaaaaaaaaaaaaaaattaaaaaaaaaaaaaaaaaaaaaaaaaaaaggggaaaaataataaaaaaa

SEQ ID NO: 12650 - DNA, 400 bp, Gossypium hirsutum
  Clone ID: LIB3135-048-Q1-K1-C2
tgacactggtgaaaatggtaaatgaagccacctcaaacattccaaattggggttcatagaaaagggaaaaaggaaggttaggggtgcaattgcaagatataggcaagaagggctcccttcatttcagttgtcagctgcagatattgggttggtcatggtggggaagaaagaaagggagtgtttggttatatgttgctgtttattctaaagtaatcttgcttggaatttccttccttgagtgtgagcgtaggtacaaggatgcgatacatttactaaggcgattgcttgattgcttcacctgtgatgcaagaaggggatattggaccgtaagattatctgttgatttggagcatattggctgccccaatgagagtctttcaatcgctgaggctggattatt

SEQ ID NO: 12651 - DNA, 495 bp, Gossypium hirsutum
  Clone ID: LIB3135-048-Q1-K1-C3
cggacgcgtgggcggacgcgtgggcttctccagtgaccaaaaaagcttcattgtctcttctatcggaaaccccatggctgctcttaagctagtttgtgctctagtgttgtgcatgttggtggttgagcccattgccacaaccaccataacatgcggcgatgtgacaagcaaagtggccggttgcttatcatacttgcagaacggagggaacgtgccgaaggcttgctgcgacgggatccggtccctgaacaacatggctcgaaccacccctgaccgccaaaccgtgtgtgggtgcttgcaagctgccgctaaggctgtcaaaattaaaagcaacttggctgagaccctcccagccaaatgtagtgtcaacatcccttacaagatcagcacttccactaactgcaaaaatgtgaagtgagatggatgaagagagggttttgcagcaacttgcaggagataaaatatatgattaaaaagaagaagaagaagaatgaa

SEQ ID NO: 12652 - DNA, 497 bp, Gossypium hirsutum
  unsure (1)..(497): unsure at all n locations; Clone ID: LIB3135-048-Q1-K1-C4
cccacgcgtccgaaaagagaaagaaaaaagaaaaaaaaaaggttcagatttcttcgccggtaaaaaacccggaggcgtttctccggcgaggcgttagggtgtagcttccaagtagcatgaaaagtcatcgtcgtcatcgaaaagttgcgacggtgaagaatgattataagcaactagatcgatttgagtcaggtgaaggagataagatgaagaagcaaagatttaagaggaaattgttgaggtacgaagagttaccggattatttgaaagataacgagttcatcttgaattattaccgatgcgaatggccattgaaggacattttattaagcgttttctcattgcacaacgaaacgataaatatctggacgcatttggcagggtttttaatattcgttggattaacggtgttcagttccatggaggattttggagatggaagtttgatcaccagtttttccaaagctcaagtatcangacccgtgatgatgatgatg

SEQ ID NO: 12653 - DNA, 469 bp, Gossypium hirsutum
  Clone ID: LIB3135-048-Q1-K1-C6
gcgcccacgcgtccgcccacgcgtccggtttcctggtacgacaacgaatggggttacagttctcgtgtggttgatttgatcgttcacatggcatccaccaaagcatgttgaagtttcttcagggccagtgaagaagttgtgtttctgatctaaagaatatgaggtgtttgagagaagcttcttgttatatggaataaaaaacccaatgattttaccccttcttgcatgtttacatttctggttttgaaggtgtagtgaacaagtttaccagtttgatgttatgaagtaaaatggcgtttatacattcgaaaaaaatataattaaacgtttttattttgttaatctaaaccttatttatcttaatagattagtctggtgttttatttttcgatggattttctgttttcatttccattgaagattttagatattgaagtttgggggtgcctttttttggggttttaatttt

SEQ ID NO: 12654 - DNA, 360 bp, Gossypium hirsutum
  Clone ID: LIB3135-048-Q1-K1-C7
gaggcgcactcttaaccattaattattctgcttagctggcacatgctgttaacgggggccttggtgttgtgtttagacttcccgagccgctcaacgaacacgtccctaaccttacctaccctgactacaattagaacgctggtgtcctagaccttgagattactgccggacctgctattatctttcatccccgaagagaggacatgcctcactcaccacctgagggccgagttcctgatgctaccaatggtggtgatcacctgaggcaggtttttagtgctcatttctgtcttagcaaccaatacaattacaatctttatagtggccacactttggcaaggtgccaaaaagagaggtccg

SEQ ID NO: 12655 - DNA, 489 bp, Gossypium hirsutum
  Clone ID: LIB3135-048-Q1-K1-C8
attccggaacttccttgttgactggacctacggctattattgctcaagtcaatcttgctattggtgcaacaggggttgtaagtcaagaatgcaagactgtagtttcagaatacggagaaacaataattgacttgctattatcgaaggaccaaccactgaaagtttgctcacaaataggtttgtgttcatttgatggaactcgagatgtaagtatgggaattgaaagtgttgtgaatgagaatgctggaaaagcctctggtaatgtccatgatgcaatgtgttctgtttgtgagatggcagtcatatgggtgcaaagccaacttaaacagaaccagactcaggagcgtatacttgattacgtcaatgagctctgtgaccggttgcctagtccaatgggagaatcagttgttgattgtaacagcctatcttctatgcctagtgtcgccttcacaaatcgtgggaagatacttgagcttacccctgagcagt

SEQ ID NO: 12656 - DNA, 497 bp, Gossypium hirsutum
  Clone ID: LIB3135-048-Q1-K1-D1
gggagatcactgattgcaaacacttgctgcttagtgaatcgtgtcactggagtcaaaactaatggaacaaaaaatttcattgtcattgatggcagtatggctgaacttatccgtcctagtctttatgacgcttaccaacacatagaactggtttctcctacacctcctgatgcagacgtctctacctttgatgttgtcggacctgtctgtgaatctgcagatttcttgggaaaagagagagaacttccaaccccagctaaggggaccggcctggtggtgcatgatgcacgtgcttactgcatgagcatggcatcaacatacaatctcaagatgcgccctcctgagtactgcgtcgaagaagatggatcggtgaccaaaatccggcatggggagacatttgaagaccacattcgttttttcgagggtctgtgatttgaacaaaacaagtgtccattttgaggcttgaaattggatattgtttttgcaaaattcatgga

SEQ ID NO: 12657 - DNA, 206 bp, Gossypium hirsutum
  Clone ID: LIB3135-048-Q1-K1-D10
cacaccctatcattataaaggtagcaactatcatcctcggaatggatgcatcacatgggtgtgcccctcagcctgatgtgcctacaacaactgcggtggttaactccaggcaatggccattgatttcccgctatatgtgcataatccgtacacagtcttcgaagcttgaaatgatagattctctttttaaaccagttttatgacaa

SEQ ID NO: 12658 - DNA, 363 bp, Gossypium hirsutum
  Clone ID: LIB3135-048-Q1-K1-D11
gttttctactcacacggacgggagggagactagaaaaggaagacaacgatggtgtctctgaagttacagaagcggctcgccgctagcgtcctgaagtgtggccgtggcaaggtttggcttgatcctaatgaaatcaatgaaatctccatggccaactccaggcagaatgttaggaaacttgttaaggatggttttatcatccggaagcctaccaagattcactcccgatctcgtgcacgcagaatgaaagaggccaagagaaagggtcgtcattcttgctatggtaagaggaaaggtaccagggaggcaagattgcctacaaagattctttggatgaggagaatgcgagtactaaggcgtttg

SEQ ID NO: 12659 - DNA, 266 bp, Gossypium hirsutum
  Clone ID: LIB3135-048-Q1-K1-D12
aacaaggcctaccttctagcctaagtttcgcactctcggtaagtttgagttctttgtacaggacattaattctgatatcatattctatatatatatatatcttcttttttgtttcccttttgtgggaattttctttctccttcaaaacatggttaatttatatatgaacagtagagattttatgaaagaaactaaacctaatgcatatatagagagttctagggttaatttttaaaagtttcaaattgatcccatccaattgttac

SEQ ID NO: 12660 - DNA, 485 bp, Gossypium hirsutum
  Clone ID: LIB3135-048-Q1-K1-D2
gcagaggccgcggctttcacttcccttctctcacctcttacagaagccagaagtcagtttagtagcaatggcgtatgctgcgatgaagcctaccaagccgggtttggaggagccccaagagcagattcacaagatccggatcactctctcctctaagaatgtgaaaaacctagaaaaagtttgtgctgatttggttcgcggtgcaaaggataagagactgagggttaagggaccagtaagaatgcccaccaaggttcttcacatcacgaccaggaagtcttcctgtggtgaaggaacaaacacatgggatcggtttgagctccgtgttcacaagcgagttattgacctattcagctcccctgacgtggtgaagcagatcacatctatcaccattgaacccggtgttgaagtagaagtcaccattgcagattcttaaatgtgccttactgctgctttttggcctcacaaggtttttagtttatttg

SEQ ID NO: 12661 - DNA, 388 bp, Gossypium hirsutum
  unsure (1)..(388): unsure at all n locations; Clone ID: LIB3135-048-Q1-K1-D3
ctctttgacctcatcctgcgaactatctgaatatcaagagcttgctggacttgacctgccaaactggggctgatatgataaagggaaagacacccgaagagattcgcaagaccttcaacatcaagaacgatttcacccccgaagaagaagaagaggttaggaaggagaatcaatgggcattcgagtgataagaaaagcctttaatttaatgttgatattattatangttctatgcttttctcgctagggttttcaagttggggaaaaaaattaaagaacattggctntctttttggctaattttgtatatgcattagtgtcttctattctagaggatatttaatatgaaactctccctnctctattatcataatataattagaaattc

SEQ ID NO: 12662 - DNA, 356 bp, Gossypium hirsutum
  Clone ID: LIB3135-048-Q1-K1-D4
cccacgcgtccggtgttatacacattcgaccttgttcaccacatacttggaagaactacgccaaagatgcccactgggtggaaatagaagagcgatgacaaatcttgatccaacaacacctgatggtttcgacaataactactttacgaaactacaagataatcgaggctcgcttcgaagtgaacagaatttattttcgactgagggtgctgatacaattgaaattgtgaaatggtttagtagtaatcaaacagctttctttaaaaagctttgtggaatctatcatcagaatgggacatataaatcctctaacaggtgcggtaggagtaactagatcaaattgccgcgccttgaat

SEQ ID NO: 12663 - DNA, 304 bp, Gossypium hirsutum
  Clone ID: LIB3135-048-Q1-K1-D5
actatgttaatattaaaagctcgttggacttgcctgccaactggggctatgtggaaaagtaaagacaccccaggagattcccaagaccttcgacatcaagaacgatttcaccccccaagaaaaatatgaagttaagacggagaatcaatgggcattctagtgataggagagcctttcaatctaatgatgatattattataggttctaagctgtacacgcctgggtttcaaggttgggaaaaaacataaaaacattggctattgcttggcttattttgttatatgccattacagccttctattct

SEQ ID NO: 12664 - DNA, 181 bp, Gossypium hirsutum
  Clone ID: LIB3135-048-Q1-K1-D6
ccaactcgaactctcatgctttattttgtacaatatgaacacttccttggctattacggaatcctgggtttcaatggatggaaccaacgcctcctttccagaaaccaccaactacgttcttaaaggaccgtaaccgctttcactttttaagactcctaacttcattacaaattcaacatct

SEQ ID NO: 12665 - DNA, 418 bp, Gossypium hirsutum
  Clone ID: LIB3135-048-Q1-K1-D7
gagagagagaaacacatagagggagaaatggtttctctgaagctacataagcagctctgggtgagcggtctaaagtgaggaaaaggaaaggtttggctcgatcctaatgaagtcaacgagatctctatggccaactgccggcagaacataaggaagttggataaagatggttttatcatcatgaagccgaccaagatttaatgtcgatcttgtgctcgtcgcatgaaggaagtccagagaaagggacgtcactctggatatggtaagcccaagggttcaagggaggcaatgttgcccacaaagatcttatggatgagaatgaagcatgtacttagacgcctactccgcatgtacatggtattaaatataaatggcatgcacatgtaccatgacatgtacatgaaagtcaagggtaatg

SEQ ID NO: 12666 - DNA, 374 bp, Gossypium hirsutum
  Clone ID: LIB3135-048-Q1-K1-D8
ccagctctagtcctaatgctctaacttgaagttgaaagtagcctttttgcctattaccaaagcctctctttaagtggaataaaggaacttgttcactatctatcccaccaccaccggcattagtgctgtctagttgtgttcaatgtttgagcctcgtagctcggtgccttattaaggatgtggaaaagagttggaaataaagagactaatataatagagaataggggttcttgcaggtatccatcaatcccgaaacgacagcccctgcaagagaagagaataagcagctatttcatcttctttttgcgtgatttgattctcctgatcccggtagaatcgtattaggagtcgccctactgagattttcaatctga

SEQ ID NO: 12667 - DNA, 290 bp, Gossypium hirsutum
  Clone ID: LIB3135-048-Q1-K1-D9
ggcgagcacgcgtccgtaaacccctgggactattttgacgtcggttttccttattctgatggaatacaccccagggccgattccgacatcttgcaatggcatgtcttggtgcgtaaccgtctacgcgtcaccctgttgtgctttgtcggatcgccgggcggcatcaacaagaacgatctacgaggctagctgtagaaaatatgatgaactctttcgttttatggaaacacgttatttgttaaggtacttgggggcttcaacagacacatgcttgatcctggaaacagaca

SEQ ID NO: 12668 - DNA, 85 bp, Gossypium hirsutum
  unsure (1)..(85): unsure at all n locations; Clone ID: LIB3135-048-Q1-K1-E1
gttcgaaannaaaaaaaaaaaaaaaaaaaaaaaattaaaaaaaaaaaaaaaaaaaaaaaaaaaaaagggggaaaaaggggaaaaa

SEQ ID NO: 12669 - DNA, 342 bp, Gossypium hirsutum
  Clone ID: LIB3135-048-Q1-K1-E10
cagaaacataactcgtatcctttctggcgtttaccctgtttactgaacaatttaacttgtagggattgcaccgacagcaatagcaggtgcgccggcagcattctcaggaggagcaaatgatgcatcaccggcaccatctcccggcagctcatgctctcaagttgtttatgcattaatggcagctcctatcttacacttcataattatgttaacctgtatgaactaagctatcctctcctgttgattcacttacccttttgtatttacaatgaggtcggagtaagtttcatttatttattgacatttgaaccattcttgtgcgcatattaaattatattttta

SEQ ID NO: 12670 - DNA, 366 bp, Gossypium hirsutum
  Clone ID: LIB3135-048-Q1-K1-E11
cagaaatataactcggaacctttctggtgatgaccctttttactgaacaatttaacttgtgggtatggcaccgtcagcaatagcaggtgcgccggcagcattctcaggaggagcaaatgaggcagcaccggcaccatctcccggcagctcaggctctcaagttgtttctgcttcaatgggatctcttatcttaggcttcataattatgttaacctctatgtactaagctatcctctcgtgttgatttacttccccttttgtattgatgatgagggtggagtaggtggcattgattttgtgagctttggaccatccttgtgagcatattagattatatattagtctgaaaaaaaaaaataccatggg

SEQ ID NO: 12671 - DNA, 328 bp, Gossypium hirsutum
  Clone ID: LIB3135-048-Q1-K1-E12
cacacacttacacccactcgtccgcttggttttagttatggagtacaccctttcacaaatgtggtcttacattgacctctctaaaacctctacatttgattaacacctacacacaattttaatcatatcaaaaaaaaattaaaaaaatttcttataataacaaacgtttttaaacaatttattttttttttttaacaaaataatgattttttttttttttaaagaaatttacatttttctcttttattttttaaaaatttgcgcccttcttttattaaatattttcctttctttataaacttgtagtttaaaagctttttttttcttt

SEQ ID NO: 12672 - DNA, 382 bp, Gossypium hirsutum
  Clone ID: LIB3135-048-Q1-K1-E2
ctctttgacctgatactgcgaactgtccgaatatcaaaagcttggtgggcttgacctgccaaactggggctgatatgataaatggaaagacaccccaggagattcgcaagaccttcaacatcaagaacgatttcaccccctatgaagaagaggaggttaggaaggagaatcaatgggcatttgacagatatgaaagcctttaaatttaacgttgatatcattatagaggctatgcttttctcgctaggttttcaagatggggaaaaaaattaagaacattggctttcttttagcttataatgttatatgcattactgtcttctattctagaggatatttcatatgtacttctcccctcctctagtatcataatatcattaga

SEQ ID NO: 12673 - DNA, 398 bp, Gossypium hirsutum
  Clone ID: LIB3135-048-Q1-K1-E3
cccacgcgtccgggagcagagaagggccgatccattatgtctaagcgaggaaggggaggtagtgcggggaacaagttcagaatgtcgctgggtttaccggtggcggctacggtgaactgcgcggacaacactggggccaagaacctctacatcatctctgtcaaaggaatcaaagggcgtctcaacaggctcccatcggcttgtgtcggtgacatggtcatggccaccgtaaaaaaaggaaagcccgatttgaggaagaaagtgttgcccgccgtcatcgtccgacaacgcaaaccttggcgtagaaaggacggcgtctacatgtacttcgaagataatgctggtgtcattgtcaatcccaagggagaaatgaaaggatctgctatcactggtcccat

SEQ ID NO: 12674 - DNA, 463 bp, Gossypium hirsutum
  unsure (1)..(463): unsure at all n locations; Clone ID: LIB3135-048-Q1-K1-E4
cccacgcgtccgcccacgcgtacggaaacaccatcaaagcttgcaagtttcaataatggatgaatctggggagtacccaaaggagtactacaccagcaacggcaaccccaggagactgacttcaacatcctcatcttcttcgtcaacgacgagcgttcacgttaccgccttggatggcctcgtcaacgtcaactacctcttcaccatcgacgtctttgtgggcactttctttggccactccgggccaacacagtctcgagaaccgagccccctgcgacgccggcattgacgtagctaaaaagctcttgggcttcgagggcgtctccttcagcttattacttttctcctccctggnggctcagggactaaagctcgccatcaatttgttgaacagcaaagatgtggatgaagctttcagggcacacattaaccttaaagtatcgaggtttgggatgatgggctc

SEQ ID NO: 12675 - DNA, 186 bp, Gossypium hirsutum
  Clone ID: LIB3135-048-Q1-K1-E5
tcgctttttcttatggtttcgcataacatattgctaccgccgtcaagcactcaagccatgaagtcgattgagcctcaaaattctttctctaactccgatttcaacaaagcaaaggaagattcatggcaactttacaaagtaagatttcttctttcactcttctttatattttgaaatacaatattg

SEQ ID NO: 12676 - DNA, 204 bp, Gossypium hirsutum
  Clone ID: LIB3135-048-Q1-K1-E6
gccacgcgtactgccacgcgttctaaccggctctgatatgagacgtatgacctatgaagactctgggcgggtaacgaacgtatcttacgacactcggcatgctgacttgcatgatctttttggaccatttggtgctttgtcacgtttgtatgccgctattgatcagaacacaggcacaagtggaggcgttcgtgcttgtcaact

SEQ ID NO: 12677 - DNA, 452 bp, Gossypium hirsutum
  Clone ID: LIB3135-048-Q1-K1-E7
gcagcaggagcggttaagctttgatttgtacaatattatcagtggcttggctttcactgaattttggctctcaagggatggatcctacttttctcttccaggtgacaagcctgcgttcttggaggagtgatgacgtcttcattatttatgactgctgcattcatgacaagctcactgacttgatgtgtctcacggcttgtatgatctacatggtctgatggaggaagagatgctgttgtacgtttgacatgacgggactatgagtaattgttactacaatctgcacctctcctcatggtgcttgttgtagcggtgggattctgtgatagagctgattggcttgacttcttgaacaccgaagatgatcagaatgagaccaaggcactctatccatcggaatacatttaatattgaacgtctataaacatcgattgagtgcagttcttaaagga

SEQ ID NO: 12678 - DNA, 445 bp, Gossypium hirsutum
  Clone ID: LIB3135-048-Q1-K1-E8
gcagccgcagccagcaagcagcagtagcaacagcaggagcggaagaatgtctcacaggaaatttgagcacccaaggcatggttcccttggatttcttccaaggaagcgagcctctcgtcacagaggaaaagtgaaggcattcccaaaggatgaccctaccaaaccttgcaagctcactgcctttctggggtacaaggctggtatgacacacattgtcagagaggtcgaaaaacccggatctaagcttcacaagaaggagacatgtgaagctgttacaatcattgaaacccctcctatggtgattgttggggtggttggatatgtgaagacaccacgtggccttcgctccttgaacaccgtctgggctcagcatctgagtgaggaagtcaagcgccggttctacaagcactggtgcaagtccaagaagaaggcttttgtcaagtac

SEQ ID NO: 12679 - DNA, 369 bp, Gossypium hirsutum
  Clone ID: LIB3135-048-Q1-K1-E9
aaaaagggccgaggcacgcgttcgctatgaagtgcacagtgttcacaccatggtttggaagtgcatcgttcattctttcaagaagtacactttgcatgaggatgttggggctgatgattactattgtaggttcgagtataaagctgctaccggtgcctttactcctgaccgagttgctgtgtattgcaaatgtgagatgccttacaacccttatgatctcatggtgcaatgtgagggctgcaaggactggtatcatcccgcttgtgtggacatgacaattgatgaatcaaaaatgttggatcacctttgttgttccgaatgttctgaggatgatccgaaaatgatcacaaaacggatttcattcatcac

SEQ ID NO: 12680 - DNA, 398 bp, Gossypium hirsutum
  Clone ID: LIB3135-048-Q1-K1-F1
gcagttgctggaagtgagtttgacccacaacggtctcgtacaaccgaagctagccctgggcacaaacatttaaatcaacagcgaggtcctgttgaatcttcttctgaccctaagcacactggaagaaacaccaagaactacgaagttgccctcaaggggattgagggccttcaatttgagagcgatgagagaaatcagtattaaaattgtgagctatatgaattgttgtaaagcatgaaatgatttgtgtttgtccttgttggtgggttgagttgaaggaatttgtaaaaagttggagctctggagttgggactctcgtgttgtgcacccaaagcataaatttctgcactgatggaagagcttgtgaagtgaaaattgactgacactgctatcgaaaa

SEQ ID NO: 12681 - DNA, 371 bp, Gossypium hirsutum
  Clone ID: LIB3135-048-Q1-K1-F10
gaccgatccaaaccctgatgaccctcttgttccggagattgctcacatgtataagactgatcgggcaaagtatgaagccactgctcgtagctggacccagaagtatgccatgggatgacagttgttggtgtgtaatatgtatcagctttcttatgttgccaactgtgtcgaaccattttatgttttcttttggggaagggagggggtgttttttcttaaaggaatttgtcattgtgctttggatatgggaagatatggacattctttttatttattccgcgctttataacttgtgtgaaacccttgtttcgttctcgaagtcgctgtgaaaccctttgtttcgttcaatgtaacaaaaaagtctttggttc

SEQ ID NO: 12682 - DNA, 364 bp, Gossypium hirsutum
  Clone ID: LIB3135-048-Q1-K1-F11
cccacgcgtccgcagactcccgcaaaaccctcacgacaaaagaattctcttttctattttgcaccactctcctgcaaaaatgtttcgatccgttgctagatcggccgccggtaagaacctcctccgacgaggatatgcaaccgccgtacctgaacggaaagtcgctgtcttgggcgcagctggagggatcggccaacccttggctctcctcatgaagcttaaccctcttgtttctcaactggctctctatgatatcgctaacactcccggtgttgccgctgatgtcagccacatcaactctagatctgaggttgccggatacgttggtgaagagcaattggggaaagctttggagggatgtgat

SEQ ID NO: 12683 - DNA, 266 bp, Gossypium hirsutum
  Clone ID: LIB3135-048-Q1-K1-F2
cccacgcgtccggtgagttttactgtgatccgtgaagattgtagtattctgaacctactattaaagcattcattttgactgctaaaccaataatgattgttggagtgcatcttgattgaccctataatgtgttctgattcttgattttacctgttaaaaaggtaaaattagcttagagttacaatcactgttgatttgggcatcaagtcatgcttttaataaacttggaatcgatttagcagatcacagaatgtataatttttaac

SEQ ID NO: 12684 - DNA, 415 bp, Gossypium hirsutum
  Clone ID: LIB3135-048-Q1-K1-F4
taccaacccatttgccggaactggaaaaaacaatggggctttcacccttcttccctctgctaggaccagtgaacgcgcccatcatcgccggaccaccaccagatctagtggccgacatcgcgcaataggggtttcaaccccgttttaaaacacgcgtgccaagcggagatcgtggggaggtggtgtggcgcacgactctgagttgcgcgacgtgcggagcccggcttgcggcgctggctttcctgatgctgggtttctcatttccttttttgttttattggtatttgggcttgtgttttgctttgtatatcgggctgagagatgtgggctaagctttgggtaatctgttgggctttgggtttgttttaaatttggtcctacaactatattcattaaaaatacatgactatcacat

SEQ ID NO: 12685 - DNA, 213 bp, Gossypium hirsutum
  unsure (1)..(213): unsure at all n locations; Clone ID: LIB3135-048-Q1-K1-F5
gcaatggatttatagctgcagtctttttaacccaaatatgaatcacttacgcttatatgattcttggggagaaagggatgggctcttcctttctggtacagttcaccgcatttgtagaatagaaccaaactgtccttgtcacaaaacantattgatgatttattcattatagtcgcagatgttcacttcattaaaaacttacagcataattgt

SEQ ID NO: 12686 - DNA, 230 bp, Gossypium hirsutum
  Clone ID: LIB3135-048-Q1-K1-F6
gtaaagcaaactgtcaagcgttgtttttagctgttttttaactcgcatatgtttggaggaatctggggttgaaaaggaaggaggcttccatcctagaactggttatttaacttcctgtcaagaagcaaattatcctttataccttttatggacggacttttacattagaagagaaatacttgttactcttcttacaatcctaatatcaaaaatgactttttggaaggaat

SEQ ID NO: 12687 - DNA, 486 bp, Gossypium hirsutum
  Clone ID: LIB3135-048-Q1-K1-F7
caagacggagctttgccgctttagtggtgccaagatataccctgggaaaggcatcacagaagttcggggtgaaacccatggcttcctcttttccaattcagaatgcaggaggtacttccacaaccgcctgaagccatcaaaacttacatggacggccatgtacaggaagcaacacatgaaggacattgcccaagaacctgtgaagaataggagacctactgcaaagaagccatactgcagatccattgtgggtgccaccttataggttattcagaagaagaggagtgagaaaccctaagttcgtgatgcagccagggaagctgctatccgagaaatcaaggaaaggatcaagaagactaaggatgaaaagaatgcaaagaaggcagatgtagcatcgaagcaacagaagacacaaggcatgggtaaccctccaaagggtggtgcactcaaaggtcccaagcttggtggtggtggtggaaagcgata

SEQ ID NO: 12688 - DNA, 330 bp, Gossypium hirsutum
  Clone ID: LIB3135-048-Q1-K1-F8
cttgcaggaaaggttcagcgaggtactgtcgcatgtcaaaaggcccttgacatggactgaattctggctttcaagggatggagccttgtcagctttacttggtgtgataataggtgttcttgcaggcaagaaatttttttggtaatttataggtactgcaatcaccagcaaggcaccaacttgtggtttctaactggttataaatctagtctgttcttgatgaggaggtgatgttgttgtagttttaaataacagcaaataagatgaattatgcttactcctgccaattttatatttaagaattcactactgcacctttcacttaaaggt

SEQ ID NO: 12689 - DNA, 480 bp, Gossypium hirsutum
  Clone ID: LIB3135-048-Q1-K1-G1
atcgtgaatccctacactaccctagaggcttccatcttcaaagctgtgactgaggccttcattaataaagctgctggtaggaacatcaccagggtggctggtgtggccccatttgaggtatgtttcagctcaagaaacattgtagggacacgtttaggagcagcggtgccatcaatagacctcgtgttgcagaacgagaatactttttggaggatttttggagcaaactcgatggtcaagtttagctgggaagtgacgtgtcttgggttcgtgaatggtggctcgaacccacaaacttccattgttattggagggtaccaattggaggacacttttcttcagtttgatttggcaacttcaaagctggggttcagctctacccttttgggtaggcaaactacttgcgccaatttcaacttcacatctaatgcttagatggcatacggcagaaataaattttacaaattataatgttgtgag

SEQ ID NO: 12690 - DNA, 309 bp, Gossypium hirsutum
  Clone ID: LIB3135-048-Q1-K1-G11
cccacacatacgtagactcccgcataaccctgaccacaaatgactgccattttatacttgggggcactctcccgcaaaaatgtgccggtgcgccgctagatctgtcagggggagcaacctacgccgacccggatatacaaccggcgtacctgagcggaaagtcgctgtcttgggcacagctggagggatcggacgacccttggctatgctcacgaagctgaaccctgctgtttctcaactgggtctctatgatatcgctgacactcccagtggtgccgctgatgtcagccacattaactttagatctga

SEQ ID NO: 12691 - DNA, 241 bp, Gossypium hirsutum
  unsure (1)..(241): unsure at all n locations; Clone ID: LIB3135-048-Q1-K1-G12
aaaaancgggccgacgcacgcgtccggtggttccaatgcccttcttctccaccacactactataaaactattgaccccaaatcccctgtcattatcaaaaaaaggaacactcttgctttctttatcgcttataatcaataaagttgcttttaaaatgggtacaaaaaccatgtattagaatttcatcatcactatcaccaaatgtagaacatttgctttcttgacggggtcttttcaatct

SEQ ID NO: 12692 - DNA, 457 bp, Gossypium hirsutum
  Clone ID: LIB3135-048-Q1-K1-G2
gtttgcaaaagaggtgacacccgcaaatggaaggctgggacccgaatacgaagtcgacgctaacacagatcccgctactgacgacgaatgcgggtcccagagacggagcggcatggactcagcggctgaaggaggagcataaggctttgatcgcctacacgcagatgaataagtccaacgacaacgattggttacggatatccgcagccaatccggaagggactcgttggaccgggaagtgttggtacgtccataaccttctcaaatacgaatgcgatctccagtttgatatccgcgctacttatccggtcactgctgccgagctcgagctgaccgaactcgatggccagactcagaagatgtacagaggagggaagatttgtctgaccgtgcattttaagccactctgggcaaagaaatgttctaggtttggaatagcacatgcactgtgtttggg

SEQ ID NO: 12693 - DNA, 486 bp, Gossypium hirsutum
  Clone ID: LIB3135-048-Q1-K1-G3
cttgtcaggcttctgggcttctgtgtggatcagcaagaacagttgcttgtttatgaatttatgcccaacagcagccttgatgttgtcctctttgatccaaagaaacgtgcacaactcaattggagcaaacgtttaaacattattaatggaattgcaaggggaattctttatctacacgaggattcacgacttaggatcatacatagggacctgaaggctagtaacgtgttgctagattttgacatgaacccgaaaatctcagattttggaatggcaagaatctttgctggagcggacagtgaagctaatacagcacgtatagtcggaacatatggatatattgctccggagtacgccatggagggattgtattcaatcaagtccgatgttttcagctttggagtactcttgcttgagataattacaggcagaaggaatgcaaggttcaatcaaaagaaacatgcccaaacccttgttgcatatgca

SEQ ID NO: 12694 - DNA, 345 bp, Gossypium hirsutum
  Clone ID: LIB3135-048-Q1-K1-G4
gcggcaaagggccaacaacttccacaactaattactctcaaagcaattcatcctattccacttgaaaatgtgacattggatggggaagcacttactttggagcccatgcttttaattatgaagaacttgaggaagccactgacaatttcaatccttctaaacaactcggagaaggaggattcggcactgtttattatggcgtactcagggatgggcgagtcgtatcggagaagcacttatacgagaacaatattaagcgtgtcgatcattacatgaacgagatcgaaatactcactcgcatgcttcatacaaacctcatgaagctctatggatgtacctcgagac

SEQ ID NO: 12695 - DNA, 480 bp, Gossypium hirsutum
  Clone ID: LIB3135-048-Q1-K1-G5
ggaaattacaatggcaagaagggtttcgagaggcaggggagtcggcgtattgttcgatgaagaaggcgttttcctcgatggtgtttataatccgggagctccatagctatactctgcaaatgcgagagcttttgttttatgaagatttacaagggattctcgttagagttcaaaaagagatgcacgcttcattcgtttggttgttccaacaggtcttttctcatacacccactttgatggtctacgtgatgatcctattagcgaattattcggttcattcaatgggaagcaacgccgctctggcagcaaccgccgctgcgaatccgacgccggggtcttatgttgctgtggttgacgttcaagatcagaaggattccaacttcgattcttcgtcgataaagtcattttcagtgtcgtcatcgagcgggaaaaccgcttccatcggggggaacaacggcggcggtggaaaagtccggtctg

SEQ ID NO: 12696 - DNA, 403 bp, Gossypium hirsutum
  Clone ID: LIB3135-048-Q1-K1-G6
cccacgcgtccgggattatctggaagatacccaggtttgatgtcattgaggagcgttgatctttggccagctagttggatggcagttgcctggtacccaatatatcacattcccatgggaaggaccataaaggacttgtccacatgcttccttacttaccacactctatcatcttctttccaagatatggacccggagaatgagattgagggtggcgaaaggaagggaaaggaaggggagtgcatctcccttccaccattcgggatggccacatacaagatgcaaggggaagtgtgggcctcgggcaattcaagacgggaccaagagaggctagtgtcgcttttaagcgtggcagattcgtggctaaagcaactttagggcccacatcatgacttcaactact

SEQ ID NO: 12697 - DNA, 491 bp, Gossypium hirsutum
  Clone ID: LIB3135-048-Q1-K1-G7
cccacgcgtactcccacgcgttcgttcacgcgtccgtgattcgtgaggggctacactgtgacccatgcttttcaggaagagcaattgccatgcctaaaatgcttattgatggtgctgtaaagtatgaagatggtacccctgcaactgaagctcagatgtggaaagatgtggagacatttttgtcatgggcggcaaaaccagaaatggaagaaaggaagctgatgggatttaaatggatatttgcattgtcattggccttgcttcaagctgcttactaccgacacttgaggagctcggttctcaaatctagcaggctgggacttgatgttgtgaactagcctactgctccccaagattgtcgatttttagagatatgattcggcaataattgcttatcacgatgttctacgttctgccatgaccaacgtggagggtgagtcttttttatagagctgagaagaaataagctggtcgacacacatgcattaaat

SEQ ID NO: 12698 - DNA, 468 bp, Gossypium hirsutum
  unsure (1)..(468): unsure at all n locations; Clone ID: LIB3135-048-Q1-K1-G8
ctaacacagatcccgctactgacgacgaaggcgggtcccagagacggagcggcatggactcagcggctgaaggaggagtataaggctttgatcgcctacacgcagatgaataagtccaacgacaacgattggttccggatatccgcagccaatccggaagggactcgttggaccggcaagtgttggtacgtccataaccttctcaaatacgaattcgatctccagtttgatatccccgttacttatccggccactgctcccgagctcgagttgcccgaactcgatggcaagactcagaagatgtacagaggagggaagatttgtctgaccgtgcatttcaagccactttgggcaaaaaattgtcctaggtttggaatagcacatgcactgtgtttgggacttgccccatggcttgctgcagagattccgattctcgtcgattccgggatgatcaagcataangatgat

SEQ ID NO: 12699 - DNA, 241 bp, Gossypium hirsutum
  unsure (1)..(241): unsure at all n locations; Clone ID: LIB3135-048-Q1-K1-G9
gagggcttctggagtgggtgcatgaagccattgacagttatgggtacttgtgttccttaacttttcccagttcttaattgtgttattttaatgatgaagttgaatacttgtgaagaataaaatccttttttaatttcccttanaaaaaaaaaaaaaaaaaaaaaaaaaaaaaaaaaaaaaaananaaaaaaaaaaaaaaaaaaaaaaaaaaaaaaaaaaaaaaaaaaaaaaaaaaaatagg

SEQ ID NO: 12700 - DNA, 354 bp, Gossypium hirsutum
  unsure (1)..(354): unsure at all n locations; Clone ID: LIB3135-048-Q1-K1-H1
cccacgcgtncgcccacgcgtncgcttttctccctttttttttcaccaaactcctccggcgatgccatatttcacgtttctgttttcattttgtacgaaaatcccatcctaaattacctaagaagatacaatttttgctccactcttttctgtcccctgttccttctgtttaaaccctgttttcctcctctctttttttttttttggcttgttcatcagcattttctctgttgctttaactttttgtttgatatccagattttgttttccaattttcgatagttttcagaactacccatatcggaatttggctccttttttttttggttgtgtctatgcctctgatagaggtga

SEQ ID NO: 12701 - DNA, 205 bp, Gossypium hirsutum
  Clone ID: LIB3135-048-Q1-K1-H10
attttatcatcattcatgccatgccccatcttttgtgattgatctgaccacagtttacatgtgaatgttatgctgccatgttcgtacatttctgcattttgttggtttcatgggaaaaaaaaatcttattcttttatcttccatgctttcaatgagttttctaaatgtgttgacattgtttacgaatgtgtttgttttttacatg

SEQ ID NO: 12702 - DNA, 364 bp, Gossypium hirsutum
  Clone ID: LIB3135-048-Q1-K1-H11
ctggaactatctggggaaccgttgttgctacatggtatgatgtgcctcgtgttgagagaagtgttgccatacctgggcttgtaagaacgctaaagatgatgggaaattatggaatgacatttgctgcaattgggggagtctatattggtgttgagcaactgttgcagaattataggatgaagagagactttgtcaatggtgctgttggtggtttcgtggctggggcttccattctcggtttcaaagggaggagcatctcaacagctatttctgccggatcagcactggcattcacctctgcggtgattgatgctggaggtcagactacaaggctggacacagggaaggagtattacccatacac

SEQ ID NO: 12703 - DNA, 450 bp, Gossypium hirsutum
  Clone ID: LIB3135-048-Q1-K1-H2
gcagctctcttcgaaagagagtatgctcttattgatgcagacgatggagtaaggagagattctttcaagccgagagtttggacagttgaaaaagaaagggcaccctctttagaagagtttgatcaccaaagaggttttttcaactattcattgaaagggggagctttacccgctaaagacttagaactcgaggggagacgaatgctaagatgaaggccagtctcgggaatcagactcgggaagaataggatttttttccttgggactttgccacccataacataaatagaagaggaagcttctgccctttttccttcttttgagtctacgcacttttgcttagtatggtggttatatgcttgttaatttagtttaatggatcttctcataggtagctgcctgtaattagcgaccttcctcttttttacaagcatgagtaggacttctagt

SEQ ID NO: 12704 - DNA, 318 bp, Gossypium hirsutum
  Clone ID: LIB3135-048-Q1-K1-H3
gacgagatatcttttatatagagctacctacaattaattgaccggccgtcgacaaacaacggactgactgaaaaaaccctgtagccacctaaattaatttgcatgaaatacatctttctttagctagctggagtaataaaaaagaggcacggatcgatcgtccttacaaacaggtgggctgaatggatagtgagagggacgctctctctagccattcattaagcgcggtgtgggtggtacttacacccagagcgactcacttactagcgagctagctagcgctcgcttcgtttgctttccttcctttctttctacgca

SEQ ID NO: 12705 - DNA, 463 bp, Gossypium hirsutum
  Clone ID: LIB3135-048-Q1-K1-H4
ctgagatccattacttaagaggcctgctggaaagggctgaagaacataatcggcttattcaagctcgggtggacctacttaggaataagacacaagaagtcccggacataaaagattttattgggaagttgagaggtggaattttaagttacaagggaacacaaaatgtggagctttaaatggtctgcaactggtggggctggcaaagtgtatctcagactgcagtgactgagaagctgcatggagcggttaatagttaatacgtatttgtagtgagatggtgttaaaccttaagcgtggttgtaataagtaaatacattgcgagttctaaacctacttctacttgtttgggtaaagcaaaatgatgagtgtcgggatttgggtgagtcgaaaggtgtatagttggatttagacggtaaggccagcaagaatgaatcaagaaattgcaatgttggattgatat

SEQ ID NO: 12706 - DNA, 454 bp, Gossypium hirsutum
  unsure (1)..(454): unsure at all n locations; Clone ID: LIB3135-048-Q1-K1-H5
gcttatattggaattccgttctcaatttatacagatataacctgctacattctncatgggtagaagccgttagtctatatgatggccataaattatccaccgtaacttccatttgggattctggctatagtgcaatgaattcttggacaatcacacattgctgttccatccattgacaatggaccttcttgctttgtgaaaaagagggcttaacctttctctctgatcaacaataaacgtcttatttaagaaaccatgcttatacaataataagggagggattctaatccgtttgatccgcagctaaacattgataaaaaaaaaatgaacttcgcttattacaaatatattatcaatttaatagtatctttaatactagcttaagctgcatttttatcctgtttagttaacaaggtgtatcttaccttttagtatcctactttttctttattaa

SEQ ID NO: 12707 - DNA, 227 bp, Gossypium hirsutum
  Clone ID: LIB3135-048-Q1-K1-H6
ttttctttgtactttttcccctttacatatatataatagtaacctttttccctttttctttcttttgaaattacccacttttacttaatatgttctttaaattcctttttaatttatatttatataatcttttttataatagctttctttttatttaccaacctttcttttttttttcaaaacattaatttgacttttatttttggtaaaaattattcttttcttta

SEQ ID NO: 12708 - DNA, 457 bp, Gossypium hirsutum
  unsure (1)..(457): unsure at all n locations; Clone ID: LIB3135-048-Q1-K1-H7
cgcggcggtatacgttaacaagccctcccttcttctttttccgacaaaaaacatgagcgcggagcgcgaagggttgctttactaaataatataatgcacgttagcgctttaattttcaataacgggcggatcttgaagaaacaaaccgagcctaaagtaacagcctattacgtttttcaggcccctttacttgatattctattaataaagcactagcacccctatatagtaaaggtattctgctatcaattaaaccgaaagcaaaaatccatcgcgtttcgtatacatcgagacttgtagcttgattctttagtcattccatactgtttagaattgcaggaaatcacncgactcttcctatttctcaatgatatcctacgatcaagacaattcccgttaaactttttcatttcatagaagtgcattcttattcctacatagcaaattgcatttccta

SEQ ID NO: 12709 - DNA, 504 bp, Gossypium hirsutum
  Clone ID: LIB3135-048-Q1-K1-H8
tctgaacccaagccaccgatgtatgaaccaccaaagaaggaaaagtccgaaccaaagccaccagtgtatacacctccaaagaaagagaagcctgaaccaaaaccatcagtttatgaaccaccaaagaaggaaaagcctgagcctaagccaccactttatacaccaccaaagaaagagaagcctgaacccaagccaccagtgtatgaaccaccaaagaaggaaaaccctgagcctaagccaccagtttatacaccaccaaagaaagagaagcttgaacctaagccaccagtgtatgaaccgccaaagaaggaaaagcccgagccaaagccaccagtttatgcacctccaaagaaagaaaaaccagaacccaaaccaccagtttatcagcctccgaagaagccaccggtttatgagcctaaaccaccaaagccaccggtttacacaccaccaaagaaagagaagctgaacccatattaataatattattattaataatgaacatta

SEQ ID NO: 12710 - DNA, 72 bp, Gossypium hirsutum
  Clone ID: LIB3135-048-Q1-K1-H9
cccacgcgttcgtccacgcgttcgcccacgctttcgaattaaaaaaaaaaaaataaaaaaagggaatattaa

SEQ ID NO: 12711 - DNA, 411 bp, Gossypium hirsutum
  Clone ID: LIB3135-049-Q1-K1-A1
cccacgcgtgcgcaaatcctctcgttacattctggatgcaatatgggaaaagatggagatgttgccctcttctttggattgtcaggtacgggtaagaccactttgtctaccgatcacaacaggtatctgatcggtgatgacgagcattgttggagtgacaatggtgtgtcgaacatcgaaggtggttgctatgccaagtgtattgatctttcaagggagaaggagcctgatatctggaatgccattaagtttggaactgtgttggaaaatgttgttttcgatgaacatacgagagaggtggtttatggtgacaaatcagttacagagaatactcgtgcgggctatccgatcgaatacattccaaatgctaagataccattgctttgagcttctaaaattgtttgaacacat

SEQ ID NO: 12712 - DNA, 235 bp, Gossypium hirsutum
  Clone ID: LIB3135-049-Q1-K1-A11
gacccacaccttcgcggacgcctgggccaacacaaaacatttaatccaaccccagcttcacctgctggcagtgcgttctaatatttggttcaacccatttcattgttaaaatgtagctgtcaatgaagggttatttaataagagagctgggcaattaaggtggtgtaaaaacaatggctatgtccgtgtgagaaaagggcccctcaacttcacgatattatatatagttatattc

SEQ ID NO: 12713 - DNA, 416 bp, Gossypium hirsutum
  Clone ID: LIB3135-049-Q1-K1-A12
gacgcacgcgtcctattgacttattattttttgaagcattttatttattgcgaaacaccaggtcaaaccgggggctggaccttaattcaacaagataagaacaagaagaagcatcttgagaagcctgcccaattcgatatatggagctcaatcatatcacaaatggctgaggagtcttctaagtcagttccagatccgtatgttcaccctcttgtcaaaagatcagccagctctttaagcgagaaaagccttgaaatctgcactgagagccttggttccgaaactggctacaatggcttctcttcataccctccatcagaaacgagtgacatgcaagaagaggacggtcaataagacgatcaacaacttcaacaccaagagcaagaaaagggtgggggagctcaaaaatgttaaaa

SEQ ID NO: 12714 - DNA, 376 bp, Gossypium hirsutum
  Clone ID: LIB3135-049-Q1-K1-A2
cccacgcgtccgcccacgcgtccgctcacccaaagtgacatgattgctctttcagctgcacacaccgttggattctctcattgcagcaagttttcaaaccggatatacaatttcagccgtcaaagtgcagtagacccgacattgaaccaagcatatgcgacccaactacaacaaatgtgtcctaaaaatgttgatcccagaatagccattaacatggaccctaacacaccacgtgcattcgacaatgtttactacaagaacttgcaacaaggcaagggattgttcacttccgaccaaggtttgttcaccgacaagagatcgaaaccagtcgtagacgcttgggcggctaattcgaatacatttaactccgctttca

SEQ ID NO: 12715 - DNA, 297 bp, Gossypium hirsutum
  Clone ID: LIB3135-049-Q1-K1-A3
cgtccggccagcgtcggaccagcgtccgctcaccctaagtgacatgatggctctgtgagctgcacacaccgtgggattctctcattgcggcaaggtgtgaaaccggatatacaataccagcctgccaagtgcaagctacccgcacattgaaccaagcatatgcgacccaacatacagcacatgtgctctaaaaatgctcattccaggacagccctggacatggaccctaacacaccacaggccatcaagcatgtctactacaaggacttgctacaaggcaaggcatcgttcactcat

SEQ ID NO: 12716 - DNA, 287 bp, Gossypium hirsutum
  Clone ID: LIB3135-049-Q1-K1-A4
tacaccttatgctgaacacgatgcttcccactctgatgcatgatcacgtgaacgtatattcgcagcgatagggacagtaacattttctggcacaccaacctatggtattgatgaaagtgtggaaccagcaagtgtatctattggattctcaacagtgcgaagcgtgacggatgtgattgacatgcaagctgtgggtgcgggagctgttgaaagaagagctagacatgcgattgatgatgatgactctgtatctgatgggcaaaccaaaatgtatggtcagttggaag

SEQ ID NO: 12717 - DNA, 412 bp, Gossypium hirsutum
  Clone ID: LIB3135-049-Q1-K1-A5
tcgagaccttgctgaaaccaccactgaaaagaacaatggtgaggtggctactgaaacaaccgaggctgaggctcaggtagaagaggccaaatatggatatggtggatacgggagccgtggaggttatggaggatacggagggcgcggtgggtacggaggatacggagggcgtggtgggtatggtggtggttacggtggacgaggacgtggacgtggacgtggaggttatggaggaggttgtgcctatggatgctgtcattcagattattacggaagaggttgccgaaggtgctgcgcttacgttggggaggctgtgaatgttgaaacacatgctgatcctctctactaaaataaaatcattccaagttgcatgtatctaaaaaagtaaaagggcatagcaaatcttacaatt

SEQ ID NO: 12718 - DNA, 420 bp, Gossypium hirsutum
  Clone ID: LIB3135-049-Q1-K1-A6
ccggaccggagaagagggacgagccaggcgacgcgctacgcccacgcgttcgaacacacaaagtgacaagaaagatcagaaagaagggcgcagcgagggaaaccataaggcaacaaggccagaaacccgagacacgagcttcaaggggcaaagcgcagaagaccccacagtgaggcaaacggatgcgacccaagcacaaaaaaggggggcggaagaagctaatccaggacctggaagtaacagggagatcaacacacgcacgaaggacccgacaatgcaatatacgaagcaccagaacggaggacaggacgacaagaattcgacacacagttagagaatgaccgaaggaggacaccagggggacaagcctgagaaaatcagctaagacaacaagaatgaggcagcagcaggtggaggaag

SEQ ID NO: 12719 - DNA, 215 bp, Gossypium hirsutum
  Clone ID: LIB3135-049-Q1-K1-A8
agcagtagctgcagcagcatctattggttacattggtgtaggaactgttgagttcctattgggtgaaagaggttccttctacttcatggaaatgaacactagaattcaggtggagcatcctgttactgaaatgatttcctttgttgacttgaatgaagaacaaattcctgtagctatgggagaaaaactgcgcttcaaacaggaagatattgtgc

SEQ ID NO: 12720 - DNA, 439 bp, Gossypium hirsutum
  Clone ID: LIB3135-049-Q1-K1-B1
gaaagcacaaatggaatggctgatcatttattgtatgaagtttttaagacctcactaatcagccttaaacttttgagttcataatgaatgaaatgaacccccggatgaagagaaaatctcccctcccttttactaaaccatggggagtcccgagtagtttaccgggcaaatttagttgtcgtgacgatacctttcttagtggaagattggaaaagacttctcttcatcacgagactgatcggatccgccgtagacacccgagaaacccccacaaggcaggctaaaagagtaagaggacaacaagcaaagagttatgctttcatttctttgttgagattgaaataaagttatttaaaaaagggggtaggtataatgcacgcaagccaagtcaagaaaaggacttccttacttttatttcatagtagtcttaatgactagt

SEQ ID NO: 12721 - DNA, 444 bp, Gossypium hirsutum
  Clone ID: LIB3135-049-Q1-K1-B10
cggacgcgtgggccagaatttaatattaaggttctagttgctgctgctgtagccttcaagggtgttgggggtatcctttttatctttggaagcactatcggtgcttatcttctggctctgcaacaggtcattattactcctatattgtacgacttctacaactatgacacggaaaagaaagaatttggcctacttttttcaaagttctcacagaacttggcattgctgggagcattactcttcttcatcggcatgaagaactcaatccccaggagacaactcaagataaaggctcctaaaaccaaaacagtttgaaggaggaacatctggtaaaccaagggtctattgttcaatctctacgttttccttgtatcaaggctttgttcttcaatgtttaggggggaaaaaaggcatactactttcattttgatacttgtaactact

SEQ ID NO: 12722 - DNA, 390 bp, Gossypium hirsutum
  Clone ID: LIB3135-049-Q1-K1-B11
taaaatcgtgggcgacaatctaaactgagggtccgagcggcagcttatatcgcctgggggggatgacatggttccctacccctctactgtagctctagccatacacctttggtagctcatcacactgtcgtcaacactcgtagactgttcgacagcgacatcgataccgcattcatgcaaactgtatgtattagaagccaattgcttaaaaccatcatgtgcttaggctttttgccactactcccttcaacgggcagacataattaataacatgtaatcctctatgggccatggcattattatttatttcctttgagagaaagaacatgaatttattcattgataaaatggaggatcctacgctttccttgtttcatagcttcaaacctt

SEQ ID NO: 12723 - DNA, 364 bp, Gossypium hirsutum
  Clone ID: LIB3135-049-Q1-K1-B12
ctctagtgttgtgcatgttggtgcgtgagcccattgccacaaccaccataacatggggggatgtgacaagcaaagtggccggttgcttatcatacttgcagaacggagggaacgtgccgaaggcttgctgcgacgggatccggtccctgaacaacatggctcgaaccacccctgaccgccaaaccgtgtgtgggtgcttgcaagctgccgctaaggctgtcaaaataaaaggcaactgggttgaaaccctcccagccaaagtgtagggaaacatcctttacaagaacagcacttccactaactgcaaaaatgtgaagtgagatggatgaagagagggttttgcagcagcttgcaggatataaaa

SEQ ID NO: 12724 - DNA, 446 bp, Gossypium hirsutum
  Clone ID: LIB3135-049-Q1-K1-B2
agcagtagctgcagcagcatctattggttacattggtgtaggaactgttgagttcctattggatgaaagaggttccttctacttcatggaaatgaacactagaattcaggtggagcatcctgtaactgaaatgatttcctctgttgacttgattgaagaacaaattcgtgtagctatgggagaaaaactgcgctacaaacaggaagatattgtgctcagagggcattccattgaatgtcgtatcaatgcagaagatgcatttaaagggttcagacccggaccaaggaaaataacatcgtacttgccatctggaggcccatttgttcgaatggatagccatgtttattctgattatgtagttcctccaagctatgattcattacttggaaagcttatcgtatgggctccaacaaaggaaaaagcaattgagcgcatgaaaagggctt

SEQ ID NO: 12725 - DNA, 281 bp, Gossypium hirsutum
  Clone ID: LIB3135-049-Q1-K1-B3
ggcagcccctttaggaataattgatgtttatacgggcgttaaaacggttgggttcttaatggacttaagatgcttgcaaactttgtcatttgttcacgcagtttaagaataattgctaaaattttccgctttcaaaaacaaggttgactagaaagaacttccccctcgggtaaatttgggagaaaaactgcgctccatacaggaggaatgtgagctcaaccggcactccaaagaatgatgtgaaaatgcttaaaacccatataaaaggatcaaaagggggg

SEQ ID NO: 12726 - DNA, 422 bp, Gossypium hirsutum
  Clone ID: LIB3135-049-Q1-K1-B5
gaaagcacaaatggaatggctgatcatttattgtatgaagtttttaagacctgactaatcaggccctgagcccttgagttgataaggaacgaggtgaaccccaccatgaagagaaaatctcccctaccttttactaaaccatggcgagtcccgagtggtctaccgggccaatgtaattgacgtgacgattcctgtcttatgggaagatcggaaaagacttctcttcatcaccagactgatcggaaccgccgcacacacccgataaacccccacacggggggctaaaagagttagaggacaacaagcaaagagttatgctttcatttctttcgtgagattgaaataaaccatatttaaaaaagggggtatgtataatgcacgccggccaaggcaagaaaaggactttctttcttttatttcat

SEQ ID NO: 12727 - DNA, 247 bp, Gossypium hirsutum
  Clone ID: LIB3135-049-Q1-K1-B6
ggagaacaggtgcgcacccaaggggggaaagaggagcccgagacgacaaggcaaaaaacaaaaaggggcaaggggacgctaaaggcaccgaaaagaccatctctgggcaacctgactgaagaacaaaacgcctgaacagaggggacaaaaaaagccatgcgaacacaagaaaattgaggcactagggcacgcccaccctgatcgcatgatgggcgaagagcacagcgcaggattagaagaaagcaag

SEQ ID NO: 12728 - DNA, 413 bp, Gossypium hirsutum
  Clone ID: LIB3135-049-Q1-K1-B7
agaaatggatgtaaaattgagagacgaacaagccagaaggcaaagaggtctagccagcaaggttaatgcagttgatggtgctaggaaagctaaagttagtgaacgtgctaatcgagcagttcctgcccccgaagcaaatgcagagattcaagcaaacttagataaatggagagtaatgacacaaacaaatgcaaaaagcaagagtgagaaattcccacctccccatcaagatggagctgttgggcatccattagatgcttcacataaagggcctctatctttttccgcaactgacactactttcggctcatcaattttcaactctaagtcatcggaatctgctaaaaatcctggacctgtcgtcggttcttcgagaagaaagaaaaccaataaagacccccaaagggctccgt

SEQ ID NO: 12729 - DNA, 138 bp, Gossypium hirsutum
  Clone ID: LIB3135-049-Q1-K1-B9
atgaagactgggtcccgatctctcatacgggtccaaactgggccccttcaactgatgatactatatatatgcgtctaccatgaatatgttcttcaagtgccacattgcaatgattcattatcaggaacaggtgcaact

SEQ ID NO: 12730 - DNA, 284 bp, Gossypium hirsutum
  Clone ID: LIB3135-049-Q1-K1-C1
cacacgcgtacggatggctacatgtacatattggcgggggctgtggtagctcatgattaacttactcatgctgataaggacaaggagtacctggcggctccaagtcagatggctggagccgctgcccctggggcagctgctcgtggcggggctacatctgatggtgccgctgccgagcaggaaaagaagaccctacactgacaaaattctgatgacgatatgggattgaggctctatgactatacatattagtgtttacgcacaaacatatatgaacgtagaca

SEQ ID NO: 12731 - DNA, 377 bp, Gossypium hirsutum
  Clone ID: LIB3135-049-Q1-K1-C10
gacgcacgcgttcgcccacgcgttcgcccacgcgtccgctcacccaaagtgacatgattgctctttcagctgcacacaccgttggattctctcattgcagcacgttttcaaaccggatatacaatttcagccgtcaaagtgcagtatacccgacattgaaccaagcatatgcgacccaactacaacaaatgtgtcctaaaaatgttgatcccagaatagccattaacatggaccctaacacaccacgtgcattcgacaatgtttactacaagaacttgcaacaaggcaagggattgttcacttccgaccaggttttgttcaccgacaagagatcgaaaccagtcgtagacgcttgggcggctaattcgaatacattt

SEQ ID NO: 12732 - DNA, 384 bp, Gossypium hirsutum
  Clone ID: LIB3135-049-Q1-K1-C3
ggttggactgagaggacttacaagcaagaggcacatgaagatcgtgctgagatggatgagagggagacaaaacttacaagggaggtaacgatcatgaaatttatgaatcggagagaacagtaggacacacagttacaagtcctggtgatacagtgaagcagggcaaagctctcttcttaagcaacccttgaacgataccgcttttcttcttggtattaccgagttgtatcgagtggtttatgggaaaaaatatgtggcaagccgggtgctggctcaagtatgtagtttttatattattcaggaatagttcaaagtgggtaaattttgggtatttagaacttgcagaaaaaatgggtataacatgattctcttttactatcattt

SEQ ID NO: 12733 - DNA, 261 bp, Gossypium hirsutum
  Clone ID: LIB3135-049-Q1-K1-C5
tcggctttagaagatctcaacctctttatggtttatttagaggaggcattggtcatgtgaagctgtagcataaaggctcatctcttgttggaaaatcggaggaacatttatttttccggtaagttttcatataaaacttctacattgaagaaaaacagagaatccctctcgtccgttaatttattgttgtatctcacttagttatgaaaaataattcccttggttcagaaaaaaaaaaaaaaaccttttctttttggtatt

SEQ ID NO: 12734 - DNA, 414 bp, Gossypium hirsutum
  Clone ID: LIB3135-049-Q1-K1-C6
tgcgcacgttcggcttggtgatttctgatcagggctgtggatgacggagagaagaaattcaaccaagctcggttgaacctgcgaagtgacatagtgactcatatgatggtggtctaatgcctgagcctctaattatagacgcacgtgcatggattcacgagatttcaactgttagtgtatactattcacagaaaccaccttcaacggagcggcctggtcaaaatccggggggtaagaagaccctgatgagctcgactatactgcgactgtatcaaatgacattgagaggtgtacagataagagggagctgtttggcgagattgatataacagtccttgtaacgttattatactaattactagaataggtcgcggagctcggaccatctgtatcgacccaaggccgagttttggc

SEQ ID NO: 12735 - DNA, 177 bp, Gossypium hirsutum
  Clone ID: LIB3135-049-Q1-K1-C8
tcgcccacgcgtacgccttactttagatacactgcctttcttttgggggttctttctttatggtgtgttggtacaaggcttttgggtcccacccacaaaacccacccaaaccaagttttccaccaccaccccaaagccattggccgggaaatgtaatggggaagtcgcgggttatgt

SEQ ID NO: 12736 - DNA, 392 bp, Gossypium hirsutum
  Clone ID: LIB3135-049-Q1-K1-D1
atttaaaaaagggggtggggatgatgcacgcaggccaagtcaagagatggacttacttactgttatttgatatgagaccttaatgactagaagtttggagccttaaccggattttatcggcgctcggattcttcgtcttaaggtaaggtgagattactttatagagtgtgaatggaactcttaatcgaactgatggcgagatcgattttttgatcgaggttcaagagaaaagagagggaccaccgaccaatgatgcttttacgaaagtacagtcaccggtggcgaagaccttctcgacactatcgaacctaaaatccactctcaatcgctcttatttttattagaggaattgttgtcgtatcctggacttaagggaagcaaaaagtgcccta

SEQ ID NO: 12737 - DNA, 317 bp, Gossypium hirsutum
  Clone ID: LIB3135-049-Q1-K1-D10
acgcgtgcgaacaaggtctactttaaaaactcagtgctttttctatataatgaagagatgggttatacaggggcagttccaatgagagagagcccatggagaatgccataaggggatcatcggctacctaaggctcatcgttgcaactgatctatctgaaagatgttatccaaggaggaaccaacagagccatacacctatttacagctggatcccccaaatagggaggtggagcttgaatgaaatgcccttttttgcactttcttctataccttgattgtagcttgtactagaggacacttttcatattcatcatt

SEQ ID NO: 12738 - DNA, 357 bp, Gossypium hirsutum
  Clone ID: LIB3135-049-Q1-K1-D12
ctttcaaatccaacaacttctcgtggcctgattagtcctttacatgatgagagattagctttcaagtttgctcaatataaacccgagtctggacgaggtgcagatggtagggaaaaagcattcggcagaccggaaagaattagatccacttcattagtgatggatgcagtactgccggaccaggtgaattcggtttgtggcttatgtcaaaagcatttgagacggaaaccttatattctcgggaacaccctgccttctggtgaattctctgttgtggcagttctagtttgtggccacgtataccatgaggattgtttggaaaagagaacgagtttcgaggagaggcgtgacccgcgg

SEQ ID NO: 12739 - DNA, 312 bp, Gossypium hirsutum
  Clone ID: LIB3135-049-Q1-K1-D2
cccacgcgtccgcctcactttagatacactgcctttcttttggtgtttctttctttatggtttttgttacaagtcttttggttcccacccacaaaacccacccaaaccaagttctccaccaccaccccaaagccatcggccgggaaatgtaatggggatgtcgcggtttatgtgtataatttgccggcggagtttaacctcggtcttctcgatgattgtagccatttgaatgtttataccaatatgtgtccgcatgtggctaaccatggtctatgtcagccgttggacaacatggaccttcagtcgagtgac

SEQ ID NO: 12740 - DNA, 207 bp, Gossypium hirsutum
  Clone ID: LIB3135-049-Q1-K1-D3
cgggacgacccacgcggtcgcccacgcgaacgcctcactttagatacactgtctttctttaggtggtacttactttaaagggtgagaggcaagtctgttgggtcccaaaaacaaaaccgacctaagaccaagatcgtcaccaccaccacaaaggcatcggacgggaaatggtgtggggatgacggggtttatgcgtataaatagccg

SEQ ID NO: 12741 - DNA, 395 bp, Gossypium hirsutum
  unsure (1)..(395): unsure at all n locations; Clone ID: LIB3135-049-Q1-K1-D4
ctaaacaccaccaccaccaccaacgccgaacctccaccctctgatccacataacccttttaacaactaccccaaacaggcttcccctttcggtggcgcagcaccttctgtagctgttgctggcggtggtgttggacttgaagggttggatcaacggttgttggcgacggtgtcacctagagttcatagaaggcattcagctgattttatggaaacacctcatttcttaaggtcttgcggtctttgtagacgtcgccttgttcctggccgtgacatctacatgtataggggtgatacagcattttgcagcttagagtgcangcaacagcagatgaaccaagatgaaaaaaaggataaatgttcattaccatccaaaaaacaggcggcggcttttct

SEQ ID NO: 12742 - DNA, 289 bp, Gossypium hirsutum
  Clone ID: LIB3135-049-Q1-K1-D5
gaccaggacggattaacagctagagggtcgagtgcttcgaccataaaaaactttaggcattggctcaagatgccccgacttaggatgcatgcttcgaaacaccccccgctctgctggaatggacatatgacttccaatcatccgagatgatgactatattcactgccggctggggcaacctgacgaactaggcctgactgaacatttatgagaaaagacctataaactgtcttaccagatcaataccaaaggcgctcgctttgagtagataacctcagcaaaccgcgaa

SEQ ID NO: 12743 - DNA, 399 bp, Gossypium hirsutum
  Clone ID: LIB3135-049-Q1-K1-D7
cacgcgtccgaccgtgtgtgggtgcttgcaacgctgccgctaaggctgtcaaaattaaaggcaacttggctgagaccctcccagccaaatgtagtgtcaacatcccttacaagatcagcactttcactaactgcaaaaatgtgaagtgagatggatgaagagagggttttgcagcagcttgcaggagataaaatatatgattaaaaagaagaagaagaagaatgaataaggattttgggatggaattttcaaaatccaaaattagtctccactttagtgtagtgaggctttgtttattttggtttatgttttggtccctgcatgttggctctaattttatatcccctatgtattggctattttaatgttttaatgaattaaagtttatgctctggcatc

SEQ ID NO: 12744 - DNA, 379 bp, Gossypium hirsutum
  Clone ID: LIB3135-049-Q1-K1-D9
tttcttcctattcttttactactttcttgcccagacagcggggaggctcaacacttgggaatcattaacaacagggatcgcccaacaggcaaaaggtgtaatagcccccaaagagaaaactccattcataacttttgtcctaggtggccctggtagtggaaaagggactcagtgtataaagatagttgagacatttggattcgcacatttgagtgcaggagatttgttgagaagggaaatagcttctaagagtgcagatggtgccatgattcttaacacacttaaagaaggaaaaattcgcccgtcacacgtgacagtcaaactgatacaaaagagatggtattaagttacaatcacaaaattctcattgatggctttc

SEQ ID NO: 12745 - DNA, 401 bp, Gossypium hirsutum
  Clone ID: LIB3135-049-Q1-K1-E1
cccacgcgtccgaccgtgtgtgggtgcttgcaagctgccgctaaggctgtcaaaattaaaggcaacttggctgagaccctcccagccaaatgtagtgtcaacatcccttacaagatcagcacttccactaactgcaaaaatgtgaagtgagatggatgaagagagggttttgcagcagcttgcaggagataaaatatatgattaaaaagaagaagaagaagaatgaataaggattttgggatggaattttcaaaatccaaaattagtctccactttagtgtagtgaggctttgtttattttgttttatgttttggtccctgcatgttggctctaattttatatcctctatgtattggctattttaatgttttaatgaattaaagtttatgctttgtcaatc

SEQ ID NO: 12746 - DNA, 287 bp, Gossypium hirsutum
  Clone ID: LIB3135-049-Q1-K1-E11
tttttctttgaaccctaaaataacaccattatgctggacgcgctttaatagttactattcatttcccttcacattatcctataaagccttcttacgttgcatctatgaccaaagacttacatcccaacatcaacagccatggaagcataagacttgatttccccaaagtacaatggatccctgcactaaccattttcaaggctttgctctttaactaataactgctgaccgatccaaaccctgataaccctcttgttccagaaattgcttacatgtatcacaccgat

SEQ ID NO: 12747 - DNA, 282 bp, Gossypium hirsutum
  Clone ID: LIB3135-049-Q1-K1-E12
gaccgatccaaaccctgatgaccctcttgtttctgagattgctcacatgtataaaactgagctgggctagtatgaagccactgctcgtatctggacccataaatatgccatgggatgacagatgttggtgtgtaatatgtatcagctttcttatgttgccaactgtgtggaaccattttatgttttctttttgggaagggagggggtgtttttttttaaaggaaattgtcattgtgctttggatatgggaagatatggacattctttttatttattccgcgc

SEQ ID NO: 12748 - DNA, 274 bp, Gossypium hirsutum
  unsure (1)..(274): unsure at all n locations; Clone ID: LIB3135-049-Q1-K1-E2
naaaaacaatacaaccgtgtgtgggagcttgcaagctgccgaataaggctgacaaaaataaaggcaacttggctgggaccctgccagccaaactgtaggcgtccacatcccttacaagatcagcgcttccactaactgcaaaaatgtggactgagatggatgaacagagggctttgcaacagcttgcaggaaatcaactttatgatttagaagaacaacaacattactgcatatggctttttggatggaattttcagaatccaacactcttctc

SEQ ID NO: 12749 - DNA, 414 bp, Gossypium hirsutum
  Clone ID: LIB3135-049-Q1-K1-E3
cccacatccatcttatataatcccaatttccttttctattaaaaacccagtttttttcttcacccaaattaagacacccagatcctcaaaacccaaaaagaaaccatgaaaaaccaatcgaaaatgctcacgatcgggctagtatcagcctggtactcttccaacataggtgtcttgttgttaaacaagtatttactaagcaattacggcttcaaatacccaatcttcttaaccatgtgtcacatgacagcttgttctttgttaagctacatcgcaattgcatggatgaagatggtttcaatgcagaccattcgatctaaggttcagtttttcaagatcacgactttgagtttagtcttttgcgtgtccgttgtgtttgggaatatttctttaaagtatttgccggtgagtttc

SEQ ID NO: 12750 - DNA, 333 bp, Gossypium hirsutum
  Clone ID: LIB3135-049-Q1-K1-E4
ctatgatgtgcagagtgctcacaccattgaagggaagtgcatcgttcattctttcaagaactacactaagcttgaggatgttggggctgaggattactattgtaggttcgagtataaagctgctaccggtgcctttactcctgaccgagttgctgtgtattgcaaatgtgagatgccttacaaccctgatgatctcatggtgcaatgtgagggctgcaaggactggtatcatcccgcttgtgtggacatgacaattgaggaagcaaaaatgttggatcactttgtttgttccgaatgttctgaggatgatctgaaaagatcacaaaacggatt

SEQ ID NO: 12751 - DNA, 396 bp, Gossypium hirsutum
  Clone ID: LIB3135-049-Q1-K1-E5
ctgtcttttatgctgtcaaaattaaaggcaacttggctgagaccctcccagccaaatgtattgtcaacatcccttacaagatcagcactttcactaactgcaaaaatgtgtaggagccggaaaaacagagggttttgcaccagcttgcttgagataactatatgattaaaaagacttagaagacccccgcaccccgattttggggtggaatttttttttcccaaaaaaaggcttcactttagtgccccgcggctttgtttttttggaggaagggctgggctcttgggggtggcctctaaataaaaaaaccctccgcctcggccctttaatgttttaatgaattaagggtccttcttttgtggataaaacaaaaaaaataaaacaaaaagggggggg

SEQ ID NO: 12752 - DNA, 448 bp, Gossypium hirsutum
  Clone ID: LIB3135-049-Q1-K1-F1
cattggtgtaccgttccccaagagccaacccatgaggatttactctagtttatggaatgctgatgattgggccacaaggggtgggttagtgaaaactgattgggcaaaagcacctttcacagcttattacaggaacttcattgccaatgcttgtgtctggtcaggaagaagttcatcatgcgctaaaactaactcggtctccgccggtgcatgggaaacaaacgaacttgatgcaccaggaagaagaagattaagatgggttcaaaaatatttcatgatttataactattgtactgatttgaaacgtttccctcaaggtgttccaccagagtgtaaacgcccaaggttctaaaatcaaacctctcctcctttccatgtaatatattctttttttcactactttcttactatgtattcaagttgcactcaacttgatgcttggggatgg

SEQ ID NO: 12753 - DNA, 295 bp, Gossypium hirsutum
  Clone ID: LIB3135-049-Q1-K1-F10
gcggaccgatccaaaccctgatgaccctgttgtttctgagattgctcacatgtataagactgagggggcggagtatgaagccactgctcgtagctggacccacaagtatgccatgggatgacagctgttggtgtgttatatgtatcagctttcttatgttgccaactgtgtcgaaccattatatgtttccttttggtgaagggagggggtgtctttccataaaggaatttgacaatgatctctgcatattggaagaaatggacattctttttatttattacgggctttataactt

SEQ ID NO: 12754 - DNA, 273 bp, Gossypium hirsutum
  Clone ID: LIB3135-049-Q1-K1-F12
atccacaggatgctgaaactcggcgggagcattgatgaggatgcaggtgaaggtgaaggtgatgctgatttgcccccattggaggatgctgatgccgaaggcagcaagatggaggaagttgattaagcctaacatgtttttataagatcagtagatttatcttacttttgaagcatctgttagcttgttttacattttgtttggtgcatttgcttttgttatgttgttgttagttattgtcgagtactcttaaatgattagtgctgttttctt

SEQ ID NO: 12755 - DNA, 281 bp, Gossypium hirsutum
  Clone ID: LIB3135-049-Q1-K1-F2
cacacgcagccggatgggaagaggcgaccctatgaagcacgtctgcaaggttagatgaacaactcctatgcctagtctgggtgcctactggcgatgcacccaggcctgccatggttggagcgcttagggatttttcatagaagggatattgtgagatctatacgccaaaacttccgatgcgatgaacacaaaaagcgatgcatatcctgctctagcatgagactggggatgggacgctttcagcataataaacagtatcgtcaaatcgttttcaaggaacc

SEQ ID NO: 12756 - DNA, 194 bp, Gossypium hirsutum
  Clone ID: LIB3135-049-Q1-K1-F3
gccacggaaaaagctggcgtaaaaaacacctgtgagaataactcacggggtaaaaagcagagcgttcaaaagaatagtgcatgtctcaatgacttcgacagatacaagatcaggttggccaccatcaaaaaagctggagttgtgaggcacagagcctcgctaagattgaaaaaggaaaatgcgccttgaagaga

SEQ ID NO: 12757 - DNA, 446 bp, Gossypium hirsutum
  unsure (1)..(446): unsure at all n locations; Clone ID: LIB3135-049-Q1-K1-F4
ctgcgattaaaggaacgcttaatgtactgacagctgccaaagagcttggtgttaaacgtgtggtggttacgtcttcaatctcctccatgtggccctgcccaaactggccagctgataaaatcagaacagaggattgctggactgatattgagtattgcaagcaaaatgaattatggtatccaatttccaaaacactagctgagaaggctgcatgggaattttccaaggagaaaggtctggatgtggtggttgtgaatccgggcaccgtgatgggtcctaatattcctccaaaccttaatgctagcatggtaatgttgttacgccttctgcaaggcagcacagagacatatcaggactntttcattggatccgtccatttcaaagatgttgcgttagcacacattttggtatatgagaacacatcagcaacagggaggcacatgtgc

SEQ ID NO: 12758 - DNA, 88 bp, Gossypium hirsutum
  Clone ID: LIB3135-049-Q1-K1-F5
cccacgcgtccgcccacgcgtccgctgtgatttaagattttagaagcaaaaaggacatgaaacaaagtttgtcaatgggtacttccag

SEQ ID NO: 12759 - DNA, 367 bp, Gossypium hirsutum
  Clone ID: LIB3135-049-Q1-K1-F6
gccatctctaaactgcacttcagaggtggttctagcccacacaagaggagaaaacatttttccgagttcaatctattggcttgttgatgttcaagatgttgcatatgcacatattcaagcatttgagattccttcagctactggcagatattgcttagtggaaagagttgtagagtttccggagattctgaagaccttgaatgagctttatcctactttgggactcgaaagaaaatgtgaagaacatgacgaccctcttaagcgtatataccaggtgtcccaggagaaagcaaaaacgttgggtctcagcttcactccttgggaaaggagtctccaggaaactgttgaaagcttgaaggagaaagga

SEQ ID NO: 12760 - DNA, 359 bp, Gossypium hirsutum
  unsure (1)..(359): unsure at all n locations; Clone ID: LIB3135-049-Q1-K1-F7
ccacgcgtacgncgaagagcgggcaaacaagaagagaatgctttctccggaggaccagactatgacgagccggagaatatgcccatgggcgaagatataccctacaagaaagagaagcatgagaacggggaagctgaacttggaaagaaggaaacgatggacaatggacaaccaaggtctcaagcaagcctggaagaacttagccgctctaaccaggatgctctgcctgccagcctagctgaaaaagaaaagcaaactgaacaggctgctacagattcgtcacggaaacagaaaatggagcacaacttggaagagcaggaaacacatccttcaagtggtattcaagagtatggtgaaag

SEQ ID NO: 12761 - DNA, 417 bp, Gossypium hirsutum
  unsure (1)..(417): unsure at all n locations; Clone ID: LIB3135-049-Q1-K1-F8
cacgcatacggccacgcgatgggattggcctggtcgggattcaacagatgcagcatgcttgtcctgaatgcagaggctcaattgagatcnccagagaccgccatagatgcccacagtgtnnngggaacacggttactcaggaaaagaaggtgctgggagcccatattgacaaaggaatgagagaaggtcacaaaattacatttgagggacaagctgatgaggctccaaatacaataactggagacattgtttatgtattggaacaaaagaaacaccccctatctgagttgagatttggggacgaactctatgttgtccacaaacacactttgacagaggctctatgtgggtgtcaggtggacctaactcaactagactgcaggcatttcttaatttaattaaaaccaatcgaggtcg

SEQ ID NO: 12762 - DNA, 378 bp, Gossypium hirsutum
  Clone ID: LIB3135-049-Q1-K1-F9
atctgccactgcttctgagaagcaagcagtgagtactactgcgattcctaaagaatcggccagtgttgaagaaaatggtactagcaaggagagccctaattgtgaagatgctaatctgccagaaagtttggagcacaaccttcctgataatcctttcgcatctcctaccaaagcatccggggagttcttgtctgcattctccaatgctgaagcagatcgggatgtttcagtctcggcttcttctgtcaacagtaactgggtctcttcaactctacttcctgcaaataatgctttagagattgcatccttcaactctttcaactgtcaaatgcccacgttctcgtctggacatggtaccattggtatgtatgccggcac

SEQ ID NO: 12763 - DNA, 169 bp, Gossypium hirsutum
  Clone ID: LIB3135-049-Q1-K1-G1
aattggaggggtttctaagaattcgaaagtcattttatgatgactatgtttttctttttacacggctttttttcagggaggatgggttttaggtttattattattattattattatttgcctcgtttttcctttaattagcataatttaaaaatttgtttttcaaactt

SEQ ID NO: 12764 - DNA, 418 bp, Gossypium hirsutum
  Clone ID: LIB3135-049-Q1-K1-G10
tcacaaccaattttgcccttgggtgtttggaactgttgctgctgctggctgtagtggctccagtgctgatgttgttgcactctgtggatggcagttgacattggatgccttggatgccctgcggtcacaggggcatatgcctgtacagacagtacagtctgagtcagcagcatcgctgtataaggatgatcaccaaactcctggtaaaaagctccatcgacggcgtcctatgagcaaaaatcacgggcaataatgatggccagacacgacgtgtgaagacatcttcaatggctagatggaataagcattctcaacggttgaagcaaattggaaaagcttttttagtcattgccactggaactgctgccactagccctggggaagttctgtcattttttaatgtcccttcttgtaaact

SEQ ID NO: 12765 - DNA, 366 bp, Gossypium hirsutum
  unsure (1)..(366): unsure at all n locations; Clone ID: LIB3135-049-Q1-K1-G12
aaggccggaaactgatatcgatagttattaatacttgaaggtgtgctctccctatgaataaaattgtctggttcttgtaccaaatctaatatgagctcatgatatctaactattcttgtttttgagctcatgatttatagattcatgttgtactatgcattctgggatttttcttgaatcttcgcacttgcntgaaaaaaaaaaaaaaaaatataaaattttttatttataataataatttaatttttaatatttattttttttttttctataataaatatcatttttcttttatataaatggggggcgccctttaaagataaaacatttctaccgccgcctggtgaagaaataattttttttttt

SEQ ID NO: 12766 - DNA, 235 bp, Gossypium hirsutum
  Clone ID: LIB3135-049-Q1-K1-G2
caaaaatggctttagctgggtttttcttgttgggtttactttcaatggtctcagctgttcatggatatggtgggggaggaacaaagcttacacctcactttatatggggggagtgaggcttaacgcacaagggggggcgcttggggttatggaaccctatagccagggatattggacaaacacaccaacttttaacacacctttgttcaacaatgggcttaactgtgggtcttgc

SEQ ID NO: 12767 - DNA, 432 bp, Gossypium hirsutum
  Clone ID: LIB3135-049-Q1-K1-G3
atttgagaaaattgcttctactcttatgccagaaaaagattggtccattcgcattgctgcaatgcagagagttgaaggccttgtttctggaggtgctgctgattatccatgtttccggggacttttgaagcagcttgttggcccactaagtgcacagttatcagatagaaggtcaagcattgtgaagcaggcttgccatttattgtgcttcttatcaaaggagttcttgggagaattcgagtcatgtgctgagatgttcatcccagtccttttcaagttggttgtgattactgtgcttgtaattgcagagtctgcagataattgcataaaaatgatgttgcataactgcaaagttgcctgcgtgctttcccgcatagctgattgtgcaaagaatgaccgtaatgctgtactccgtgccaggtgctgtgaata

SEQ ID NO: 12768 - DNA, 432 bp, Gossypium hirsutum
  Clone ID: LIB3135-049-Q1-K1-G7
ttccaattcaaggaagttgagggctcagaggaaataatcgaggctgaccttgtcctgctagccatggggttccttggccctgagtcgacactggcggaaaaattaggtgtggagcaagacaatcgatcaaacttaaaggcagagtatggccgcttcacgaccaatgtggatggagtctttgcagctggagattgtcgacgcggtcagtcgttagtcgtgtgggcaatctcagaaggaaggcaagctgctgcacaagtcgacaaatacctgactaaggaagataaggacacaagtgtagagggtgagaaccaagatttcgtcaagcggcaccaagaccttccccaaaagcagcaaactgtcatgaaatagatgatccatcagattgttattgcttgcgacattgggctgaaatggaacccgaatccaatacat

SEQ ID NO: 12769 - DNA, 441 bp, Gossypium hirsutum
  Clone ID: LIB3135-049-Q1-K1-G8
gaagaaaccaaagaaagcacagagtctacagaagcagcagtagctgcagcagcagaagaagaagtaaaagcagaagccgaagccgaagccgccccagtggaagcacccaaagaggaagctgcaaaggaagaagaggaaccagctgaagctcaagctgagaagactactaccgagtaaaataagcttgtaagatggggagtcaatggaagcttgtgtagtgcgcttactgttagctaagtttgcatgttgaaatcaattagtttctattctagttgaataaggacgtgatagtattaaggtggatgaggcttgggactggggcatggaaatgacccaccaatgatagcttgcctattggctaaactaacatgcaattggcatatggcagggagagagtttagagaacgttcaagcaggaatttggtgggggggggacatttt

SEQ ID NO: 12770 - DNA, 306 bp, Gossypium hirsutum
  Clone ID: LIB3135-049-Q1-K1-G9
gtaaaagagctgttaagcacttactcttcataaacttgatatacatctttctattctgaggagactctttaaaaggccgtaaccgaaacacgccccagtggaagcacccaaagaagaagctgcaaaggaagaagaggaaccagctgaagctcaagctgagaagactactaccgagtaaaataagcttgtaagatggggagtcaatggaagcttgtgtagtgcgcttactgttagctaagtttgcatgttgaaatcaattaaattctattctagttgaataaggacgcgatagcattaatgtggatg

SEQ ID NO: 12771 - DNA, 210 bp, Gossypium hirsutum
  Clone ID: LIB3135-049-Q1-K1-H1
gaagttcatcatatttgaaaaagctagtaatagacatggggtattcatttcttagaaagaactgcagggggccttcagttgcactaaacattcctcacatcaatctcattgaagttggaatgatatactatgtctagtgtagtgtggattatgccaagaacctgaaactgttggttcatattattattattattattattattatccaac

SEQ ID NO: 12772 - DNA, 378 bp, Gossypium hirsutum
  Clone ID: LIB3135-049-Q1-K1-H10
cccacgcgtccgcccacgcgtccgcccacgcgtccgcaaacactgccttgaaggaaagcaactccgagagtttcgactgttctcagatctaaacgacaacgtttccagatccacaatggcttctacattcagcggcgatgaaacggctccgttcttcggctttctcggcgccgccgccgctcttgtcttctcttgtatgggagctgcatatgggaccgctaagagcggtgtcggtgtggcatctatgggtgtgatgaggccagaattggtgatgaaatcgattgtacccgttgttatggctggtgtcttgggtatttacgggttgattattgctgtcattattagtaccgggatcaatcctaaggcaaaatcgtatta

SEQ ID NO: 12773 - DNA, 159 bp, Gossypium hirsutum
  Clone ID: LIB3135-049-Q1-K1-H11
tcgaaaaaaattaaaaaaactaatatactattatttgttttaaaaaccaaaaaaaaaaaaaaggaagaatgctagcccttctaaaaaaaaccacactttatatacactttcatgcgacaaaaaaaaatcatctaaagagaaaccaaaattcaattgaag

SEQ ID NO: 12774 - DNA, 307 bp, Gossypium hirsutum
  Clone ID: LIB3135-049-Q1-K1-H2
aaactgtgtgcttagatttgaagacctagtccctgtgaacaaatcttgttgttcatttctgggtttaatttctcaagaaaaagaagatgacaaaagataggcaaatcggtgtagcaatggatttctccaagggaagcaaagcagctcttaaatggacaatcgacaatctggtagacaaaggggataccctttacctcatccacgtcaaacccaatcagagcgacgagtctcgtaaccttctttggtccaccacgggctcacctttgattccattatcggagttcagagagaaagaagtgattaaaca

SEQ ID NO: 12775 - DNA, 248 bp, Gossypium hirsutum
  Clone ID: LIB3135-049-Q1-K1-H3
gttcctgaattcaagtctcaacagtcgggcaagaactccgtctctgcttctactccaattttaaattcaacttcgcttgctaaatcgtcgtcaatcaatacaacatatgctgcagtaacaaataacacgagcggtggagataacttgctagcaagtgtaaagggtggttcaccgagtagcatatcggaatacttgatagagacgctcccagggtggcacgccgaagattttcttgagtcctcttcacc

SEQ ID NO: 12776 - DNA, 278 bp, Gossypium hirsutum
  Clone ID: LIB3135-049-Q1-K1-H6
ctgtgtgcttagatttgtagacccatttcctgcttacaaatcttgttgtgcatttctgggggttaatttttaagaaaaagaagatgtcaaaagattggcgaattggcgtctcaatgggtttctccaaaggaagcaaagcagctctttaatggtcaatcgacaatattgttgtcaaaggggataccctttttcttattcacgtcaaacccaatctgagcgacgcggtttcggaccctttttggttcaccagaggctcaccttttgtttcattttctggg

SEQ ID NO: 12777 - DNA, 377 bp, Gossypium hirsutum
  Clone ID: LIB3135-049-Q1-K1-H7
tcggccacgcgtacgcccacgcgttcgctcacccaaagtgacatgattgctctttcagctgcacacaccgttggattctctcattgcagcaagttttcaaaccggatatacaatttcagccgtcaaagtgcagaagacccgacattgaaccaagcatatgcgacccaactacaacaaatgtgtcctaaaaatgttgatcccagaatagccattaacatggaccctaacacaccacgtgcattcgacaatgcttactacaagaactttgaacaaggcaagggattgttcactttcgaccaggggttgttcaccgacaagagatcgaaaccagtcgtagacgcttgggcggcttattcgaatacaattaactccgcttt

SEQ ID NO: 12778 - DNA, 257 bp, Gossypium hirsutum
  Clone ID: LIB3135-050-Q1-K1-A1
aaaaaaaagatttgctttttaatttgagacaaacaaaggatcattcatgatcttccctcccttgctacaaaaaaaatgttgatgatgaacaaggcctatggagtacagcctatgttatgagaaaaaaaataatgaaacaggaatttgtattatggtaagtattctaagaaggtataagttaagtatgataagatctctttaggaacacgggataagctagtatagggaagggaaagatgtgttttacattttttata

SEQ ID NO: 12779 - DNA, 302 bp, Gossypium hirsutum
  Clone ID: LIB3135-050-Q1-K1-A10
ggaattgctcccggctcgtggtccagttcttgccttggatgtattcttggtgcaggcatcggcaaacactatcctttcgcactttctggggctggtgttctcgctggaactgttacgctcggtgacattgcctaatacagagagtattccaattcccaagcttgcataaattctgcctttcatggtaaatgtataatagttgaacgtgattttactgctgataactgttttacaagccacccttagcatttttttaataaatacatgtattggtgcaaaattgatcatattaacacggattt

SEQ ID NO: 12780 - DNA, 411 bp, Gossypium hirsutum
  Clone ID: LIB3135-050-Q1-K1-A11
tgcattttgaagcatgccatatcagattagctcccgtttatatagcattgttgcggggtatgggggacaataacgaggcaaagaactatagctacagcctcgaggtgggtgggaacgggaggaagctgatttggcacggggtgcctaggagcataagggacagtcaccggaagattcgtgatagtttcgatggtctcattatccaacgcaacatggctttgttcttctcaaggggagaccggaaagaattgaagcttagagtgacaggaacgatatggaaagagcatggacggggttgtgcctgtaaatatggcctcattctgttttgtagtgatcccaagcaatatataagagtatctttctagaaacttcatgggacttttggacatgtattatttggtttgtagaagg

SEQ ID NO: 12781 - DNA, 434 bp, Gossypium hirsutum
  Clone ID: LIB3135-050-Q1-K1-A12
cccatgcatacaaggcatcgaagcatggcgtcgtagggttgacgaagaggggggccgtggagttaggtgagcatggaactagagttaattgcatttcacctcacgcaactgtgaccccattgttccaaacaacactggggttgctcgataagaagaagggagaggagatgattgcggcttcagctgtgttgaaaggcaccgtattggaacctgaagattttgcacatgcagcactgtatttggcaagcgatgaggctaaattcatcagtggtgttaacgtgcctgtcgatggagggtataatctcagcaatcagtcatggaagatgggatttgcagcacttttttggataaatcaacaagtcctctattttaagctttgaacaatattttctttaatagggaaaattaaaattacccaaaattaaagtacctgt

SEQ ID NO: 12782 - DNA, 249 bp, Gossypium hirsutum
  Clone ID: LIB3135-050-Q1-K1-A2
ggtgatgatgatgatgatgatgatggacctcgagaggcagatttggagggaagagttgagaaatacattggtgtgaaagtgaaggtttcctttaccgggcaaggtgagacacaatcaatgaagcaattatcaggaggacagaaaactgttgtagcccttacattaattttcgcgattcaacgatgtgatccggctccattttatctttttgatgagatagatgcagctctggatcctcaataccggact

SEQ ID NO: 12783 - DNA, 354 bp, Gossypium hirsutum
  Clone ID: LIB3135-050-Q1-K1-A3
tgagagctcagacacgattgataatgttaaggccaagatccaggataaggaaggaatcccagcagaccagcagaggctgatttttgctgggaagcaacttgaagatgggaggacccttgcagattacaacatccagaaggaatccactttgcacctggtccttcgcctccgcggtggttttaagtgttgtgccgaacacctgtccagttattgttgatgttttaagtttgttatgcttgtgggtcgtatgctgatgtgagctggccactatgcaggggaagcttacaagtaaaaataattgctttttataaacgcttttagttgttttttaggtttgaataagttcgtttttgc

SEQ ID NO: 12784 - DNA, 252 bp, Gossypium hirsutum
  Clone ID: LIB3135-050-Q1-K1-A4
cttttattaattatgtatatatattgacaatgtgtttagttccagtgagccaatgatgatataatccactgtggatgaggtgcagtggagccaagaacgaacctacttggcagaagctgcaattcaatgcgtttaatggattcaactgatgctgcgtctcttaattaaatgcttttaacttggtgtttcttgagcatgggtttgggtttgattgagtttaactataccctataccttttgctattaatttcg

SEQ ID NO: 12785 - DNA, 446 bp, Gossypium hirsutum
  Clone ID: LIB3135-050-Q1-K1-A5
gccgcaagcgtcacacaccaagcgcatgtctgtagttgcaaggctgagggagctgaatacactggggggtcatgttgaatcagttgtgaagctgaagggacttgatatcgatactattcagcagcattacacagcttaaagctaaagccaccgcagatgatgacgatatgcattttaatttgagacaaacaaaggatcattcatgatcttccctcccttgctacaaagaaaatgttgatgatgaacaaggcctatggagtacggcctatgttatgagaaaaaaaataatgaaacaggaatttgtattatggtaagtattctaagatggtataggttatgtatgttatgatctctttcggaacacgggataagctagtatagggaagggaaagaagtgttttaccttttttataactgcaaaataacaacaggctttcaattaataa

SEQ ID NO: 12786 - DNA, 391 bp, Gossypium hirsutum
  Clone ID: LIB3135-050-Q1-K1-A7
gaaacaatgtgtgccggctgtgaaaagtattataagaaaactatttactgggatttgattgtgttctgaagtggaaatctgatgatattttatcttggaatggaaacccttttatgtgcctccaggtagagggaagaccatgaaaaaaaaaaaaaaaatataaaatgaaacaaacaaaagatcatacataatctaaaaataaataaaaaaaaaaaaaatataaaaaataaaaaaaaaaatataaataaaaaaactggggggcccgttttaaagaaccaaattttccttcccgtgttttggaaattattatttttttttttgggcaacaaaaataaatttaatgggccggggtttaaaacggtcgaaaatggaaaaaccttgggtttcccaa

SEQ ID NO: 12787 - DNA, 380 bp, Gossypium hirsutum
  Clone ID: LIB3135-050-Q1-K1-A8
cccacgcgtccgcccacgcgttcgagaatgtccaaggacagtttcctgcgctgatatcgtgtctctttctgctagagatggcattgtcttgcttggaggaccacgcattgagatgaaaaccggtcggaaagatagcaagagaagttaccttccagaggtagaaattaccatccccaaccacaatgattcaatggagttggtgctttcacgctttcaatccattggcatcgacacccaaggagtagtagctttactaggagctcactccgtaggtcgagttcattgtgtaaacttagtacacagactctaccccacagttgatccgacattggaacctgactatgccgaatccttaaagggaggtgtccgacacccgaccc

SEQ ID NO: 12788 - DNA, 164 bp, Gossypium hirsutum
  Clone ID: LIB3135-050-Q1-K1-A9
aaacaaaaccagaaaattgccagtttggcttaaagctttataattgcatgcatgcacccacccacacacacatacatatatacatacatatatagatttcaaattgtggcatatcacattacttgatgcttggccacaatcaactataactaccgttttacacc

SEQ ID NO: 12789 - DNA, 395 bp, Gossypium hirsutum
  Clone ID: LIB3135-050-Q1-K1-B1
gttatggtttaatacccatgttagacttaactggttccatacctcaactattgtaaggcgctgttgaaaaatatgaatgctgtcttctcctctttggcgacatctagggaattgagcttccaccacaaccttcttgagccttatattgtcaagggacggaatgaaattccatgcaaatcaccataccgtaatccgcatttttgaggggatgtataatttccatagtttcctatgaaaggttttaatttcagcatgttaaggaaaattattaggatccaagctagtttcatgtaatagtttatagggactcgtaacggagaattcccctgtcaactcccctctccatacttgaaaatcctcgagtgttgtctctgctagtgaaatctttaagattt

SEQ ID NO: 12790 - DNA, 377 bp, Gossypium hirsutum
  Clone ID: LIB3135-050-Q1-K1-B10
ttttttttttttcgacagaaataaggggtatattacattgattatccatgataggagaaattacagagaaaatctggataggaaattacgtgattcataatggaagaagaaaatgaaaaagaagcaaaccgctaccccttcttcggcagagccctaataaattcttcttggctatacaaaagttgtagttcctttttttttcctttttgccatgaacaatatcgaagaaaagaggcagtagcaccacaaaataaagactggtctgatctctcttttcctttcggctatttacaatgccaaatatccaaaccagaatatcagatacattatcaatatttacaaaaagtcaagaagaatcaaggccaccgatttttgtt

SEQ ID NO: 12791 - DNA, 417 bp, Gossypium hirsutum
  Clone ID: LIB3135-050-Q1-K1-B11
gagagagagagaaaatcacagcttggtagtatccgactttgctgctgtaatgttggcagagagacgagagagggcatcagctggtttaatccaaaaatactctgtctgtctcttctcactgctcatagattggcaggcgaattaagccacattcgcattaattaccactcttaattatttgattctccccctaagtctctattggaagacgagcaatgagctttgggttcttttggtttgggttattatgttaggaattagttattagttattctgggttaattggtctgcattctttttattgttcgttatcaataataatagatcgtccggtcaattacctattgccccgaatagcgatcctactaaatgcaagaggctttatcaagtttggaaggggaccaatatattcttttt

SEQ ID NO: 12792 - DNA, 434 bp, Gossypium hirsutum
  unsure (1)..(434): unsure at all n locations; Clone ID: LIB3135-050-Q1-K1-B3
ggagacaattgtttgcaggcttgagcataaattacattaagattgttccttcagttgcagtgggattcgcggcatatgacatgatgaaggtttggcttcggattccaccccgacagaaactacaggcagaatcatctggataaacagagatggatttacaatgggttgcaaccaaaatccgaaagaacttggtggtagcattatatgaactaagaaaagtttagcaaccaaaaactagtttcctcaattcattgtgattctttttttctattgagattgttatgttttattgtgggatgcatataaaataccttgtttcccaaaaaaattcatgcttggattttcattatggttggctggagtatagttcttgccnaaaaaaaacttttagaacaaaaaaactttttttactatataaaaaaaaaattataatt

SEQ ID NO: 12793 - DNA, 124 bp, Gossypium hirsutum
  unsure (1)..(124): unsure at all n locations; Clone ID: LIB3135-050-Q1-K1-B4
ngcgagcgtacggttgatacctaatgtaattgtgcagaaattctgtgcggtaaggttcagggcataccaggggattgtgcagcttgaacgcaagacactaactttctgtgggagagctgcgaat

SEQ ID NO: 12794 - DNA, 439 bp, Gossypium hirsutum
  Clone ID: LIB3135-050-Q1-K1-B7
caacgcctcctgtatacccaagtcctcccgttgtgaagccacctccagtggagaccccttgtccaccaccaccacctgtgctatatccaccacccccggcacagcaaacatgccccattgacactctcaagctaggcgcatgtgttgatgtgttaggtggcttagtgcacattggtatcggcagcagcgccaaggacacatgttgcccagtgcttcaagggttgctagacttggatgctgctatctgtctttgtaccacaatcaaggccaagcttttaaacatcaatatcataataccaattggccttcaggtcctcatcgactgtggcaagactccacctccaggattccagtgtccagcataaggatagtacccctttttggacaataacatcatgttcatctcatgacaagaagttataattgtcgaaaatttcga

SEQ ID NO: 12795 - DNA, 340 bp, Gossypium hirsutum
  Clone ID: LIB3135-050-Q1-K1-B8
cccacgcgtccgtctacgcgtgcggtccaattcaaatctgaacttcagtaagctgcattggccaaatttcgacagatgcgatatgatcgatgcttccggaaggaggtccgttatcaatgcacgatatggttatcacaacatcgacctcttatccgagggcaattcgtacgacaaactgtgaacaccaatgaccccttatatgaagccaattcattcgacaaatagcaaagatgaaaacacttgaagagtccagctgataaggtaacaagatttcatccactactctgataagatacctcgactgaatattatttggaaatgataaaaagatttgatgaac

SEQ ID NO: 12796 - DNA, 429 bp, Gossypium hirsutum
  Clone ID: LIB3135-050-Q1-K1-B9
cggacgcgtgggttgaaaccgcagtgaaagaggcacttgagtggcttgatgacaaccagagggccgagaaggaagactacgaggagaagctcaaggaggtagaggcagtatgcaacccaatcatcacagctgtgtaccaaagatctggtggagccccaggtggtggatcaactgaagaagatgatgattctcatgatgaactttaaaaaactggtaatgacattttgattgctgaaacaagcaaagcaaagcaaagggtgagaaggatgagagcataggtaggtgagatgaagatatacaggaatttttctccatggtagaagttaaaaaagggagaattatatccccccttgttcggatgttatttttgggggaatgaataccgtttaacggatattatttttttggtttcaaaaaaagcattctttt

SEQ ID NO: 12797 - DNA, 176 bp, Gossypium hirsutum
  Clone ID: LIB3135-050-Q1-K1-C1
ctcgattatggcggtcgggacggtacatcttattaaacacatgtacgccgtattaatcccgcttatgctggggcataaagagatagttcccagggcgctgggctttgatctctgaccaccaatgggagggcaatactcgaactgtctctagtggctactacggacatacctgatct

SEQ ID NO: 12798 - DNA, 458 bp, Gossypium hirsutum
  Clone ID: LIB3135-050-Q1-K1-C10
gaacgcgtgtttgcgaaacgattctcgcaacacgtccaagcttccattgacagaatcaggggcggtaatgatgcccatatgccctgactgatcccacatgaccacatggcatgatcagcattctccggatctttcttgcacacgggagagacaatttcaacactcaactttctacatgtcacattgcaacaatcacacacatacttatcaaacagcctccatatgtgtattctgatttctgctagaatgcgcatagtccataatgatttgtcaaattcatcgttgtcatcactattatggaaagtgactgtagtcttctatatgtgctccgcagaaagaactcgatacacacttttcattgtatattttcccgacccttcatatttccaaaccatcaatgtttccgaaccacccctagatctatgaatgcagaaaatacgcacttgtgtagctgcatt

SEQ ID NO: 12799 - DNA, 389 bp, Gossypium hirsutum
  Clone ID: LIB3135-050-Q1-K1-C11
cccacgcgtccgaggaaatccatcattggtgattttctactctctcggatccctcccctgcgaaacccttggtttctctttggtggaacactatccaaacttacatgaaaaaagcaggcagaagcgatgctcgtattgttttagcaaatcaagtcaccgataggaactattccatcagaaaaattctgaaaaaatctcaagtttccttgttggctaaacgagttcactccgaacccgatggattgacttttgttcttacagccaaagacgtggctgtcgaaggcttttgcacgagcaactgtggattccatgaaccctaaagaaaagtccgcgtttgtatgggttggaaactcggagactcaatgcccaggtcaatgcgcaccgtcaaa

SEQ ID NO: 12800 - DNA, 260 bp, Gossypium hirsutum
  Clone ID: LIB3135-050-Q1-K1-C12
ccacgcgtccgtgtaacactgcctggagacattgccattctctatgtaatagagaaaaccaacgcatgacatgtgtattgtatcactcggatccgaggttatcaaggaaaacaagttcatggtagtctgaagttgatatcattttcatctgtaaacttgttctttttaatatatatatatatttgttaaaaaaaatatgaaaaaatctcaagttttctagatagctaaacaaagaaaactaaaaaacccaaaaaaatgac

SEQ ID NO: 12801 - DNA, 156 bp, Gossypium hirsutum
  Clone ID: LIB3135-050-Q1-K1-C2
atcgtgtataacgaaaatgactgtccatcttttcaaacacttgtacgccgtatttatcccggttatcttggggcatatataaagatttcccagttctctgtgctttgatctatgtccaccaattttccagcaatacactaactcctatctaacaac

SEQ ID NO: 12802 - DNA, 450 bp, Gossypium hirsutum
  Clone ID: LIB3135-050-Q1-K1-C3
cagaggcgttccccaaattacagtttgcttcgacattgatgctaatggcatcttgaatgtctctgccgaggacaagactactggccagaagaacaagtttaccataacaaatgataagggtcggttgtcgaaggaagaaatcgagaagatggttcaagaagccgagaagtacaagtccgaggatgaggagcacaagaagaaggttgaagccaagaattcattggagaactatgcctacaacatgaggaatactatcaaggatgagaagattggttcaaagcttgacccggctgacaagaagaagattgaagatgccattgatggagcaatccaatggttggatggcaaccagctagccgaggctgatgaattcgaggataagatgaaggagctcgagagcatctgcaatcctatcattgccaagatgtaccaaggtgcatgggctgacat

SEQ ID NO: 12803 - DNA, 341 bp, Gossypium hirsutum
  Clone ID: LIB3135-050-Q1-K1-C4
cccacgcgttcgctaccacacacttgctaatatttctacttggagtggccgctctaaccactccctctttgggtacccatgagtcctcccaactctgggaagccctctacttctgtttataagcctcctaaagtgaaacccccaccttatgaacataagccacctgtctatgaacctccaaagatggaaaaacctgaacctaaaccaccagtttatacaccaccaaagatagagatgccagatcccaagccaccattatgtgaatcaccaaaaaaggaaaagcccgaaccatagccaccagtttatacacctccaaagaaagagaatgcttgacacaaacc

SEQ ID NO: 12804 - DNA, 436 bp, Gossypium hirsutum
  Clone ID: LIB3135-050-Q1-K1-C5
gccattcatgatgcatatttcaatgctgtttttcatgggataaaaaatcggagattcatgggttcaaaggctgaggacgtcatacggtctctgttgaaagagtacctcaatgtttctgaaaaacaaggtcaactttcaagtgccttagaaagtagtgagaaaagaatattaaccggtgaagagaaagatacatgcacaaccaatgcacataatgatggagagagctcgcgccaagagcctgaaaaatgttcttcagaaaatgatggaaaagagatccaaaatcaacttcaggaaagttccacatccaaagatggaaattcttcggtgccacaattcaaaaatgttgttgctattgttgatcctccacgtatgggacttcatcccactgtgatcaaagtgttaagaactcatgctccattacgcaggcttgtgtata

SEQ ID NO: 12805 - DNA, 264 bp, Gossypium hirsutum
  Clone ID: LIB3135-050-Q1-K1-C6
cccacgcgttcgcccacgcatacgcttggttgagtgggtgttctggaaaaaaaaaaggcagaaaaaaagaaagcaatgaacaatggaaatggtttttattgtggttcaaagttttaagctattgtataatacaacccaaaatacataaactaacttaaggaaccgtttgtgtcgaagattaagaggataatctcttggtttttttatgaccatttttaataccttctgaacatacacggaaagcattgaatcggtgaaaacata

SEQ ID NO: 12806 - DNA, 450 bp, Gossypium hirsutum
  Clone ID: LIB3135-050-Q1-K1-C9
cccacgcgtccgatagatgttgttgttaggatctaattttagctgttctttgtccccctttgtttcattactaaaaattctcgaatctccagaggaaatatctttctttttttttattaagaacaataaagagagagaaaaaagccaaaaccatcagtgtcttctttaatgctcaacatagttttaagttaaaaaaactactttcaagaggttctttacagttcttgccctcaatgtgatcaatgatggtggtttagaagtcaatggttgctcaacctaaagcaaatggaaaccaatggtactaatcaccattcccgtgaaaatcgcccttcaacgggttcaaataatgctaacagaggtcaatccactaaggaggaggtttttgttaaccaggctcaaatgactttgcatgaggttagaagacagtgggccggggatcagtctcaaaaa

SEQ ID NO: 12807 - DNA, 392 bp, Gossypium hirsutum
  Clone ID: LIB3135-050-Q1-K1-D1
cttgagtgatgaagtataagctggactatttttgagtcgctgatacattgattaaacaaaggtagaagcatgcagcagagcgatgctatcataaacgatcatgctcactatatgacttgctataccatagcgtgggtgcatgtgtatttttgggaatataatgcatatgcagatagatgaaggcagtgcttggtatagctagctagctatatatatatactactcttacattaccatacgaacagcctattcatagactaattggattaagagcatgcctttcttgataatatacttgtgccaatagtgagattgaaattagcatctcgataatattcgttgctcgtgaatagaatacacttatataatgtcggcctatgacttgatgcact

SEQ ID NO: 12808 - DNA, 398 bp, Gossypium hirsutum
  Clone ID: LIB3135-050-Q1-K1-D10
taaaaaaaaaaagacaaaaaaaagactaaaaaccgacggaagcaagaacaggaaaatacaagggggagaaaaatgaaaaaagaaacccgaaaaaaaaaaaaaaaaagggacagagaagatgctaaaaagagaaaaaataaaaaaatatcaagagggagccagtgataaggcaaacatgaataaaagcaggagagaccacgcgtaaaacgacaaaaaggggaaaaaaagggcagcgagaggggagaccataaaaaaagacaaaaagggaaaaaaacggggagggcaaaacaaaaaagcgaatggaaaaacacacttaaaagaagtggcagaaaagccagaagggggggccgcccgaaacacctaaaaaaaaagtaagacacaaaaagggaaaaaggatc

SEQ ID NO: 12809 - DNA, 366 bp, Gossypium hirsutum
  Clone ID: LIB3135-050-Q1-K1-D11
cacgcgtccggccacgcgtacggctatgttcgtgctggcgagccccgagaggcttacactctcaccaactgcctgggcgaacatggtgtgcaaccaaacgttgtgatctttacaacatgtgcattaaagggtgacgcactgcgtggccaaatgaatcatgcactgctgcgctttatgagaaaatgtgccatatcagctttaccctcaaactgactacttttgagacacctatatggggatatggtgaagctaaacagcccttgaaaggtcgataaccttcttcggattatggcataaacgggtatttttgcttataggagcaccatacagcttcttgctgatgcttggcgagccatcgttttacta

SEQ ID NO: 12810 - DNA, 367 bp, Gossypium hirsutum
  Clone ID: LIB3135-050-Q1-K1-D12
ctcacgcttacgtttagcaaagaccttgactgcactcgggtatcgagggttctctaagtgggggagggatgggttatgccccgcaaatcagactggcattacagcctatgaatgccttttgtggaaacactcctaatagttcggccatgtgtgcaatgcatgcaagctattttgcctcaaaagagactaaagcagatgataattcaatgggtttacattccagaaatgcaaaggcgtcgtacccagatttagcattagcaaatatgatcatgtgtggcgagaaatgtaaagattgaactgaatataacacataccttgattggaaagttcgagttgagtagttctgcaaaaaaaaaaactcaatgcc

SEQ ID NO: 12811 - DNA, 411 bp, Gossypium hirsutum
  Clone ID: LIB3135-050-Q1-K1-D2
gcagcaggaagccgactggactcctctggtgagcctaacgaaaatcggtctggcagattagtctcaagcagtagtcgcctgtcaacaactcagagaatcctccctgggtttcaatccaaatcagcatcttatactcgaacctcagccacaagaggtggtcaagatgattcccttcggagcttcgagttcttgacaattgggagtgggaaaaggaaataaattgaacatgcatcttgtaggaaggatttgctcgtgtcggaagcacacttattatctgacggaaatctcggcactataacggtatttacgagcagttactagtatgtatatcggaggtcatgatttggttccaaccatgacagtcttcctggaaaaacatttcagtccttacccatgtaccccgtcagtata

SEQ ID NO: 12812 - DNA, 451 bp, Gossypium hirsutum
  Clone ID: LIB3135-050-Q1-K1-D3
ccactcttcaatttcaagcctcaagagctctctggtatccctcctgaagttgtcaagaaacttattccggagcatgcttgcaagcagaatttattcatggcactgcacacttagcaaccattccaagtttcttgggttcctactagcaaatctgaggccatttgatctgtatcaacataagcaaaagatccctgacccgacttgcagcatcgatgtagtgaaagaagtgttagagaacaagtgagtagaagggaggagaggcaaggctttgaatgctggtgaagctgttttgctgttcattttgtggatgcaattattataagtagtatcaacttgtgttcttaatgtatatgcattggtgatccatagtaatattagaatggtgagaagctatatatgtattttaccatctgctggtaagttttcgtcctgtatctcagctttcttcttc

SEQ ID NO: 12813 - DNA, 374 bp, Gossypium hirsutum
  Clone ID: LIB3135-050-Q1-K1-D4
attccttaatttttacagaagatcggcggtttaatcgcagagaatcaaccatgtttaacaggcttttcgggaaacccaagcaggaagcaaatgctctaaccacgttagacaaattaaacgagattaacaaggcatttgagtacatgcttgctggcgagggcctgaggtgcgtgattcgcatggatgcataaggattggctggccatggatgaagggctttttgttaagtatatgtgcattttaagggaataaataatgtaatataatctacatcgctgtgctagctgtaatggtaaacatttatcttatcatgcaaaaaaaagaagtataaacttgtgttcttaatggatatgcattggcgatccataaaaata

SEQ ID NO: 12814 - DNA, 338 bp, Gossypium hirsutum
  Clone ID: LIB3135-050-Q1-K1-D5
acggctaatcatcatgcacatcttcttgctggcttttatcgggctaaaaaatgggggttcataggctcttaggctggcgatagcctacaccctctgttcaaacagtacaaccctcctcctgatttacaaggccatcgtataaactccttataacgcagatagatctgaacattatcagaagattagaaagatacatacacatccaacgctcattaacctcgtcatagctcacacctagatcctatgaaatgtacttcacatatatatatccttagaccctgatataactttacagaagttccacttacaaatatggaaatccttcagtgccacaatta

SEQ ID NO: 12815 - DNA, 286 bp, Gossypium hirsutum
  unsure (1)..(286): unsure at all n locations; Clone ID: LIB3135-050-Q1-K1-D6
ggactcgggattgtcgaagtcgaagcctacactatcaaagcccttttggtacacttttggttgaactctgaaaatggcatgtataggactaccctttttgttgttggtcatgtactctttggttttgtataaatttggatagccatgcgaaaatggcttatatacactttgagcatagcattataatcgttttgtatgttgttcaaaaaaaaaaaaaaaaaagaaaanatataaagcatttaaaattaataaataataaaacataaactaaaatggggggggggct

SEQ ID NO: 12816 - DNA, 435 bp, Gossypium hirsutum
  Clone ID: LIB3135-050-Q1-K1-D7
gagagagagagaaaattacagcttggtagtatccgtctttgctgttgcaatgttggcagagagacgagagagggcagcagctggtttaatccaaaaatactctctctgtctctcctcactgctcatagattggcagccgaattaagccacattcgcatcaattaccactcttaattatttgattctccccctaagtctctattggaagacgagcaatgagctttggttccttttggtttgggttattatgttaggaattagttattagttattctgggtttcttgttctgctttctttgtctcgttcgttatcaataatcatcgatcgtcgggtcaatcagctatggccccgaatagcgatcctactaaatgcaagaggctttatcaagtttggaaggtgagcaatagattcttttgtcgtgggagattgatctt

SEQ ID NO: 12817 - DNA, 140 bp, Gossypium hirsutum
  Clone ID: LIB3135-050-Q1-K1-D8
gagagagagagaaaatgacagcttggctgtatacgtccttgctgttgcagtggcttctgagagactagagagggctcctgcctttatactccatacttactacctgtgaatctagtcactgctactggatgggcacacca

SEQ ID NO: 12818 - DNA, 285 bp, Gossypium hirsutum
  Clone ID: LIB3135-050-Q1-K1-D9
tcggccacgcgtgcggtcgatgccatcccgtggaaccaccgtttctttaaaggtgaggaccagagttgcattccgccaatctgtcgtcgccccttacgaaaacttggacgataaagacacgcagatcccaggatcggaagaagatcgacaagcacctcacggtgaggcacaattctcggaaaaagtgtctgttaaagtttaccacttgcctgggggctatacaggggctctcctcaccgtggacagagacatgtgatctaaaagtcgatgagtggacaggctaaa

SEQ ID NO: 12819 - DNA, 463 bp, Gossypium hirsutum
  Clone ID: LIB3135-050-Q1-K1-E1
tcgcccacgcgttcgcccacgcgtgcggcttcgagttcttttaggtgattttctgttagggctggttggtaggtgatggctccaagtcaacctaaaactggcctttctgtgggcttaaacaaaggacatgttgttaccaagaaggaattggctccccacccttctaatagaaaggggaaaactagcaagagagtccactttgtgaggagcctaattcgggaggttgctggtttcgctccgtatgagaagaggataactgaacttctcaaagttgggaaagataagcgtgctttgaaggtggcgaagagaaagctaggcactcacaagcgggccaagaagaagcgtgaggagatgtctagcgttctccgcaagatgaggtcagctggaggtggatagaaaaagaagtgagttgcccttcgattgtgcttaaagcaagtatttagtcttttagatttggtaaatt

SEQ ID NO: 12820 - DNA, 438 bp, Gossypium hirsutum
  Clone ID: LIB3135-050-Q1-K1-E10
cccacgcgtccggacttcaccagccgagaagccgacggttgcttgacgggaagtttcaagattattaattatctacatgaaaattgaaaaagaaaaaaaaatgagaaagagaggatgctatgttgttatcactcttattttatcaattttcatcctgtgttaaggtgagtttggataagtttggatagacggtgtgtttatctacaggtagtgtaaaaatagggcggtgagattagatattataatataagataaaaagtaagttaaacgctccgcatcgtacctgattgcctattcaaactcactcttaatagatttgtgttatgagctgtaggatttgtgtacgaaaaaaaaataaatttattaataaaataatatttattgtgttattattttttaaaatttttttattttttttgattgagtaaattgtttttt

SEQ ID NO: 12821 - DNA, 449 bp, Gossypium hirsutum
  Clone ID: LIB3135-050-Q1-K1-E12
gtgatgggtcctcgtactattcaacatgaaactgtggtttccgaggctgcagctgcccctgcaccagcaactacttccagtagtttagctggcactgattcatgcagcatccactacaaggcattccaggattgcctgaatagctatggaagcgaactcagcaagtgtcagttctacatggatatgttgactgagtgcaggaagaacacagggtccatgttgggtgcctaaaagtttattcaccattttccttgttatgctattgaaattgtcagcttcggacttgcgctgagatttacccttgtttttctttggttgattgatgaagctgaactcttccataaatctctatgaataaaaaacactctttgagtgatactgttttttaattggtgaacctttgttatcgctaatcaatctcaatatcatttgtactctttcagtaaatg

SEQ ID NO: 12822 - DNA, 438 bp, Gossypium hirsutum
  Clone ID: LIB3135-050-Q1-K1-E2
cccacgcgtccggaaaaaacccagcaaaaacaagtgttttttttccttcacagatctgagatccaaaagcctctcattcttcctctaagcgtaaagaattatatcaaggatattattataagagagtaaaagcaagcaaacatgtcaaggaggcaagtaagttccacgcgccgctttgttgacagcggaaacttcccgttctctggtgctttacattctaaatcccgctcttctcctattttatctatcgctcttgtcgttgtgggagctatccttctcattggctatgcctatagtggttcaggtaaattccgaggtgaagcggttagtcggatcgaaggtgactatacatgcagtctagaagttcagagggcaataccatttttgaagaaggcatatggggaccgcatgcacaaggtttcgcatgtaggccctgat

SEQ ID NO: 12823 - DNA, 306 bp, Gossypium hirsutum
  Clone ID: LIB3135-050-Q1-K1-E3
gctccatccattggcaatggaccttcgtcggctgtgaaaaagagggcttaaagttgatccgcgatcagtttcaaacgtcttctttaagagaccatgctaatacaataataagggagggattctaatctgtttgatccgcagctaaataaggataaaaaaaaaatgaagtaggcaaattacaaatatattagcaatctaatagtatttgtaatacttgcttaggctgcattttcagcttgttttgtttacagcgtgtatcgcagtttttagtggcctacttgtctttgattaatgcaaattttattt

SEQ ID NO: 12824 - DNA, 327 bp, Gossypium hirsutum
  Clone ID: LIB3135-050-Q1-K1-E4
aggatatctcatgatgttgtacagatgcttttgaagaatgtgacaactgtgaggaactagggggtcttccatgaagactgatggtttaattttctactacattctatcaattcccaaaactcagctcatgcttgggaacaattttatgtcattattttatcatttgttgttatttttgtttgtgccatgttcctgttctgaaataaactccaatgtgtgccttctagaaatggcttctcttagtatttcttggaacttgatctgaattcttgatgagtcttgatctcagctcaatatttgttaatggattcattttgtctctctcct

SEQ ID NO: 12825 - DNA, 357 bp, Gossypium hirsutum
  Clone ID: LIB3135-050-Q1-K1-E5
ccaagatatgtttggcatgtgcctgatgtaaatggaccggcattgcagcgggagctcagggctttctacgggcaagcccctgctgtggtggaaatttgtgtgcacgctggtgctgatgtgcccgatcaatataaaccaaccatgaggttagatattgggatccctactagccttagagaagctgaaatggtagtctgatccttgaatgagttttgcgcattatttcgtatcttcatttattgtaaattagttcatcagacggttgtagagcttgcttgcttataccatgcatcaaagcactattatgaattcttttacttttattttactgaataaccatacgtgattatatgattg

SEQ ID NO: 12826 - DNA, 415 bp, Gossypium hirsutum
  Clone ID: LIB3135-050-Q1-K1-E6
cccacgcgtccgcccactcgtccggtttttttgccttttcattccgttcttaccatatcatgggcagttgggttggaatccgcgtgatggttcgagagtggtttcaaatattcttcgcatctatcttcggccttgtcttagaagtcccgcgagactaagttagtggtcgagtcgtttttggtaattgacacccgtcgcattagtttcaattcatatgttaccattcatagtgaagtagccctctttttgatgtctgagtgccttattctatctatcaaagtccttcctttatctatagctcgggtcagtcccccatggtctgctttgattttctcgaacagtgccggtccgcatcaggggctctcgtgcgagccatgcaacgttctcaggcaggaactgctcctttccttgagct

SEQ ID NO: 12827 - DNA, 340 bp, Gossypium hirsutum
  Clone ID: LIB3135-050-Q1-K1-E7
cccacgcgtccgcccactcttccggcttttttgcctcttcattcccttcgtgcgatatcgtgggcagtcgggttggaacccgcttgatggttcaagagtggtttcaaatattcttatcatctatctcgagccttgcctcacatgtcccgagagactaagttcctgctcaagtcgtttttggcaattgacaccctgcgaattatgttcaattcatatgttaccattcatattgaaatatccctctttttgatgtctgagtgccttattctatctatcaaattactcccttcatctataccttagatcagacccccatggtctgctttgatttgataaaaca

SEQ ID NO: 12828 - DNA, 438 bp, Gossypium hirsutum
  Clone ID: LIB3135-050-Q1-K1-E8
gcttggggtttgattcacgggatgactaattattgggcagtttccacgctgggatggattgcagttgttttcattttcagtttgaagcattctggtgcttatgatttcagttttctcgagattgagcctgttacagatccttcattgccttctgtcccgtttttcggaaatggtagaacttgcaaatgaattccagttccggtgaagaccagaaagtgaatttgatgatgctatcacaggcaaatgtggtgaccaccggaaggtgaaatgtgggggtgaaagagactaaattggaaaaagataccgcgatgcgttgtcgcgggtgttactcgtgtgctctttctataaacactttatattacagattcattgctttcctctgctttgataatacaaagttaccaggtttgcttgttaacttgcaaagatttacacaaa

SEQ ID NO: 12829 - DNA, 454 bp, Gossypium hirsutum
  Clone ID: LIB3135-050-Q1-K1-E9
aaatgaacaagcagctaggtttgccaatggaggtgcatatcccccagacttaagccttatgagccaaggctcgtcattatggccagaactatgtgtttggtcttctaaccggttatcgtgatcctcctgctggtatctcgattcgagaaggtctgcattataacccttactttcctggcggtgcaatagctatgccgaaaatgcttaacgatggtgctattgaatatgaagatggtactccagctacagaggcccaaatggggaaagatgtggtgacatttttatcatgggcagctgaaccggaaatggaagagagaaaactgatggggtttaagtggatatttgtgctatcacttgcacttcttcaagcagcttattaccggcgtttgaaatggtcagttttgaaatcccgaaaactggtgcttgatgttgtcacttgattcccttctgttta

SEQ ID NO: 12830 - DNA, 325 bp, Gossypium hirsutum
  unsure (1)..(325): unsure at all n locations; Clone ID: LIB3135-050-Q1-K1-F1
ctcaaagcaaggcttctcgaaaacagctttttaaaacaaagcctcatgtcatcttccttgatgtangcatgactgctgaactttcaaagggtgatcgtgttaatttattggaattttttaaggctgttgcccgtagagatggccgtactgctgcagagtgcacgcttagactatcacaaagacaaaactgcccaaacccaaaggcttttatcgaggaagtagaagaagccttcactttctggggtactccggagggtgatctagtccatccggctgaatgcatgcaagaattgcttgagaaagtaaggcgtcataaagtcaatat

SEQ ID NO: 12831 - DNA, 417 bp, Gossypium hirsutum
  Clone ID: LIB3135-050-Q1-K1-F10
cccacgcgttcgcggacgcgtgggcaaccacagggcgaaacatggatgaagtgatgcgggcggtggactcactgcagaagacatcgcagtacaaagtggcgacaccggcgaactggaaacaaggggagccggtagtgatttcgccatcggtgcccaacgaggaagccaaaaaaatgttccctcaaggttttgagaccaaaaacctcccatcagggaaggattacctgcgcttcactaacgtctgaattacatatatgatggctaagaacttttgtactgcaacacttgtctttcaagttttactatgtaagcaccgcttgcaatttcggttaaataataataaaaaagttgtacttggttgaaaaaaaattaaaataaccaaccttttctttctctttcattgcatgttaaaatttt

SEQ ID NO: 12832 - DNA, 456 bp, Gossypium hirsutum
  Clone ID: LIB3135-050-Q1-K1-F11
acttgaccaaggtcaagcatggcaaatcactgcagcctctggaaccacacaagcccgaatgggggctcgaaccaaatgcaatttcgatgcctccgggaaaggctcatgcgagacaggcgactgcggtggagtcctcgaatgcaagggatacggtaaagctcccaacacactagccgaatacgcaatcgaccaatttgagcaccaagacttcattgacatctccaacatcgatggctttaatgttcctatggagtttagctccaactccccagggtgcactagggttatcaagtgtacggccgacattgtcggacaatgcccgaaccagttgaaggttcccggaggttgtaacgggccttgcccagtgttcaaaactgaagaacattgctgtaattctgggaactgtcaacctaccgacttctcgaggtttttcaaggagaggtgccccgatgctta

SEQ ID NO: 12833 - DNA, 445 bp, Gossypium hirsutum
  Clone ID: LIB3135-050-Q1-K1-F12
tctagagcggggtagcatcaatattgatatgggtgaagaggtgaaggctcttggagcatgggcaagcccttctagccgcaaggtagagctggctttgcgggggaaaggtgttacatatgactacatagaagaagacttgagtaacaagagctgtttgcttttgcaatacatctcggttcatacgaaagtcccagttgttcttcacaacgggaaagcaattgccgagtcgattgttatacatgaatacattgaggaaacttggaaaacctatcccatcttgccacaagatcctaacgacaaagccatggctcgattctggatcaatatcattgatggcaagtgctcgtgtgccattacgaaagttgcatttagccctgaagaagagagagagaatgcagtggaagaagcttgtgagtgtttgaaaacactttaaagggcactgaat

SEQ ID NO: 12834 - DNA, 279 bp, Gossypium hirsutum
  Clone ID: LIB3135-050-Q1-K1-F2
tgccgttggaccgtttaagaccaaatgctgctcactcatatcgggtttggctgatctcgagggtgatgttgggctttgcactgctataaaagctcatgggttagtggttaacctagacgttcctgtttgattgtctttgctcctcaaatgctgcgaaaagcaaatgcactgcttgttacaagatgagcttaagcaatggttgggagtttcttttacgaagatttatttctctgagcgtgttaaatgcggtgaactgatatgccaagggttcgcataaat

SEQ ID NO: 12835 - DNA, 294 bp, Gossypium hirsutum
  Clone ID: LIB3135-050-Q1-K1-F3
gtggtgcagccgtattctacttgcgttttgctgtaacactgcagaacatctttcctacaagtggtgccgcagaacatatgcttcctcagcatttcattgtcattttatgcaggccactcatatgattttggtaattgcagcactcacgcttatcataatttacactgaagcttgtcgccggcttgatctaaccattgtgggatctctagttggtgaacattttttgatatctccccagacagggtacccacaggaactcttcaaagtgacttcatgacacagcttgtttgctat

SEQ ID NO: 12836 - DNA, 458 bp, Gossypium hirsutum
  unsure (1)..(458): unsure at all n locations; Clone ID: LIB3135-050-Q1-K1-F4
cgaagacgatctatattcacgtaagatgtccttgaataagtgtgctccattggttgtagcatctccaaataaaatacaatcatcggcaaatagaaggtgggaaatcggtggaccgcttctacaaccttaacacctttgaaaaacttctcatttgttgcaagtcttaataagcccgaaagaccttgtccacataaaagaaagagaaacaggcttagaggatcgccctgtctaagacctattgtgggtagaaacttttatccaatatgcccattaatgaccactgaataagaaacagtcgttacacatttcataagagcatcaacccatttttgatcaaatcccatttgtatcattatctctcttataaaattccattcgaccatatcatatgctntactcatgttgagcttaattgccatatatcctttcttccctgatctcttatgttttaacatatg

SEQ ID NO: 12837 - DNA, 389 bp, Gossypium hirsutum
  Clone ID: LIB3135-050-Q1-K1-F5
agcttgtcttactgtttctagagcagtgccggtgccaggggagagcgtagtgcgcatggcggtggatcaagtcaacatccaaccagttggtgagggtgaatggagtgatattcaggcaacagaggcaagaatagctgatgtgagagagatagccccagagacagaaggaagcagccatgacatttgcgtcgataaccaagcaatcgataagcaccacgagcaatgagcaagctctttccgccagccttgagaaagcattccataatacagatgcttacgatcatagggaactcacgtgatttgggcttatatcttcaagctgctgattttaagctcaataaggagtatattataagctggaacatcccatcccatggaccatgtttgta

SEQ ID NO: 12838 - DNA, 414 bp, Gossypium hirsutum
  Clone ID: LIB3135-050-Q1-K1-F6
aaaagaaacaggttacaccaccaaagagatctaatcagaagcaaacaaatgagggccagcgatcatttgatagggttactaaacttcttaacatttttgttatcaacagtaatcctgggtggcggaatatggctaagcagcagagccaacaacatcgattgtctcaagttcttacagtggccattgatagtcatcggagccgaaatcatggtggtttccttggcgggtttcgccggcgcctgttataggaacactttcttgatgtggctttacctcttcgccatgttcttcatcatcgctgcgctcgtcgggttcataatctttgcctacgcggtgactgataaagggtctggtcgcccggtgatgaacaaaggttacttggagtattacttgcgggactactcggggtggctc

SEQ ID NO: 12839 - DNA, 399 bp, Gossypium hirsutum
  Clone ID: LIB3135-050-Q1-K1-F7
caaaattctcaaggacctgaagaaagaattttgttgcaatggcaccgttgtccaggacccagaattaggaaaggttattcaacttcaaggagatcagaggaagaacgtctccactttccttgttcaggctggtattgtgaagaaggatagcatcaaaatccacggcttttaagtctcggctacgagagtttccaggagacttaaaaggtctatcatcttctaagccggaagagctacccgatgaagtattagttatttaggtggtgtcatattatctataatgttagtctgatactctgatatattgcatcctatgtttcttgtgctgtcaactctttaagctatatgtgatgttgaatgacaatgataaccgttgcatattatacataaatagttgtc

SEQ ID NO: 12840 - DNA, 335 bp, Gossypium hirsutum
  unsure (1)..(335): unsure at all n locations; Clone ID: LIB3135-050-Q1-K1-F8
agaggttcaacttgaagaagctgacgtacgaggaaaggaaagctaagttgattgatcgattacacacccttaatgccgctgctggtgcggattccgaagatgaggattgaacgtagtatgctgatttcgaaaaatactgaacttgtttacctgcttttgtttttactgttctataaagaactatttgaagttaatttcttttttgtttaggttagcttatttacttctcaatttcaattttgttattaggagttctgtactttttttttaaacagtttctgaaggcgactgaatgatcagattcttgtgaaatgcgaattcggttttgagtccnt

SEQ ID NO: 12841 - DNA, 439 bp, Gossypium hirsutum
  Clone ID: LIB3135-050-Q1-K1-F9
cccacgcgtccgggaggatttgtgactcattgtggatggaattcaaccttggaaggcgtgtgtgctggtgtgcctatggtcacttggccaatatttgcagagcagttctacaatgaaaagttggtgactcaagtcttgaagattggagtggccgttggtgttcagaaatgggtgagactggagggagattttgtggaaaggggagccattgaaaaggcagtgaaggagatcatgaagagtgatagagcagaagcaatgagaaacaaagccaaagcactggccgaaacagcaaaaaaagctgttgaaaaaggagggtcttcttactctgatttggatgctctgattgaagaaataagcttacattctcattaaatccatagacatttcatattgtcggttggttcttcaacttcatgcatgttttgctttactggtaaat

SEQ ID NO: 12842 - DNA, 420 bp, Gossypium hirsutum
  Clone ID: LIB3135-050-Q1-K1-G1
gcgctcaatcgctcatccgccaaaagttgttcctcctttcatttcaaaaagaaaaaaagagagtcgaaattcgatataaaagattaatgttataaattccatttctttttcaaaatttcattttattttattttttgttttttttttcaccaatccattttcaataacaatggagaagagcattcaattcaaatcccaaatccttcactacagaaccaatagtttgttaaacccatttctcgaatccaccatttctcttcaagctttcaattgttcatggaaatctcccattttcaccgtttctcctttgctttcacccaaaacccagatccaaaaaccaattatttgcgcaagaagaagcaaaagaagaaagggtctgacagatcgacaaagctcgcactcgagttgatgtaatttttg

SEQ ID NO: 12843 - DNA, 453 bp, Gossypium hirsutum
  Clone ID: LIB3135-050-Q1-K1-G10
gccaccagtttatgcacctccaaagaaagaaaaaccagaacccaaaccaccagtttataagcgctccaaagaagccaccagtgtatgagcctaagccaccaaagccaccggtttacacaccaccaaagaaagagaagccagaacctaaaccaccggtacatgagtctcccaagaaaccaccatatggtcactatccaggacaccctccactggggaagcctcaatagagagatcccatcggctagccatcccaagaactgagctactatggctatatggataaattagtatctatacaataaaagttgcttcctactcatgttctatgttcttgtatgttcttgtatgttatgtaggaatgttttcttttactagcgagaatgcttatggcagtactcattggaatgtctattctatgtcttcttatttttcaatgagcaatattctgatttc

SEQ ID NO: 12844 - DNA, 381 bp, Gossypium hirsutum
  Clone ID: LIB3135-050-Q1-K1-G11
tccacgcgtccggttaaggttggcacgtcatatcagccccttttgatttgtggccgagaggggtcttttcttaagctgaatttcctccatattcatattccttgcagcatccatagggtactttcattcctatttacatattgtaggaacatcaccctgccatgaaatatatagtgcattttcctttaaaacataggcagcgtctgctgtcatttcttaatatccccacagtgatttttattattaggagtatcttatcacttgtggcttggaatcattgatcgattattggggatgtaagaatcactgtgttttgcgttattaaaaatcaattatcattttccttgaatgtctcgaaataatcaggcatattgcaaaaac

SEQ ID NO: 12845 - DNA, 420 bp, Gossypium hirsutum
  Clone ID: LIB3135-050-Q1-K1-G2
ctcgtatcctccatcggctggtgcgtttcgtggggacgttaggtcgtatttggaccctatgataggccacttagcatgggctagaacacccttgcttgccaacatttacacttacttcagctattcaggcaatccaagggatatctcacttccatatgctcttttcacatccccttcacctgttgtatgggatcaaggacgtggataccaaaacctattcgatgcaatgttggattcattatactcggctctcgagaaagccggacagggagggctcgaagttgtggtatcagaaagtggatggccttcagccggtgggttcgggacatcgatcgataacgcggccacttatctatcgaacttaataagacatgtgcaaggaggtaccccaaagaggccaggataagccatagagacata

SEQ ID NO: 12846 - DNA, 273 bp, Gossypium hirsutum
  Clone ID: LIB3135-050-Q1-K1-G3
cccacgcgtccggaagaatctaacgttcgaattaatgggcttgtcgcataggcacacaaagttcctgaagaaagatggattatgcatgatggtacaccatggcccggtgataacaccagagatcatccaggaatgatccagggtttcttaggccatagtgggggccttgatgctgagggcaatgagctgtcaaagttgggttatgtttctcgtgaaaagagtccaggctttcaacaccataagaaagctggtgctatgaatgcactcggtcga

SEQ ID NO: 12847 - DNA, 144 bp, Gossypium hirsutum
  Clone ID: LIB3135-050-Q1-K1-G4
gaacgcttttttcgttcgctatgtgctgactggatgcgtactcgcgtgatcgatcaatggacgggggaattgcgtgaatgacgagaccggcctaacctaaagtaaaggctcttccctctctggatggcgaatcttgattgactg

SEQ ID NO: 12848 - DNA, 333 bp, Gossypium hirsutum
  Clone ID: LIB3135-050-Q1-K1-G5
cccacgcgtccgcggacgcgtgggctagaccaggtgctcgttataaaggctacgaaccttgcaacgggctatagctttgttggaattgattctgatcgaggtagtgtatggggatgcatctaaatccgcgtatggaaccacaatctctgccgctagctttgcactcggaggatctgaaaatggctcccttcattatttggttgaaccgagggaagtgcggaagctagagctaaagcaaggtacgaagctacagctagcaagctgctttggtagtactcgactgaaaggagagggctttgcagctgctgtccaacaagttgaagagtttgctac

SEQ ID NO: 12849 - DNA, 89 bp, Gossypium hirsutum
  Clone ID: LIB3135-050-Q1-K1-G6
tccacgcgtaacgtcactcgtccggccacactgacgaacgaattgattggggaaagggtgggataagacagattccacttcttactatg

SEQ ID NO: 12850 - DNA, 414 bp, Gossypium hirsutum
  Clone ID: LIB3135-050-Q1-K1-G8
cccacgcgtccggccacgcgtccgaccacgcgtgcgctttgaagaatattgaacttctttggatttgattgctattgtgtatattctctatttttgcatcttttcgtgagtatttgcgcgtcaatgtctcccttcacaagattaaaatctggctttttatatccgaaaagaaagaggaagaattcgaaataaaatacaatgtttttctcttgtttgcactcgctgttggtttccttgtctgtttgcaggtgtgctggtactgtgccagctggcatttgtcgtggaggtgtacggaggcgctagagattgttgaggttgctgcagcgcaaggcatagaaccctagggttcttcctgttctaaaatctttaggccatttgggccggtgtcattttggtgttgatccaaggcattgg

SEQ ID NO: 12851 - DNA, 344 bp, Gossypium hirsutum
  Clone ID: LIB3135-050-Q1-K1-H1
cccacgcgtccgatttgtcccaatctctggatttgagggtgataacatgattgagaggtcgaccaaccttgactggtacaagggtcccactctccttgaggctcttgaccagatcaatgagcccaagaggccttcagacaagccactccggctcccacttcaggatgtctacaagattggtggcattggaactgtccctgttggtcgtgttgagactggtgtccttaagcctggtatggtagtgaccttttgcccctctggtctgaccactgaagttaagtctgttgagatgcaccatgaagctctctctgaggctctccctggtgacaatgttggattcaacg

SEQ ID NO: 12852 - DNA, 337 bp, Gossypium hirsutum
  Clone ID: LIB3135-050-Q1-K1-H10
ggctagtttaagggtgctcttgtgtttctttctctttactgcaagttctgtcaacattgggtgcagccgtagtctgcaaaaagatcatatcgccttgtttgtctttggggattcagtgtatgatcctggaaataataactacatcgacacgattgctcgggcaaattattatccatatggtgaaaccttcttcaaataccccactgggaggttttctgatggtcggttaattccagactttattgccgagtatgcaaatttaccactaattccaccatatcttcaacctgggaatcatgaagttactactggggtcaactttgctttaactggagct

SEQ ID NO: 12853 - DNA, 356 bp, Gossypium hirsutum
  Clone ID: LIB3135-050-Q1-K1-H11
acgtgattaacacatttctgggggactgaattcggccctgagttcaaaggataccgggagggggattcataacctactgcctttccgcacatttgtatcaccgtggatgacatgtatgaggcatgtggaagatttcagagacttggagtagagtttgtctaagaaccacacgatagctatgcatgtatcaaggatgcccctcgttactggattgaaatctccgatttgaatggaatttgtgcaatacttggcaatggagcttaagctagtgcttacccagggtcatgcgacaaggatatggtatatgtagggggttgcgaccactgtcatgattatagagtgataacgcatgatat

SEQ ID NO: 12854 - DNA, 199 bp, Gossypium hirsutum
  Clone ID: LIB3135-050-Q1-K1-H12
gctagactaacgtggcgcttggagaagcagtggggcctctgataacacaggaagcggcagggggagacctagcagaaactacgacgaaacacactagagaggaggaggcgaacaaaacaccaaggctgagactcaagaaggacgcggacggtataatggacgacgacacagacgataggaggcatccacgtggacaccg

SEQ ID NO: 12855 - DNA, 355 bp, Gossypium hirsutum
  Clone ID: LIB3135-050-Q1-K1-H2
gccacgcgttcgcatttgtggagtccctgattacgtgataaatggtaagcagcagatgtggggctgccaaccacccgaagtcgtcttgaaagcttttcaagtggcaacaaatttagataccctctgcttatattatcaagcatttgtaacctatacaaatcaataaatcgtctatgataataaacatcaattcttaccaacgaggcgtgggattttattaattgattgaataacctgtcgatttatgcttgctcgtatgctatagagtgtatacgaacaaattgattggctcaaacttctatgtgcatggcatgacatgacacattgattgaatatatcaaacaggttgtcatgt

SEQ ID NO: 12856 - DNA, 342 bp, Gossypium hirsutum
  Clone ID: LIB3135-050-Q1-K1-H4
gcttaaagtgcacaaactggaaaaataccttttagataattttcctttattagcagcaagagtgcaatgccggggaggatcgttttctcctgcatattagggttttaagtttcgaattcaaacgccgttcacaaggtgaccactgctgttgacagcaactacatctcttgccgttattttacatacaagtaacacccggtgtatgatacggtggtccatacactacgtgcgcgtccaagaacacaaccaccacctattggctatgatatagttcatcacagagctacttcaccaaccacgtctacatgtgcgccaacgtcatcaacatcatgtagattaccc

SEQ ID NO: 12857 - DNA, 246 bp, Gossypium hirsutum
  Clone ID: LIB3135-050-Q1-K1-H5
cccacgcgtccgcagacgcgtgggctagactcaggtgctcgttataaaggctaccaacctggcaacgggctatagcatcctcggaatcgattctgatcgaggtagtgtatggggatgcatataaatccgcgtatggaacacacaatctctgtcgctagctttgcactcgtaggatctgaaaacggctcccttcattacttgggtgaaccgagggaagtgcagaagctagagctgaagcaaggtacg

SEQ ID NO: 12858 - DNA, 398 bp, Gossypium hirsutum
  Clone ID: LIB3135-050-Q1-K1-H6
caacatcccggcggcctctttcggcatctctactatgatcggcgttacggtatggatacggatttacgaccgtttaatagttccatggctccaaaagtacaccaaaaaggaaggaggaatcacattactgcaaaagatgagtataggcatggttctcgccataatcaccatggttatatccgccattgttgaagatagaagaagagccttagctttgagtaaccccatcggcatagattcaaagaaacaatcctttttttaattgcaacaatgggggtaaatccctaacttacaataataagacttttcgaaacattcacattaattggtttaatcgaattttactacaaacagttccctgaaaacatgagaagcattgctggatcattcacttttat

SEQ ID NO: 12859 - DNA, 307 bp, Gossypium hirsutum
  Clone ID: LIB3135-050-Q1-K1-H7
caagagtttccttctccttgctcttttagctgctgttgttcttctcatttcttcggaagtggcagctcgagatcttgctgaaactaccactgaaaacaataatggtgaggtggctaccgaaacaacccaggctgagctagaagatggacgcggaggttataatggaagaggacacggagggaaaggagggtatggaggtgggcacggagggtatggtggtggtggccacggagggtatggtggtggccacggaggatccggtggtggtggccacggcggtcacggtggacatggaggaggttataaa

SEQ ID NO: 12860 - DNA, 262 bp, Gossypium hirsutum
  Clone ID: LIB3135-050-Q1-K1-H8
cccacgcgtccgggggcgtttctgaaaagcctcccgcgtcttactcgttgctctatactgggaatcattagctctacattgtattacccaatacatcaacatttatatatccacatccaaacaatgtcctagtcctctgaatataaaccgcattagctgctttgcttgtgaactatttattcaaataggctttctaaatttagaatctgttcttatgccaagacgaaaataacttagacagtaacactcttgatcttgctaa

SEQ ID NO: 12861 - DNA, 450 bp, Gossypium hirsutum
  unsure (1)..(450): unsure at all n locations; Clone ID: LIB3135-050-Q1-K1-H9
gatataacaaaccgtgcaggcctggaactcattgcagtactcttgataagctatatgctggggagcagaagctttataaggaagtgaaggaggaagaaaccaccaaattggagcgtgaaaggaaattgatgttgcttcaaaagcaagacgaaaaccatgactggagcaagacagagaagatccaatcaagcgttgagaatctggataatgtcctaagacacctgcaaaattcaataagcacgtactgttcgtctatattggagatcatcgatgaggaactttacccccagctggagacattaatatccgggctgatggagatgtggaaaatgatgtacaaatgtcatcgagttcagaaccttatttcacagcagttgaatcatgtgactgatatangcattgacctgaccaccgactctgatcgttaagctacagatcagcttgaaactg

SEQ ID NO: 12862 - DNA, 172 bp, Gossypium hirsutum
  Clone ID: LIB3135-051-Q1-K1-A10
gtcccggtggaacggaaacaaaagaacactagtcccatgccttaccatggctgggttggaccatgcgagcaagtttctttgttgtatgaaagcttcggaattggaaatgcctccaactatgattgtgttaaaagttttactcaacttatgtggcctgaaagtcacccacact

SEQ ID NO: 12863 - DNA, 85 bp, Gossypium hirsutum
  Clone ID: LIB3135-051-Q1-K1-A2
gtaaaagccagtatgaacaatgatcaagccttttttagtgacaaaacctcgcaaacaaaattgaagtccagaaaatcgaattcgg

SEQ ID NO: 12864 - DNA, 406 bp, Gossypium hirsutum
  Clone ID: LIB3135-051-Q1-K1-A3
cccacgcgtccgcccacgcgtccgttcaccagttgttgctagggagaaatcaaaatggggccaggtggaccaggaggacctccgggatggggcggtcctcctcccggaccgggtttttccggtggtatttgtgacttcattggttcttgtttgagctttctgtgttgctgctggctgcttggagactgttttggtggtccaatgggtccaccagggccacctggaccacctggatttggacctccaccaccatagttatatgctgtttatcatcttcatattccaacacaaaaattggaggcttttctagcttctatctgggtttcaacttagctatctaaaatacatatttatgtaataattgcttgcatttttagtagaatttatgtttattgaaattaatctc

SEQ ID NO: 12865 - DNA, 412 bp, Gossypium hirsutum
  Clone ID: LIB3135-051-Q1-K1-A4
caaaaagcgcttctcttttcctcatgaattatttcccaagttacccggttgaaaccgaagcttgcaaagagcattcagcacgactagctgacatgatcggcacctgcttcaaagcagcagggagtatgatgccaaactttttagcagtcaacttctacatgaggagtgatggaggcggtgttttctatgatttggatagcatgaatggccaaagattatgtggatgtaatacaattgctgcttgccaggctggagcaccatttggatcttgcaagaacattacaatgccttcttcaagtccaatgaccaatactgccggaagcttttctggatctgttcaattctcgaaatccgcttcaacaatctattatcctaatcaattcgctatcgggttcttttctattccatggat

SEQ ID NO: 12866 - DNA, 420 bp, Gossypium hirsutum
  Clone ID: LIB3135-051-Q1-K1-A5
ctttgtttgaaaccttcatgatcttagtaagcacaggtcgagtaatagccgacgcaggaagcatgacttctgacctcgcgaagggctcagatgcagttggatcagtctttgctatattggatcgatacactagaattgaacccgaagaccctgacggttacaaacccgaaaagatgacaggccatgtagaacttcgcgacatagacttcgcgtaccccgcccgaccagatattattatctttaaaggcttctcactcaaaattgaagcaggtaaatcaacagcattggtaggacaaagcgggtcgggtaagtcaaccatcatcggattaattgagagattctatgatcctcttgagggagcaggaaagattgatggtagagatataaggtcataccaccttatgtcgctaaggaaacaca

SEQ ID NO: 12867 - DNA, 281 bp, Gossypium hirsutum
  Clone ID: LIB3135-051-Q1-K1-A6
cacaatcgatgaagcacagctctttgagttttggccagcgaccattattcaatgggtactttgggcatgaaagcataagaggcgtatacatcgagtacatggaccaagatctggcttatgatacgacagatctgtgagtgcattacaaccggagttaataaaaagatcatagtgctcagtcatggaggggaggcagatggcgcaccttggggatgcttggagtatctaaaataagtgtggcacacataatcctgctgtccgaaaagatgctcacaagagat

SEQ ID NO: 12868 - DNA, 360 bp, Gossypium hirsutum
  unsure (1)..(360): unsure at all n locations; Clone ID: LIB3135-051-Q1-K1-A7
cccacgcgtccgaaaaaaaggagttaaaaatggcttgtcatatagtggtaaaaggtgagcttaagaatggtgatgactgccttgcgagcttgacttattcgaattaccaaggtgctccggtaacgattaaaaaagattcattacccactccatttgcgcagaatatggtagtcgacggtctgtacggaggcctggtgtatgatgttgttagggtgaagtggattattctttggaccactgattgtaaggtggctactaagctcattccgaccgaaaaccatattgtttgggaggatatagtgagcatccttcagccctaccagagctctgacaactngcccgtatcatgtgggggtgcat

SEQ ID NO: 12869 - DNA, 446 bp, Gossypium hirsutum
  Clone ID: LIB3135-051-Q1-K1-A8
aaaatcccaaaatagatatcccaaacgtttagccatttccagtaaaaccccaaaacagatttccccaattctctacatttcccctaatccctaaatttcccccaaaatccctaagtttttttaatagttcttcgtttaagtaaagtccttatatttaaaaaaaattcaatttttttcaggtattagggaaagcgattcggccaggtatttcagcatctagagtttctgtcaatgttggagaagagcgttgaaggaatagcttcagatcctaaagtgcacactttcgaggaggttgccaaccacaacaaaaccaaagattgttggctaattatttctgggaaggtttatgatgtaactccgttcatggatgatcatcccggaggtgatgaagttttgctgtcagctactggttactaccattggcttgctgctgtttacttttttta

SEQ ID NO: 12870 - DNA, 330 bp, Gossypium hirsutum
  Clone ID: LIB3135-051-Q1-K1-A9
ctcgtttaggccttcaggaacattcctggagttgaggatgccaatgtggagaggcttaatcgtttgaaactcgcccctggtggacaccttgtgcgattcattatttgtaccaaatcatcttacgagaagcttgactcagtttatggaacattcgaaaagcccttacaaaagaagaatgggtatgttatggctcgcactaagatagtaaatgctgatatgggtaggatcattaactacgattaggtacaatgagtgctgaatcctaataagatagataacaatatggcacctttgaagaagaaaccaatgaaaaacttgatgctatgctgg

SEQ ID NO: 12871 - DNA, 344 bp, Gossypium hirsutum
  Clone ID: LIB3135-051-Q1-K1-B1
ctacagtcctggaattacatttaccgctccctctttactgacaaaaccttggatctcacatgggactcctttgatttgactaagcacggggaacgagtaaagtacaaatcctttaatgagattattatcaaggaacccaggctgtggaaacggtctgtatcacgtagtcaatttgttatgatgccggaggtgccattccaggagtatcgagatggatcttagaagtatgtgtcgactcggaaacacgcgctactgtgagtataagatcggactctgtgcaggacatggaaggaaccgtgttatcgagccagctagtgctacccggaataacattatgttccgac

SEQ ID NO: 12872 - DNA, 224 bp, Gossypium hirsutum
  Clone ID: LIB3135-051-Q1-K1-B10
gtggagttgatggtgtgaaggtcgatgtgcaaaacattatcgagacacttggtgctggacacggtggtagagtatctcttacccgcagatacgttcaggcccttgaagcgtcaatttcccgaaacttcccggacaatggatgcatagcatgcatgtgccataacactgatggaatctacagcaccaagcataccgctgttgttagagcttctgatgactttaat

SEQ ID NO: 12873 - DNA, 290 bp, Gossypium hirsutum
  Clone ID: LIB3135-051-Q1-K1-B11
attaaaacaggggaagaaaagcagcgtactttgtgaagaattgaaggtttttggatactgggcaagcccttacaggtacatggcacagcttgctttgaagttgtaaggtgtttcttatgagtacactaatgaggatatgcttggcaacaagagcgatttgctcttgaaatacaatgcggttcataagaaaggcccggttcttcttgacaacgggaaaccaattgtagagactcttgttatacttgaatgcattgaggaaacttggaagcataatccctatttggcacaag

SEQ ID NO: 12874 - DNA, 316 bp, Gossypium hirsutum
  Clone ID: LIB3135-051-Q1-K1-B12
gagcgtaagggtttagagaagaatatggcggtcaaaaggaagacccccgtcaagtcccgaaacccacatctcattcgtggcgtcggaaagtattccaggtctaagatgtaccacaagcgtgggctttgggcaatcaaggccaaaaacggcggagtttttccccgccatgaccccaaacctaaagcccccgtcgccgtcgccgtcgagaaaccccccaagatttaccctgctgaggatgtcaagaagacccttcttaacaagcgcaagcctaagtccaccaagctgagaactagcattacgcctgggacggtgctga

SEQ ID NO: 12875 - DNA, 441 bp, Gossypium hirsutum
  Clone ID: LIB3135-051-Q1-K1-B2
cgaaaaagcactctgctttattatcaatttttctttttgcatttttttccactgaaaaaattctattcgttggaattgaaaacggggacggaatttataggctaactatctttttattaacatggaagttgacgccgatggaaatgggaccattgatttcccggaattccttaacctgatggcaagaaagatgaaagataccgactcagaagaggaacttaaagaagcattcagggtgttcgacaaggaccagaatggtttcatatctgctgccgagctccgtcatgtcatgacaaatcttggtgaaaagcttacagatgaggaagttgatgagatgatccgtgaagctgatgttgatggtgatgggcagatcaactacgatgagttcgtcaaggtcatgatggccaagtaagaacctctctgtctaaccataatcgagcc

SEQ ID NO: 12876 - DNA, 371 bp, Gossypium hirsutum
  Clone ID: LIB3135-051-Q1-K1-B3
accgatgacagattctacaatgccggctgtgaatcaaattacattcttgcgcactatcaaggcccaaggatggtgttatgcctttgggaaaagttgcagaaagagcaccaggcctactgttgtgagtaataatttaaccatacttgaagcttcatacagcttttacatgtaacatcatgtaacattgaaaccaaagctaacctttttagggaatagtgtatgcgcagttcatgtaattacgagattttaagcaccgggaatcttacattacaacaattatttggggtcatatatcatttgttcattcgttaattctttagcattatcgtctatgttgggtgtgacaatacattgaaagattgtccatggaa

SEQ ID NO: 12877 - DNA, 447 bp, Gossypium hirsutum
  Clone ID: LIB3135-051-Q1-K1-B4
gccaactgaaaagaatagctcgaccaatgtactcgaatcctcctgttcatggggcaagaattgtcgccaacattgttggggattcagctctcttcaaggaatggaatgctgagatggaaatgatggcagggagaatcaagaatgtgagacataaattgtttgatagtctttcttccaaagataaaagtgggaaggattggtctttcgttcttaagcagatcgggatgttttcgttcacaggcttaaacaaagctcagtgcgataatatgacaaacaagtggcatgtttatatgaccaaagatggaaggatatcacttgcaggattatctttggctaagtgtgaatatctagcagacgccatcattgactcataccacaatgtgagttaacaagataatgaaaaattttactaaaaaaaacatgttgtgataatgtgtttaaactgag

SEQ ID NO: 12878 - DNA, 242 bp, Gossypium hirsutum
  Clone ID: LIB3135-051-Q1-K1-B5
cccacgcgttcgcaaaacaccccctccctctttcatcgtgatctccgctctcttgtctctttcatatcgaaccaaaaaaacccgatcccaatggcttcttcaactggattttcactcaatttctcccctctttcaacttctttgaagcacaaccaggtacctcttcatgggatctctaatgtcaacttacttagtctcccatctcttagaatccgaccgggacctatgcgcctccgggtttc

SEQ ID NO: 12879 - DNA, 434 bp, Gossypium hirsutum
  Clone ID: LIB3135-051-Q1-K1-B6
caccatggatgaagtgaagctctttgggttttggccaagtccttttagtaaaagggtcatttgggcattaaagcataaaaggcgtggaatatgaatacattgaagaagatctgccttataataagagtgatctgttgttgcagtacaacccagttcataaaaagatcccagtgctcggtcatggaggaaagccaattgcagagtcattggttattctggaatatatagatgaagtgtggccacataatcctttgttgccaaaagatgcttacgagagatccgtatctagattttgggccaaattcattgaggaaaagactcaaccaatgtgggaattctttcgtaaattccgtgaagaacagcaaaaggcaatcgagaacaactatgaaattctgaggacgattgaggaacatggtcttggagacaaaaagttc

SEQ ID NO: 12880 - DNA, 423 bp, Gossypium hirsutum
  Clone ID: LIB3135-051-Q1-K1-B7
acttcaccaaaattcacagccctaaaaatcaatttgtttgggcatatttcagcagccaccgagtacaccacttcatcaggtggtcgatggcactccagcgacgatcgatgatgcctttgggcccttccaacttcgacttccagcgaagaggataaaaatccatggctgatttgcaaggttcgattgtacggaagagaacgctcgtggatgaggctcggagactgcggaattgctcatgcgagcccgatcccctggcgttgttctggcacgttccagaagcttctggcttgtgtaagcttggtaacttaaggtttcatgaatatttttctgttttgggtcaggatttgggctaggggtttattttattgtgggctaaataattggacttgtaacaaggacattggacctaattatttttgtttt

SEQ ID NO: 12881 - DNA, 291 bp, Gossypium hirsutum
  Clone ID: LIB3135-051-Q1-K1-B8
gccagttccgagaagaacagaaatgggtttgcaaaatttttcactcggagtaagaacgggatacaactagaaatttaagaacaagttgtaaaacaaagatatagtttgtcatattaaagacggtgattaaatgttgtttgatcacctgttattattattgttacttcactcttaggttgtctcatgtaatgctattattatacatgaatggttgtgttcaaattgaaatatcaacattcaagttgttacttcactcttaggttgtctcatgtaatgctattattatacatg

SEQ ID NO: 12882 - DNA, 401 bp, Gossypium hirsutum
  Clone ID: LIB3135-051-Q1-K1-B9
tgaccatagtacgtaacagaagagtcgacattgctcaatatttcctaaacccaggacagtgccggaagatatggttgctatcttcctcagggttatgacatttgggacagatagctgctacgaccacttttttattcttgagatttgatagagtaggaatatagttccatgaaattctccagtttgtaattttaattttcggagggagatgtaaattccataatttcctgtagaaatctctagtctcagtttgtaaataattattactaggacccgaattagcctcttgtaatagtttataggcacttctaactgagaattcgcctgatgattccccccggcacacacttgaaagtcttcataagttgtctctgccagagggatctacaatattttctttt

SEQ ID NO: 12883 - DNA, 423 bp, Gossypium hirsutum
  Clone ID: LIB3135-051-Q1-K1-C1
cccacgcgtacgcccacgcgttcgcccacgcgtacgcccacgcgtccggtctaccacacacttgctaatattgctacttggagtggtggctctcgccactccctcttttggtacctatgagtctcccaactatgggaagccccctactcctgtttataaacctcctaaggtgaaacccccaccttatgaacatcctgtttataaacctcctaaggtgaaacccccaccttatgaacataagccccctgtctatgaaccaccaaagaaggaaaagcctgagcctaagccaccactttatacacctccaaagaaagagaagcctggacccaaaccaccagtatatgaacctccaaagaaagaaaagcctgagcctaagccaccagtttatacaccaccaaagaaagagaagcctgagcccaaacc

SEQ ID NO: 12884 - DNA, 312 bp, Gossypium hirsutum
  Clone ID: LIB3135-051-Q1-K1-C10
caatggtcatggttatggcgatcgctacaactgatgctcaaagcatttgcaacatgccagcttcaggtgtgatggcatgcaaaccagcagtgacccgccctaacccttcggcggccacgttaacttgctgctccgtcctttcccacgctgacatgcgttgcctttgctcatataagaactccaagctcttgccttcccttggtatggacccaaaccttgccatgaaattgcctagcttgtgcatgctttctcatctggaaattggtaggtcctggttctcatatttgatctcaaatgtgagggaaaatcatg

SEQ ID NO: 12885 - DNA, 149 bp, Gossypium hirsutum
  Clone ID: LIB3135-051-Q1-K1-C11
cccacgcgtccggaaggaccttccactctcttgcttcaccttctctttctttccccggatctcgttcggtctctttgaaactcacccccgcttcaactcggcccttctttggtctttagatgccaccaacgccacagattagggcaccc

SEQ ID NO: 12886 - DNA, 262 bp, Gossypium hirsutum
  Clone ID: LIB3135-051-Q1-K1-C12
gtggatccaccatgttcaaagacttccacagaaggttgcagcgggatctgaaaaagattgttgatgctggagtacttgcgtctgatactcggcttggtggggaagtaaaagcacatcctgtggaagttaatgtagttagtcatcctatccaaagatttgcggtatggtttggaggttctgtacttgcatcaacgcctgaattttttgcggcatgtcacacaaaagcggaatattaggaatatggagccagcatttgccgtac

SEQ ID NO: 12887 - DNA, 400 bp, Gossypium hirsutum
  Clone ID: LIB3135-051-Q1-K1-C2
tggctgaaaacccgagaaaaatttaagtgactccatatttccttcacagtagggcacagttggaagacgtggttgctatcttcttctccttggccacatctcatacatcgatcctcagtcatcacttttctcaacttcagattggagaaagtggggatgtaatttcacgctattttcgacactgtaattttgatttttgagggcatgtgtaaattccacaatttcctgtagaaacttttagtattggtctgtaaataaaaactaggatctatattagcctcctgtaatagtttataggcactccttactgaaaagtctccagttgcctcccttctccacacttggaagtcttcattggttgactttgaaagcggaatctgcaatattttcctagcaatat

SEQ ID NO: 12888 - DNA, 367 bp, Gossypium hirsutum
  Clone ID: LIB3135-051-Q1-K1-C3
aatccaattactcataaactgatgccagctactgatacaattttaagaacatattaccataggatcttcacatgaagataatgacacattcttcagaccagtttgtaccggatataggtttggaaggtggggcatatcatcaccctgaacaaacatgcaggagagaggagaggaatcttcctaatatatctgtgccccttccagttaaaagagaggagcatataccaagcaaggtagaggaggatctttcgatggaagtagaacaacagtttccaaccaaagcagaggagcagcctcaacatggcttggtagtttcagagggagaatcttcgcagatatcaaatgccattgcttaacatgggttggc

SEQ ID NO: 12889 - DNA, 468 bp, Gossypium hirsutum
  Clone ID: LIB3135-051-Q1-K1-C5
ctgaaagctaaaaaggaaacatggtttttttttgagttagtgaaacaatcatggccgacaccttgcttttcacctgcctgctattatttcttgctgccatgcaaggcgtccatgcagtcgactatgccatcaacgacaacaccggcaacagtggcggcggtgttcgtttccgaaccgaaatcggagcccaaagcagcctccaaaccatgtcatccgccacagacttcatctgggacatcttccaacaaaccaacccatccgacaggaaaaacgtcccgaaagtaacactgttcatcgaaaacggcgacggcgtagcctttgccatcaacaacgaaatccatgttaacgccaattacctaggaaactacacaagcgacctgaggaaggaattcaacggggtgctttaccatgaaatgacgcatatttggcagtggaacgggaacggtcaaacccctggggggttgattg

SEQ ID NO: 12890 - DNA, 446 bp, Gossypium hirsutum
  Clone ID: LIB3135-051-Q1-K1-C6
caaaccttaactacttccatgaacaacaagtattaatcctttctttttggcgatggcaacgtatggagttggtttagcagaagcttacgttatgcgatctttacataaggagaaaatgaagaagatggacaagcaacaggcgtcaaagagtgaggaggaggaggaggagaataataacaaaatggtttttgatgatgaaatgaaaatgcctgcttcttgtttctcctgggtttctaagaaaacccattttgctagggtttctgatgcttccggaaaaccaaacgtatgatgacaaacagtgtcttgagggccttgcttgtatttttattatataagctttggccaaaggaaatgccttttagcctgttaaactaaggaattttatacaaagcttgggattgctttgctgggattcttgcttgtatcaataaaagaaagatacttgc

SEQ ID NO: 12891 - DNA, 340 bp, Gossypium hirsutum
  Clone ID: LIB3135-051-Q1-K1-C7
ggaattataataaaggaacaaagggtggacttacgtcacgtgtgttgcaatcaaggatcctgggcgcttgacgatatatagagagaacgagggctgtctacttgtttttacggccagtgtgaacatcttggcaagcgaacgatctgtcgcgcatatctcacagcaactgtaactgagtgacgaagccctcgacccaagaatccggtatgtagaagtctcgaaccctggcatcaaagaaagtcactttcagtatggaatgcctcactcaatgagggggggtatttattacatatgcaagctctctatgcagcgattgaacccatgcttgttatcaaaaatt

SEQ ID NO: 12892 - DNA, 412 bp, Gossypium hirsutum
  Clone ID: LIB3135-051-Q1-K1-C8
aactctaatcaaggaaaacatattgatgcaaattaccaatgcttcacaaatgatcaaactagaaaaagatccacatgctgcatttgcattgatcattgatggaaagactcttgcctatgccttggaggatgatatgaaacagcaattcttaggcttagcagttttatgtgcatctgttatttgctgtcgtgtatctcccaagcagaaggcgctagtgacaagattagtaaaagaagggaccgggaaaaccaccttagcaattggtgatggtgcaaacgatgtcggaatgattcaagaagctgacattggagttggcatcagtggtgtggaaggcatgcaggctgtaatggccagtgacttctctgttgcccaattttgtttcttggaaaggcttctcgttgtccatggacac

SEQ ID NO: 12893 - DNA, 331 bp, Gossypium hirsutum
  Clone ID: LIB3135-051-Q1-K1-C9
gatttgaccttttgagaaaaatcctgtgagaatccactctctccataggttcttcaagcagaccctacgatggcggacgacgactataatgatatggacatgggatatgaggatgagccaccagagcctgagattgaagaaggagctgaggaggatttggaaaacaataacaacgatgatgttcctctagaacctatcgaaaccgaagacaaagtagaccaagatgctgaagacaaaactactcgtaaaacatcaaagtatatgaccaaatacgagcgtgctagaatcttgggtacccgagccttgcaaatcagtatgaatgcacctgtta

SEQ ID NO: 12894 - DNA, 160 bp, Gossypium hirsutum
  unsure (1)..(160): unsure at all n locations; Clone ID: LIB3135-051-Q1-K1-D1
cccacgcgtncgggtaaggagatttgggggttattctttagattcttaaaagcaccataattttctttgtgtactgttttgaacccattgtgcccccatctttcccctacatccctgtccttcatgttcccttatatccctaacaatgatctttattgtg

SEQ ID NO: 12895 - DNA, 300 bp, Gossypium hirsutum
  Clone ID: LIB3135-051-Q1-K1-D10
gagcgtaagggtttagagaagaatatggcgtgcaaatttgtgacccccgtcaagtcccggaacccagagctcattcgtggcgtcctaaagtattccaggtctaagatgtaccacaagcgtgggctttgggcattcaaggccaaaaacggcggatttttcccccgccatgaccccaaacctaatgcccccgccgccgctgccggcgtgaaacccgacgagacataccctgatgcggatgtctagaagccccttttgaacaagcgcaagcctaagcccaccaagctgagagctaacattacg

SEQ ID NO: 12896 - DNA, 327 bp, Gossypium hirsutum
  Clone ID: LIB3135-051-Q1-K1-D11
cccacgcgttcgcccacgcgtccgcggacgtttggggataaggctaccctcctctcttagattgagatgcttaccaaccaagtactactattactgtacatacagagggggagaagcactaatcaaagtatatttcgcctagttgagcttttttgagtgtggcgaggtcttgagaggaagaagctggcgagtagacttcttgggctatgttcggtagaagacttccataaatgttggaaggcacctttcgcgggatgctgtcccactcgcaagagccgacggggtgacccacataacgatcagaacgaactagcccctcgtttattt

SEQ ID NO: 12897 - DNA, 376 bp, Gossypium hirsutum
  Clone ID: LIB3135-051-Q1-K1-D12
tcgcccacgcgtccgcccacgcgtccgcaaggtttggcccattgctgctcctcaggcagtcaagagtgttgaggttgaagctaatcctggccctggaagtatcgtaaagatcaactttgctgaaggccttccattccaatatatgaagcaccagattggaggacatgacgacaagaatttgtcatacagttatagtttgatcgaaggtggacctttgggggacaagcttgagaaaatcagctatgacaacaagtttgaggcagctgcaggtggaagaagcctttgcaagagctcgatgaaattttacactgttggcgactatgtgatcactgaagatgagatcaaggctcaaatcaaagggagtgaaggagtttac

SEQ ID NO: 12898 - DNA, 390 bp, Gossypium hirsutum
  Clone ID: LIB3135-051-Q1-K1-D2
aaaaaattgaaacaagaccttcctggccacgcagatgaggtttttgctgttgattggagtccagacggtgagaaagttgcctcaggcggtaaggatagggtgttgaagttgtggatgggctaaaagcctacagataaatggagcctaaagagcatatcccatcaagttgaaatataaacatgtggcgtttgcatcaatggcaacaccatatatttatctgataggatcagtgatacgtgcaactgcaatgaaccaggattgattggtaggaacctttatgtgtgacattgcagttatgcagccatttatcacggctttcaagatttctgagtgtataacaatatatactagcttgacgaaacattgcaaactgatgtaatatcttttttg

SEQ ID NO: 12899 - DNA, 341 bp, Gossypium hirsutum
  Clone ID: LIB3135-051-Q1-K1-D4
atcggtatcctctaattttaaacctaagagttttaagttaacgaagcatttgggtcgtttcgaagtaatggaaacttcacgaaaagtaaagaagggagccggaggaaggaaaggcggtggcccgaagaagaagcccgtttcaaggtccgtcaaagccggtctccagttccccgttggtaggatcggccgttatttgaagaaaggaaggtattcacagcgggtcggaaccggagccccagtttacttggctgcagttcttgagtacttggcggctgaagttttggaattggctgggaacgcttcacgtgacaacaagaaaaacaggatcattccaaggcacg

SEQ ID NO: 12900 - DNA, 243 bp, Gossypium hirsutum
  Clone ID: LIB3135-051-Q1-K1-D5
gtaagttctcaacttttaaaggcaagtgatttgaggctggtgacgtttgtgccaagagatggtgagagaaaaggtgctgaatcaacttttaatgaaaactgtaaagatgcagctgaccaagatgataaatatcacctataacaacgattacacgtgtacagtaaaatcatgaattctgcttgtcattcttaacgttttaatttgtatgaataataataatggatagtaaaatgtttgagaggg

SEQ ID NO: 12901 - DNA, 389 bp, Gossypium hirsutum
  Clone ID: LIB3135-051-Q1-K1-D6
tgttctcctttttttctctatttgaacaagcatgggtttaggccataaaatcaggaccggatatgcgaagctcatctttctttcgagactggctcgtcagtctcatgatgctaagactcttccagcattgccctgccaaatcatgaagcaagatggagatagactacgatcccttgcactctttggggcaggggtctcagggcttttgggttgtgctaccatagcttattctgatgaggctgagcatggtttggcggttcctaactatccttggcctcatcaaggcatactaagctcatatgaccatgcttctatgcgtaggggtcaccaggtctaccaacaagtctgtgcttcttgtcattcaatgtctctaatctcatttcgagatc

SEQ ID NO: 12902 - DNA, 456 bp, Gossypium hirsutum
  Clone ID: LIB3135-051-Q1-K1-D7
ggaatttcgattagtgaacatagagtggatttactccacctggattggaatataacaacccctccccccaacgttatatagctataacgagggctgcctttctctctctaccgcctgtgtctatctcctgtcaagtgtactccctgccacgcaactctcacagcaactgtaactgtgtgacgaaaccctcgacccaggtatccggtatgtagaagtctcgaaccctggcatcaaagaaagtcactttcagtatggaatgcctcactcaatgaggaagtatattcattacatttgtaagctctctatgtagcgattgaacccatgcttgttatcaaaaatttcgttctcctttggaggtgatcctcctcttcagaggaaatctcatggtggtcagaatgagcgcttgtgggggaagcaaggagagtaatcttctatttgtgaaactatatttcttat

SEQ ID NO: 12903 - DNA, 382 bp, Gossypium hirsutum
  Clone ID: LIB3135-051-Q1-K1-D8
gaaattccaaatgaagataagaattttaccactagaatgcgcatcattgactttggaagttcaatagatgggtttacactgaagcatttatacggatcagctggaccttctagatctgagcaaactcatgattatagtccacctgaagctcttcttaatgctagttggtatcaagggcccacgagcacttctttgaaatatgatatgtggagcgtaggtgttgtgatcttagagatgatcttggggacaccaaatgtatttcagataagtgctctgacacgcactcttctagatcatcatatcgagggttggaacgaaaacttgaaggagcttgcttataagcttagatccttcatggaattgtgcattctaatcactggga

SEQ ID NO: 12904 - DNA, 434 bp, Gossypium hirsutum
  Clone ID: LIB3135-051-Q1-K1-E1
cccacgcgtccgggaaaagaagcctcgaagagagaggagggattgacaatgtgaagactcctgatgttcatactttttttcaacacttgattacgtttgggattgttaacgaagaggagttggagctttataggaagcttgttattggctctgcttggaggaaacaaatgcctaagcttgcagtttcgcttggcctcggtgataaaatgcctgacatgattgaagaattgatcagtaaaggacaacagcttgatgcagttcatttcacttatgaagtcagcctcgttgacaggttcccccctgtggccctgctaaaagctttcttgaaggatgcaaagaaggcagcttcatctattttggaagatcccaataatgccggccgggctgcgcaacttgctgcacgcaaagagcaatcagcacttcgggcagtcatg

SEQ ID NO: 12905 - DNA, 400 bp, Gossypium hirsutum
  Clone ID: LIB3135-051-Q1-K1-E10
tcgcccacgcgtccgcaaaaaccaatgtggctgttacgctttttgaggctggcctggctaagctacaaacttcatttggtagtgataggattcctgatgctcatcttcttgaacaggctgagctatctgccaagaggaagaagctgaaaatttgggagaactactttgtaggagaggaagtttccaatggacctgccactgttgaaaacaagcaaaaagaactgctacaggcagtggttacagaaatattgggtgacggaaaatgttatgtccagacggtgggagatcagagagtatcagctattcaaaaacagcttgcatctttaactatgcaagaagctgctgagattggtgcctttaaccctaagaagggtgacatacgccttgctcagtttagtat

SEQ ID NO: 12906 - DNA, 333 bp, Gossypium hirsutum
  Clone ID: LIB3135-051-Q1-K1-E11
catcgatatgtcaagcaacaaattcgaaggttcaattcctgaaacagttggaaaccttatttctctccaggtgctcaacttttctcacaaccacttaaccggtcatattccttcctcattggggaatttggtagcacttgagtcgctagatctttcttgcaacgagcttgttggggagattccttcggagttgactggtttgaattttcttgaagtgttaaacctgtcagagaaccagctcgttgggctcatacctcaaggaaaacaattcaacacctttcttaacgatttctacgcagcaatatatgactgtgtgggtttcccgtttaaaaa

SEQ ID NO: 12907 - DNA, 401 bp, Gossypium hirsutum
  Clone ID: LIB3135-051-Q1-K1-E12
aaccgtttaagcacaggcaagagctggtactagcctttttagtacaaagaatatgtagacgagcccggggatgttcgaaacattttggtagtagtagcaacccttatagctttcgttaccttgcaagctgggggcaaccctcctggcggagtatggcaagaaagagatcatgcaggcagagccatttatgcatccaactcagcaacctactatgtggttttgatttacaacaccctcggtctcggcactttcatacttgtgataataccgctcacctacaaatttccttggcacctggaaattgttattgccaccattttcatgggcgtcacttacgggtacgcagttttcgcggttacttcccatgaaataccgatccggtacgccatatgccccttttg

SEQ ID NO: 12908 - DNA, 331 bp, Gossypium hirsutum
  unsure (1)..(331): unsure at all n locations; Clone ID: LIB3135-051-Q1-K1-E2
cccacgcgtccggccatctttgctgcattactcatcatggttgtttccgctcacgaggggcacgaccacacacctggaatggccatgtctccgggaccggcggccactaatatggccaacatcttggctccaactgcagtgatgggggtattccttgctttggttgttgcagttttgggtcctttaacagaataatatttaatattgcagtgttgtttcggatttcttcgctggccttaataaatgttttccatgtattgcttctcattccgcttcccttttcatttatgaaaatttcatgcgttacagtttaaaaaaaaaacaaaaatnn

SEQ ID NO: 12909 - DNA, 401 bp, Gossypium hirsutum
  Clone ID: LIB3135-051-Q1-K1-E3
aaggagttgatagagaggcactgtggaggtgtcagaggtgtatgggacaatttacttgcagtaatacctggaggttcatctgttccacttttacccaagcacatatgtgatgatgtcttgatggattacgatgcactcaaggctgtccagtcaggactgggaactgctgcagtaattgtgatggataaatcaactgatgttgtagatgcaatcgcaaggctttcatacttctacaagcatgagagttgtggacagtgcacaccctgcatggaagggactggatggctctggatgatcatggaaagattgaaagttgggaatgcaaagttggaagagattgacatgcttcaggaggtgaccaagcacattgaagggcacacaatttgcgctttgggtgatgc

SEQ ID NO: 12910 - DNA, 385 bp, Gossypium hirsutum
  Clone ID: LIB3135-051-Q1-K1-E4
tgactccacaacatgaggagtcagggtccatgtatcagtctccaaggatgcaagtcttacccaacagagtagccatcagcaaggtttgcccaatcagcctggtcatccctcaaaaggttgtggtgggagtgttggttgggccaatcccgtgaagaaattgagaacagacgcacgttaaaggagaccaagccttctatgacattctagagtatctcacgtaatgaaaaaatattttgttgccattgactccaagcactgagttgtattttatggctcatcacggcctgtacaattgcaattagatcataccattaaagtagtgtaggttcattgagccctcgttgtatatccgtctttttcttaggttcaatcaatgcaatagttt

SEQ ID NO: 12911 - DNA, 395 bp, Gossypium hirsutum
  Clone ID: LIB3135-051-Q1-K1-E5
aaacgatgagttgcataggaacgtgctgggcggaagcttggtggtcttagggtcgagaactcgtattggctcaatgaggagtcatcttacaaatactttgaagtcatcttagtggtgcctgcacacaacactatccgatatgacccaggcatgaactggatctgcaatgtggatcacacgcacaggttacgtccatgactgacctctgctggcatgaaatacaggggtcttctaggcaaggggcacttgcaccagacggctcgacctttgaggaggagcccctggaagagaaacatcacactctgacattcggcgctgccgctgatcccctggaccgaacttggtgattttgttgctgctatcttggcttcattactattgtaggttttataaca

SEQ ID NO: 12912 - DNA, 236 bp, Gossypium hirsutum
  Clone ID: LIB3135-051-Q1-K1-E6
gtgattatgagacaagtcaaatcctgcggacaggttgatgatgttcgatcagattctgaaggcgaggatgaacatgaggattgaatatgaaagcgtgcaaaccactatatttacttgttccccaaggtatttaggaaatcataattttcaatacaaatgtaattttctttcaattctacatatttcctattattgatgaaattaatgcagtgttgtacctttcctttttctctttc

SEQ ID NO: 12913 - DNA, 281 bp, Gossypium hirsutum
  Clone ID: LIB3135-051-Q1-K1-E7
gaccgcaaaatcgactgttgggtgtatgttacttagaaaagacccaggggcctgtgtgaaaaaaaagtgggatggggtcaaacccaaaaacacaccgaggacacactggagtactcgttagccgtctaagttacatattagcgcgagtaggtaggaagtttcacgagatctttcaaactgtgattttgattttagaggggatattgagaagccattattttctattaaaagtcttggagagaatttgccaaacataaaatttaagaacataatccatattt

SEQ ID NO: 12914 - DNA, 371 bp, Gossypium hirsutum
  Clone ID: LIB3135-051-Q1-K1-E9
gccatgactgagatgaatggtgctttttgttcaactaggcctatgcgcatagggccggctactaacaagaagactggtgctgcacagcaatatccagcagcttcatcgcacgggactcagaacgagaatgatccaaataatacgactatatttgttggtaatttggattctaacgtgactgaagaccatttgagagaggtcttcagcccatatggtcagttggtgcatgtgaagattccacaaaacatgcgttgtggatttgttcactttgctgataagagttgtgctgaagaagcactccgaatactgaacgggactcagttgggtggacaacagattcggcttttatggggtcggaacacatcaaacaa

SEQ ID NO: 12915 - DNA, 413 bp, Gossypium hirsutum
  Clone ID: LIB3135-051-Q1-K1-F1
atggcccatactgcaacacggaaaattcgacggtaggatgctgaacactgagaaaagacccagggcactctcgaaaaagatgttccatggattcagacccaaaaccacaccgaggacacactgaagtactcgttagccgtctaagtaacatattagcgcgagtagctaggaagttccacgagatcttccaaactgtaattttgatttttgagggtatatcgagaagccatagttttctatagaagtccttgtagtcaatttgtaaagcataagctctaggatcatatgcaatattttgtaatagtttataggagctgcgtactgtgaactcccccgatgcttcgacacttcaaacttgaaagtcttcgtgtggtttttcagccagcgagatactgagaatcatctctgttaca

SEQ ID NO: 12916 - DNA, 396 bp, Gossypium hirsutum
  Clone ID: LIB3135-051-Q1-K1-F10
cgcagtgtactagtgaataggaaaagcggattgatattactaatgacagatggaggttgaggatagaacatgttcggtgcctcgcccttgtctccttcgccggagactcaaaatgataggaatcctatcgataaagaagaggcataggcatcgcctctcgatccaatccgtcttccctggcctccccaacacactcttgatacgaaataaacctcccgccatagagaagagatctaaagtctgggtcccctcgatcacccttcccttgaacctgaactggtcgagagagatgaacccgcaccacattttttaaccttcgaaccgaaacccccaactagagatgtaattccataacctaaacaactcagttgagagctccgtgactggttcaaggga

SEQ ID NO: 12917 - DNA, 71 bp, Gossypium hirsutum
  Clone ID: LIB3135-051-Q1-K1-F11
cttcataaatttggaatatagtctttggtacttttatttaaaaaaaaaaaaaaaaagaagaggataggggg

SEQ ID NO: 12918 - DNA, 400 bp, Gossypium hirsutum
  Clone ID: LIB3135-051-Q1-K1-F12
cccacgcgtccgattcgctagcggagagcatcatcgttattttggattgaagactgaaacgagagggattattgagttcgagtgcagaagtgagagagaatatgatatgtggactcaaggtgtgtcgaggcttcttttgattgctgctgaaactgaaaggaagcacagaagacaaagttcaactacatggcctcctggtggccagaatttggacttagattaactcatctgccttgcttttaagctagattggttacagggagctcaatgcaaagcaatgggcgaaccattctagccaagacaaatatctgtgaacattttgagctgatggtgcaatcaaaaagctgtgactgtaacctttttttgtagagtgagagagtggaactagttacttagggat

SEQ ID NO: 12919 - DNA, 310 bp, Gossypium hirsutum
  Clone ID: LIB3135-051-Q1-K1-F2
aggactcttacctgtataggcatttggagaatctgcaggcacaggatcgttttattgtttataggatggtggtggttctctttaggaggggattgacatttgaacagacaatgtgcctattggaggtaatgtgggctgatcaagcaaccattaaagctgggctttctaaaaacacctggaggaggataagacagaaggcacccccgacagatgatctattggtggatgcaattgcagcttccatcttacagaagaagaaattgatcattgagaagtaccgccgcattgattaaatttttagggagtggca

SEQ ID NO: 12920 - DNA, 351 bp, Gossypium hirsutum
  Clone ID: LIB3135-051-Q1-K1-F3
ccgacacgtactctcagcctttcttggtttacctacaggaatccatgccgccggcctatgcgaggggccacacatacaaccctgctaaactaccatcacaaaaggcaccaaaggtctccatatgccgacttgcctaccataacaagccagagattcccgttattctactgggaactatttcgtgggcatactacggggtagtattgacaatttttgtgaccctacactcctgcgtgatgcacccattctttaaaccacatttattgagagaagattcaagggtctgggcactgatattcttggcccatgacgcggcatcatttgttgtatacacagcacacaattacttct

SEQ ID NO: 12921 - DNA, 461 bp, Gossypium hirsutum
  unsure (1)..(461): unsure at all n locations; Clone ID: LIB3135-051-Q1-K1-F4
tcgcccacgcgtccgcccacgcgtccgaagaagatgaggaagcaatcgctgctcctgattatggaatggtttctttagcaactgaccaatggcccgcacaaataggtgatcaatggtctgctgatatggttcagccacctatctctggtgtacctgctggtaattggggtgatcaagttgcagttgccgttacttctgatgtgtgggatgctgcagctgccccagcacaaatccctggtgctcctgtcgatgtgtcagcccctgctgctactggctgggaatgagagggatttattatgattttgacaaaaaatgttttggtttgcttttgaaatatgagctatgtcgaacaatggaattgtgtgttctggcacgatttaattgaatagttttttttatagatattatttagngaattttcttattttttgtttggaatcaaaagtgatgatttattggtt

SEQ ID NO: 12922 - DNA, 454 bp, Gossypium hirsutum
  Clone ID: LIB3135-051-Q1-K1-F5
gcttactgagttcactcgtttccggagctgacgtcactctcccggccgccggcagattttctgcatcgacattttggacggacatgattaaatacaaagccacatggtacactgctgtccccacgatacaccagatcatattggaccgccatgagagcaatcccgaacgtccacggtaccccaagctaaggttcattagaagctgcagtgcatcattggcaccgagtatattagaacggctagaggcggcatttgacgcaccagtgctcgaggcttacgccatgacagaggcgtctcaccttatgacatcgaacccgttactaaacaatggcccacataaagctgggtcggttgggaaaccggttggtcaagaaatggcgattttgaatgaacaaagggagattcagccaccttattctaatggggagggttgtattatgggattgaatgtaac

SEQ ID NO: 12923 - DNA, 350 bp, Gossypium hirsutum
  Clone ID: LIB3135-051-Q1-K1-F6
gtttaccctatctaattgtgttgtttttgaatttaggagcattgctcacttcactaggctgccctgaatgttaccgccacccatcttcgccgccgaaatgtcctccgccagactatccgcctaaacatcatcatcctcccatcgtaaagccaccctatcaccctaaaccaccaaaacatcatcctccaaagccacctaagccttcggtggtaaacccaccatatcaccctaaaccaccgaagccaccggtggtgaagccaccgtatcaccctaaaccacctaagccttcggtggtgaaacccccatatcaccctaaaccaccaaaacatgcaccgcatcatcccaagcca

SEQ ID NO: 12924 - DNA, 399 bp, Gossypium hirsutum
  Clone ID: LIB3135-051-Q1-K1-F7
atccgcgccacactcttcaggaagctcatcaaccatggcggaacagaccgagaaagcatttttgaagcagcccaaagtgtttttaagctctaagaaaactggtaaagggaagagaccaggaaagggagggaaccgcttctggaagagcattggtttgggattcaagacccctcgtgaagctattgaaggaacttacatcgataagaaatgccctttcactggccctgtttcagtcaggggccgcatcttagctggtacttgccatagtgccaagatgatgaggacaatcattgttcgactgaactatcttcattatatcaagaaataccaaaggtactagaagaggcattcaaacatttctgctcacatttcttcaatgcttcttgtgaaggaagggga

SEQ ID NO: 12925 - DNA, 101 bp, Gossypium hirsutum
  Clone ID: LIB3135-051-Q1-K1-F8
aaataaaaaaaaaataaaaaaattttatatttttaataaaaaaatcaaattaaaaggagaaatggtgttaaaaaaaataaaataaatgacaactaaattaa

SEQ ID NO: 12926 - DNA, 260 bp, Gossypium hirsutum
  Clone ID: LIB3135-051-Q1-K1-F9
ctggcatatataccttggctacatgcattgttaatgctcttagaaaattcccaacatgtgggccaaatggaaaacttgaattgctaaaggatctatatgccctaagtttgaagaaaagagatattcttgtgctgcatggaccctctgttttgtccaaggaacttgagaaggagcgcatatagcgtggtgtgaggaagttcaaagtgaccacggaggtccaaaaagcttacttggaatacttgagcttccccaagggagac

SEQ ID NO: 12927 - DNA, 388 bp, Gossypium hirsutum
  Clone ID: LIB3135-051-Q1-K1-G1
agcagagtccgtcaatcaggcccgtgcttacaacgcccaaatactttccctcatggaccagctctccaagggtagcaaccttctcatcaacaaccacccatcccctgcatccatctccatcctctgattttgcttttggctggtgttttttttttatctatctaaccgaaggcacggggcttctaaatccgttaattttgggtatggtatggatccgtacatagtatttgttctaatttttggttttaattggagaaagttatgccgaaaggcagtggcggatatgcctcagttttctagctgtttcgaattgtgaaactcaaacaagcaaacgttgggccttttggttttaattggagaaagttatgccgaaaggcagtggcggata

SEQ ID NO: 12928 - DNA, 408 bp, Gossypium hirsutum
  Clone ID: LIB3135-051-Q1-K1-G10
gttgatgatgactgacatacaagacgattttaacctttgtgggctaagtagccaagttccttactatgattatgctcttgatttgattttggatgttgaatcttctcacggagatatgtttacggaggagcaaaacgaattagttgaatctgcggcagagatgctttatggtctgattcattctcgatacatattgacaggcaaagggattgccgctatgcttgacaagtacaagaactacgattttggaagatgccctagagtttactgctgcggacaaccatgtcttccagtcggtcaatcggatattcctcgatcaagcaccgtaaaaatatactgccctcgatgcgaagatatcttctacccacgctccaagtaccaaggcaacaccgacggtgcctatttttt

SEQ ID NO: 12929 - DNA, 432 bp, Gossypium hirsutum
  Clone ID: LIB3135-051-Q1-K1-G3
tcgccgccattcattctcagcatctttaggttacctactggaatgaatcccgccggtcttgcaatggcagacacagaaaaccctgctgaactaccatcagaaaaagctccaaaggttttcatccgccgacttgcttacctcaacaagccagagattcccgttatcctactcggaactatagctgcagcagccaacggtgtaatatttccaatttttggtatcctaatttccagcgtaatcgacgcattctttaaaccacatgaattgagagaagattcaaggttctgggcactgatattcttggcccttggcgcggcagcatttgtggtatgttcagcacaaaattacttccttttcatcgctggaagtaaattaatccaacgaatcacatccatttgttttgagaaaaaggtccccatggaactttggtgg

SEQ ID NO: 12930 - DNA, 354 bp, Gossypium hirsutum
  unsure (1)..(354): unsure at all n locations; Clone ID: LIB3135-051-Q1-K1-G4
gaaaaagggtattgcctgaaatcagtgctgtttttgtctagtatacctcgcaatatataagtttgttctatggttggacgcacacgcaatgacaacgcctcttatatcttgtgtatctttagttgcttgaggagagcctttagaactttgccttggagtgtgataggttcaaatgttaaaactctatcaaccatcagtttaaacagcctggtattagttctgtgttttgtcttanaaaaaaaaaaaaataaaaaatataaaaattaaaaaataaaaaaaattaataaaatttatataataaaatataatactaataaaaaaattttataattattattaataaatatttaaaaa

SEQ ID NO: 12931 - DNA, 370 bp, Gossypium hirsutum
  Clone ID: LIB3135-051-Q1-K1-G5
gtttactatgacaaaaccatcagtggaaagctaagttacggggctgtgcacgatgtgtttgggattcaagctaagaagctcttcttatggttgcctgttactgggattgaggttaatggcaaatcaggtatggttcagttcttcgttggagctttttctatggagtttccagctgtacagtttgaagatattccagtttgaaagaagaaggctgttctgagggctgacctgtttgcttttatgtgaattcaggactggttccttggtccattgctggtggcggcaaccttacttgcctgttttatttcatgcccccaattaagacttcttgttagctcaataatttctttgaaagagccttactatattt

SEQ ID NO: 12932 - DNA, 391 bp, Gossypium hirsutum
  Clone ID: LIB3135-051-Q1-K1-G6
agagtcgccctttggtgtttttctaattcaatcagtgaggtgaagaaaaatgtcttgctgtggtggaaactgcggttgcggctccggttgcaagtgcggcggcggcggcggctgcggctgcggcggttgcaagatgtaccctgagatgaactttgctgagcaaaccacaactgagacacttgttcttggcgtggcaccccggaaagtgaactttgatggagctgaaatggaaactggggctgaaaatggctgcaaatgtggagataactgcacttgcaacccttgcaattgtaaatgaggggaaaaaaaaaaccgaagcatattatggaagctgatctaaataatatatgatgtatttgggtttttattattagaataaagcagccatggt

SEQ ID NO: 12933 - DNA, 330 bp, Gossypium hirsutum
  Clone ID: LIB3135-051-Q1-K1-G7
tcgcccacgcgtccggataaataagcgtttgtctcagatttttgaagatggcccgtaccaagcagacagcccgtaagtcgactggtgggaaggctccaaggaagcaacttgctaccaaggctgcccgtaaatctgccccaaccaccggtggtgtgaagaagcctcatcgctaccgtcctggaactgttgctcttcgtgaaattcgaaagtaccaaaagagtactgagcttcttatcaggaaattgcctttccagaggcttgttcgtgaaattgcccaggacttcaagactgatttgcgtttcagaagcaagcctgttttacttttcaaga

SEQ ID NO: 12934 - DNA, 420 bp, Gossypium hirsutum
  Clone ID: LIB3135-051-Q1-K1-G8
cccacgcgtccgcccacgcgtcctggtgcatctgccgtcgaccacctgctccagccactggtgcatctgccgtccaccacctgctccagccactgctcaagagcttagggagtctaattcggataagagaaaaagctacctaaccgaatagtcgatctgtaatcgttcgacaacttccgagatctcatttggaagctacaggctcggggatcgtcagcaactagtcacactatcactatccactgcttgttactgttatgttttgaattattttatggcatgtatagaataggccagtggccgaagaatattttggttaatgtatataagccatgcgaaaatggcatcttttgaatgtgtacttatagaagtttaaattggatccctgactgtctttagtacttatctaaaggaatgttc

SEQ ID NO: 12935 - DNA, 359 bp, Gossypium hirsutum
  Clone ID: LIB3135-051-Q1-K1-G9
aacagattgtccagggcctcctcttttatcttcaccaaaaccatggtcaaacttgacaggtgacagaggtggaggagacaagagtccaagaaccctacttgttcgagaaacacacaaagaagacatcactgtcggttgtaagagaaagagaaccgatgatcacacacccaccatgaccttattaccattctttctcgagccgatttcaattcaaaagcaccatcatcatcacccaccagctgatgaagacaacaacatagatcttgagctaaggcttggccatccacccaaggtaaaatagtttcatcataagaccatattataactgggccttactttctataatcatatgtttgtct

SEQ ID NO: 12936 - DNA, 402 bp, Gossypium hirsutum
  Clone ID: LIB3135-051-Q1-K1-H1
ctattcttacaaaaaagaaaagaaaaattacagtgaaaatggcaacccttaaagttccagctcatgtacctgccccttctgaggatgctgagcaacttcgtaaagcttttgaaggatggggtacaaatgagcaattgattatcgacattttggctcacaggaatgcagctcagcgcaatttgattcgtaaaacttatcgtgaagcttatggggaagatctccttaagtctttggatgaggaactttcaagtgactttgagcgagctgtggtgctgtttactttggaccctgcagagcgtgatgcatttctggctcatgaagctacaaagaggttcacatcaagccattgggttctcatggaaattgcttgcactaggtcttcacatgaactgttcaatgtga

SEQ ID NO: 12937 - DNA, 397 bp, Gossypium hirsutum
  Clone ID: LIB3135-051-Q1-K1-H10
ccaagatatgatcaatgtacttgagctgtggacattggaccatagattttcctgaatggcttaacctaatggcaagggagatgaatgatactgattccgaggaagaacttaaagaggctttcagggtgtttgacaaggaccagaatggtttcatatctgctgctgagcttcgccatgtcatgacaaatctcggtgagaagcttacagatgaggaagttgatgagatgatccgtgaagctgatgttgatggtgatgggcagatcaactatgaggagttcgccaaagtcatgatggccaaataaggataaaaaatgggtaaaaaggggaacaagtcagataactttgctaaaatacttatttatatcaatatggcatctatgttttatgttactacctt

SEQ ID NO: 12938 - DNA, 264 bp, Gossypium hirsutum
  Clone ID: LIB3135-051-Q1-K1-H11
gaacaagggaggctcaatggagctcctatcttggtatttgagatagctcagttccatgtcggggatgtggtaactagcatgcataaagcatcttttattccgggtggtggagaatgtgttctttatggaactgtcatggggagcttgggggcgtatgcttccgacacttcccgtgatgatgttgacttcttttcgcacctagagatgcatatgaggcatgaacaccctcccttgtgccgacgaatatcatatggcttacatatc

SEQ ID NO: 12939 - DNA, 349 bp, Gossypium hirsutum
  Clone ID: LIB3135-051-Q1-K1-H2
cccacgcgtccgctgatttattacattgcagagttggcacgaatagtcagatgatcatggctctctctcgtctctccttgcctttctcattacttgtgttgtcgttgccagtcattgcttccgctggttatgatgattcatctaaatatggttttgatggaataccagctgacagcccccaagcaaaccctatttatggcactaaagaagatatctacacgccaaaacctgaggaaaaagtagaagaaaaagaaaagccttactatggcacacaaaaagaagaaaaggaaaatcgtctcaccataggtgttcaaggccttgttttatgtaaatcagattccgggtattc

SEQ ID NO: 12940 - DNA, 310 bp, Gossypium hirsutum
  unsure (1)..(310): unsure at all n locations; Clone ID: LIB3135-051-Q1-K1-H3
gccgaagggagtgttaggacaagaattgtgaagaaataagtagaaattgcactcgtcaaaatctaaaggtgaaatggactcatcgcactttgtggcaggttctgctcagcatggaggtcacccccaaaagtatgtaccatattcttgtccattttaatgtattgttttgtaatttttatgtgagaaaaatggttgtataaactctttgcatgtgtgatatctccatactaggtagaaattgtcacaatagaagatggtctcctttgcgtaacattaatgaagtaatactattattctgttgtgttgcana

SEQ ID NO: 12941 - DNA, 285 bp, Gossypium hirsutum
  Clone ID: LIB3135-051-Q1-K1-H4
accgcgcttactgcggttgacatgtgcttggcctgctcactatccataagctttgctgctgccttacgcaaaacaaccagtctatggtggtgaacgaatacttgcacctcattgtgcgtgtgctgaacaccgacgttgatggaatgcaacacatcatgtacgctttgacctacattaatgctattgcaaggcgatgagattgcactgactgactgaaggcgtgatgttaacatgaacacaatggcttgtgaatatactgatcatgagcttgtcaatgacatgacc

SEQ ID NO: 12942 - DNA, 299 bp, Gossypium hirsutum
  unsure (1)..(299): unsure at all n locations; Clone ID: LIB3135-051-Q1-K1-H5
ctctcaagcaaagccagcaaggagaatacttggaaaattcccaagaggtttaatgaaggtttctttttttttcttacatttattctggtatttttcatcaaattttcatccataatatatttagtttgtaatatatttgagtgatggttaccgattaaatccatccgaaatttgcatgtactgtaccataaatatccattattggtgatttaattcatgttactattacacagttnacaaaaaaaaaaagaaatcttttattaacaaataaaaaaaaaaaacaataaaaaaatataatt

SEQ ID NO: 12943 - DNA, 398 bp, Gossypium hirsutum
  Clone ID: LIB3135-051-Q1-K1-H7
cccacgcgtccgcccacgcgtccgtgttgacctcccaaccttgactgaaaaggacaaggaagatatcttggaatggggagttccgaaccaaattgacatgattgctctttcttttgttcgaaaaggatcagacctcgtggaggttcggaagctgcttggaaagcatgctaagaatattcttctaatgtcgaaggttgaaaatcaagaaggggtagcaaattttgatgacatccttacaaattcagatgcatttatggtggcacgaggtgaccttggaatggagattcccattgaaaagatatttctggcacagaaggtgatgatttacaagtgtaacatccaaggaaaacctgttgtcactgcaacacagatgttggaatccatgataaagtctcccc

SEQ ID NO: 12944 - DNA, 422 bp, Gossypium hirsutum
  Clone ID: LIB3135-051-Q1-K1-H8
cccacgcgtccgcgataccagggagaggaggtgaacatgacactggcaaggtcggaggcaaagatacttcgtgagaagatatcagacaagcagtacagtgatgaggaggtcatcaggattgtaacaacacggagtaaggcacagttaaatgctactctgaatcattacaatactgcatttgggaatgctatcaacaaggatttgaaggccgaccctgaagacgaattcctcaaattgctgagagctgcaatcaagtgcttgactgtccctgagaaatattttgagaaggtgctacgtcaagcaatcaataagctgggaacagatgaatgggctcttactagagtggtcgccactcgggcggaggtagacatggtgcgtattaaggaggaatatcagcgaagaaacagtgtgaccctggaaaa

SEQ ID NO: 12945 - DNA, 373 bp, Gossypium hirsutum
  Clone ID: LIB3135-051-Q1-K1-H9
ctcgctcacgtgttgtggatgataagagtaaggcccgtttttgttacatttggtcgagtcaacagagttgagccagtctcacttggagagcttggcatacccaggaatgatgttgctgataactgctctggagttttcagagatttattcattaatcagatgaacctccttgatcgggcagtgaagatggtagctgaattatatgaacctgtggagcagaactatgtacgtaagcacgccttatagcaagccaaagccttgggaattgaggttagagaagctgcaacaagggtcttcttaaacacttgacgatcgtactcttcgaacgtgaaccttgtcgatgagaactccttacggaatgatgagaaacagc

SEQ ID NO: 12946 - DNA, 356 bp, Gossypium hirsutum
  Clone ID: LIB3135-052-Q1-K1-A1
cggacgcgtgggggaaagtagaccaccggtgttgattcggccgtagaccacggcatggttcgaagcccgggaatcacggcactgattcaggtcgctgcgagacgaacggacacgagtcgaaggggtgtgactcttggtctgattgcggcgcaaggtcttctgtcgcttggtatggcttgcgagttgcggtgcaaaccctagctaggttttcccgaaactgaaaataaattgggccaattgggcctactaagtcttgggttactggcctacttcaggggtattgggtatttgattgtaaatgggctactgtgttaagcgggatatgggcttattgtaactggactctaataaataac

SEQ ID NO: 12947 - DNA, 390 bp, Gossypium hirsutum
  Clone ID: LIB3135-052-Q1-K1-A11
cccacgcgtccgcccacgcgtccgctttcaaaacacttctccagtgaccaaaaaagcttcattgtctcttctatcgaaaaccccatggctgctcttaagctagtttgtgctctagtgttgtgcatgttggtggttgagcccattgccacaaccaccataacatgcggcgatgtgacaagcaaagtggccggttgcttatcatacttgcagaacggagggaacgtcccgaaggcttgctgcgacgggatccggtccctgaacaacatggctcgaaccacccctgaccgccaaaccgtgtgtggtggctggcaagctgccgctaaggctgtcaaaattaaaggcaacttggctgagaccctcccagccaaatgtagtgtcaacatcccttac

SEQ ID NO: 12948 - DNA, 229 bp, Gossypium hirsutum
  unsure (1)..(229): unsure at all n locations; Clone ID: LIB3135-052-Q1-K1-A12
gcgcccacgcgtncgcccacgcgtacgctttcaaaacacttcttcagtgaccaaaaaagcttcattgtctcttctatcgaaaaccccatggctgctcttaagctagtttgtgctctagtgttgggcatgttggtggttgagcccattgccacaaccaccatatcatgcggcgatgtgacaagcaaaggggccggttgcttatattacttgcagaacggagggaacgtgc

SEQ ID NO: 12949 - DNA, 353 bp, Gossypium hirsutum
  Clone ID: LIB3135-052-Q1-K1-A2
aaaaaaaaaaaaaaaaaaaaaaaggcaggggatgacccctaagcataaataagtgctggtcgagaattgcctttataaacaaagccctacttccttgcaatgactgccgccagagggataattgccacgctaggagtaacggtataacacttctctaaaggcaaagataggccttattacgtttagattcatttcctttattgccccaggcttgcttatcagaacggagaggataattccttgggcttgttttcgacgaaggctagaatacgttagatatagtacaagtgtcaaagagacgattttttcatgtgaacagaccattctcaactgttctctgttccttaagcgga

SEQ ID NO: 12950 - DNA, 265 bp, Gossypium hirsutum
  Clone ID: LIB3135-052-Q1-K1-A3
gccacgcgttggtctatgcgttcggagagcacctaacgcgcgagtttatacactagctgagaaagaatcgcttgagccgaatcgcgctatgcatattatcgctaacggagggagaggccatgaccgagactaccggtttatataccgccacttaatgaaaggctttagctctggcctgggctgtatgatctaccaaagcaggtatagcctgagccataccctgaccatattcgtcatccgactacagatttaccggagcccatgg

SEQ ID NO: 12951 - DNA, 351 bp, Gossypium hirsutum
  Clone ID: LIB3135-052-Q1-K1-A4
ctcgttaaggccttcaggaacattcctggagttgaggttgccaatgtggagaggcttaatcttttgaaactcgcccctggtggacaccttgggcgattcattatttggaccaaatcagcttacgagaagcttgactcagtttatggatcattcgagaagccatcagagaagaagaaagggtatgttttgcctcgttctaagatggtgaatgctgatttgggtaggatcattaactccgatgaggtacaatcagtggtgaagcctattaagaaggagatcaaaagggcacctttgaagaagaatccaatgaaaaacttgaatgctatgctgaagttgaacccttatgctaag

SEQ ID NO: 12952 - DNA, 269 bp, Gossypium hirsutum
  Clone ID: LIB3135-052-Q1-K1-A5
acgcgacccgtgggggaaagtagaccaccggtgtacattccgccggttaccacagcatgggtgggaggcctggtatcacggcactgagtcacgtcgctgggagacgaacggacacgagtcgaaagggtgtgactcttgtactgactgcggcgcaagttcttgtttagctttgtatggcttgtgagtctcctgactaaccctagctaagatttcccgcaactgacaataaagtgtgccaaatggggctactaacttttgggatactgacc

SEQ ID NO: 12953 - DNA, 427 bp, Gossypium hirsutum
  unsure (1)..(427): unsure at all n locations; Clone ID: LIB3135-052-Q1-K1-A6
ttcttttctttcaactcaaagtcccaagtagtattagaatcatgggtgttgtcacttataactatgactctacctcccctgtcgctcccgccaggcttttcaaggccttcgttcttgaagctgacaaggtctggcccatagctgcccctcatgcaatcaagagtattgaggttgaagctaatcctggccctggaagtatcgtaaagatcaactttgttgaaggccttccattccaatatatgaagcaccagattggaggacatgatgaaaacaaattttcatacagttacagattgattgaaggtgggcccttgngggacaagcttgagaaaatcaactacgagaataagtttgaggcatctgtaggtggaggaagtgtgtgcaagacctcgatgaaatttacacttttgtgactatgtaacactga

SEQ ID NO: 12954 - DNA, 133 bp, Gossypium hirsutum
  Clone ID: LIB3135-052-Q1-K1-A7
tcgctataccattgtgttgataatttgctacctattggcgaatgggattgttattctgctgatatttggtataccaattggtcttctacgtggctgcgggatttacatgttttcataaaaacaacgtggcttc

SEQ ID NO: 12955 - DNA, 235 bp, Gossypium hirsutum
  Clone ID: LIB3135-052-Q1-K1-A8
cgcttgcgaggcgcgtacaacattaattgcgtaaaagatgccagagaggataggctctacgttgtgaaactcgcgcctggaggacacctgggccgaaacattatttgtgccaactgaccttacgagacgcgttgcttatacatagggagccattcgagatggcatcatagaagaagaaaggtctacggcatgcctgcatctaaaaatgggcacgccgatatggctaagaacatta

SEQ ID NO: 12956 - DNA, 393 bp, Gossypium hirsutum
  Clone ID: LIB3135-052-Q1-K1-A9
cttttctttggtcagcttgacttgttttcattattggattctgaatattgcttggtttgatatttcacgtactctgttttggctatgatgcacttgttttctcaaacaaaagttgattggcagtgtatattatgttgtttattggtatactcaagcaacaagttgagtttcgataagttattgccacgatgacggaaatagttgggccaaggttgtacagttgctgcaattgcagaaaccaagttgcccttcacgacgatgttatatccaagtcttttcaggggagaaacggtcgagcttttttattctcccacgcaatgaacgtgatggtgggtcctaaggaggatagacaactgatgactgttctttacacagtggctgatgtttacttgt

SEQ ID NO: 12957 - DNA, 338 bp, Gossypium hirsutum
  Clone ID: LIB3135-052-Q1-K1-B1
atttcttcaattgatttttctctcattgtcccccattttctttcttcatattttcaagcggctatgtctttcagaggaacaaatgcatcatctggcatgggagtggctgatcacagcaaaagcacttacctggagctgcaaagaaagaaagtgtttcgatacgtggtctttaagatcaatgagaagaaaaaggaggattgcaagattataaacccttacaatttatggatgatgtggtcaccgtctgtttcaaggatccgtgccaagatgctgtatgcaacatccaaggaaaggttcataagcgaattaaagggcattcattatgaaatccaggcaac

SEQ ID NO: 12958 - DNA, 256 bp, Gossypium hirsutum
  Clone ID: LIB3135-052-Q1-K1-B10
cccacgcgtccgcccacgcgtccgggttcttgcattggaagatctgcagctcaacactaatgggtgctccctggatgctatacgcgagaagtataagcaacagaagttcaaaatgtggtaccatggataccttcccggaaaggggtggatcaatctttttaagaagaagaagaaagctgatttaatggtctaaaaccattccccttttggaaaatggatctggtcccaatatttaaaaatattacctttttttttt

SEQ ID NO: 12959 - DNA, 197 bp, Gossypium hirsutum
  Clone ID: LIB3135-052-Q1-K1-B11
gtgaagaagaatcatcgaacactaacggggctgaagctaggacctctcaagacgcacgcaaacgactaatctggctataatacctatagtgttgtgacaaacctatacccgatgggcgaactgaagaaccggatggggccatgttgtctggagcctatggaggcgataaccattgctggaccgatcgctatgcctta

SEQ ID NO: 12960 - DNA, 129 bp, Gossypium hirsutum
  Clone ID: LIB3135-052-Q1-K1-B12
ctgattattaattattttactttaacgatttttaagctggaacttttatagaggccacgggggttttctcttgtttcaatacctttttttgttatgacaacacaatcaccctgtgcctaccgaaaaacc

SEQ ID NO: 12961 - DNA, 100 bp, Gossypium hirsutum
  Clone ID: LIB3135-052-Q1-K1-B2
cccacgcgtgcggattcgtccaacgttcttgataaatatgcgtggtgggacgtcggcctcgcttgagctaccatgaaggagaacattttccttgcaagat

SEQ ID NO: 12962 - DNA, 175 bp, Gossypium hirsutum
  Clone ID: LIB3135-052-Q1-K1-B3
cccacgcgtccgctaaaatgaaacatgtcaaggttctaatcttactatgatacccccaatgttttagccttatttatgtcttttaggggcatgttgattttgtaagcatatgattttcttggatgctttggttcactttcatcaatcgtatgtttttctgcagtcatttcctttc

SEQ ID NO: 12963 - DNA, 356 bp, Gossypium hirsutum
  Clone ID: LIB3135-052-Q1-K1-B4
aaaatcatgatacttaccatttaactagtatcataaaaagaaaaagattgataacttaaggcataacaataccttttaaaaagaaatgaagttgactattaatctttcaaaaagaattattattttttaacaaaatattaactaaaaggttactttttttcaacatggaagcttgaatttttatttttaaatatttttataattattaaattatttattaacatggtatgcaagacgtaagtagactgcccaagcaaacattgttaaaaaaaattaatattttagcattaaaaacgatttaatttaataatcaaatttaactaaaagtaagaataaggattacactaacaaaaaga

SEQ ID NO: 12964 - DNA, 145 bp, Gossypium hirsutum
  Clone ID: LIB3135-052-Q1-K1-B5
gaaattcagcagcaaattggtgaggtgaatgagatcttcaaagatctcgcagtgctagtacatgagcaagggactatgaatggtgaccttgggacttatattcaaaattcaccggcttgccctttaccgggttaaatccaacctg

SEQ ID NO: 12965 - DNA, 404 bp, Gossypium hirsutum
  Clone ID: LIB3135-052-Q1-K1-B6
tgaggaattttacagatgctgtgatcaattactgaaagaagatggacttttcgttctacagttcatatctatcccagaggagctttccaaagaaatccagcaaacagctggttttcttaaggaatatatattccctggtggaaccctgctttctttggataggaatttatcagccatggctgctgcaacaagattcagtgtggagcatgtggaaaacataggaatgagttattaccacacactaagatggtggagaaaacttttcctggaaaacacaagcaaagttctggctttggggttcgacgagaagttcatgcggacatgggaatactatttcgattactgtgctgctggttttaagacaggaacccttatagattaccacgttgcattttcgcgagctg

SEQ ID NO: 12966 - DNA, 257 bp, Gossypium hirsutum
  Clone ID: LIB3135-052-Q1-K1-B7
gtcatttctccatcggactactgaggtatatatttctgtactgcctcactctgaaggttaccctgttttgatttttgtatggttcactccaaaacaattgttcacttgtgaggaacatgttttgcttatgtatttttcaactgccaagctctttgttggttggtaatagaatgataaacccttcgtattgcaaataaaaaaaaaaaacattaataaaaatataaacaaataagtattccatacttggtgttcgttct

SEQ ID NO: 12967 - DNA, 259 bp, Gossypium hirsutum
  Clone ID: LIB3135-052-Q1-K1-B8
accacgcgtacgaccacgcgtgcgattttcatgtgtctttgctcaattcttcccaattttaagatgaatttagagaagcaatggaggtacccatttttctctttgaaatttcatgcacctagaaaaaaaaaagggaaaatctggaaagcttataattcgaaaattatgctagtgtttgtgttggtttgaattaaataagcatatttgtcaacttttcatggaatgcaaaacgtaaggagactgaaaaaagcaaacaatg

SEQ ID NO: 12968 - DNA, 271 bp, Gossypium hirsutum
  Clone ID: LIB3135-052-Q1-K1-B9
gttaaatggagatctagctgttttgagttcgctgggtttttctgaacctaattggatataatatgtaagatatcatagtgctaattgcatatctcgtgacattcttgtgcataatttagcagtattggtatgattttgagtatgacccttctctctaaatagttccgactttgttggctattttgtttcatagtagttctcatttctctgatagtgcagggatgctgggaaaatcgttagcttcgtctttgatgacattggattctgcgac

SEQ ID NO: 12969 - DNA, 393 bp, Gossypium hirsutum
  unsure (1)..(393): unsure at all n locations; Clone ID: LIB3135-052-Q1-K1-C1
gaagatgtagtattgttggatttctggccaagtccttttgggatgagagtgaggattgctctggcggagaaagagataaaatacgagtacaaggaagaagatttgaggaacaagagtgatttgcttctgaagatgaaccctgttcataagaaaatccctgttctaatctataatggaaaacctgtttgtgagtccctcattcaggttcaatacattgatgagatttggccgcataaatctcccctactccctactgatccttaccaaagagccatcgctaggttttggggtgattttgttgacaacaagatatatgatctaggaaggaaattatggaccacanagggagaagaacaagaagcagcanagaaagagttcattgagtgccctgaa

SEQ ID NO: 12970 - DNA, 263 bp, Gossypium hirsutum
  Clone ID: LIB3135-052-Q1-K1-C10
gagattaggaaaactattcatttagttctctagtgagtgggcaattctgtgggcaaacttgtctataaatctttttaacctttctgtaagggactaaatgtaggggagggctgtgagaaagtttccggaaaagcttttttttgaggaagaagaactccttcctttttttgtttaggggagggcttgtcttgtaataagggcttcaaggtttcttcctgcccacgggagtctttttgcttcccctcatttaccttcttggaaaa

SEQ ID NO: 12971 - DNA, 386 bp, Gossypium hirsutum
  Clone ID: LIB3135-052-Q1-K1-C11
cccacgcgtccgatatttcttagtgtgttttggatcgggaggttagaggtttatcatcaatggcggatactgagacgtttgcatttcaagctgagatcaatcagcttcttagtttgattatcaacactttctacagcaacaaggagatcttccttcgtgagcttatcagtaacgcctctgatgctttggataagatcaggttcgagagcttgacagacaagagcaagcttgatgcacagcctgagctcttcattcatattgttccagacaagaccaataacactctatcaatcattgatagtggtattggtatgaccaaagctgatttggtgaacaatcttggtacaatcgcaagatctggtactaaggagtttatggaagcactg

SEQ ID NO: 12972 - DNA, 362 bp, Gossypium hirsutum
  Clone ID: LIB3135-052-Q1-K1-C12
cccacgcgtccgcttcagactcgatctttcactttcattgatgaatgtgttgaaggtgtacttagattgacaaagtccgatttccgtgagcctgtgaacatcggaagtgatgagatggttagcatgaacgagatggcggagattgtgcttagctttgaagataaaaagcttccgatccaccatatccctggtccagagggtgtccgtggtcgtaattcagacaatacattgatcaaagaaaaacttggttgggcccctacaatgaggttgaaggatgggctgagaattacatatttctggatcaaggaacagattgagaaagagaaggctcaagcattgatctatctgttattgatcatcta

SEQ ID NO: 12973 - DNA, 432 bp, Gossypium hirsutum
  unsure (1)..(432): unsure at all n locations; Clone ID: LIB3135-052-Q1-K1-C2
aagcggatggccttcagctggtgggttcgggacgtcggttgataacgcagccacttatctatcaaacttgattaaacatgtccaaaaaggtaccccaaagaggccaggaaaagctatagagacatatttgtttgcattgtttgatgaaaaccaaaaatcgggtccagagctagagagacactttgggttatttttaccaaacaagcagccaaaatatcagctccgttttggtgggggaaggcattgggatattgcttctaatgaatataatgcaacatttcctcttaaatatgatatgtaaaaatctgcaaagcttgtggaatttggggagttatgtctttctattgagttntctcttttattatcctatgtatttttcgtttaaataaggagaactctcatggngttaattttgattgtatttttatcatc

SEQ ID NO: 12974 - DNA, 367 bp, Gossypium hirsutum
  Clone ID: LIB3135-052-Q1-K1-C3
cccacgcgtccgggggaagacacgtggaatgggagctggacgcaagttgaggacccacaggaggaggcaacggtgggccgataaggcatacaaaaaatccaaccttggaaatgaatggaagaagccatttgctggttcttcccatgccaaaggcattgtccttgagaagataggtattgaagctaagcagccgaactctgctattaggaagtgtgctagagttcaattgatcaagaatgggaagaagattgcggcattcgtcccaaatgatggttgcttaaactacattgaagagaatgatgaggtgttgattgccggatttggacgaaagggtcatgctgtgggtgatattcctggtgttaggttc

SEQ ID NO: 12975 - DNA, 203 bp, Gossypium hirsutum
  Clone ID: LIB3135-052-Q1-K1-C4
gccgttctggagattcccagctcaacttgattctttatgaaccgactcgttgttctatggctttttggaccggagacctcttcatagggctgagcgtgcagagaccggtcaagcttgttgcgtcggtcgggaagttatggccttacttgactatagcctatattctggagcgccacaataacgccgctttccattacattgat

SEQ ID NO: 12976 - DNA, 309 bp, Gossypium hirsutum
  Clone ID: LIB3135-052-Q1-K1-C6
ctaaggtccagagagccgtttgcatgatttccaactcaaccagcgttgctgaggtgttctgccgcattgaccacaagtttgatctcatgtatgccaagcgtgcctttgttcactggtacgtgggtgagggtatggaagaaggagaattctcggaagctcgtgaggaccttgctgcacctgagaagtattatgaagaagtcggtgctgagtcaggcgagggtgatgaggaaggtgaagatgagtactaaataagtaatgtttgagtggagggcttgcattttgctacccaatgatttgattccttttatc

SEQ ID NO: 12977 - DNA, 387 bp, Gossypium hirsutum
  Clone ID: LIB3135-052-Q1-K1-C7
gtttgtaataaatagctattaggatctgaattagtatcttgtaatagtttataggagctccgtactgtcagaaggttcacctttccaaacaagcatgtcttcacagtctgttactgcaagtggaatctgcaaaattcattgagcaatgtccgtttgaaaggttctacccgtggaatccaccaatccatccaaattgagatgtggcatttcctctcccaactctccaacttagcccttgaagaagaagtcattttgcagcccaaatactcttctagggacacaacacagataaccaaaagaaaagacagaagaaacaaggaaacctaaattcttgccagaggcagcagacacaagcgtgctaggatagtagacttattaacaaatgat

SEQ ID NO: 12978 - DNA, 395 bp, Gossypium hirsutum
  Clone ID: LIB3135-052-Q1-K1-C8
cgatattgtcaagggtggtaaattgaaggagcttccaccgtacgaccctgattggtactatataagagctgcttccatggcaaggaaaatctacttgaggggaggtcttggtgttggtgctttcaggaggatatatggaggagccaagaggaacggtagccgcccacgccatttctgcaagagcagtgggtctattgctcgtcatattctccagcaattgcagaatgtgaacatcgtcgatcttgataccgaaggtggtaggaaaatcacatcgaatggccaacgggatctcgatcaagttgctggaaggattgcagttaccctctgagaaatttcactatatggattgagttaagaaaaattagtttgtttgcaagattactgttttatgagat

SEQ ID NO: 12979 - DNA, 390 bp, Gossypium hirsutum
  Clone ID: LIB3135-052-Q1-K1-C9
cccacgcgtccggccacgcgtacgggaaaatgaaacgccaaacgaacatcagcagtggctctttctcaacccaaatcagacaaagtgcttcccactatatctgcatcgatacccacagaaaggaaacactggagctatgaacagattcttggagattcaaccgaaccttctccaaagtttaaagctaactcatcaacaaccttgagacttccgcccccacgcaatccagtcctttctcaccgcctgttgaatcagattggggacatcaggatcccagatccgataagcctctctccttcgtccttcgatggctagagcatgcgccgcttgatttccttcccgaggcacaaatgtgcatccccttccaccaccagccgttggagacccaac

SEQ ID NO: 12980 - DNA, 346 bp, Gossypium hirsutum
  Clone ID: LIB3135-052-Q1-K1-D1
acggtgcagggcagcaatggagcatcctctaatgatgatacattgtagctgtgtgttttttttcttcctttttatgtgaaactgagtgggatacttagtattgcaggtgataatggaagcaggaatgtgctggatgtttttttcttaaggaaggctgtagccgaagcattgaatgagagaatcgagtccacaattggggaatttttgagtgttgttggaaggttgcaggctgagcaacaaaagcaagtgcaggatttccaggaaaaggtattggaaagagcaaaaagagccaaagagcaagcggcacgcgaggcattggaggcacaaaggctgattccaaagtcta

SEQ ID NO: 12981 - DNA, 290 bp, Gossypium hirsutum
  Clone ID: LIB3135-052-Q1-K1-D10
gccccagtccttgactgccacacttcacactttgctgttaagtttgctgagcttttgaccaagattgacaggcgatctggtaaggagcttgagaaggaacccaagttcttgaagaacggtgatgctggtatgattaagatgattcctaccaagcccatggttgtggagaccttctctgagtacccacccctgggtcgttttgctgtgagggacatgcgtcagaccgtggctgttggtgttatcaagagtgtcgagaagaaagacccaaccggtgccaaagtcaccaagtc

SEQ ID NO: 12982 - DNA, 384 bp, Gossypium hirsutum
  Clone ID: LIB3135-052-Q1-K1-D11
cccacgcgtccgcccacgcgtccgcttttcttcctcacttatactacccacttcgagcatcagagattggaagctcttcatatacttactctctaactgaacccgtttgtttgcctcaaacgccttaatcagtctcttgctagccattggacattacacggcaaaaacatctttctcagctcttgtttcatctctggccaatcggtgataggttggcgtgaagaatcctcaactctgggtttccaccatagttttttcatcacccacaagatacatggaagtaatgctaactttatctgcttccggtatatgagccactctgaaaaactgttagacatcgaacacgttggcctaaggccttccttggaactccgagcaccattg

SEQ ID NO: 12983 - DNA, 392 bp, Gossypium hirsutum
  Clone ID: LIB3135-052-Q1-K1-D12
gtttgatgttattatcaaaagttggccaatttgatccaccaaagcataatactattcatcagcgtggagtttttgcatgcaagacgtgtgataaacggttttcatcttttcaagcactcggcggccaccgtgctagccacaaaaaaccgaggtttacggacgcggacctaccggcttcacctaaaaagcctaaaacacatgagtgttcgatttgtggactcgaatttccgatcggtcaagctcttggaggtcatatgaggaaacatagagttgtttcgaatgaaggaatggtggtgactcggccggtgacggagaaattgaacggcgatgacgctgataatgatggtggtttgtgccttgatctgaaattggcgccttgtggaattgatttg

SEQ ID NO: 12984 - DNA, 88 bp, Gossypium hirsutum
  Clone ID: LIB3135-052-Q1-K1-D2
ttttgtttgttctttgtttgctttcttgtctttatgcgtaagctctctttttagtgtttttatatgatgaaaaataggtttagttaat

SEQ ID NO: 12985 - DNA, 133 bp, Gossypium hirsutum
  Clone ID: LIB3135-052-Q1-K1-D3
cccacgcgtccgaataagagtttcttcctactcatgttctattctcttgtatgtcatgtagtaatgttttcttttacctgcgagaatgccgatggcagtacctattggaatgcttattttatgtcttcttgtt

SEQ ID NO: 12986 - DNA, 261 bp, Gossypium hirsutum
  Clone ID: LIB3135-052-Q1-K1-D4
cccactcgtgcgaataaaagatactttctactcatgttctattctaccgtatgacagggagggaaggtttctttatacctgcgagaatgccgatggcagtacctatgggaaagcttattttatgtctacatgtgataaaagtataataaaacaatgggcgttcgctctaaaggaaaaaaacatatggacgctttctttttacatgataaatcttttagaggggcgattaaaactaagggatatgtacgtgtatattataac

SEQ ID NO: 12987 - DNA, 143 bp, Gossypium hirsutum
  Clone ID: LIB3135-052-Q1-K1-D5
agacagaaggagattttcgatttacatgctttggggcatttgttttaaaaagaaggaatgtaatctttaaacctgagaaaaatgccgaatcgctgaacctatagaaatgccaaactataagacatgttgttaataaaaatata

SEQ ID NO: 12988 - DNA, 378 bp, Gossypium hirsutum
  unsure (1)..(378): unsure at all n locations; Clone ID: LIB3135-052-Q1-K1-D6
cccacgcgtccgtaataagtgacaactactacgaagactatatccaatgaagctgtgtagatgattccaatgttaggtaataagttgcttatcagtccaacaaggtttacaatagagcccaagagtttctcactctattggctccattttcatttacacaaattcctatgtggttcttgttgcataagagctgaagcaagattctgtgcatgttagttgctttcttcttgaaagaaaaagaaagataatagggtaaacacttgttgatgtcaccagattgaaaaaaagttaatgaaacaaatcatcttttcaatctaaaaaaaaaaaaaaaaaaatataattatttaataataatataaaatagtattttnttttaat

SEQ ID NO: 12989 - DNA, 125 bp, Gossypium hirsutum
  Clone ID: LIB3135-052-Q1-K1-D7
gattagcgttaagagaagcgttcgaaaaaaaaaaaaataaattttaaaggaaaataaaaaaaaaaaaagaagaggggaaatgaaaatgaaagaaaaagctaaagaaagaaaataaagaaggggta

SEQ ID NO: 12990 - DNA, 355 bp, Gossypium hirsutum
  unsure (1)..(355): unsure at all n locations; Clone ID: LIB3135-052-Q1-K1-E1
tttgaaatggtatcacctcctgtttcccccaagtccagtcaggaggattcagcaggaagaaagagtgggtctcgttatcaaaagataagctcacgtttgagatccgacacggtgttcgttgttccagcagggcatcctttcgttacagttgcttcaagaaacaataatctagagattctatgctttgaggtcaacatagaaaacaacgttaggtaccttcttgcaggggaggggaattatgttcagcaattcgagaaggaagcanaggaactggcattcaagagcaaggaagaagaggtggataggatctttggtaaccaagatgaggagttctttttccttggaccaaagcaac

SEQ ID NO: 12991 - DNA, 392 bp, Gossypium hirsutum
  Clone ID: LIB3135-052-Q1-K1-E10
cccacgcgtccggaatgatagggaccacatggccgacccactatcatgttctcttagaccaggttgggttttcagctgatgatctgcaggagcttgttcattctctatcctacgtgtatcaaaggagcaccacagccatatctgttgtggcccctatttgctacgctcatttggcagcttcacagttggggcaatttatgaagtttgaggatgcttcagagacatcatcgagccatggtggggtgactgctccgggagcaatttctgttcctcagcttcccaggttgaaggataatgtcagcagctccatgttcttctgctgaaaaccgttgaaccatctttttgtatagggcttttggattttggctaccaaaaactgtttatgctgcttt

SEQ ID NO: 12992 - DNA, 268 bp, Gossypium hirsutum
  Clone ID: LIB3135-052-Q1-K1-E11
taaaaaaattaaaaaaaaaaagttcaaaataatataacaaaaaaaaatggggcgggcatacgaggtgctcaaatctgtcgaccgccaccatgacgcctttcattttttctacatggggtacaaaaggaacactagtggccgttgatctacaacgcctcgtgtggtgaaatcgttgatgcctcccaaattagtggctttgcataacatgcatcgataaaccgcgtgacataaccaagaagaggggctcaaacattctttcttaacaatt

SEQ ID NO: 12993 - DNA, 391 bp, Gossypium hirsutum
  Clone ID: LIB3135-052-Q1-K1-E12
cccacgcgtccggcagcttgtgtttggggattaaaattatgaagagggtttcctttgttgccttgcgtgtggtggcactcgcggtggtgctgatttcgggtgaaagtcgcacggcggaggcagtgacatgtaatcccgtggagcttgccccctgctcgccggcgcttacgtcgtccttgccttcattaagcgcttgttgcagcaagctgaaggcgcagcagccatgcctctgtggatacattaataacccatctcttaaacagtatgtcaacagtcctaacgctaaaaaggttgcttcgacttgtggagtcccatatcctaagcgttaaatgttgcttaatggtgtatctactatctactggcagcaaataagtgattctttttgctgtca

SEQ ID NO: 12994 - DNA, 420 bp, Gossypium hirsutum
  Clone ID: LIB3135-052-Q1-K1-E2
atttttgttgctggatagaaatgtgtttgactctggatattttcatcatttcaggcaagaatgattgatttttattacggtctgattatggttttagtccctctgttatcatttgattttaatttagtataatttggtttctttaagtttataatattgacgtgaatttaaaaaaaaatggaactatactatatgcggtcacaaaacttatggaggatagttatacttttagctttcattaatgaatagctttcttgtctttatctgcgcttatcaaataagattttattagttaaaggatgtttcctggatcaaccttcaattgatactgtaagcaattttcttatgtaattctaatatagaatgtatcttgttttaatagatctaatgcatggcaataaggagtcattagcattttta

SEQ ID NO: 12995 - DNA, 398 bp, Gossypium hirsutum
  Clone ID: LIB3135-052-Q1-K1-E4
ggaaaatggggaaacagccggtgaagatgagggcggtggtatacgctttgtcgccgtttcaacagaagattatgggtgggctgtggaaggatctgccgggcaagatctctcacaaggtttccgagaattggatcagcgctactcttctccttgctcctctcgttggaacgtacacatatgtccagaacttcaaagaaaaggagaaattggaacacaggtattaaaaacctcaggaagcgtccctttttatcagagtaactctgagcctttacgttttagatgcaaatttattgtggtccggtccaatgatgaaccatgttttttgtttgggatctgattagtatctgactgtttgagttggtgttttgttattcatatggaataaatgaatatggaac

SEQ ID NO: 12996 - DNA, 414 bp, Gossypium hirsutum
  Clone ID: LIB3135-052-Q1-K1-E5
cccacgcgtccgtgcatgtaaccctgcatatgcctctgctgtgaatggatttgcaatgttggagtgaatgactacctgtgatgcaagaatctctctattctcgttccgtactattatacctgaagccgatctgaactccagacgatcgtaagctgcatcaaaatgaatgaaggtccatccccttttgtgtatctgttggagattgtcagatgaatggagaatgatttctgctaaaccaaatgaaccaaaggctacaacagaaaagttgaaactgcttttcattacctcgatcaaaaacccagggcactgaataaaaatatgccagctattttcttcagcacaaccacacttgggacaaaaagtgttcatcactaccctctttattttgaggttgacaaaggaagggataaaatc

SEQ ID NO: 12997 - DNA, 411 bp, Gossypium hirsutum
  Clone ID: LIB3135-052-Q1-K1-E6
cccacgcgtccgacaaaggaaagcgtaatgtcagatgagaaaaaggggaagttcgttgaatgagaagattccgaatttgaaaaggttatagacttccatatatgttctcagagtgatgtatttgtaccagccatatccggcttgttctatgccaatgtagctggaaaaagaatagcttcagggaagcctcaaatccttgttccagctgatatacctgctacgtctgcccccatcaccaactacctctctccttacgttgccaagaggaaccacttggcttattcctgtttctgctagtcgcgtcggttcgatgcacgtgtgccttcctaaaagggtgtcgggtcttcccgtttacctcagatggagtctctttgagtaagcagagggaaagaccaactttggggttcatac

SEQ ID NO: 12998 - DNA, 326 bp, Gossypium hirsutum
  Clone ID: LIB3135-052-Q1-K1-E7
aaacaaatgatggctttgcttatatcgttttgttagactacacagtggctaactcgtccatcgggaccggaaatctcatcttgacaaggccgaaatacaacagcacattgtcgattcttcgactcggcatcgatggaaacctgagggtttttacctactatgacaacggttgattcacaggcatgggaagagactttcactctcttctctagggactcaatatggggcactgaatgcgaactgccggagaggtgtgggaactttggactctgtgaggagaaccaatgcgttgcttgcccgtcaacaaacggattactcggttggag

SEQ ID NO: 12999 - DNA, 330 bp, Gossypium hirsutum
  Clone ID: LIB3135-052-Q1-K1-E9
cggacgcgtgggcttcaggcaaataattcctaacctggtatagtttgagagccactacacaagaagtgagggttgtgaaggtattcatggatatcttgaatgcagacccggcatcgcttgctgagcaactggtggacacgttctcggattgtatctggagcaaaaaatcgtctgtggtgcctgctggtctttgtatgaagctttggcattgatgtaagtgggtggtatatggtagagctataagatggaagtagtttttgagtgcaaaccttgtcaaggtttgtattagcataattctttagacccataacttatattcatcattttctt

SEQ ID NO: 13000 - DNA, 373 bp, Gossypium hirsutum
  Clone ID: LIB3135-052-Q1-K1-F1
tgacgttcaggatccaccgtggacatactcaaacagtcatggaggaggcattgccagcagttcaaatcctacagaaaaacaagacaattctcgtgctcttatggctagaattctcaaaagaatcggcgaaaagaggaagagcacagttacatactcagacttcccaggtttaggcattgacgagcgcgtagcagttggaaaatatagtttcccaaaatctctgaaaagcactgtcgagaatatcacccacatgcatggcgatgtttcggagaacagcacaatgccccaatgcgtggacgagacgatatatattctcttttgtgcgacaattaaggaaatggatgatctacaacttcccgaagttactgagaat

SEQ ID NO: 13001 - DNA, 388 bp, Gossypium hirsutum
  Clone ID: LIB3135-052-Q1-K1-F10
atggaaggcgatcaagagatttggtcagcttcactttctggttataaaattgccgtggtcctactcaacaggggtcctgttcgttattctacaacagctcgttgggatgacattggtctagaccccaagactgtggttcaagccagagacctttgggagcacaaaacactgaagacaacatttgtgggcaatttgacagcaacattgagaccgcattcatgcaaactgtatgtattgaagccaattgcttaaaaccatcatgtttttaggctttttgccactattcccttgaagttgcagtcatcatttataccctgtaattctagatgtgccatggaattattatttatttctttttaagatcagtacatgaatttagtcattaata

SEQ ID NO: 13002 - DNA, 403 bp, Gossypium hirsutum
  Clone ID: LIB3135-052-Q1-K1-F12
gaatttttagagaaggcaaaggcacgtgcattgaaacgtagtgttggcgatccatttgtagcaggcattgaacaaggtcctcagattgattcagaacagtttgaaaagatcatgaggtacataagatcaggtgttgaaagtggagcaactctagaaaccggaggggagaggataggggacaagggcttctatattcaacccacagttttctccaacgtgaaggaggacatgttgattgcaaaggatgagatatttggtccagttcagtctatcctgaaattcaaggacatcaacgaggttattcggagggcaaatacgacgtcatatggactggcagcgggtgtgtttacgcaggacatagacacagcaaacaccttgacacgagcactgaaagtgggggaaa

SEQ ID NO: 13003 - DNA, 213 bp, Gossypium hirsutum
  Clone ID: LIB3135-052-Q1-K1-F2
cccacgcgtccgggggtttaaaatttcggaaatttacctttgataatataataattttattttgtattttcctttgtaaaaccatgggttgtatttgggctgtaatcagtcaaaagaacgaaatttgaaggtatgatatatatatgctttctaccaaacaaaaaaaaaaaaagaataaacaaaaagcaaaaaaaaaagaaaaatataaaatac

SEQ ID NO: 13004 - DNA, 355 bp, Gossypium hirsutum
  Clone ID: LIB3135-052-Q1-K1-F3
cccacgcgtgcggcttcttcttccctgctccctctccatttttgctaggaattcaacctagtttgtgccaccatggaggatcatcggtgccatgcacctccaccccaccgctggttcacggatcaaaaccaggtatagctgcgaaaatctcagaatcgataggcgtggcggagtgggacgttggtgagaggcgtgcggcgcgaggactgctgatgattggggcttgctagtacctgtgtcaactgatttgggtgttgggttatttatgtactgagcctagagtttggtttaaggaggtaatgggtgtgcttttatatattggattctaaatatttgggtctggaccaggaatgaa

SEQ ID NO: 13005 - DNA, 415 bp, Gossypium hirsutum
  Clone ID: LIB3135-052-Q1-K1-F4
tcttattatatataaaccctacggttctcgttttttctcttagctcaatacagatatttggtctgtttggaggattttaatcttactgagtgcatctgttgcagttaggtgcagggaaaagagcgatggcggcagttcccggacagttgatttgggaggtagtgaagaagaacaattgctttttggtgaggcagtttggaagaggaactgctagccttcagttcagcaaagaacccaacaatctctacaacctccactcctacaaacactctgggttggcaaacaagaaaacagtcaccattcaaagtgggggcaaagaccagtctgtgctgctagcaaccaccaaggctaagaagcagaacaagccttcggccttgcttcacaagtccctcatgaaaaaggagttccccaggat

SEQ ID NO: 13006 - DNA, 393 bp, Gossypium hirsutum
  Clone ID: LIB3135-052-Q1-K1-F5
caaggctgctcctcaggcagtcaagagcgttgaggttgaagctaatcctggccctggaagtgtcgtaaagatcaactttgctgaaggccttccattccaatatatgaagcaccagattggaggacatgacgacaagaatttgtcatacagttatagtttgatcgaaggtggacctttgggggacaagcttgagaaaatcagctatgacaacaagtttgaggcagctgcaggtggaggaagcctttgcaagagctcgatgaaattttacactgttggcgactatgtgatcactgaagatgaaatcaaggctcaaatcaaagggagtgaaggagtttacaaggctgttgaagcttacctcttggctaaccccgatgcctgcaactaaaatatatg

SEQ ID NO: 13007 - DNA, 402 bp, Gossypium hirsutum
  Clone ID: LIB3135-052-Q1-K1-F6
cccacgcgtccgggctgctcctcaggcagtcaagagcgttgaggttgaagctaatcctggccctggaagtatcgtaaagatcaactttgctgaaggccttccattccaatatatgaagcaccagattggaggacatgacgacaagaatttgtcatacagttatagtttgatcgaaggtggacctttgggggacaagcttgagaaaatcagctatgacaacaagtttgaggcagctgcaggtggaggaagcctttgcaagagctcgatgaaattttacactgttggcgactatgtgatcactgaagatgaaatcaaggctcaaatcaaagggagtgaaggagtttacaaggctgttgaagcttacctcttggctaaccccgatgcctgcaactaagatatatg

SEQ ID NO: 13008 - DNA, 319 bp, Gossypium hirsutum
  Clone ID: LIB3135-052-Q1-K1-F7
cccacgcgtccgagtatactattctgcatattgtacagatgacgctgacaaaagatattattttagtattttacatatgaaaaaataaattcctatttttcataaaaaaaaaaaaaaaaaaaaaaaaaaaaaaaaaaaaaaaaaaaaaaaaaaaaaaaaaaaaaaaaaaataaaaaaaaaaaaaaaaaaaaaaaaaaaaaaaaacaaaaaaaagacaaaaaaaaaaaaaaaagggggggcccctttaaaggaacaaactttacgacccctgacgaacaaaaaaaatgttttttaatggggcagcaaaaaaaaaataaat

SEQ ID NO: 13009 - DNA, 389 bp, Gossypium hirsutum
  Clone ID: LIB3135-052-Q1-K1-F8
gccaaaccgtgtgtgggtgcttgcaagctgccgctaaggctgtcaaaattaaaggcaacttggctgagaccctcccagccaaatgtagtgtcaacatcccttacaagatcagcacttccactaactgcaaaaatgtgaagtgagatggatgaagagagggttttgcagcagcttgcaggagataaaatatatgattaaaaagaagaagaagaagaatgaataaggattttgggatggaattttcaaaatccaaaattagtctccactttagtgtagtgaggctttgtttattttgttttatgttttggtccctgcatgttggctctaattttatatcctctatgtattggctattttaatgttttaatgaattaaagtttatgctttgt

SEQ ID NO: 13010 - DNA, 242 bp, Gossypium hirsutum
  Clone ID: LIB3135-052-Q1-K1-F9
ggacgccactattgatgcctttctcaatgtttatgcaacacaggatggtggaaacccgatggatctttggaactttgatgatttccctgccatggcggagggtgttttctgaacgaactttccataataactagtgttggtaaataaagcaacatgttagtgagtttttcacaacccctctggcagttgctttattagttggtgttataaaaatgattttgtctttattgaacaaaatgttg

SEQ ID NO: 13011 - DNA, 240 bp, Gossypium hirsutum
  Clone ID: LIB3135-052-Q1-K1-G1
gtcattggcaaacctgtgattgtgggggactacatgaatgcaggggttggggagttcctcccaacaccctggctgagtattctcttaaccaatttggagacatggacttgtacgtcatttgcttaattgatgggagtatgatactcaaggggtatggctgaactgaaggggcttgtcacaacatgatgagcactgtccacatcacccgacaatgcgcgaggtaggttagagctcactggc

SEQ ID NO: 13012 - DNA, 149 bp, Gossypium hirsutum
  Clone ID: LIB3135-052-Q1-K1-G10
cccacgcgtccgctgtagccttttactttttctttccttgatgtttgtggggaacgtgatcttatggtgacagaagtacgaattgcgagagcctgctaacatcttatgtaataagctggatcccgtgttcacaatgcgctttcatagag

SEQ ID NO: 13013 - DNA, 233 bp, Gossypium hirsutum
  unsure (1)..(233): unsure at all n locations; Clone ID: LIB3135-052-Q1-K1-G11
gggagacattctaagaggagaaaacaccgtttcttccatggcctgagcaagctttcatgatgacatgcaatcattcgggcatccctgttttctgatccaactcattccacaaattcacaatgttccatagcaaagtaaatgtggtacaagtacattgatttctagttgacattttaaataaattttaaagctcttgtaatactaaatttttaataaattagctttatcatncc

SEQ ID NO: 13014 - DNA, 131 bp, Gossypium hirsutum
  Clone ID: LIB3135-052-Q1-K1-G12
ccggccggaattccggccgcccacgcgccgtgccactttatgacgcgcttttccttttttgccgtgctctgagcgaacggtactggggacttgctataggggcggcagccacctggttcgcttgaagccat

SEQ ID NO: 13015 - DNA, 429 bp, Gossypium hirsutum
  Clone ID: LIB3135-052-Q1-K1-G2
cgagaatgggcctcgtctcggcgaagcctctagaaacactggccaaaccctcctgcggtggactcgtcgaggcagccccctccgtgctctcctcgtcatttctcttgggtctgttgcttttcttgcattgacagggttgcttacctttatgcttatatttctggtagcgaccgtcaatgccattattgtctctcttctcatctctttggcagctgcgggaggcttcttgttcttttcccttgcatgtgtaacagctatttatattggggccatgtcaattgctgcactcgttttttctattgcgacgatttcagcaatttttgctgctatgatagctgcacgttgcgttggattcttttgggtcatatggttgggtactaggaaaagtgtgggatttgccaagcaatcattgagcaagactggatcagt

SEQ ID NO: 13016 - DNA, 394 bp, Gossypium hirsutum
  Clone ID: LIB3135-052-Q1-K1-G3
cccacgcgtccgcccacgcgtccgcccacgcgtccgtggaagaggatgcatttaggccagtcttgcaccactatgatggccccaagtttcgtctcgagctttcagttcctgagacgttggatctattagacctttgtgaacaagcaggctctccataagccaaaagttatctgagtgcaaatgtgctagggttaagggcataaggctgcctgcttttcacagattttccatagagcgcaagctgtgggttaaagaccagttggtgaatcaactcatgaaaagtgggaaatggcgttagccagctgaataaaattgcgtttgtgtcttgtgaaagatactttttgtaaacttttgcattatattcttatgtattaaaaatcctatatagatagac

SEQ ID NO: 13017 - DNA, 408 bp, Gossypium hirsutum
  Clone ID: LIB3135-052-Q1-K1-G4
ctcaaagaacaatggagccctgcactaaccatttccaaggttctgctctcaatctgctcgttgctgaccgatccaaaccctgatgaccctcttgttccggagattgctcacatgtataagactgatcgggccaagtatgaagccactgctcgtagctggacccagaagtatgccatgggatgacagtggttggtgtgtaatacctatcagctttcttatgtgttttggggaaggaagggggtgttttttcttaaagtaacttgtcattgtgctttggatatgggaaagatatggaacattctttttatttatttcgtgctttataacttgtgtgaaacccttgtttcgttcaatgtcaaagttgctgtggaaccccttgtttcgttcaatgtaacaaaaaagtcttta

SEQ ID NO: 13018 - DNA, 396 bp, Gossypium hirsutum
  unsure (1)..(396): unsure at all n locations; Clone ID: LIB3135-052-Q1-K1-G5
caaattttgatttgaatgcaaatatagcatgtcccgtttgcaactgggggatttctattacatggctgaagatatcattgatgatatggatgaagacgactatggtagagctggtggagacatggatgcccatgaatatgacatgctgaccaaggtgactgatacatcttctggtcaagcacggaaggggaaggacattcagggaattccatgggaaagattgaacataaccagggaagattatagattgacaaggcttgaacagtataagaattatgagaatatcccggcctctggtgatgctgttgacaaggaatgcaaacagatggaaaaaggtgggaactactatgagttcttncacaacactagattagttaagccgacaatcctccattt

SEQ ID NO: 13019 - DNA, 240 bp, Gossypium hirsutum
  Clone ID: LIB3135-052-Q1-K1-G8
cccaaagaacaaaggtgccctgcactaaccatatttatggggctgctctcaaactgcgcggtgcggaccgatacaaaccctgttgaccctcttgttccggagatagctcacatgtataaaactgatcgggccaacagtgaaaccactgttcttagctgtacccagaagttttccctgtgatgacactggtttttgtgaaatacccatcacactttttatgtgttttgaagaaagaagggg

SEQ ID NO: 13020 - DNA, 355 bp, Gossypium hirsutum
  Clone ID: LIB3135-052-Q1-K1-G9
tggagcaagctaacgaatgtatctactgcgtactatgtatcagtggtcgaagatcccgtcaaggcttgcagcagggtgagatggaaaccagtgaatcacaaagtgatcgatgagcggatgacaaagatcgatactgtatagcagctgtcgctattccaaaggagggtcctatagtgaagacagccatagagcttatagatgaccaacatgctgcgctttacaaggacttacattgcatggagcacttgcttgatgcctctgccgatcctgcaaggcacataaacaacgaggagttgctccatgtctttgctggcctatcaccaccagttcacaattaaaagcatgctcatataga

SEQ ID NO: 13021 - DNA, 305 bp, Gossypium hirsutum
  Clone ID: LIB3135-052-Q1-K1-H1
cgcacacgcgcgggttatgtgcttcataaagtagtaacaggggtgaaactccaggatgtaccggaagatggtcctaggactcggatgtgaactgtggtccttcagaactgggttcagaccctggagcttaaacatgttattattagagtgtagatgaagggtatactacctgtggtggcctcacgcactctttctcgtaaatgctaagccctcaggcgtgagaaggataatctctatggggcctccttttactacacaacacggtggacctattttatttggtcctacgaatgggtatatatact

SEQ ID NO: 13022 - DNA, 404 bp, Gossypium hirsutum
  Clone ID: LIB3135-052-Q1-K1-H12
caaatcttgatcccacaacacctgatggtttcgacaataactacttcacgaatctacaagttaatcgaggcttgcttcgaagtgatcagaatttattttcgactgagggtgctgatacaattgaaattgtgaataggtttagtagtaatcaaacagctttctttgaaagctttgtggaatctcatcagaatgggaaatataagccctttaacaggtacggaaggagaaattagatcaaattgccgcgccgtgaattcagcaactatcagatccaactcagatgctgctctcgtcagctcaatataatatttgctgaactgaaggctaagaaaaatgggcagaagagaagctattttcctactcaaaatcaaaacgaataatatattgtaactctttaatgccta

SEQ ID NO: 13023 - DNA, 374 bp, Gossypium hirsutum
  Clone ID: LIB3135-052-Q1-K1-H2
gccgaagtgaaacccgatattccattgctcaataatcgtatatatgacacaaaatttgagtcccaattttacatgatttctgacacaaacaagcgtgtatatgcaatgggtgattgttatccagcctcttcacaacttccaaagggtgaatactcactgcgactgtacttaaggcatgacaatgtccagtacttataaaaaatgaagcaattagttctgtttctggaaaggaatttggaggaaaaggacattattccattgaactttttctctgaaccacatggccccgtgatggggaatggtacctttaaatattctattttggttccagggataaaggaatcactttatttaagtccaccaaacaaagataa

SEQ ID NO: 13024 - DNA, 372 bp, Gossypium hirsutum
  Clone ID: LIB3135-052-Q1-K1-H3
ccaatttacagtggaccctttcgacgactccgatgtctcgtcggacgacagctctgattttgattcacccgaaaaagcaacattcttgtcgaggttcatatgcaaaggactgagaactcaggatcccccgagattgtccataagaattgatgaagatcctaaagcttccacctcaaccagcaagaaacaagggttccatgtaagcattgatccatggaaactaataaatcttagtagggacaaagctcttctagctgctgataaggctagacaaaggcttatgatacaaaagccagcagtggagcttaatgcattgaagccactaccactagaaacaaaacatggcccattaatgaaccctgaaagaatatg

SEQ ID NO: 13025 - DNA, 231 bp, Gossypium hirsutum
  Clone ID: LIB3135-052-Q1-K1-H4
gcgattatggctgagtttcgtgatggtgcaacccgtgttcttatcacaacagatgtttgggccagggggctcgatgttcaacaggtgtccctggtgataaattatgaccttccaaataatcgagagctttacatccacaggattggtcgttcaggtcgctttggacgaaagggtgttgccattaactttgtaaaaagtgatgacatcaagattctgcgagatatagagcat

SEQ ID NO: 13026 - DNA, 422 bp, Gossypium hirsutum
  Clone ID: LIB3135-052-Q1-K1-H5
gtcaatgtaagtcatatgattcatgatttatcattcgggccaaaatatcctggactccacaacccacttgatggtacagtgcggattttgcatgaaacaagtggaacattcaagtattacataaagattgtccctactgagtacagatatatctggaaagaagttttgcctacaaatcagttttctgtctctgaatacttttcccctatgaaggagtatgataggagttggccagctgtttactttttgtatgatttgtcaccaatcactgtgacaataaaagaagagcgccgaagctttctccattttatcactcgactttgtgctgtcttgggagggacattcgctttaacaggaatgctacatcgttggatgtataggcttattgaagaagtgactaaagcaagcggtgtgcgtgcata

SEQ ID NO: 13027 - DNA, 63 bp, Gossypium hirsutum
  Clone ID: LIB3135-052-Q1-K1-H6
cccacgcgtcctgttaaaaaaaaaaaaaaaaaaatataaaaaaaaaaaaaaagtgagcccaaa

SEQ ID NO: 13028 - DNA, 297 bp, Gossypium hirsutum
  Clone ID: LIB3135-052-Q1-K1-H7
atgttgaaaccatgatattctcattgagaaacaagaagatacagaataggcattcattccaatgatactgccatgtgcattcttgctagtaaaagaaaacaatcctacatgacatacaagaaaacagaacatgagccggcagcagctcttattgcagcgataataatttatctatgtagccatagtatctcacttgtcgggaatggttagccgaggaaatctctctattgaggcttctccaatggagggtgtcctggatagtgaccatatgggggcttcttgggagactcatatact

SEQ ID NO: 13029 - DNA, 276 bp, Gossypium hirsutum
  Clone ID: LIB3135-052-Q1-K1-H8
gttacacatcgcgagcgagcgctctagcggatgctatataacatacacgcttatgcgcccgggcatgccacgtataaagtcacctatagtgaaatcaatggacgatgcactgcaacgcgatgtctagcaacaccacggcgaaaacccacttaattcccaaccaaaacatcttgctttacacacttgttttaatagctggcaggacagcaacgagggccttacccatcacttttgccaccagaatggcaaactggacgcgcaatgggacgggccctt

SEQ ID NO: 13030 - DNA, 330 bp, Gossypium hirsutum
  Clone ID: LIB3135-052-Q1-K1-H9
ggaatgtcttagctttttgttaaggaatatggatatggcttctgtttctgctttaatctcagaagatgttagggggcaagcaaagttaattgctgaggaatggaaaccaaagttggatgctcttgccttggatgctagtattggtaattcattggaagctcttgcattcctcaacttcttggcacttttggtattgcttcttaccttcaaggaggaaaaactgtaatggctgttacaaagggtctttggccttcgtaaacaagttaacttttgccggcccttggttttgtctgaaaaaatgccacgggtaattgtaagttctggtgaata

SEQ ID NO: 13031 - DNA, 382 bp, Gossypium hirsutum
  Clone ID: LIB3135-053-Q1-K1-A1
cccacgcgttcgaaaacagggcatttccattaaaccaacaacaacaacaaaaaaccaaacacccagagttaaccaaaagagaaaatggtcaccaaagtctacattgtatactattccatgtatggacatgttgagaaactggcccaagagatgaagaaaggagctgaatctgtcgagggagtggaagtcaaactttggcaggtagcagaaacactaccagaagaagttcttgggaaaatgggagcaccaccaaagacagatgcccctatcataacaccagatgagctgacggaggcagatggtgtgctatttgggtttccaactagatttgggatgatggctgcacagtttaaagcattcatggatgcaactggtggtctat

SEQ ID NO: 13032 - DNA, 441 bp, Gossypium hirsutum
  Clone ID: LIB3135-053-Q1-K1-A10
gctagggatgcaattctgagccgcaaattcgaccaggtgcgtgtgaacattccgaatggtgagatggttggtcatactggagatatccaggctactgttgtggcatgcaaggccgctgatgaagctgtcaagatgatcattgatgccatagagcaagttggtggaatatatgttgtgaccgctgaccatggcaatgctgaggacatggtgaagaggaataagtccgggcaacctctttatgacaagagtggcaagctccaaatcctacttcccacacttgtcagcctgtgcctattgcaatcggaggtccaggattggcagcaggcgttagattcaagaatgatgttccggatggcggacttgcgaatgtggctgcaactgtcatgaacctccatggttatgtaactccaaatgactatgagccaacactcattgaagtag

SEQ ID NO: 13033 - DNA, 375 bp, Gossypium hirsutum
  unsure (1)..(375): unsure at all n locations; Clone ID: LIB3135-053-Q1-K1-A11
gcgcaaaagcgaacatcaaggacctctttgtcatgcagaagcacggggacaatgnagacgtggagggcggagatgaacacagatcaggtaaacacgtacgtgaactgaacggaaggctgaacaagtgcggggtgaacaatcctcgcttcgacgtaggagtgaaggagatcgagggttggactgccaggctgcttccatcaagacagcttgggtacatagagctgacaacatcagctggaataatggaccatgaagaagccagaagaaagaatggaggggggaaagtacttgggttcttctattgaggggatttcattagaaataaaacctttatgaattatgacgttttcctttaaacctcgtaggtagcaaggc

SEQ ID NO: 13034 - DNA, 432 bp, Gossypium hirsutum
  Clone ID: LIB3135-053-Q1-K1-A12
cccacgcgtccgcccacgcgtccggtttcatgttaccgatgctacccttatccgcggctgtcggaagagtattggctctgcaacactaaaaaacgtcttaagtgccttgctacagcagggcctaccattttatcattacaaaatgggtatttggcttgaacaactcaatattaagataagagaaacggctcgctctttcttcaacgctcaactgagatataacctagtcgacgatggaatcgtctaacgttctatccagacgaggacatgcggcggcatcacaaggaattgtgtcgagtggaatacgaagacgagcgctacagagcgctgctacggtggccaagaaaacacgggaagacatgtctcgctgagctaaagagaatgcttcgtggcttcccgaccctgttaccggatgctacagacccgagaact

SEQ ID NO: 13035 - DNA, 375 bp, Gossypium hirsutum
  unsure (1)..(375): unsure at all n locations; Clone ID: LIB3135-053-Q1-K1-A2
cccacgcgtncgcctctctcttgcctcatccatttttggtgatactgaagtcaatgtttatgggaaagtcccgttgatgcacttgtggtacaaaacccgggcacacccttctgaactgactgccggcttctataacacggcctcaagaaatggctatgaagcagttgcagagatgtttgcaaggaattcatgcaaaatcaacttgcctggaatggacctgtcagatgagcaccagccacacgatgctctttctagccctgaatcattacttgcacaaatccgaacaacgtgcaacaagcaccgggttgaggttgccgggcagaacctggcccctggagctcctggtggtataaagcaaattaagaaaaatatgtt

SEQ ID NO: 13036 - DNA, 411 bp, Gossypium hirsutum
  unsure (1)..(411): unsure at all n locations; Clone ID: LIB3135-053-Q1-K1-A4
cccacgcgtccgttaatgccaaaaaaaaaaaagtcatagtttcttcatttctagcttaaccatggaaatcgaaatatggcacaggcaatgctcaagcagattggaaaccatcaaattaggccggagctacacgcaacgtggccacgatgaacattccaagcccaagtggagaacgttttggaagatattcacaagagaaaggaagaaaatcttcgcttctccagttggattccaggcttcttatgatccagatgaatattcacagaattttgatcaaggaaccggttgggctgaaccggataatctttctcggtctttctcagctcggtttgctgatccatctaggatctcaagaaagaacccgttgcgttcatgtgattggcaaatgaatgacaactaanaatgttcttc

SEQ ID NO: 13037 - DNA, 439 bp, Gossypium hirsutum
  Clone ID: LIB3135-053-Q1-K1-A5
gggtcgcccacgcgtccgttaacaatccctaatttattgtcagtacgaaaagaaacctttgattatttaattcccgtttgcgtaatctttttgggaaatcggtagcaaaaaaatgtcgtcgtcggggaggaagatcacccttaagagctcggacggggaatcattcgaggttgatgaagcggcggcgttggagtcgcagacgattaagcatatgatcgaggacgattgcgctgataacgggataccgttgcctaatgttacgagcaagatcttagcgaaggtgatcgagtactgcaagaaacacgtcgaggctgctaagacagacgatcgatccgccgatgacgagctcaagagttgggacgctgactttgtcaaagtcgatcaaaccactctctttgatctcattctgggcagcgaactatttgaacatcaaagggtt

SEQ ID NO: 13038 - DNA, 404 bp, Gossypium hirsutum
  Clone ID: LIB3135-053-Q1-K1-A6
cggacgcgtgggcggacgcgtgggcacaacctctttggtggcccaagtgttgttagcgtgtcgcgaaccgatggtccatataacttggcgggtacgcggacggcgcctggtccgtcatgtggggatgttcttctagtgatgcagaacgagcccgagctaatgtttgagaccctgaagcaccgagcggaagaattttgtggacaggaccatggttatgaaggcacgcatgctgctgtagatagcaccattgctcgctcttttcacaacatgccttatattgtagcggcatccccttgatcgctgactggcatgaataacaatggcttgtactatttgcatgaaggaaactacaatgctgctgtcgattctggaggtagtgaagacgagcacgggtactattgcta

SEQ ID NO: 13039 - DNA, 259 bp, Gossypium hirsutum
  Clone ID: LIB3135-053-Q1-K1-A7
ccccaccgaatatccgctaccactagcccacctctcaatatccacgagaaccacactcggtgccaaaattctaatcttttgcatggtgatttatatattttaaaacaccttaagaccctcttcttattttgtagctaaccttcactatcttcacaaaacatcatagagtcgtctgcaccatttaacgaaagcttgactgtgctaatcgctttgattggcgtactgctttctattcatttttattgattgggtgtatttg

SEQ ID NO: 13040 - DNA, 434 bp, Gossypium hirsutum
  Clone ID: LIB3135-053-Q1-K1-B1
aaccctacggtggccatgatagctcaggctaatatcacaagcagcgataacaattcatcagtgccatttagcaccatatttgcccttgatgatatcttaaagactggtcctgaggataactcagaggtgatcggaaatgctcaggggcttgggatcctcatagccgatacaaatacaacaaacctgctctggtactgggactttggatttatcacgggtaagttcaacggcagctctataagcatgttttcaaggaatccgacaacagtgacggtacgtgagctttcggtggtcggagggagaggaaaatttatgatggccaaagggtttgcacaacttaaggattactcacgtaatgacaccactataattgcggagcttaatgtaactgttattcattactagaggttgaaaaaggggggtgggggctcatg

SEQ ID NO: 13041 - DNA, 263 bp, Gossypium hirsutum
  Clone ID: LIB3135-053-Q1-K1-B10
cccacgcgtccgcgcaacctgaacttacctccattgcatgggctcttatcgcattagcactttctcgagtgacgataatgggtggttttggtttgtttttggagcctgctggcctccctcgaggccgcctaacattgtcaccatcagctgcaatgattggtttcactgcctttggcattttgggagccattagcattgcatgaaattctttgtcctgttctttgttatgatccataagcactctcaaatctgtggcttctccc

SEQ ID NO: 13042 - DNA, 354 bp, Gossypium hirsutum
  Clone ID: LIB3135-053-Q1-K1-B11
aaaaaacaatactacaaacaaaaggtttgccttttctaaatggatccaagacttacctacggcttgcgtgcgacatttatagcatggtctatatccgtcacctatcattcaactacactggccgtctgttttacaacatcttatcatgggtaaacccaggcgatacccaacttaaacgccttgcaacacatacccctttcaccagctgccgttatagcaaataggcccgtactgatcgccctttccaacagttgcacagcctgaatgtcaaatggcacgcgctctgttactgcgcattaaactcggcggttttggtggttacgctcatcgtgaccccttcacttttcagctccc

SEQ ID NO: 13043 - DNA, 356 bp, Gossypium hirsutum
  Clone ID: LIB3135-053-Q1-K1-B2
cacgcgttcgccacgcgttcgatttataataaataaagttttttttttttttttaataaaaaattattggggaagggtaaaaaaatataaaggggtgcccattctataaaaaaatgttattaaataaaattgtgcggcgtatttggggggctcaatttttaggtaaaatttttttaccggcagatttgtaaaaaattgtttttttataaaactcctttatttatcatttttttgagcggctttttaaaaaataaattttgttaaaaacccttatttaccaaaataaaatactttatttaaatttccctttttttggagtgaatgttatttaaaaaaaacccttctctaaaaggttt

SEQ ID NO: 13044 - DNA, 306 bp, Gossypium hirsutum
  Clone ID: LIB3135-053-Q1-K1-B3
atgatgattcgcttcaaactgacttttggcatcaaccttcttatgaaccttcttccctagcaggaagttcaatggatcgaaactatcaacccaggcagcaagccccgcttatacctgacaattttagttctttggatcaggttatttcagcattgagagaggcaggacttgaatcatccaatttaatacttggtgttgacttcactaagagcaatgaatggacagggcggtattcattcaacagaagaagccttcatgctattgggagctcacctaatccttatgagcaagcaatatctataattg

SEQ ID NO: 13045 - DNA, 380 bp, Gossypium hirsutum
  unsure (1)..(380): unsure at all n locations; Clone ID: LIB3135-053-Q1-K1-B4
cacgcgtccggagatttaaagaaagtcaagcccatttgggtgttctttttgctgggaattatatgtttattcaggtcaatcctacaaccatgaaatactgctttgaaaaatcttatggaggccttgctttaaatggcttgccttcttctaggtgttctctctctaggattgcttgatgtttgaaggtttgaaattgtgtgtgtgttgccttttcttgtattacatcttgactcatacagggtagctgcaacttttcttttaatacaaaatagcctaagggttcaaaagctganaaaaaaaaaaaaaaattaaatcttttaaaaaaaaaatgatactattgggagcttacctaatccttattagcaagcaatatctattat

SEQ ID NO: 13046 - DNA, 446 bp, Gossypium hirsutum
  unsure (1)..(446): unsure at all n locations; Clone ID: LIB3135-053-Q1-K1-B5
agcaatctcagccgctattctaaacctgatttttcatggtattgagggagtgttgtcttttctaaagagccgatcttctaagcttccattttccatgtattcataaaccagacatccatactcagggcaggcacctatgagcagaaccaggtgtggatgtctcatgcagcttanaacctcaacctacataacaaatttatttaatacaaatgaaaggaaggaagaaggacagataagttctgccactataaacacatgaaggtaagaccatactctttatctcccctctatttggctagagaaattgctgtggacatcatatttggtggttttctaagtggcaaggcttttaaaggcttttataagtcattaccatcttaaattataagactatgaacaagtttaaaagaagctataaaaggaacatttctataatttaaaatgaa

SEQ ID NO: 13047 - DNA, 447 bp, Gossypium hirsutum
  unsure (1)..(447): unsure at all n locations; Clone ID: LIB3135-053-Q1-K1-B6
cccacgcgtccgcccacgcgtccgcccacgcgtccgggaagagaagtccaattaggaaaacttggcctgcctacacattcagaggtcgacatgcgaatcatagcacttcaccatgatcctgacttatggggagatgatgttaatcttttcaagccagagaggtttgctgaagggatagcgaaagctactaagtacaatgcagctgcatttatgccttttggattgggacctccatcttgcgttggcatgagctttgcaatcactgaggcgaaaactgcacttatgttcacgcacctgcactacgtcttacactcaagccacaacatgggatgcagntgttgtttcattcactacattatgatgcttaaaattctaggttgttggtccccaatatagtaatatatagtaaaatgtggatgatactgtactttgcaaccattcgatgat

SEQ ID NO: 13048 - DNA, 359 bp, Gossypium hirsutum
  Clone ID: LIB3135-053-Q1-K1-B7
gtttctcgatctggcactttaacatatgaagttgtttttcaaacaactgcacttgggttggggcaaacaacctgcgtaggaattggtggacatccttttaatgggaccaactttggtgattgtgtgaccaaattccttgctgatcctcacacagaaggtattattctaattggtgagataggaagcacagcagaagaagatgctgctgcactaataaaggaaagggggactgaaaagcccattgttgccttcattgctggacttactgctcctccaagacggcgtatgggtcatgcaggagctatagtatcaaggggcaagggtactgcacaagacaaaatcaagactctaaaggaagc

SEQ ID NO: 13049 - DNA, 304 bp, Gossypium hirsutum
  Clone ID: LIB3135-053-Q1-K1-B8
acgcccacgcgtccgccacgcgtccggtggacaatgccgacactcacttcaactatgactcagccaccggattggtgacacttacattgccagtgccatcggaggagatgtacagatggcacgtagaaattcaagtctaagtttagcttcaggttattttattaggccatcatattaaaagtcattattgtattgagggagatttcatggctttctagtctagtctagtctagtggtaatacgtaattggggtcctctaccgtgctgtagctactttctcttaaataaaattgcctctctctcg

SEQ ID NO: 13050 - DNA, 418 bp, Gossypium hirsutum
  Clone ID: LIB3135-053-Q1-K1-B9
cgtccggcttttttgcccataaaaaatttgaaataggtctataaggccagttgttgaagaagaagcaggtcaatggcgaaggagttggaaggattcaatttcgagcaaaggcatggaaaggcgagggtgagagtgggcagagtttggaggagcaaagatggatgccgccacttcatggtcgaatggaatgttaacatcagcttgctttccaattgcgttgccgcttatgtccgcgatgacaactctgacatcgtcgctactgacaccatgaaaaacactgtttatatcaaagcaaaagaatgttcagaacaactttcagcaaaggagtttgctattctacttggcaagcactttacatcattttatccacaggttgttactgcaatagtaaagatagtggaaaagccatgggaacgca

SEQ ID NO: 13051 - DNA, 416 bp, Gossypium hirsutum
  Clone ID: LIB3135-053-Q1-K1-C1
gcaaacacttttcactatctaatccatggctggcaccataagcaccctatgggtgggcttgggcttgtgattccacctgcagaagctgctatactagctataatgttttggaacttgtatgggattttattcactatctccacaagacctgcattatttggaggtggactaattggatatgtgatatatgatatgatacattactatgtgcaccatggccagcctaccaaacaatctatcaaaaaacttaagaaatatcacttgaaccatcactttaggattcaaaacaagggctttggcataactacaacattgtgggacagagtttttggaaccctttctaagaccaaagcagacaagagtggatagatgatgatgatgagtctgacaagcatcacatgattgcaccctgtgat

SEQ ID NO: 13052 - DNA, 168 bp, Gossypium hirsutum
  Clone ID: LIB3135-053-Q1-K1-C11
aaaaaaggactgctacttcggcttgtagtgtttatatatatatttatatatataatgggataaggaattattagatataatggctaggaacaacttctataacagtttaacctctatgtacttttggatttttgttcttcaatatccataaccttttggctttcctgc

SEQ ID NO: 13053 - DNA, 310 bp, Gossypium hirsutum
  Clone ID: LIB3135-053-Q1-K1-C12
gcaaagatggacgctaatgaaaagatggcaccggaactctgaaaaggaaagcacaaggggtgggggggggtaatcgacggtgcggagaactatgcctcttcaagctggtgcttggaggagcttgcggagaatgttaaacaaaaaaatgacaaggcggataaagaatatcaaatgtgctacgaaggggatccatccgatttaataaaacaaaaaggaaagttgaagaagccatcgacaaacacgaagaatgatacacggaagataaagacaagattgaaaaggggcgaaaagctatgactgaaatggaaaa

SEQ ID NO: 13054 - DNA, 329 bp, Gossypium hirsutum
  Clone ID: LIB3135-053-Q1-K1-C2
gatttgttgaataatcagaaggtgcagtacacagtgcctccaaatgtttggtttggtgcatttccaacaaaagatttcaacatttcgactgatggagcaggagcaggagcaagagtgtatccgggtcttgatctgaagctcctctgttgtcttttcactggtgagatgctattgcggggtgtatcaggagctgaagatgcctatgaagcttttatgtttggataaaaattagcatggagtagtgcgtaacttattagagttgtatcaactatgctggatttgatcttcattgctatattcagaacatcggacgttgggtgtgttatttt

SEQ ID NO: 13055 - DNA, 237 bp, Gossypium hirsutum
  unsure (1)..(237): unsure at all n locations; Clone ID: LIB3135-053-Q1-K1-C3
gataaacagcacagaaaaaaagcaccacctcagcgatgatatatgaagantgcgtttaaggcaggggaaaggggagagaaaaggaaggaacctagacgttcaaaaaaaaaaaacaagagagaaaacggggcacgagcagaagctaaaaaagagaaaaaaaagggggggcgatgcaaaggaggcaagcatacggaggcgggcgaggcgaaggaaacctctttgataggggaaccaaaa

SEQ ID NO: 13056 - DNA, 394 bp, Gossypium hirsutum
  Clone ID: LIB3135-053-Q1-K1-C4
ccacgcgtccgcctttgcgctcgctttgtgtttggtattgatagcgttgttattgacaacaatgtcattggggcaatttggaaatgatccaagacatctgcttttctcagttgtgtggggaagcattagtgttggtattgcatcttttgttagggccaagggcaggattttctgtaatcggcctcgtttgcaattgcatgataaacctgggtattgatacacacattttttattcagctatttttatgtactaatcaacgtacataaagaactttgttttttgggttcagaatgtattatttatttcattctcctttgtttattaatgtgatttcacatagttgtgtttaacaaaaaggcgggtatgccaaaaaaaaaaaaaaaaatatacttt

SEQ ID NO: 13057 - DNA, 399 bp, Gossypium hirsutum
  unsure (1)..(399): unsure at all n locations; Clone ID: LIB3135-053-Q1-K1-C5
cccacgcgtccgcccacgcgtccgcccacgcgtccgggaagccgtccatcaaaaaggaaaccaagtggaggcattgaatcactccgtgcaatcccatggatctttgcatggactcaaacaagatttcatttacctgtgtggcttggctttggggctgcatttaagcacgtcattcagaaggatataaagaatctccacatgctccaggagatgcacaaccaatggcctttctttagggtcacaatggacttaattgaaatggtatttgccaagggagaccctggaatcgctgccttatatgacaagctgctagtgtcaaaagaactctggccctttggagagaacttgagagctaactatgaagacactaaacgacttgttctccangttgctggacac

SEQ ID NO: 13058 - DNA, 367 bp, Gossypium hirsutum
  Clone ID: LIB3135-053-Q1-K1-C6
cggacgcgtgggatgggaagccccctgctcctgttcataatcctcctaagctgaaaccgccaccgtatgaacataaacctccggtctatgaaccaccaaagaaggagaagcctgaacctaagccaccagtttatacacttccaaagaaagataagcctgaaccgaaaccaccagtatatgaacctccaaagaaggaaaaacctgagcctaaaccaccagtttatacaccaccaaagaaagaaaagcatgaacccaagccaccgatgtatgaaccaccaaagaaggaaaagcctgagcctaaaccgccaggttatgtacctcccaagaaagaaaaaccagaacccaaaccaccagtttataagccttc

SEQ ID NO: 13059 - DNA, 438 bp, Gossypium hirsutum
  unsure (1)..(438): unsure at all n locations; Clone ID: LIB3135-053-Q1-K1-C7
caagggtgagaaactctgtgacctgtgcagcatcactgtcaacaagaatgctgtatttggtgacagcagtgccttggcacctggaggagtacgaattggtacccctgccatgacttcgagaggtttggtcgagaaagacttcgaacagataggtgagttcctccaccgagcggtgaccatcaccttggacatccaaaagcagtacggaaagctcttgaaggacttcaacaaaagtttggagaacaacaaggagatcgaaaagctgaaagccgatgtcgaaaagtttgcatcctcatttgacatgccgggtttcaagatgtccgaaatgaagtacaagaattagatcttatagatatttatggttttattcatgcttattgctgntattatcggcatatgtgtcatctggaaaattgcctctgctgatttccaaggagt

SEQ ID NO: 13060 - DNA, 431 bp, Gossypium hirsutum
  unsure (1)..(431): unsure at all n locations; Clone ID: LIB3135-053-Q1-K1-C8
cccacgcgtccgtctgaaggtgccacttctggggatggtatagcatctgtaaataaagaagatgttgaccagaagcaaagcaagggaagcttgattagtggctccaataacaaagaagtatcggtgacagtgaaagaggcgaacaaagatgaagaatcgaaggttgcagctacagatatcggaataacggaagccactcatggtgaatcttctcaaccactcaacatgagcgagcacgaggctgacgcagatgctgaagatgggatcattggagatgagagaatagaagatcacgaagtcgaggcagatgaccagagggatggagagtattattatgagcaggttgacgaangggaatacaactatgaggaggatgaaaacgtggacccggaagaggaatacatagaggaggaagatggtgatgactttgc

SEQ ID NO: 13061 - DNA, 436 bp, Gossypium hirsutum
  Clone ID: LIB3135-053-Q1-K1-C9
gcagaagcggttcccaagccctgatgtgttgcagcaacggataacatattaatcaatcgataatgtatttttggtgttgatcattttatttcttgtcatccatccggtgaggggtcatttgtaggtttttttttaagtttgcgggagaaattacttgagttagagaaaacaattatggggtggtggtggaatgtttaatagcaccaaccaaccaagcccttcaccttaagtttgtgccaatagaacgctcataaatgtctagcagtcactgtattgaagttgtaggggatgaagctacattacattacatctcatatatgtccctgcctttttctatggaaatcagctgatgattgttggcgttgagtttattaaattgcctcagcaattcttttactggtaaacaaatgggagaagcaaaactctgtataataaa

SEQ ID NO: 13062 - DNA, 308 bp, Gossypium hirsutum
  Clone ID: LIB3135-053-Q1-K1-D1
agctcaactgatttgcaatgggagatgtttcatgcaaaagacccaccattactcacgtcatcttggacatggatggtctcttactcgacacagagaagttctacactgaagtccaggaaaccattcttgctagattcaataaaacttttgattggtctcttaaggcaaaaatgatgggaatgaaagcaatagaagcagctcgagtctttgttgaggagactgggatcagtgattctctttcagctgaggatttccttgtagaaagggagtcgatgctgcagagtttgtttccaactagtgagctcatg

SEQ ID NO: 13063 - DNA, 428 bp, Gossypium hirsutum
  Clone ID: LIB3135-053-Q1-K1-D10
aaagtgttgatgacatctacatcagagctgctacgttgatggctgcagcgatgttaaggtttgtatgaattctgaagatataactcatttggataaccatctggactggctgaatatttcaacaacagaaaacattgacatctatggtcttgtgatgaccttgagctcatatgagcaggacctcagcatctgccagcttgtatatatataataatcattaagcgctatgaatggagaagagggtgaaaacctttcatatattttaaaatacgaattgtcattgccggacataaatgggtgggagcggattagtagaactggtactaatctttaatatattcttcttcatgcaaagaaaaatgactggttatggtgttcacgttccaagagggctacaatttttaaatgtcttgaaatgctgtttgatt

SEQ ID NO: 13064 - DNA, 417 bp, Gossypium hirsutum
  Clone ID: LIB3135-053-Q1-K1-D11
caagtaatcccttctcttggtagccagggcaaatcagaggatggtaaacctccatgggaaggggttagaacgaggtgcaaaaaagaatggtcgatgtttcagaaccgactcgcaaatgcagacaaggcgtaccttgctcagcttggaaaggaataattatttactgtctatttttattttattgatttcttttaccccaatccctccctgattttcaaccccgtttgtacatgtataatatctcacctgacgtttgttagggttcagtttgggtgacattttattttatttttgctgaacgagggtggactcatttacctgagccacatttttttgtacattaagatttccacagctatagaaaagggggagtaattttttttataaaaaaaaaacatctaataaaaaataaagggc

SEQ ID NO: 13065 - DNA, 446 bp, Gossypium hirsutum
  Clone ID: LIB3135-053-Q1-K1-D2
ggggtacatatgtgagaggcattgcggcagattacccacaaaacaaaaggagaatcaaacgaagacaaagtgaagagaaggaaatctgagcaaaaattccaagaaataacgaaagtaatagttgtactgcataaggctcttaaatgggggataacaaggaattgacgccgtcaaagtatgacatgaacgcaaaatgggacgcctgcatcgatctcactctccgccgcttcgtttattcatccttggctggcgcttttggtggcctccttttcttcaagagtccagtgactcgatgggcatctgtagcttttggtgctgggattgggattggatctgcatacactgattgttctagtctttttggtggatattcttcgaagttggctcctcctaagcttgatgatgctcctgcacccaaagagcaagtggagtgaagtgatgttttt

SEQ ID NO: 13066 - DNA, 242 bp, Gossypium hirsutum
  Clone ID: LIB3135-053-Q1-K1-D3
gtgatattgatttgtacaagcaatcaagaggtgttggtgatccagaacttcttgcatgagagaccgtgtttagtgtgagtgaaatagaagcactttatgagcttttgaagaagataacacagggtggtctagatgatgggctgatcgacacggcctgggatgtttgatacctctgatctggttctataagagatgtacaccgttttgtgagcccagagcttatgcttggagatgactaacta

SEQ ID NO: 13067 - DNA, 439 bp, Gossypium hirsutum
  Clone ID: LIB3135-053-Q1-K1-D4
cgagattacgtgtaagaccatatctgggatatggcatcatatgaggcttcgtgtaagaccatgtctgggacattgacatcgatatgtgatttcgtgtaagaccatggctgggctattgccattgatacgagattacatgtaagaccatatctcggatatggcattattacggtactatgtgtgcaagatccccgagtatcctttagtattccaatagttcaacgggaaaagtggatgaaacatggttataagtgatggtacaacgaaagcaaagtattcgtgacagaaatcaacaagtaagtgaaagtggagaatgaaagtacgatcaagttaagcaagacaggtacgtacaggacttatgtgagaattgaatgaaagtgaattggtgagttcataccgtatcatgtatatgaaataagaaagatatgtgtgtaaatac

SEQ ID NO: 13068 - DNA, 344 bp, Gossypium hirsutum
  Clone ID: LIB3135-053-Q1-K1-D5
gcgtccggcaaagctccctggaagcagaggcgcctttgtctttaataaataatatgttttgttgtttatgtgtttgtagaataaagtagccatggcttgtcgtaggttttgcctgttgccgccaccgttacttggtgcttgccaatagatagagtgaagtactaatatttacttgtttttctgtccagtgtgagcatctctgctatctcaagatatattgtgactattacataattaatgtaaggaagtgagtcagattcataatgaatgaaaagaagctcctatttcgtttaaaaaaacaaataattgaaagtggcgaatgaaaatacgatcaagttatgtaa

SEQ ID NO: 13069 - DNA, 442 bp, Gossypium hirsutum
  Clone ID: LIB3135-053-Q1-K1-D6
ccctcccttttgctcaattaagatgctgcttcagtttaccctccctgttttaccctcctcatgggcttgccctttacgtcttctttttcttccttctaacctcaaccttttctgccgatttgctccctctgactatcaaccttttctttctttttctttacaacacaatttacgcttggccttctcaaccttttcttttctttttctctctgtcactctcttgcttgctctcagttggggggtggtcaagttactgcaactgaaaggttcaatgcatgaggatattgggagactatcatcattcatctcgtattgcttttgttgagtttacaatgaatacgggtaacttaaagagattgtggaggaaggcaaaggaatgagaattaattataagtgagttaacataggctgcagcattaatatttttgaggatgtgccatgt

SEQ ID NO: 13070 - DNA, 392 bp, Gossypium hirsutum
  Clone ID: LIB3135-053-Q1-K1-D7
catctgtttggccaagtacacaagatggtactttacaaactgtgacactaaatgttgaggaaacaagtgatggctttgcttattacgttttgttagactacacagtggctaacttgtccagcggggccggaaatctcatcttgacaaggccgaaatacaacagcacattgtcgattcttcgactcgggatcgatggaaacctgagggtttttacctactatgacaaggttgatttacaggcatgggaagagactttcactctcttctctaaggactcaatatggggcactgaatgcgaactaccggagaggtgtgggaactttggactctgtgaagagaaccaatgcgttgcttgcccgtcaccaaacggattactcggttggagccggaat

SEQ ID NO: 13071 - DNA, 418 bp, Gossypium hirsutum
  Clone ID: LIB3135-053-Q1-K1-D8
cccacgcgtccgaagaaattgagaaagcaacatcgagcatctatcctttacaaaatgtgttgattcgtaaaggcaaaattttgaaggctccgaagtttgatcttggaaagttgatggaggttcatggtgattactcggaagatgttggtgtgaaaatagagaggcctgctgatgaaacaatggctgaggctgccccggaggtcattggagcttgaatgaaacaccccttgaatttgtgtgttcttttctttctgatttcaacagatttgatgattttgtttaaaactaggagaaattttccatggttttgatttgatctctaagatatggttttgcaaattgatattgaattagacaatcttgtgtattagaaagtcatactctctctatatatgaaaattattatatatttaacgac

SEQ ID NO: 13072 - DNA, 425 bp, Gossypium hirsutum
  Clone ID: LIB3135-053-Q1-K1-D9
gtgatattgatttgtacaagcaatcaagaggtcttgttgatccagaacttcttgcgggagagaccgtttttagtgtaagtgaaatagaagcactttatgagcttttcaagaagataagcagtgctgttatagatgatgggctgatcaacaaggactttgttttttcatagttctcattttgttatataagtgatatcttttgttttgtttgtcaagtttttcggcttgatgatcactcctcatcttgagttgggtctttccatctcatctttgtaggatttaagtttatttatattactatttgacaggaggagttccaattggcgttattcaaaacaaacaaaaaagagagtttgtttgctgatcgggtatttgaacttgtttgatacaaaagcataaaggaaattttatggtttgaaaaagtt

SEQ ID NO: 13073 - DNA, 449 bp, Gossypium hirsutum
  Clone ID: LIB3135-053-Q1-K1-E1
cgctttcgcttaaaaatggcaatgattcctaccatctttggcaacaacaggcgcagcagcctcttcgacccgttttcgttggacttgtgggatccctccaaggagttcgatttcccaacagtcacatcgtttccttcactttcccgagaaaactccgctttcgtcaacacgcgcgtggactggaaggagacaccggaggcacacgtgttcaaggcggacctcccgggggtgaagaaagaggaggtgaaggtggagatcgaaggcgatagggttctccaaatcagcggagagaggcacgtggagaatgaagagaggaacgacacgtggcatcgagtggagcggagcagcgggaagttctcgcggaggttcacgttgccggagaatgtgagaatgggcgacgtgaaagctttcatggaaaatggggttcttactattacttgtcctaaaag

SEQ ID NO: 13074 - DNA, 208 bp, Gossypium hirsutum
  Clone ID: LIB3135-053-Q1-K1-E10
tgggctgttggtgctacgagtgcggtcctggaattggcctcttctgaaagaaaatatttgtcatttcaaaccagcataaaccttgttttcaaaattaacgtgatcttggaatggatttttataatttgccttgcctctacgagcactaaataagcataaccatcttttgaaaaaaaaaaaaaaaaaaaatgttaggatatataaaatt

SEQ ID NO: 13075 - DNA, 288 bp, Gossypium hirsutum
  Clone ID: LIB3135-053-Q1-K1-E11
ggagatagttgttctgattatgacttttgttgttaataagaaaagaacacggtaggggtgttggacaggtttaaacctcggctaatgcaaacagtatacaagaaaggcaagggcagaaaatgggtgttgaggaagaaggaccagatgagaatgtaagggaatggggtgccccctggcacgaagtacacgtgtttgaaaactgaaagggtatttataaacatcttcgaaattttagtatcttgaaagttgtggggaggaactattgttacataatttcatggtttatta

SEQ ID NO: 13076 - DNA, 434 bp, Gossypium hirsutum
  Clone ID: LIB3135-053-Q1-K1-E12
ctcttccaaaaaattttccccagggagtgaaaaggaacaaaaaatcttctactcaagaaaagagagaaagatcttccttagcgaaactatttgcaggaaaatcaaaaagaacagggatgagttattacaatcaacaacagcctccagttggtgttcctcctactcaaggttatccaccggaaggatatccgaaggatgcttatccaccaccgggatatcctccacaaggatatcctcaaggttatcctcctcaaggatatcctcctccttacgcccctcaatatcctgctcagcctcctcctcagcaacagcaaagtactggtttcttagaaagctcgttggctgctctgtgctgttgttgcctgctggatgcttgcttttgaaaatccaactatgccaaatgcctcaaatgttgaaaaatcaaatgttcttac

SEQ ID NO: 13077 - DNA, 368 bp, Gossypium hirsutum
  unsure (1)..(368): unsure at all n locations; Clone ID: LIB3135-053-Q1-K1-E2
aacgtccctgaaagtaatccaagcttatcgattattcgtgggaagacaaatgcaacacatcggcgagaaacacattacgtacaatgctgaagagctacaggattacttgttagacttgtttgagggatcccaaaaatcattgcataatcccaataggagatgattctatgatataataaagtaggtacatacaggttttgtattttctttttcagtttgatcgaataaacaggtggattaaagcaattctgtatgtcctggctaggtttccgatcgaaaagaaaccgattgtaatcccattcttgtgactagatttagatcaatgtcaatttggcttgggtttgcgnnncaaaaaaaaaaacgtggat

SEQ ID NO: 13078 - DNA, 404 bp, Gossypium hirsutum
  Clone ID: LIB3135-053-Q1-K1-E4
ccgatttccttcaaggatctctaaaggccaagcctccaacagagagaaaatacaaatggagtcttcaggaccttcaaggaggacttgtttcatccaagaagatgatggattggcttccattgtagatatggaggctggatattcaggaagccattaccaaaaggttaaccaaaatgggtttctttcaagacctctttgttactctagaaagagtagtttgaggaatctatcttctttttcttcgtcatcttcttctggttcagtttcttctccgaggcctgctcgcttttatgatgccagatttgaagacgttcatcaaccctatttcttggatgtttgctttctttgcaagaagcctcttgggtgtaaccgtgacatcttcatgtacagaggggacacacctt

SEQ ID NO: 13079 - DNA, 347 bp, Gossypium hirsutum
  Clone ID: LIB3135-053-Q1-K1-E5
gcggccacgcgttcgaccacgcgttcgatttttttacaatgataaaagtaatggccatgcccatattgaaacttctttatttcggtgctgaaaatgaaaatttctgaaagttgggtgaccaaccgtgtagtttactcttttaaatcattggtggtactcaaaatgtgatctccttctacagtttaataacaagtcacgccagattggacttgctggagctttcctcttaagctaaataatcaaaacctacaatttagtatatatttatcggatcggtgaatatccttacagcttgctttcctcttcttgggtggcctttaactgcaagcaagcattgttgtgctatt

SEQ ID NO: 13080 - DNA, 432 bp, Gossypium hirsutum
  unsure (1)..(432): unsure at all n locations; Clone ID: LIB3135-053-Q1-K1-E6
gtgcaagattgattgcgaagtacngaccaacaatgccagttctctcagttgtcatccctcgccttaagacaaaccaattgaagtggagcttcagtggggcctttgaggcaaggcaatccctcatcgtcagaggtcttttccccatgcttgctgatccccgacatcctgcggagtctacaagtgcatcgaatgagtcagttttgaaggttgcacttgaccatgggaaggctgccggagttattaaatcacatgatcgagtcgttgtttgccaaaacgtcggggatgcttctgtggtgaagattatagagctcgaagattaaactaatgttactttctctgctttgggattatttttggaatctgatttgtgaaagcgatgaatgactatatatagcacctgtggggtattggctccacgctttggtggatttg

SEQ ID NO: 13081 - DNA, 109 bp, Gossypium hirsutum
  Clone ID: LIB3135-053-Q1-K1-E7
cgactatgaaggtggctgttagctacatcagcgctcaaattccttcatagtcgaaaaacaaaggaaaaaaaaaaaaaaaaaaaaaaaaaaaaaaaaaaaaaaacccccc

SEQ ID NO: 13082 - DNA, 337 bp, Gossypium hirsutum
  Clone ID: LIB3135-053-Q1-K1-E8
ggaacggaaaccgcggggcgacccacgcgaccgggcagaccaacaaaaacgagaaatttttcgcataggagaagcgaggaatcacgggggggcacgggatggggacacaaggccgcgacgagggcagaagaccataactgtcctcataaacaatggaggggacaccagcgaagaagagacgcaagaaggaccggacaacgggaaaaagacaaggaactacactgccggggcggaggcaatacataatggagaaagcaagggctggacaaccaaggaatgtcgtgaggaagagctcactgaagcaagcgagacggcaacaggagcgaagaaggaccgc

SEQ ID NO: 13083 - DNA, 388 bp, Gossypium hirsutum
  Clone ID: LIB3135-053-Q1-K1-E9
cccacgcgtacgcatctctttgcttttctgtttgtatttcactagtagggagctgggaaaaaaatgagttttcgaaaaaaaattggtcgattggctttctgcttgttttttttttagattttgatcgcattatataggacatggagagtcccgattccgtgagagttgccgttaatattcggccgttgattagtgcaaagcttctccatggatgcattgattgcatcaccgtccttcccggcgaacctcaggaagtaccaatatgaacagccaatcaagtcggtcacatgccatctttacaataagcatggagcagaagaagattgctagctgcctaagtggggtaaatgatgataccggtgaagacatcttatgtgcaaagcttcat

SEQ ID NO: 13084 - DNA, 320 bp, Gossypium hirsutum
  unsure (1)..(320): unsure at all n locations; Clone ID: LIB3135-053-Q1-K1-F1
cccgatcgtaaagagtcacgaaggtggctttccgtacagcgatcggtttcgtagtgatgggattcgtcggattcttcgtcaagctcatctttattcctattaacaacatcatcgttggctccgcttangaattgcangctcgtagaaattggtgggggatatgaccagttggcgtagttgcagattctcatagaaaatgaatgttagaatgcagcacgtgggggctgtccctcttcccttctcattttacattttattagttgaaccaatagtcttgaatctaaagtaaactctcttggaatttctttgaacaatttgta

SEQ ID NO: 13085 - DNA, 311 bp, Gossypium hirsutum
  Clone ID: LIB3135-053-Q1-K1-F10
gagttgcctctgggaagaggaggaagagtattattataattaaaacggcttattttcttatgttataattattaaataaattgcttcccaggcattgcctggtgatatagcatggggtgtgtttctattctagtacttttttgtcttttatcaagtcaattgctatgccagcaaacctgaacttgttactgccatttgtacggcagaatgtggagcttctccatttttttattattatattacatgaaataatatgcggcctctattatacctaaaaaaaaattattaattttgtatttatatatatattt

SEQ ID NO: 13086 - DNA, 359 bp, Gossypium hirsutum
  Clone ID: LIB3135-053-Q1-K1-F11
agccggtgctacctccactaacatccccggcgacctcctcaaggggaggatgcgtgagggtgaaattcgggcagatgccagctgctgtacgaatcgagggatttgattgcctcaccagagatggccgccatcgcagcatcttcgccgtggcttaaaaaaaaccaagatatgggaacaaaaatgtgagaggagagagggagatgataaaattaagttacaacttggaatagtgtgggtagtgttggatttgttaatagaagattaaaaagagatgatgggtgttaaaatgttgggacttttatgattttgggatgggattttttcttgcataaaaaaactaagaggggagcaaaaacaag

SEQ ID NO: 13087 - DNA, 433 bp, Gossypium hirsutum
  unsure (1)..(433): unsure at all n locations; Clone ID: LIB3135-053-Q1-K1-F12
cccacgcgtccgcagttcaccaagactcttgacaagaacctcgcaacaagtctgttcaagttgctcctcaagtacaggccagaggacaaagtggccaagaaggaacgtctcttgaaaaaggcccaggccgaggctgaaggaaaagcccccgagtctaagaaaccaattgttgtgaaatacggtcttaaccatgttacttaccttatcgagcagaacaaggctcaattggttgttattgctcatgatgtggatcccatagagttggtagtgtggcttccagctttgtgcaggaaaatggaggtcccatattgcattgttaagggaaaatcacgtttgggatcgattgtccacaagaaaactgcttccgtcttgtgtttgaccacggttaagaatgaggataagctggaattcagcanagtactcgaggcaatca

SEQ ID NO: 13088 - DNA, 378 bp, Gossypium hirsutum
  Clone ID: LIB3135-053-Q1-K1-F2
cttcgatatgatgatgacgagaggccgactgcaaaagaagcagtggctgattcttatttgaacccacctagaaatgcggaaagcagaagaactcgttcctagcatgccaaatttgtgaggcggacaagacatggcattgtatcttctttgtgctgggctgggtaaggatcctgcctgtgtaatctagactgaaaattatgtgtatgtggtgctttagctgttgaagttgagaattctttcaaaaatgatctatttgattatctggtgtcccccaacggaaactttagttattatttcagactttcatatttcccgaaataatgctgaataatcgtttgagtacttcagatgggaacagctcctaaatctgatttgagt

SEQ ID NO: 13089 - DNA, 400 bp, Gossypium hirsutum
  Clone ID: LIB3135-053-Q1-K1-F3
gtccgggcttctaaggggaaacccccaccttatgaactatagccacctgtctatgaacctccaacgagaggaaaagcctgaacataagccacctgtctatgaacctccaaagaaagaaaaacctgaacccaagccaccgatgtatgaaccaccaaagaaggaaaaggccgaaccaaagccaccactttatacacctccaaagaaagagaagcctgaaccaaaaccatcagtatatgaaccaccaaagaaggaaaagcctgagcctaagccaccagtttatacaccaccaaagaaagagaagcctgaacccacgccaccagtgtgtgaaccaccaaagaaagaaaagcctgagcctaaaccaccagtttatacaccacccaaaaaagagaagcttgaacct

SEQ ID NO: 13090 - DNA, 411 bp, Gossypium hirsutum
  unsure (1)..(411): unsure at all n locations; Clone ID: LIB3135-053-Q1-K1-F4
tccggccgcttccccgtcgaccccgcgtccgggcactctcgttttggtagggaccccgtcttcgttggatcgtgaccgccataaaccccccttcgctcgcgacgcttaatggacttgaaaggaatttgnnnnnngngcggtccctttcccttcctctcctaccccccctcttcttctttcctcctctctccttttctctttttcctcgccttcccctctccttctcttattccttctcttcttccctctctcctcttctcctctcctccctcccctccctctccctcctctcccccctcccctctattactctttttctcccccctccccctcctttctcccccccttttctttctccccctccccccttctctcctcttacttcctctttctccccttcttctccccccc

SEQ ID NO: 13091 - DNA, 454 bp, Gossypium hirsutum
  Clone ID: LIB3135-053-Q1-K1-F5
cccacgcgtccgcccacgcgtccgtccctgctgagatgatcaagtgtgtggaagttttcaaaggattttatgaaacaaaaacaaagcacagaaagcttacatggatatactcgctgggaacttgccacattaatggcaagtttgaacacaaaactattgaacttattgtttctacttatcaggctgctgtcctactgctcttcaatgcttctgatcggctgagctattcagagattatggctcagttgaacttgacccatgaagacttggttagattactgcattcgctgtcatgtgccaagtataagatactaagtaaagagccaaacacaaaaaccatctcccagagtgactacttcgagttcaactctaagttcaccgacaaattgaggaggattaagattcctctccctcctgtggatgaaaagaaaaaaagttgttgaagatgttgata

SEQ ID NO: 13092 - DNA, 410 bp, Gossypium hirsutum
  Clone ID: LIB3135-053-Q1-K1-F6
ctcaaccttcccctcattctctccgacgcccgaaaggatgctctcatcgaaagatggacgggggtcaagaacattaaggatccgtacatgacagatatcacagaatttggcgttgtcgaggataacacgcatttaaaggggagggtgaagttgcaagacttagtgaaaggcaagactcaggtgatctgcgggatctattacaagctgtgtctgtatgcaaaagatgagaacatgttgtaactcatgcaatgctgtattttgagaaacagcgtggttgaaattaaggaaacataccttctttaccctacggaagggttggaatattgtattatatgatcatacatatattcatgtatgttatcaattttctggtagttaactgaggggagagtaaaatgttggtgatacac

SEQ ID NO: 13093 - DNA, 436 bp, Gossypium hirsutum
  Clone ID: LIB3135-053-Q1-K1-F7
cccacgcgtccgcatgattaaaatctgcaagatgcttggtttggcagctcttgtagaggtgcgtgatgagagggaaatggaccgcgttcttggtatataggggattgaacttattggtatcaataatcgtaaccttgaaacatttgaggtagatatcagtaacacaaagaagcttcttgaaggagagcgtggccagatgattcgcaagaaagatataattgttgttggagaatcggggctttttactcctgatgatgttgcttatgtccaagaagcgggtgttaaagcagttttggttggggagtcgatagtgaagcaaagcgaccctggaaaaagaataagtggactttttggtaaagacatttcgttatgagttcacacagggaaaagtggactctggatgtgtgcttccgagacttcatttacaattactaca

SEQ ID NO: 13094 - DNA, 424 bp, Gossypium hirsutum
  Clone ID: LIB3135-053-Q1-K1-F9
attggtgctcttagtttgcttcaacctcagcatctgtgtccctggatcttacactggaactatgaatccacctcaaagacaggttgcgtcagcacgaaatgcaaataatatgccaggaaaatccaagtcagtgctatcacaagagaatgatatggaaattgacccatggacacttttggaagacggagcaggatcaggtccatcttcaagtagcactgcagccattggaggcagtgacaatgctaatcttcgagcttcaagttggctcaagggggctgtaagagtgagacagacagacccgtcgtatattggtgctgtggatgatgatagctgattttaggttcaactatgtttttagatttggtcttaaggaatagcaaggcccctcacaacaggtaaattaaagcgttatttgttgtgcaca

SEQ ID NO: 13095 - DNA, 93 bp, Gossypium hirsutum
  Clone ID: LIB3135-053-Q1-K1-G1
cggggttctttaccatgtctaatggaattggaaaaaaggaatgagacctttaactcatggttagaaaaacatgtttttaatttttgggtttca

SEQ ID NO: 13096 - DNA, 437 bp, Gossypium hirsutum
  Clone ID: LIB3135-053-Q1-K1-G10
cccacgcgtccgcccacgcgtccgggtgcaggcaattccaatggaagaagagcgagttgatcgacaagaaaactcaactcagccatctgaaaccaatgtgtttcccattatgccggcgacttttcccatggcctttaaccaggtagttccgccggttccaattcagaatccgactgaaaatctcacaatagcacaggggaatcaattgaataacaatgttccaacggcaaatctcatccgtccggttccaaatttcccagctcttcagagatccgatctcaacacagacttaaatcctgcgacggatcctttatcgctgtcactcaagctgtctttgcaatccgatcaaatggattcatcatcatcttcaacttccaggcattctccatttcacggtgatgccaaacttagcagtggagataacaataacatcatca

SEQ ID NO: 13097 - DNA, 431 bp, Gossypium hirsutum
  Clone ID: LIB3135-053-Q1-K1-G11
cccacgcgtccgcttttctttcctaaagaatcaaccccacctccacttggtcctggaactgctgttgctgtggtacttattgtggctccctcgcctgttgctgcattatcgaggtttctctccaagtccatgttcatgacttgagataacaccaagctacccagtggcagataaggtgagttagtgtcagagttgcctaatgacatggacatcgggctcaacttttcttccatgtgtttcttgaaagtggcaaacccaaaagaagctcttcttaaaagaacaaaaaattaagagttgggaaactggagagaagaaaccccccacccgccaaaaaaagtttgaaacaaagacgggtttgcttgaaattgcgccagacatagaatgtagagagagacgtagagattttataaacttccttgcttaatgatgga

SEQ ID NO: 13098 - DNA, 430 bp, Gossypium hirsutum
  Clone ID: LIB3135-053-Q1-K1-G12
gtacaaagtggggcaccagaaccagaacaaatttgcgatgatgacaataacaaccagctagctgaggagaacattgaaggagacattacaaaacttaccggtagacagaaaaaattattcgagttgagactaaagatgaacgaagcaagaaaagctaatcaaacggctatggtggctgaaaagaaacgaatggaagctccacctgaatctagaggaatttctaagcaaaaatggctcgaggaaaggaagaaaaagattgggaaacttttggatgcaaatgggttggatttgcaaaaagcgtatatgctcgatactcaagaggcagccgaggcaaaatataagaaatgggaaaaagatcctgccccgttcggttgggacgtattcaatcagaaaacattgtacaatgcatacaaaaaacggacaaagaaca

SEQ ID NO: 13099 - DNA, 394 bp, Gossypium hirsutum
  Clone ID: LIB3135-053-Q1-K1-G2
ctttctttaatcattgtttgtttttcttaggtgcgttaatagtttcaaccccacaagatgttgcactgagtgatgctcgtagaggagttagaatgttctctaaagttcaagttcctattttgggattaatagagaacatgagctgcttcaagtgtccacactgtggtgaaccttcgttcatctttggtgctggtggagcccgtaaaacaacagctgagatgggtttgcaacttgttggtgagatacccattgaattggacattaggaaaggctgtgacaaaggcatgccgatagtggtatcagcacctgattccgctgtctccaaggcttaccatgatgtagctcaaactgttgtcatgagacttgaggatctggcaaaggcatgaaactactc

SEQ ID NO: 13100 - DNA, 426 bp, Gossypium hirsutum
  unsure (1)..(426): unsure at all n locations; Clone ID: LIB3135-053-Q1-K1-G3
ctcgaatttctttattcaagcttcttgttttttagatcaaaacccccatttttcttttcacttttcatccgttaagtttccagatattctacctgaaaaaattgcagaatgaggagcaaaagacatagccataacaagttcatgcggttcattacggttccttttaaagcgttagtcaaggccagggatctatatgttagaagcttgacaagttgtgcttcaaaagtgagctacgggcatggttcgggcgggtgctcagcgcaatactcanggttgccgaggagctttattagtgcaatgtcggcaacgtgtaatgacaatgaagatcttagagagctcattanggctgcatccgcgacgagcttgggtcataggaaggaaatggagatgctcttgaaacagcagttgagggtgcagatgggatcg

SEQ ID NO: 13101 - DNA, 388 bp, Gossypium hirsutum
  Clone ID: LIB3135-053-Q1-K1-G4
ctgcacttcttgattattgttaatgaatccccttcatgataatgtttccccatttcatgtccatgccgagttgagttgcacttctacacgcgattgcctcagcaacaaaggctgaggcgacttgattgtggatttccgagcatgccaagagaacctttccttcgctgttcctggccacaattccgagtgccgcatgagaagatctcacatcatatgcagcatcaaagttgatcttcacaaactgatcagattgcccataaagtgcagcagaaaaccctacactggactggattactctgttcaaagacccagactagccactctgggaactccaaattatattcagacagaaaaatctggcatgctaattcttcccatactgatactg

SEQ ID NO: 13102 - DNA, 408 bp, Gossypium hirsutum
  Clone ID: LIB3135-053-Q1-K1-G5
gtcgacaatgttggtgaatcaagagccacgtccagggtttggtcaaggcatcgacaccctgggggagctgtatctgagcggaggttcctttggggcgagaatctcttgggtttgcaagatgacgacgatgaagatgatgtgcgtgtaataagtgatgtaggtgaagacgcatccccaagcccaaggagacgcagacgcctgacgcggtcaaggtcagatgaagatcagtcatgaaataaatcagatatttttgcaggtaagtcccacttgcttgacattatttcgaatgggatttatttcgaactgctttttcctgatccggtcggtagtattcatcccaagtagtatgcataagcttttgctggtctcagaatccaccatcttgtggggttctagaatgtgtcatct

SEQ ID NO: 13103 - DNA, 404 bp, Gossypium hirsutum
  Clone ID: LIB3135-053-Q1-K1-G6
cattgatggagcaatccaatggttggatggcaaccagctagccgaggctgatgaattcgaggataagatgaaggagctcgagagcatctgcaatcctatcattgccaagatgtaccaaggtgcaggggctgacatgggtggtggcatggacgaggatgccccacctaccggtggcagcggtgctggacctaagatagaagaagtcgactaaatcaaatattaagatagtattttgccgatgtttaacagcttctgctggtgctatattttatgttttcagcaacctatgttttgatgtattgaaaaaatctggtttatttttgggaacattaccatcttaagtaactaatgttccccgttttaagaattatatcaacttctctatattaatgtttagttttatc

SEQ ID NO: 13104 - DNA, 99 bp, Gossypium hirsutum
  Clone ID: LIB3135-053-Q1-K1-G7
aataagctactatatatatgtccatgttctcctccaggctctttaatcttgtgggtggtacattgatgaggtttataaaaagatgggtctctttcattt

SEQ ID NO: 13105 - DNA, 441 bp, Gossypium hirsutum
  Clone ID: LIB3135-053-Q1-K1-G8
caagggtccaaagactggtcttaagacaccatttcgaaatgggttgttgtggcacattgcgggggatgttctaaagttggccaaggatggtttggaaagaaggggcttcaaggaatccgggttcttgaatgaggtggcagaggtggttcgtacaggtgtaacaccagctgagaagcttttggaattgtataatgggaagtggggacaatctgttgaccctgttttcgaagaactcctctactgagggattttatgtattttcagggctctttttgaggagggaatcaaattcttaaaatcttagtgctgtcatgcaacatctttcgttgtaattcgctaaggaacctcggatcatctttagacttcaaaaacttcctactaccgaatgcttttttttcttttatgtgattttgttagaggaataaacgatgctgtaactga

SEQ ID NO: 13106 - DNA, 299 bp, Gossypium hirsutum
  unsure (1)..(299): unsure at all n locations; Clone ID: LIB3135-053-Q1-K1-G9
aacacgcgcacgaacagaggcacaggcacgacttcaggaagcaaacacgancccgggggcgggggaagcgcgaaagcacagaagacaggaccttgagagaatgggggtgaaagcaccgggggcactgactgagccggaagagggggcaagcagaggcggcacacgagggcaaaagagccgaaacggggcgagcggggattgcggggaaacaccagaggcgaggcaaaaggaggggacaaaaagccgggcgaacgacgcttacaggactacacgaacggaaaaaagaaccggaaggggaa

SEQ ID NO: 13107 - DNA, 406 bp, Gossypium hirsutum
  Clone ID: LIB3135-053-Q1-K1-H1
ccaaatttggttgccttgaaaaaaatagtcactccaaaagctattaaacattaccagggccaaatttttgaccctaaccagaaaggaccctaacaagggccaacttcccaaaaaccgtgccaaccgttcttcaactcttttctttacacacaacacctccttgggaccgccttatcgtgttttggttgataccaacttcatcaatttctccatccagaacaaattggatctggagaaaggaatgatggactgcttatatgcaaaatgcactccttgcatcacagattgtgtgatggctgagcttgaaaaattgggccaaaagtaccgtgtagctttgaggattgctaacgatcctcgttttgaaagattgccatgtgttcatcaaggaacctatgctgatgactgt

SEQ ID NO: 13108 - DNA, 378 bp, Gossypium hirsutum
  Clone ID: LIB3135-053-Q1-K1-H11
cccacgcgtccgcgttccttacaggaccatgaagcacctccccgccctgcaaagaggaaagctgaccagcatcatgaccttgaacgtgattatgactatgatgatcgtgacaatggtcgtgatcgcgaacgtgatcgccatcatcatcatcatgatcgctccgagtcttccaagcattccctcgaacctgcaactaaagccacttcctcgactgctactgcaggaactgataagaagccaaaggcaagtgtgttttctcgcattagctttcctgaagaagaaattagcaagaagaaaaggaagatatcttctgatgcacctgcatcttctggccatcacaagccatcctccaatggatatgattacaaaacatctttc

SEQ ID NO: 13109 - DNA, 420 bp, Gossypium hirsutum
  Clone ID: LIB3135-053-Q1-K1-H12
gcgtgcggttgcttgggacgaggtcaggaggtagtcagctgaggctgatcttaggcttagacttgaaatagaatataatgatcctttcgtgtctaaaccgccaagaaagcgacgggactgaatagcgtcagatatatgcctgctgggcagctggccagaaacattgagaaaatgtctgatgaagctgctgtggagattgcttttatgcaactcaagaagatccttccagaggcatgtgccccgattcagaatcttgtttctcgatggggcacatatgtgaacacactatgctcctatagctatgattgagtaggcatgtcccatgatcttgatgatatgctaagaaagccctgggtaacatattctttgcgggggaggccacccagatgagctatccacggtccattcatggtggcattt

SEQ ID NO: 13110 - DNA, 433 bp, Gossypium hirsutum
  Clone ID: LIB3135-053-Q1-K1-H2
aaatgagccgaggaagtggaggcggctacgatcgtcatatcacaatcttctctcccgaaggtcgtcttttgcaagtggagtatgcgtttaaggcaggtaaagcagctggaatcacgtcgattggtgttcgaggcaaagactctgtctgcgttgttactcagaagaaagttcccgacaagctattggatcagactagtgtcactcatcttttccctattaccaaattccttggattgttggctactggcatgacagctgatgcaaggaccttggtccaacaagcaaggaatgaaacggccgagtttcggttcagatatggatatgagatgcctgttgatgtattgtctaaatggattgctgacaaatcacaggtttatactcaacatgcttatatgagacctcttggaggtgatgctatggttttgggtattga

SEQ ID NO: 13111 - DNA, 417 bp, Gossypium hirsutum
  Clone ID: LIB3135-053-Q1-K1-H5
cttgcaacatatatcgagcctgggaagtgtttacatgggacggttggcagtccattttacatagcgcccgaagttttggttgggggatataatcaggctgctgatatttggagtgctggggtgattctatacatacttcttagcgggacaccaccattttggggtaagactaagtcaaggatatttgatgctgtgagggcagctgatttgcaattcccgtcagatccttgggatcggatttctgattctgcaaagaatttagtcaggggaatgctcaatacggatccctctcaaaagttcactgcactgcaagttttacatcatttatggatgaagtacgatgaatcttgccctgaagaatcaagtgagtttgtataccacagtcatggaaagttggaggttcatagtggctcattt

SEQ ID NO: 13112 - DNA, 396 bp, Gossypium hirsutum
  Clone ID: LIB3135-053-Q1-K1-H6
gaataaaattatattgcactttgacaaggtgtgttggcctactgtggcttttttgggagttggtgctgacacatcttatcattgcagctactttctaaaccttcataaggcgacaggacattctggcctcggatatatgcctgctgggcagctggccagagacattgagaaaatgtctgatgaagctgctgtggagtttgcttttatgcaactcaagaagatccttccagaggcatgtgccccgattcagtatcttgtttctcgatggggcacagatgtgaacacactaggctcctatagctatgatgcagtaggcatgtcccatgatctgtatgagaggctaagagtgccagtggataacatattctttgcgggggaggcaaaccagatgagcta

SEQ ID NO: 13113 - DNA, 435 bp, Gossypium hirsutum
  Clone ID: LIB3135-053-Q1-K1-H7
acggaactggcgagcagacattgagtcgagatatataccggctgggacatcggtttgactttggcagaatgctgtcttgttatttcactacagctggttgttatttcagtactctggtaacagggctcaccggctatgtgttcctttatgggcgcctctatcttgtactcagtggccttgaacaaggattgagtggggaaccagcaattcgtgataataagcctcttcaagtggctcttgcttctcaatcttttggtcaaattggatttttgatggcactacccatgttgatggaaattggcttggaaaggggtttccgaactgcattgagtgaatttatattaatgcaactgcaactggcaccagtatttttcacattttctcttggaacaaaaacccattattatggaaggacattgctttatggaggtgcta

SEQ ID NO: 13114 - DNA, 335 bp, Gossypium hirsutum
  unsure (1)..(335): unsure at all n locations; Clone ID: LIB3135-053-Q1-K1-H8
gtgtttttgaaatattatgaaaaaaatcaagagagtattaaaataatggttttttgggagactgaaagtaatgattctagattttgattcatattcaaataatagatgattttatctgattacctaatattttattattagttgtttctcatttttattttcattattttaaatggtgtgcgataataagtacttttgtaataagaactatgagagttaaaatactttcagcccatgtatcagagtgagtctttttaaaccatagatttatacatgttatatatatataagttgattgagttagtttaattggcannnaaaaaatcataaattta

SEQ ID NO: 13115 - DNA, 433 bp, Gossypium hirsutum
  Clone ID: LIB3135-053-Q1-K1-H9
accgaatcagacgacataaagggtacagtaaactcatggagactttgcacagttactcaagtggaggagctaaaagctgtaattcgcttgcttcccatatgggccaccgggatcatctttgctgcagtctacagtcagatgagcaatttatttgtgttgcaaggcgaaagaatgaatacgcacgttggcaattctacgttcaagatcccaccagcatcgctttcgatattcgacaccctcagtgtgatcttttgggtgccaatctatgacagaatcattgtcccagtgacgagaaaattcaccggtcacaagaacggcctaactcaacttcaacggatgggcattggcctcttcatatcaatatttgccatggtagttgcagcgattctggaactcgaacgactccgggaagtgaggaggcacaattactatg

SEQ ID NO: 13116 - DNA, 437 bp, Gossypium hirsutum
  Clone ID: LIB3135-054-Q1-K1-A1
cgggactacgcaaaggtagaacaccatagaaacttcgcttactttctcataaaccttgattttgctacgaaaaataagaacccggaatagcggaaatcggttcgtgttccgctttcaaagtaagttgtctttgcccaagtgtgaactgcagacgactctccagtggttccattccttcttactttacttttgggtcaacccaacccgaatgggaataagagggtcagccaaacagcgggcagctccactttgtacattttgtgaggcagaccaatcaggtttagaaaagggaggggaacttctcaccgaagcgaatgaggcagtaggaatgaaggaggcgggaagctaccgcttctagaatgcaagcttatccttgactttttttagagaaaaaaaaaaaggtttttggatgaagtaattggagtgacaaatggtta

SEQ ID NO: 13117 - DNA, 387 bp, Gossypium hirsutum
  Clone ID: LIB3135-054-Q1-K1-A11
acgatccattttgttctgcaacatacgaattaaaagaaaaagtttgaaacccggaaatgtcggacgaggaacaccattttgaatccaaagccgacgccggtgccttcaaaacctacccacaacaggccggaaccattcgtaagaatggttacatcgtcataaaaaaccgtccctgcaaggttgttgaagtttcgacctccaagactgggaagcatggtcatgctaagtgtcactttgttggaattgacatcttcaccgccaagaagctggaagatattgttccctcttcccacaactgtgatgttccacatgttaatcgtactgactaccacgtgatcgacatttctgaggatggatttgggagtttgctgaccgaaaggtggagac

SEQ ID NO: 13118 - DNA, 202 bp, Gossypium hirsutum
  unsure (1)..(202): unsure at all n locations; Clone ID: LIB3135-054-Q1-K1-A12
accacgcccttgagaaagaaagaaagaaatcaaacatgggatccatttncgagagtaagggggagaaggggcgagtagctggaactggaggggtcactggaactgaagaggcagctcgagaccttgcttgaaccaccgctgaaaagaacaatggcgaggtggctacagaaacaaccgaggctgaagccaaagcagaagaggc

SEQ ID NO: 13119 - DNA, 391 bp, Gossypium hirsutum
  Clone ID: LIB3135-054-Q1-K1-A2
cccacgcgtccgcctactcactattgagtctagaaagatcaaccacaaaatcgcaacgttcatgttctagtttctcaaaaagaataaaaaaaggcaccaaggagagaaaatttggccatgaaagattttcaagtccattgaataagagtttggacattgcatttgggagctacaatttcgatagtccaagccatactgcttccaattctttggtggccatcttacacattctcttaatttgatcaagttgcttgggaagaaagcttgagagtaaacttccctagtggctgtttaattatcggtcaataacatctttaattatattggttttcacctaattcaattgtgcacagaaatgtgtaagcgtttctatatattgtgggcatgcatt

SEQ ID NO: 13120 - DNA, 439 bp, Gossypium hirsutum
  unsure (1)..(439): unsure at all n locations; Clone ID: LIB3135-054-Q1-K1-A3
gaaaaagagctgagtgaaaatcggaaaaaatatgctaagctgaaagaagagcttcttttgactccttcagaacttgcaaggatgaaagaagaagcatttcagtctaataagcataataatgctcataatgatactgctggaccacttatacggcacgaaatttctcatgaagatcaccctttgagccttggtaaggctagtgtctggcatcaatactttgagcatacggaaatcgcagaacacatcgaccgtgatttgcaacgcacacatcctgaaatgaaattcttctcaggagaatcatcattcggcaggaaacacagggaatcaatgaggaatgttcttctcctattttcgaaactcaatcccgccatccgttatgtccaatgcatgaatgacgtcttggcaccattatactatgtatntagcactgatacagatg

SEQ ID NO: 13121 - DNA, 445 bp, Gossypium hirsutum
  Clone ID: LIB3135-054-Q1-K1-A4
cccacgcgtccggcttgaggcaacggaatacatatcaagggacctcctcgggtaagctgctgaatccctcgggtaaaattggtgagcaaggctctcagttgagctcttttgatcctatgcatcatgtccaagaatctgtatcccatgtagctgaaattgttgaaagttcaagaaggaaagctcgatcaatggttgatgcagccttaaaggctatgtcatctttgagaaaaggggggaaaaacattgagaggattgaggatgcaatagattttgtaaataaccagctttcattgaatgagtttagtgcacctgctccgaggtctgcggccccagtagactctgtacgtagtcatgataatctgactgcttgttcatcatatccatttgcaactagtcatatacctgagatgaagctgcaaaacttgtcagaccaggatgaacttaa

SEQ ID NO: 13122 - DNA, 423 bp, Gossypium hirsutum
  Clone ID: LIB3135-054-Q1-K1-A5
cattagcatcaaaatcactccagctttctttatcactgaaaaatgtcttgctgtggtggaaactgtggctgcggtactggctgcaagtgtggcagtggctgtggaggatgcaagatgtatccagacctgaacgctgccgagatgaccacaactgagactctggttcttggtgtagcaccccagaaagcacactttgagggagctgagatggaattcggggctgagaacggctgcaagtgtggagacaactgcacctgcaacccttgcaattgtaaatgattagagaccaaagccaaagctccctggaagcagaggcgcctttgtctttaagaaataatatgttttgttgtttatgtgtttttagaataaagtagccatggcttgtcgtacgttttgcctgttgccgccacggttacttggtgc

SEQ ID NO: 13123 - DNA, 432 bp, Gossypium hirsutum
  Clone ID: LIB3135-054-Q1-K1-A6
cccacgcgtccgcccacgcgtccgattttgcactttttgattattgtttttgagtcccccattaccgtgactgagttcaaacccatactgatgcctaagttggttgcttctaaacatgctaatgcttctgctacatatggagaggaaacgttggagtgaatagtagacttggaggctgcgattttcccattctgacccctgactaccattcctgatgcggatctggagttgttgatatcgaaagctgcatcaaactgtatagactcccatagctcctcctctctgtgttcagatctaacagccgtggttgtaagttttctttctcgtacaccttaaagctctattaaaaaattctgcactttaaaagctagatcccttcctgatgaaatcttcttctcatggagcatctgatttctcgagttccatataacc

SEQ ID NO: 13124 - DNA, 351 bp, Gossypium hirsutum
  Clone ID: LIB3135-054-Q1-K1-A7
ctttttcatcgcctgccctacgtcttctttttttcctgaagctctgtgtgctgcgatcctaagtcaccatgtgcgacgggccagaatgtacctgattcgtcagatgaatggaatcccttttttgtattgcttccgatgcaatgaagcgctcaacgcttattatgcttctctgtgtggcacaaggaaaagacaagtctgaaaataaagacatagatttttggagtgatgaataaacacagcagtgggacatctatcctctctatcttctaacttgcgaatcaccgaccgagaatcactctcaatctccaccgcccataagcctagatttatagaacttattatgttcttttg

SEQ ID NO: 13125 - DNA, 235 bp, Gossypium hirsutum
  Clone ID: LIB3135-054-Q1-K1-A8
cttaaacgaaacggaatatttatgaagggatttctctcgaaaatcgagccgggacccgcaggggaaataggtgcgcttggctctaaagtgatctctgaagaacctatgcataaagtccaagaatctgttttccaagtagctgaaatggtggaacgttcaagaaggaaagctggatcaatggttgatgcacccttaaacgctatgtcatatctgataaaaggggggaaaaactttg

SEQ ID NO: 13126 - DNA, 377 bp, Gossypium hirsutum
  unsure (1)..(377): unsure at all n locations; Clone ID: LIB3135-054-Q1-K1-B1
cccacgcgtccgcaataacttagagtggaggcagcagagaaggaggcagcggcagcagcgagggagtcagaggcagcagcaatagcagcagatgtttcaacagtacgaagagctccagctacagcttcagtaaatgatgcagatgtttcaacagtcgcaaaagccgccatcttaaacattagttttctccttgtaaaaatgtttttaacattgtcactgttaggattttaacccgattaagcaacgaacaagaaaatagcgaaataaattgagatattgaacacgcccnacatataaaataaaaaaaaagggatgtttaaaaaaaaaaaataaataatccacttgggtttgggataggaaaatgaaaaaagcctttt

SEQ ID NO: 13127 - DNA, 202 bp, Gossypium hirsutum
  unsure (1)..(202): unsure at all n locations; Clone ID: LIB3135-054-Q1-K1-B10
gacccacgcgttcgctaatgacccgtttaacctcattcttgacgaaaaagagggccctttcgaggtgtctaggggaggcaccctcaaantccaggagaaagatgggattgattatgcagccgtcacagttcaacttcctggtggggagcgagagcacttcctgttcaccatcaagcaataggttgcatcatgcaaaccagat

SEQ ID NO: 13128 - DNA, 154 bp, Gossypium hirsutum
  unsure (1)..(154): unsure at all n locations; Clone ID: LIB3135-054-Q1-K1-B11
acccacccattcaaaaagaaaatgaaaagaaaaatttgacaaactttctgagttacctccaagctgtattgggactaatttgaacctagnccatattggacgtgaaaaaaggggggatcctttacaaaataccaaagcggcttttatatatccg

SEQ ID NO: 13129 - DNA, 120 bp, Gossypium hirsutum
  Clone ID: LIB3135-054-Q1-K1-B12
acaaaacacattgtgagaatattattaagataaacgttgtttatagagcggcaggtcggcttagtactttatatttggacggccaccagtcgcttatagtgatttgataattgccgcctc

SEQ ID NO: 13130 - DNA, 445 bp, Gossypium hirsutum
  Clone ID: LIB3135-054-Q1-K1-B2
cccacgcgtccgcccacgcgtccgaccaaatttatattttcccatatgcatagatagaatacataaatgcaagcatggaagtgactcttcaacatatgacactgaaggaaggtatatgccaatgaactttgagagtatttttagcaagtacgctcgaactgtgccggacaagttaacactgggggaactatggcacatgactgaggctaatcgaaactcatatgatttcattggctggataatatcaaaaggagaatgggtacttttgtatataattgccaaggatgaaaatggttatctaacaaaagaagcagtaaggggatgttttgatgggagtttgtttgagtatattgccaaaatgaaaggtggcaaggttcactgactgacgttgctgtgttaaaatatatgtgttggttttgggtgatcaaataaagcttgaattaaa

SEQ ID NO: 13131 - DNA, 381 bp, Gossypium hirsutum
  Clone ID: LIB3135-054-Q1-K1-B3
cccacgcgtccgcaaaaaccctagttattaatcgagggaagcagaaagcctatacccatgactgtaaaacgtcggactggtggccgcaacaagcatggccgcggccatgtcaaattcattcgctgttctaactgtggcacatgctggcccaaggataagtcaattaagacgttactcgcgaggaacattgtggaacaagctgctgttagagatgtccaagaagcctgcgtccatgacactctatactttgcctaagctgcatgagaagatgcaatactgcgtctctggtgcgatccactaccacgttgtgagagtgcgatcccgcaccgataggaggaaaagtgacccacccgcccgcttcatcatacgcagggatgatat

SEQ ID NO: 13132 - DNA, 444 bp, Gossypium hirsutum
  Clone ID: LIB3135-054-Q1-K1-B4
caacctttaaggtaacattaccatcaggatcatccccgccacttccacttaaagaaaagcttccctttttcagtctgaaggatgataaaggaaagatagcaaggggaatatgcatcacaaagacttctttgaagcctgatatatcgaactttttggttgtatatcctccaagatcattgtttcctgaacaggttacttcaatcagacttctccaaatagctagcaatttggctgtttgtctgccaggcatgtttgtgttatatatctcagcattatgtaatgatgatgatcaaggaaagaagttaattcatgcagtcatgaacacgcttcttacagttcctctagattctgaaagtaatgctgcagttcaaagtgagactgctgaaaatggtagtgcagttcaagatgagacttcagaaagtagttctggaggtccaagtgatt

SEQ ID NO: 13133 - DNA, 164 bp, Gossypium hirsutum
  Clone ID: LIB3135-054-Q1-K1-B5
ctctaacgctatgtaattgtataaaggaattttgaaatggctaaccattcggtggatacggggtacaagttccttctaacaaactcttttcaatccaaatcaaatccaatccctgttcttatattgaaacacatttttccaaagctaactcaactcgcatgtta

SEQ ID NO: 13134 - DNA, 262 bp, Gossypium hirsutum
  Clone ID: LIB3135-054-Q1-K1-B6
acacgcgttcgtccactcgtccgaccaaatttttgttatactttatgcatagaaagaatgcggctattctagggtggatgaggctctttaacatatgacactgagggaatgtgtatgccaaatgaactttgaaagtatttgtagcaaattcgctcgaactgtgcctgacaagttaatactggggggactttggctcatgaattgaggcttattgaaacttatattatttctatgggtggataatatccaatgtgagaatggg

SEQ ID NO: 13135 - DNA, 165 bp, Gossypium hirsutum
  Clone ID: LIB3135-054-Q1-K1-B7
tgatggtcgaaagactatgcttctttctttcaaaggcttcttatctattaactaaacatataatcgcaccatatatgtttggtgttatgtcatgatctcagttgaaaagtcttatgcttgctgtgtataaatatagaaataaatgactaacaactcaacattccc

SEQ ID NO: 13136 - DNA, 253 bp, Gossypium hirsutum
  Clone ID: LIB3135-054-Q1-K1-B8
tggctcttcctctcatgtaacacagtggggcctgtattaatacactctctgtgctggataacaaacgacggaataagtccaagaatttcatctatatttaatttgaggatgcaaattcataatcttgaaattttaattcgatgctaaataacactagatccggagaatctataagttatggactctgactaaaatcccaaagaaccttaccatcttaaaatttatgcgctgctctgcatgaatggctgatttt

SEQ ID NO: 13137 - DNA, 163 bp, Gossypium hirsutum
  Clone ID: LIB3135-054-Q1-K1-B9
cgcaccatgtgcaccatactttctatgacaagatacaaggatgccacttacatgaaggggggtgggggaaagtctgtgccattgtttcactggagatataagcatgaagggaaggctaaaaaggcaaaagaagtaatggaagcagtataccccgataagaatt

SEQ ID NO: 13138 - DNA, 416 bp, Gossypium hirsutum
  Clone ID: LIB3135-054-Q1-K1-C1
ggttcgttaagacaatggctaccatcagaatagctcttcgtaacgtccaccgcatcgttaatacctccgccgttgccggccgtacaacgaccgttttcaggccacagtatggttgggtttcaacatatttttcaactaatattagtaacactcagccattaaacatcgatctttctaacgaagaaagcaaaaggcgtctttataacagattgttgtataggagcaaacaaagagggtttctggagctggatttggttttgggaaaatgggttgaagaacatatccattccatggatgaaaatggaattaaagctcttgttaatgtcctcgatttggaaaaccccgacctttggaaatggctaaccggtcaagaacaaccacccgaagcagtgaccgttaatcctgtcttctctgca

SEQ ID NO: 13139 - DNA, 432 bp, Gossypium hirsutum
  Clone ID: LIB3135-054-Q1-K1-C11
tagctcagttggtcttcaaatccttaagggccaaacgtgggtgcctgttaagcctattccaaatgcactcgtcatcaacatcggtgacactctagaagtacttacaaatggaaaatacaagagtgtggagcatagagcagtaactcacaaagagagagaccgcctttcaatcgtcactttctatgctccaagctatgaaatagaacttggtccaatggcagaactggtggatgagaagaatccatgcagatacagaagttacaatcatggagagtacagtaaacattacgtaaccaacaagttgcaaggcaaaagaaccctggatttcgcaaagatccaatccaagacctcgaattaacaaggattccactttggtcttcccccccccccactaaaacactattcttgtactatttaactgtagaaatgagc

SEQ ID NO: 13140 - DNA, 315 bp, Gossypium hirsutum
  Clone ID: LIB3135-054-Q1-K1-C12
cccacgcgtccggcatggtggaacctgcaaagaatgtgggtacatagaaggacaacatccttcttctttgccttcattgattgcatagtgagacaattgggattgtctcaaacgacatttactctcacggccaaggtcgtcacagacgatgtctcgaagatgtaccagcaagagatcatggatttcgggagcacttccaccatgtttactgttatatcaacgttggcaatgctgaatcttttcagcttaattggggtagtagttaaggtgtttatggggggattagagtgtaaggacatggaaaaagttggtatc

SEQ ID NO: 13141 - DNA, 360 bp, Gossypium hirsutum
  Clone ID: LIB3135-054-Q1-K1-C2
cagaaagctctatccattttgctacggctggttgaaccagatcaccgtcaaatagctgaactaaattttcgaatatgtatgtgtttggaaattggctcaaagccccaagaagcagttccatactgtcagaaagccatatcagtttgcaagtctcggctggagaggctcagaaatgaagtaaacaattctttagaatcagcatcatctgtcgctgcttctgaattggataatggtgtacaacagtcctcaaatggctatcaaactgtttcatctgtcaaagataaagaagcagaaatcaacacacttgctggtcttgctgaagacctggaaaagaagcttgaagatctacaacagctggtc

SEQ ID NO: 13142 - DNA, 444 bp, Gossypium hirsutum
  Clone ID: LIB3135-054-Q1-K1-C3
ggtgaatctgctccagatcctgggttgatggatgaggttgttccagatgaaatagatagagaggatcctctcaatgacagccgagaaatgttgtctcgctctctaggaagggatgacagcggatcaaaagttgatggctctgccaaggcagagtctattgagagtggtgaaaagataagccaaagctgcaaagtaatcctggataacaatgctcatccttctctttcttgcaatgcaaatgtgtactctggtaatgaaacaaccaaggagataaaaaatgctggaaaatcatcttgcataaacaactgtacatatccagattcagatcttgctgtcgcaactgggatagggccaccaaaaggagaaagcaattatgaagaagctatagaatttgatccaattattcatcacaaccagttctgcctctgggtgaatgggaatgta

SEQ ID NO: 13143 - DNA, 414 bp, Gossypium hirsutum
  Clone ID: LIB3135-054-Q1-K1-C4
caaaatctcaaacccagatttgttctctctctctctctctctctccaatcaattaattcctccattggaggagcttagggtttgttggtgttctgatctttgctctgtctgaaaaataaacagaattataaaccaacaccaacgccatgggaagatttgaagagggaggattcgattcagtggtttgccctaagcctatacgaacctttagatggtctaccaacagctgttatcagactgagatggctgattcaaaagctggttcagagcttcttgatataatcctctccgagggagggtatggggccgagaaccccaccgaccaaatggcttcatcaccaccgtatttctgtggatcaccgccgagcagggcgtcgaatccggtaatccaagatgcccgattcaacgacgagc

SEQ ID NO: 13144 - DNA, 434 bp, Gossypium hirsutum
  Clone ID: LIB3135-054-Q1-K1-C5
aaggaattgggatggctgttgtagaggagctggcaacactgggggcaacagtttacacatgcagcctgaaccaacatcagctgaatgaatgcttgaaagaatggaagatgaagggttttcaagttttcggatccgtatgtgatgcaacgtctccggctcaaagggaagccctcatcaataatgttttctccatgtttaatgcccaacttaacatcctcataaacaatgtggggacaaacgattggaaaccaactgcggaatatacaaatacagaactttcgactttgttgagtaccaatttcgaatcggcttaccacttctcccaactagcttatccccttctcaaagcatcgggacgtggaagcaattgttttgtatcttgtgtcgccggtgtattctcaatcaatgttggatctatctatggatcaactaaa

SEQ ID NO: 13145 - DNA, 437 bp, Gossypium hirsutum
  Clone ID: LIB3135-054-Q1-K1-C6
cttggctctgctaatcggcacttgagatctttaaacaggaagaaaatggggttcattatggaatttgcagagaatctggtgttgaggttaatggaggacccaaaagagagggatagaaaattcagagaacacgtttactctatgaaggatcgatgcgcaaaaaccaaggagatgtggagttatccactgcggccttatgggttttggacatttgagcgccacaatgctcagctacgttgggatcctcacattagccaagttctcggccgaaaggatccttatgatgaccttcttcaagacaggtatgcgtcttcctccaaacgaaactgaggaatcagatgccattagcagatggttgggagcttgatctacaaatgggaagtggacattgaaacccttgttactgtgtggttgaatttattgtcaattgtgctaca

SEQ ID NO: 13146 - DNA, 436 bp, Gossypium hirsutum
  Clone ID: LIB3135-054-Q1-K1-C7
cccacgcgtgcgctggttttgagaaagaaaatgaagttagaccagagctcacaaaattgctagcgggctcctctggttcaatgaaagctgatgaaggtgccaagaaagctttagatggcatcaaatctggaagtttcacagacccttgcaactttgaggggcacatgctggctatagctacagctggtttatcccctgaaagatctttcttaatggcattcattgaggtggcttccgtcggtgtcttacctcttgtaggtttatttttccaatggaactggtatcagaccatagaaaattggcatgcaaagaaaaatatgacataaccctctggtgctcgagatggatcatcattacttcttctggctgatgctgcttacttcgacgatatcatggatgcggatatttgactaacaaatttcatcagacgatattc

SEQ ID NO: 13147 - DNA, 427 bp, Gossypium hirsutum
  Clone ID: LIB3135-054-Q1-K1-C8
gtgcattctagccccgacccacctcccgaaacgtacgatttcgtcgtacggccgagcattgaaggccaggtcatgaacttctacgtgttgaaacggcccggcgtcgattttttcctggaagaaataagcaagaaacacgaagtggtggttttcacggcggggctcaagcaatatgcttcccaggtcttggataagctcgacccgaagggcttaatatcccaccggctttatcgggattcttgcaaggaactgaacgggaagttcgttaaagacttgtctgaaatggggagggatttagggagaattgtcatcgtcgacgataacccaaacgcttactctctgcaaccagagaacgccgtccctatacggccatttgtggaggatagtcacgacagggagctggagaaattggttcaattctttcagt

SEQ ID NO: 13148 - DNA, 440 bp, Gossypium hirsutum
  Clone ID: LIB3135-054-Q1-K1-D1
gctatagggttttggtagacaaggaaaaaagaagaaaagaatggcaaagtgtttcaacgtgggtcagaagcagaagagagcccaaatagcggagagaaaaagattaattcatggtgaccctgcaactaagaagctaaagaacaaatcccaatcactctccgtctctggaaaacgcaaacgcaagcttctcaaaaaatggcgcagggagcaaaaggaggttatagagaagggtttggtgactatggaagatgtggaaatggtggctgctgaaggtacaactgaagatggaggcacatgccaagatgccaccatcaaagtgccaacaaagttccccatgaagaagaatttgaagctcaaacgcattaatcgaaaagggaaaaagaaaggtggtagttcaaaggctgggattgaagctgcttcagtggattccatgatagaat

SEQ ID NO: 13149 - DNA, 401 bp, Gossypium hirsutum
  Clone ID: LIB3135-054-Q1-K1-D11
gtggattcccgctcgatttatgttggtaatgtagactatgcatgtacacctgaggaagtacaacagcattttcaatcctgtggaacagtgaacagagttacaattttgaccgataagtttggtcaacctaaaggatttgcttacgttgaatttgttgaagttgatgctgttcaaaatgctctactgttaaatgaatcagaattgcatgggcgccagttgaaggtctcggctaagcgaacaaatattcctggaatgaaacaatatcgaggaaggcctttcaatccttacttccgctcccgaaggcctttcatgcctgctttttatcctccctatggctatgggagggttccaaggttcatgcgggccatgagataccgggcgtatttagatgggtcacacat

SEQ ID NO: 13150 - DNA, 294 bp, Gossypium hirsutum
  unsure (1)..(294): unsure at all n locations; Clone ID: LIB3135-054-Q1-K1-D12
gcgccggtcagcgtacgcgcttcaaggccttcgtcgtcttcggtgacggaaatggacacgttggactcggtgtcaaatgtagcaaagaagttgcgacggctataagaggggcgatcatattggctaacttgtcagtgataccggttagaagaggttactggggaaataagatcggaaaaccccatactgttccatgcaaggttaccgggaaatgtgggtccgtcaccgttaggatggtgccggctcctagaggtgctggtattgtggctgctanggttcccaaaaaggtgcttc

SEQ ID NO: 13151 - DNA, 443 bp, Gossypium hirsutum
  unsure (1)..(443): unsure at all n locations; Clone ID: LIB3135-054-Q1-K1-D2
ctccctcaccaacctttctccggttctccgctttctcgccttccctctcgctcctcctgcttccccatgtcggcctcccttgtttttccagggggttttgtctcgggttaaataaatgttggaggttttctcgagttggctaggactcgctcactcggatccggtgtatttcgctcgaggcttaactgattcgtttgttttcttcgtctgatcttaacgttttaaacaagttagatgatctgggatggcgtctttgttgggagcggataccangcactagtcaacgtgtctgtttgctagtggctaacatcttcctgaagagcaagaggtgtggttttgatgggtattggtggcggagctgttcttaccggcacaaatttctaggatttggcgaatttctgggtataagttatgtgttggtaagggttactactgtgttctct

SEQ ID NO: 13152 - DNA, 376 bp, Gossypium hirsutum
  unsure (1)..(376): unsure at all n locations; Clone ID: LIB3135-054-Q1-K1-D3
cttacaatcaagttgcaaacctggaagcattatattccacactgcctctgctgtggataaagaggtttcatacaacttgaagagtggttggttggaaaaatgggtcattcttcgtggcagcgtctaagctgttggccgactatcaaggtgttgttattaaaatcgagactatgttttgagtctcgacttctatactgatgaagaagctgctgcaagaagatgcctatagttggtgaagtgattgagtattttgattctatgaatctaacgctatgacctaaaatggaaactctttgtaattattttattaaaccacttggacactatcttaacttgcaagtattaggctttctgatgggctacacnacaaaggaaa

SEQ ID NO: 13153 - DNA, 432 bp, Gossypium hirsutum
  Clone ID: LIB3135-054-Q1-K1-D4
ggaagctggagtgatctccaagccatctctcttcagtcttttaagctccgcttttgctaaaatcaaatcagtttctcccctaaatttactgaaattttatagcaagactccttatttctccgatgtcgatcttcgaatacaacgggagtgccctaatagccatggtaggcaagaactgcttcgccattgccagcgatcggagactcggagttcaactccaaactatcgccaccgatttccagaggatttataaagtccacgatcgcctcttcctcggtctctccggcctcgccaccgatgctcaaaccttgtatcaaaggcttgtctttcggcacaaactgtatcagctaagagaagaaagagacatgaaacctgagacttttgctaaccttgtttctgcgattctttacgagaaaaggtttggtccatact

SEQ ID NO: 13154 - DNA, 214 bp, Gossypium hirsutum
  Clone ID: LIB3135-054-Q1-K1-D5
ccggggtggaaatacacggtcggcggaagcggtctgtgttgcattcgcaaaaatatgcgaaaacttttttagaaacttaacatgggtgccttttggggagactacgcggataaagggatggcttatgctgatttaaggccaacctggccttgattggatgaatgacacaagccaatccgcatgaacatgtttaatatgccaacccataatgtgt

SEQ ID NO: 13155 - DNA, 187 bp, Gossypium hirsutum
  Clone ID: LIB3135-054-Q1-K1-D6
tcgctcactcaccaacctttttacgggttttctctttatcgccttttctttcgcttctactgcgggcacatgtggggctcccttgtatttacagggggttttttctcagactaaataaatgtacgacgtttacttgagatggctacgacatcctcactatcatcctgggaattttgatctagggtta

SEQ ID NO: 13156 - DNA, 377 bp, Gossypium hirsutum
  Clone ID: LIB3135-054-Q1-K1-D8
cccacgcgtacggacacgcgttcgcccacgcgtacgatgagagcaaggttgggcacatttttgtggttgggaactttggagaactgtttgagatagttctatattttcttgggctggttgacaagttcttctatctctcaggcatatatgacatggagctcactatttgtgatgctgttatggagaactctttgttagtggctattggacatattgagatagatctatcagaagcactcgataaggcacctcgcccttctttttaagccattgatccatacttaagatatggacccattggagagataagacacatctttagggcttctgaaaagcgcacacctcaagggctttccctagctttgctgaagcttact

SEQ ID NO: 13157 - DNA, 334 bp, Gossypium hirsutum
  Clone ID: LIB3135-054-Q1-K1-D9
gctcgatctttaaatatttttgaagtttttcttccacagctcttgctttatccaaatccttcagaccctctaaatggggatgcagcatcattaatgatgaaggatcgaaagcaatatgatcaaaaaggaaaagaatactgtgagcgatatgcaaagaaagaagacatcacgaaatccgcagctgacaaggaaactgatgatgaggatgacatcactgatgaagatactggatctagtgatgatgaaattgctggacatgcacatccataaccaccttggaagaatctatcttttaccaattatacacttgataaaagcgatgatgaaccccctt

SEQ ID NO: 13158 - DNA, 416 bp, Gossypium hirsutum
  Clone ID: LIB3135-054-Q1-K1-E1
cccacgcgtccggaaaaatggaggtgctgacatgaatcccgtggatatcgaatatgtcaagagatgtacgtttttggttgcatctgggatttttgatggatatgatgtacctcatcagccatcgaatataaatattcgttctaagaagctcttctgttttctgatggttgttgatgaagtatctctcaaatttattaaagaaaatgtgaccgtcaggaaggataaagataaggggatgtgggtaggcttatggcgtcttatcccattgaagcatcaaccttatgatgagcccagaaggaatgggaaggtttccaagattttaacccacaggttattcccccaagcacagtacagcatttggattgatggtaaaatggagctgatagttgatccattgcttatttcttgaaagatac

SEQ ID NO: 13159 - DNA, 323 bp, Gossypium hirsutum
  Clone ID: LIB3135-054-Q1-K1-E10
caaattttatgtaaagcttgaatggatctatttcattctcagaaacctacggaaaccccggtcttgcattatctgaagattttgaaataaaggagattgaggtacgcccggctatctttctctttctccattctacaaccatgtcactgttttggttgcttcatgaattcatatttggcttgtttataatcttatcatatagatgcttcattaacttaatccttatatcacagatgtggggctttgtatatggatcaaaatatgatgaaatacttggtttaagtagaacagaaatgcctggaatttgcccgtgggtaaacacc

SEQ ID NO: 13160 - DNA, 288 bp, Gossypium hirsutum
  Clone ID: LIB3135-054-Q1-K1-E11
accacgcgtccgccactcgtccgtccacgcgttcgatagtccctaaatccccaggattgttcttcaacgaaaacatgtcgcccttgttgatgaagatggctgagaggtggccctggagttactctcatgtcggagttgaactgcctttggatcatataaactcggcatttctaaaaaagactggcgacctcagttgcgcacataacatggaagctcttttgcatatacttgacgggtaccatgcaaaaggtcatacattcgtgctttccaatggaaaggaccctgctt

SEQ ID NO: 13161 - DNA, 296 bp, Gossypium hirsutum
  Clone ID: LIB3135-054-Q1-K1-E12
gcggcggcgccctttcttttttttttttttttttttttttttttttttttttttttttttgttttctggaagatattggcatgttttgctgataaaaaaaagctttaatccatagataatgaaagcctccaattatgaaaattttttgttgccctaacaacacctgaaaaaaaaaacccaacccctttaacccattacacaaatcaaatttaaaattctaaattccctttccccttatttaagcatttgcatattgcccacaccttgatgataataagatggtggctgacaagctt

SEQ ID NO: 13162 - DNA, 393 bp, Gossypium hirsutum
  Clone ID: LIB3135-054-Q1-K1-E2
gaaaaaagcggtcagacaaagagagaaacgggtagacagagagagcaacaatggcaacgttggccactttgggaactacttcactccttcggtttcagaaagcagaccccctaacggcaagcccatctccacatcttctgggttctctctcttctcaactcagtggcatcaaactctcctgcaacctccctgacgtggcacctctcaaatccatatcctcacctttcactccttctctccagcctgttgctcgcagagtatgccctttcactggaaagaaggcaaacaaagctaacaaagtatccttctcgaaccacaagacaaagaaattgcagtttgtcaatctccaatacaagaaagtttggtgggaagctggtaaacgctatgtaaaac

SEQ ID NO: 13163 - DNA, 430 bp, Gossypium hirsutum
  Clone ID: LIB3135-054-Q1-K1-E3
ggcgaccattgcaactgcttgtattttctaaaatgggatttttcccacttgtgtcgctacttgccataggtgctgcatttgtccatgtttcaagctccagtattttgaagattatgtgcaacaaaagagcttcttcaaataacctaccatcagttacgggatttcctgtgagtgttctgacgcttcagtcagttttagcatgtggaacagtggctttctatgcactggctgagggccttgcgctgggagtggcggcaccaaaagcttacggacttggccggcacatggtcgtccctgtctcccttcatggaattcctcgtggtgcagcagtgtccagctgcatctttggagctactgaaagttggcatggatctctagcagcagctgctctcattgcgtttgttggtccaatatctgcaatcggagcaat

SEQ ID NO: 13164 - DNA, 304 bp, Gossypium hirsutum
  Clone ID: LIB3135-054-Q1-K1-E4
cggacgcgtgggcaaatgtttggggggaggtcgcttagactgctgcaagactatcgatctttgggaaaaatgccgatatagattctttcactaaagctttacatcgaattgaaaagattttgtacagacattataatttggatttatatgaattggaactgttttgaaattaaaaagggtttttacctttcaaaaaaaaaaaaataaaaacgccttggtataaaaaagaaaaagggactagagctgggaaatgggagaattaaaaacttaaagacttaacacggaaaatgaacccaacgggggg

SEQ ID NO: 13165 - DNA, 227 bp, Gossypium hirsutum
  Clone ID: LIB3135-054-Q1-K1-E5
tcggatagaacaggtgatcttacattccctggtttccaatcaaaaggataacatgcgcttagttggcgggtcctttacccctacttgcatcttgaatcataatcctagattcatcgacaactctgctgtgcttaattccacaggcattgatgaaattattagcatttgcttggatgacacataaatgattaatgcgtgggtcaaaacttacccagagaacaaatatg

SEQ ID NO: 13166 - DNA, 438 bp, Gossypium hirsutum
  Clone ID: LIB3135-054-Q1-K1-E6
cccacgcgtccggaaaaatggaagagctgactttcatcccgtggatactgagtctgtcaagggatgtaagttttggtttgcatttacgatctttgatagatatgatgaacctcactatccatcgaatataaatattcgttctaagaacctctgacgctatctgatggtggcagatcaactatctctaaaacttattaaagaaaatgtgaccgctttgaaggatataaatcagggtatgtgggcaggcttatggcgtcttatcccattgaagcatcaacctgctgatgagcctagaatgactgagcaggaacccacaattttgaccatcaggttatttctccacgcacagcacatgctgaagattgatcgtcacatggaaacgatacttgatccactgattattcttgaaacatacttatggagcgatatgcatacttt

SEQ ID NO: 13167 - DNA, 419 bp, Gossypium hirsutum
  Clone ID: LIB3135-054-Q1-K1-E7
catggctactgcagaggttgtaacagctcatactgcaatccatgaggagaaacctgaagaagtggtcaaggttgaagaaattgcaacagaagaggtagtggctgttgctcctgcaacagaacctgttgctgaagaaccaaaggaagcagtgcctgaagcagcatccgaagaaccccaggctccagaaactgaagccacagttgaaactgaatcaaaggaggtggttgaagagcccaaggctgtgactgatgagccagaacttgagaaaaaagaagaagagactcctgaggaaacagtagcagagccagttgcggaggagtccaaggagactactgagccaaccgttgaagaaaccaaagaaagcacagagtctacagaagcagcagtagctgcagcagcagaagaagaagtaaaagcag

SEQ ID NO: 13168 - DNA, 360 bp, Gossypium hirsutum
  Clone ID: LIB3135-054-Q1-K1-E9
ttcccaaacatgtctaaagcctgcttgcttttgtttctcgttggagtggtggtttttatcatcactccttctctagctaaccaacatcatgataatgagcttcccaaggggaagcctttcccaggtgagaagcaaccacaacacaagccattccctgaacaccgaccgccaatacacagtggacctggcggtaaaggacaggagccaccacatggggaaaaacctcctcatagaaacttattgagtgtggaagttgagggcacacataaacctccacgacattcatgtggtaaaccttcaagacactcggggggtaaacctccacatgttgaggggttccctaccgataaagcacccatg

SEQ ID NO: 13169 - DNA, 439 bp, Gossypium hirsutum
  unsure (1)..(439): unsure at all n locations; Clone ID: LIB3135-054-Q1-K1-F1
ggtgaaaagaagtggcctggatggcctggagagagtgtgtttcgaatgttggttcccgcgcaaaaggtcggtggtataatcggacgaaaaggggaattcataaaaaaaatagttgaggagacgagagcacgtatcaagatacttgatggtcctccagggacgacagaaagagctgtaatggtatctgccaaggctgggaatgaggtacgagatggagaggaacgacggtgccgatgagttgttgggtgaaatctttgatgatgaagagcctgcgttggaggagattaaggaagcgtttgatgttttcgacgataacaaagatgggtttatcgatgcgacggagctgcaaagggtgctcatttgcctangcgtgaaaaggaagatggtgaccgtggatgagtgtaagaagatgataacgatggctgatacggatggagat

SEQ ID NO: 13170 - DNA, 351 bp, Gossypium hirsutum
  Clone ID: LIB3135-054-Q1-K1-F10
ggttgtttgagggatcataacattgatgaccttaaggagttaccaaaaggaaagtggttttgttgcacggattgcaatagaatccattctgctttacagaaattggtcattcgtggggaggagcagcttcctgattcatctctggctgttgtgaagaagaagcatgtagaaagtagtttagggagcaaggccaaacttgatataagatggagggttctcagcgggaaaatgacatctttagatgacaccagagtaacgctatcaaaggctgttgcgatcttccatgagcgctttgatcctataagtgactctggatcgagtagaggtgatcttatcccatcaatggtttat

SEQ ID NO: 13171 - DNA, 346 bp, Gossypium hirsutum
  Clone ID: LIB3135-054-Q1-K1-F11
gtgacaagcactctgccatagaaggaagtcggaaactagagcacagtgaggagttgaagtgcctagataaagctgccatagtcactgatgttgaaaccaaaagtggggacttctcaaatccttggaggctttgcactgtaacacaagtggaggaattgaaaatcttgatccgcatgtttcccatatgggttactggaattgttttctctgctgtatatgctcaaatgtcaactatgtttgtggaacaagggatgatgatggacacaaaaattggttctttcactattcctcctgcttttctctcaacttttgaaggtattagtgttattttttggggtcccatcta

SEQ ID NO: 13172 - DNA, 393 bp, Gossypium hirsutum
  Clone ID: LIB3135-054-Q1-K1-F12
cttctatctttattttctcgcctgtgacgagaagccgacgctaccatggttcacgtcagtttctaccgcaactatgggaagacctttaagaagccacgacgtccgtatgagaaggaacgattggatgctgagttgaggcttgtaggagagtatgggctccgatgtaagagggagctgtggagggttcagtatgctttgagccgcatccgtaatgctgctagggaccttctcactcttgatgagaagaaccctcgtcgtatttttgaaggtgaagcccttcttcgtaggatgaacagatatggacttttggatgagagccagaacaagctcgattattgtgttggctttgactgttgaaaaacttccttgaacgtccgtttgcaaacgctcgtg

SEQ ID NO: 13173 - DNA, 419 bp, Gossypium hirsutum
  Clone ID: LIB3135-054-Q1-K1-F2
acgattttgataaaatttcaacagccactatacgctgtgaagactaaaatagtgcatttatattataatattgtgttaatgtcaattttgtaggtaggtttgtgtaaaacagtcatgtcaaacaaaattaagttctgcctaaagcctgaaactggtaaactgtttttaagttgtattattagttgcaaagagatcaatagcagtgatagacccagtgctagaagtggcaaaatctagaaggagaaatatatcggcattcgattagtaataatcggcttgggtttaatctatagatcaagtcgagtgtggccaatctgcccttaaggtacctttggatttcatctcacagtttccagaactgggctggacagggaaccggcttgggtattgtcttgagtatgtggttggatcagttcgat

SEQ ID NO: 13174 - DNA, 238 bp, Gossypium hirsutum
  Clone ID: LIB3135-054-Q1-K1-F3
gccatttatatttgtttgatagtgaactgtggattaatatgcctcagaatttcgttttctttttccgaaggtggtgcaatgctgaactgttcggtgtttcttaaatatgctaggcattttttccctgtactaaattatgcgtttagcaggagcaaaccatttggaaatccaacaattttatcacatgctgcggctgctatatgtgaacaaaacaaacaattaataagttcccataaag

SEQ ID NO: 13175 - DNA, 443 bp, Gossypium hirsutum
  unsure (1)..(443): unsure at all n locations; Clone ID: LIB3135-054-Q1-K1-F4
cccacgcgtccgctcagtgctcattaacaccaatttatttgccactaaaaactactcaacattatcaagcaaagccattagggtgaaacatactaattgtgattcactttcattacccctccacattgatgttgaaaacactggcaacatggatgggactcacactttgctccttttctctgaaccgcccgctgctgtaaaatggtcaccgaacaaacaattaataagtttccatagagtccatgtcattgctgggtcgaaacaacgagtgaaaatcaatgttcatgcttgcaaacaccttagtgtcgttgatgaattcgggatccgaaggattccgatgggtcaacatagtttatacattggggatctaaagcattctatttctctccaagcaaatttggagggcatcaagaattagaggataantattattggtattatta

SEQ ID NO: 13176 - DNA, 420 bp, Gossypium hirsutum
  Clone ID: LIB3135-054-Q1-K1-F5
acggaccctgatttgaaatttaaaaatgtggtacttacacctcatgttggcgcgggttcacttggttcatatggatcaatggctagggatgttgatgatgttgccttacaactatatgatggataaccactgaaagggatagagctgatgaatgaattgactcagaatcaaacctatcaatgtgagaatcaaaatataaatgacattgcatttaatgttcactacattgaccatgctggggcatacttaatctagacgtttaagcccctgaataagctaaatggaaaacgagagtgcgatatatatatacacatattgctgatatcatcctgttcagcacattgatttagattcagtattttatttgaaacttaatattcccatgattttaaatgaatatttggtttataatggggattt

SEQ ID NO: 13177 - DNA, 360 bp, Gossypium hirsutum
  Clone ID: LIB3135-054-Q1-K1-F6
ccggggtggaactacccggtcgaccgactcttatatacctttgactgaacctttttaatagccttttttttacgaacctaagccaggaaaaacatcgggctatatcacctacaaagaaaaagaaacctgaacccaaaccacccatgtatgaaccttcaaaaaagcctacaatgtacgaacctaaaccaccaaaaccaccggtttatacacctccaaagaaagaaaaaccagaacccaagccaccaatgtatgaaccttccatcaacccaccaatatatgagcccaaaccacctaagctaccagtttatgcaccaccaaaggaagaaaacgcccaataatgagaacagatgaaatggaatt

SEQ ID NO: 13178 - DNA, 353 bp, Gossypium hirsutum
  Clone ID: LIB3135-054-Q1-K1-F7
cgcacattcaaatccaccttaagacagttgggtaaacatttggcatttagtatgttttgaaggtgttgaaaattttgcagctttatgttaaacttataaaacaatcaaaataagtatttcattttgaaaaaaaaaaaaaaaaaaaaaaaaaaaaaaaaaaaaaaaaaaaaaaaaaaaaaaaaaaaaaaaaaaaaataaaaaaaaaaaaataaaaaataaaaggaaaaagaaccatacaagggcaaaactaaaaataaaaaaaaaaagcccctgggtgggctctttttaaacagagataaactttttatctccacccacaaaggtgacaagattttgttgaggaccattaaaaa

SEQ ID NO: 13179 - DNA, 152 bp, Gossypium hirsutum
  Clone ID: LIB3135-054-Q1-K1-F8
gtcacatttaaatacaacttaaacagtggttttacaacacattatggtgtgcagggcgttagatagacatcctgattttgaactaataaaactacccaataaatatttgttttgacactgggacttgactgggaaacaaactattatacttt

SEQ ID NO: 13180 - DNA, 330 bp, Gossypium hirsutum
  Clone ID: LIB3135-054-Q1-K1-G1
cccacgcgtccgggaagcttggatgaagcagaaatcacgaaatattgcaaaagaaatcttgcgagtttcaaaggacccaagaaagttttcatcacggattccgtgccgaaaacagctactggaaaaattcagagggggatagtagcagagcatttcttggctcaaacgtctgccgctaaagtacccaaatttggagcttaaattcagcattgcttgtctattgcttacgtacatatttaagcgactgcaatttattgtttggtgaaaaagggattactaaagcaccatgttacatgtaattctgattagaaattattggaaagtctacat

SEQ ID NO: 13181 - DNA, 432 bp, Gossypium hirsutum
  unsure (1)..(432): unsure at all n locations; Clone ID: LIB3135-054-Q1-K1-G2
cccacgcgtccgctttcattctctttgggttcattaagtagccacccaaaccaccatcaatttgatggctgacggtgcacgaatggagatcggatcttgctgaagaaagcctcacccacgaagatccgtgtgcgtggcgcgtggaggtgcacggcgtacagaggtgctggaggcttgaacggcgctggaggttagggctgcgacactccttactactagggtttggctatttggctaaacttangtttaggttttgggccattgggccccattgtaaatgggtatctgggtttgattttttgttattgggcccaggcatattaggcccattacagagctgttttcagcatttccacacgggctggccacacgcccatgtgccagcccgtgtcgatttcgcaactgcttccttaacacgtgaaaaacccaatt

SEQ ID NO: 13182 - DNA, 371 bp, Gossypium hirsutum
  Clone ID: LIB3135-054-Q1-K1-G3
gctcgaagcagttaattcaaggataaacgtgaatcctagcttcgaagggtttcactcaaaggatcttggatggcagccaattgatggtgctggaatgatattcggctcacaaacagcaagggaatatgctcaagggttgcaccccgaatggctgcagatgcatgtgggtggaaatttcaaaagggcgacgtaattcgtagaaaatgcttgttggcttacaatgcaacaaagaacagactatgggatgactgatttagaacaaaatacatgtgttgcaagaaatgagtttgataaatgtggactagtgtatctaaatttgtaatatcatatacatcttgtaaaaaatgcacatctaatctcttggtatatgt

SEQ ID NO: 13183 - DNA, 423 bp, Gossypium hirsutum
  Clone ID: LIB3135-054-Q1-K1-G4
gtttaacactctcaatgagtaaaataaccatcatataaaacttaactttacttaaatcggctgggttccatgctttttttctctctttgattcatccatgctcgacttccaatcaagcttgcctgagaatattcaagaagatttagatcaatttgatcatttgcttaattttactcgttagaaaaaaagaaaagaaaagaaaaaggaataatctacacaaatttgtaaaaatctagaactggaaaaaatttgctttgaatataaataattcaatttatgttgagatttaattaaagatatgggtttttatatcgattagttagattcacttttaggttaaaaattaggttttagttaaatggagatttgattaacaatgatttcgattcgattttaagtgaaattcaatgtaggaatcatggg

SEQ ID NO: 13184 - DNA, 307 bp, Gossypium hirsutum
  Clone ID: LIB3135-054-Q1-K1-G5
tcacacttaaataaacccctagacaggtatgtataaatatgaacattaatgtgacatgcgggcgggaaaaattaacagctttctgtttctcaatataaaacaagcaacactcgcctgttagttcttttgattctagaaagaacttatgcataagacctgtgaacaatatttgcccttgaatacagatttattacatgatttatattcaaattactgcataatatctactataactttttacttgtgacctttttaaagatgatgaaaacattatcttttcatatgatattatatgttcgactgattt

SEQ ID NO: 13185 - DNA, 246 bp, Gossypium hirsutum
  Clone ID: LIB3135-054-Q1-K1-G6
cgctctattccatgtacacgtttctgcatcgattaattgattaaccgtagaccatgaagggctaatttcctgtgcttgaatatggttgttctcactaccaagaatactttgatacatcatatattcgtaaacatagagaattgggaaagatatcattatcctgctcggtagaaaaaaagaaaagaaaagaaaaacgatttatctacacaaatttgtgaaaatcttgaactggaaaaaatttgtttt

SEQ ID NO: 13186 - DNA, 189 bp, Gossypium hirsutum
  Clone ID: LIB3135-054-Q1-K1-G7
gcgcgctttcacccaagtacacctatgtgcatttataaatacctcacccaaaaagcgtcatagcggcattatcgggcgtagaataaagccggtctatctcccagcaatattagcacacatactttgaaacttgcactttcccccttcaattttctatgaacattttgttaaatccctctgtcaagatca

SEQ ID NO: 13187 - DNA, 265 bp, Gossypium hirsutum
  Clone ID: LIB3135-054-Q1-K1-G9
gccatgtgacgatttatacttgtctaacccctttcattatcatccaaatgagtgaaggggtttttattactgagaaaggggtagctgtgacagaaactgtggttgtgggattggctgaaagtattgcagtggctcgagtggatgcaggatgtacacatgattgaacgttgcctacataaccacaactgagattatggatcttggtgtatctccgccacttgcagactttgtgggagctgaaagggaattatggggtgagaacggt

SEQ ID NO: 13188 - DNA, 280 bp, Gossypium hirsutum
  Clone ID: LIB3135-054-Q1-K1-H1
ccatctctggcgttcttgacaggtttgccgccatgggtattgacacccctggagtcgttgccctcctaggagctcacagtgtcggcagaactcactgtgtgaagctggtgcatcgtttgtacccagaggttgaccctgccctcaaccccgaccatgttccacacatactccataaatgccctgatcagatcccagaccccaaggccgtccagtatgtgagaaacgaccgtgggacacccatggttgtggataacaactactacaggaacatactgggaca

SEQ ID NO: 13189 - DNA, 318 bp, Gossypium hirsutum
  unsure (1)..(318): unsure at all n locations; Clone ID: LIB3135-054-Q1-K1-H2
ggaggtgtgacttgcagaatgaagactttttggctggttttaataatggaccatcatagttttacaaggatgtctgttttttgagtccaattcactggaaaaaaaataatttttgggtacattttgttcttaagataaaattggaaaaaaagttggaaactttagtaattgttttgtactatgtaaagagtactacactattgtctttgtaaactctattcatttacattagccaaaaaactttgcagttgttgatcgnaaaaaaaaaaaaaaaaaaaaaaaaaaaaaaaaaaaaaaaaaaaaaaaaaaaaaaanaaa

SEQ ID NO: 13190 - DNA, 162 bp, Gossypium hirsutum
  Clone ID: LIB3135-054-Q1-K1-H3
accacgcgtgcgttcatgcattctaggtgatccatgaaaggaagaccatataacttaatgaagggctaacagaggtgaaacaccgacttgcgactcatctcttattacgatgatcgccgacgagcacacgtggtgtggttttctaaacacgtggagagataa

SEQ ID NO: 13191 - DNA, 420 bp, Gossypium hirsutum
  Clone ID: LIB3135-054-Q1-K1-H4
cccacgcgtccggtcgctcttagccttttactcttttactttactccttggagtactctcgacaatataacccccccccccccaaccctttttttttcctttaattcaaagccacaaagccaactcaaaacccacaaaagccaaagcctaggtacacagaaactacaaaaagaaatagagaaagaaggtatggaagtaggggtgaagatggggatgaaaggaggaggagatgaagtgggaggtaaggagaaggagaaaatggggtatgaagagacagagctgaggctagggttgcctggtgatggtgaggttgtaaggaagagagacttctcccacactgttgatttgaagcttaaccttatttccacctctccaactgatgacaaggacaaaaatattggcccttctcaccttgatcct

SEQ ID NO: 13192 - DNA, 311 bp, Gossypium hirsutum
  Clone ID: LIB3135-054-Q1-K1-H5
gcgcttttaacctttttttttttcttccttaaatttaatcctttaaggctattgggcatttttgagtcgactctgaagcttttagcactggctttaacttctctcttcagatccaccgccgctgcctccgcctctctaatcgaggccggctccgatcggtctgacctatatctctcaccctatgatcgcctcaaagtttccagcctttgttataaacgaaatttcaactcctattgtgttgcctatctttcaactaaagctcattcattacaaaaatgcatctcatggagcatgcaacccatcaaagctac

SEQ ID NO: 13193 - DNA, 216 bp, Gossypium hirsutum
  Clone ID: LIB3135-054-Q1-K1-H6
atgaacactttctggctggctttattaatggaccatcatacggggacaaagatgggcggtttttgagtccaatttactggaaaaaaaaaaagttttggggacaacttgaacttaacataaacttggaactaaaggtggaaactttacgaaatgatttgtactatttaaagagtgctacacttttggcttttggaactctattcatttgccttaacc

SEQ ID NO: 13194 - DNA, 174 bp, Gossypium hirsutum
  Clone ID: LIB3135-054-Q1-K1-H8
ggacgcgtacggtggatcttaacatttactcttgacttttttacgggtagtactctcgggaatataacccccccccccccaaccctttttttttgctttaattcaaaggcacgaagccaactcaaaacccacaaaagccaaagcctaggggcacagaaactacgaaaagaaatg

SEQ ID NO: 13195 - DNA, 118 bp, Gossypium hirsutum
  Clone ID: LIB3135-055-Q1-K1-A1
ctcctacttaaaagcaaagtccaggagagttgcgtttgcacaaagatatttttgagcttaacctacccaaatcttgtgctataacattttcaaatggaaaggataacccgatgaattt

SEQ ID NO: 13196 - DNA, 449 bp, Gossypium hirsutum
  Clone ID: LIB3135-055-Q1-K1-A10
cccacgcgttcggtgacctttgtcccctctggtctgaccactgaagttaagtctgttgagatgcaccatgaagccctctctgaggctctccctggtgacaatgttggattcaatgtcaagaacgttgctgttaaggatctcaagcgtggcttcgttgcttcaaactctaaggatgatcctgcaaaggaggctgccagcttcacctctcacgtcatcatcatgaaccaccctgtgcagattggaaacggatatgccccagtccttgactgccatacctcccacattgctgtgaaactttccgaattgctgaccaagatcgacaggcgatctggaaaggagcttgagaaggagcccaacttcttgaagaatggtgatgcagggatgataaagatgggtcccaccaagcctatggttgtggagactttctctgagtacccaccacttggacg

SEQ ID NO: 13197 - DNA, 321 bp, Gossypium hirsutum
  Clone ID: LIB3135-055-Q1-K1-A11
tgggatgtgaatgtgctgttatgatgctctactctgtattgcatcttatagttccagcaattttgttgtcaaaatagtgatatgtataacacatatatattagtaacttttgaacgttacgttcatatggaagacgccatttttgtagatactcttgaaaagatatagatcatggttaaggtgtttcagtggtccaaaatacgatctggcaatggctcatctctttctttggtgtggaaagagccctttgctgccttattatcagccatggatttctcttggaatattatatgaataagatggttggacgaataagtaaat

SEQ ID NO: 13198 - DNA, 450 bp, Gossypium hirsutum
  Clone ID: LIB3135-055-Q1-K1-A12
ctcatgacccgtttaacctacacccttgacgaaatcgagggccctttcgaggtatctaccgatggcaccctcaaattcgaggagaaagatgggattgattatgctgccgtcacagttcagcttcctggtggtgagcgtgtgcctttcctgttcaccatcaagcaattggttgcatcaggcaaacctgatagctttggaggagacttccttgtaccatcctaccgtggctcatctttcttggacccaaagggaaggggtggctcaaccggttacgataatgcagtggccttgcctgctggaggaagaggggatgaggaagagctagccaaggagaacaacaagagtgctgcatcttcatcagggaaaatcaccttgagcgtcacaaagagcaagccggagaccggtgaagttatcggtgtgttcgagagccttcagccatctgacactgac

SEQ ID NO: 13199 - DNA, 408 bp, Gossypium hirsutum
  Clone ID: LIB3135-055-Q1-K1-A2
caacattgatggaatttccaaccatgattcacgccttctacatattcccagaattgcaagaatctggccagttaatattgcagatcaaagatttcatgaacaactgttgcagtaaaccccaactcccacaacaaaattgaccatttcagaaggtattagtatccacatatatatatttaaaaaaatgtgtgagttgagaggtgaaagtaatagttcttattaggctgtctggttatctcaatttgcaggcactaagatattcttagcaaccttcatttcccaaatccacttggtaatttgctttgccttttatttttatttggttgaatggaagatttttatagaatttggtgaaatttttaataacataaattaatttcacttgaaaaaaaaaaaaaaagatgatat

SEQ ID NO: 13200 - DNA, 246 bp, Gossypium hirsutum
  Clone ID: LIB3135-055-Q1-K1-A3
gtttgtttttggccactttcgaattccttgtttatatgcaattgttgtatatgatttaatgttgcagcaaagatgatctgcatctctatttatgaacaaatattgtatttgttaattcaacatcatctaatttgtacttttcatgcgacttcaaactttattacaaatcgattttgaatatcttaaacccaaaagaaaaagtattataataaatataaaaattgaaaaagagatattaaaaaataa

SEQ ID NO: 13201 - DNA, 63 bp, Gossypium hirsutum
  unsure (1)..(63): unsure at all n locations; Clone ID: LIB3135-055-Q1-K1-A4
gccctttttattanaaatngntnaaaattatttaaaaaggaatttaaaaaaattttaaggaac

SEQ ID NO: 13202 - DNA, 361 bp, Gossypium hirsutum
  Clone ID: LIB3135-055-Q1-K1-A5
cccaattttagtggcaacagatgtggccgctcgtggtcttgatataccccatgtagctcacgtggtcaactttgatctccctaatgacattgatgattacgtccatcggattggaaggacagggcgtgccggtaaaacaggattggcaactgctttctttaacgaaggcaatttgtcaatggcaaggccactagctgagctaatgcaagaagcaaatcaagaggtacctgcatggcttacccgatatgcatcccgggctccttacggtggtaataaaaaccgacgatatggaggaggaggagggcgttttggtgggcgtgatttcagaaaggagggttcagttggtaggaacctacatcac

SEQ ID NO: 13203 - DNA, 438 bp, Gossypium hirsutum
  Clone ID: LIB3135-055-Q1-K1-A6
gatacttgatatgctattagcgaaggatgaaccgaagaaaatctgctcacaaattggtctatgcttatttgatggaactcaaggtgtaagtatggggattgaaagcattgtgaatgagaatgctggaaaagcctctggcagtttacgcgatgctatgtgttctacatgtgagatggcagttatatggatgcaaaaccagcttaagcagaaccagacagaggaccatataattgactatgtcaatgagctctgtgatcgattgcctagtccaatgggagaatcaagtattgactgtaaaagtctatcttctatgcccagcgtctctttcacaattgctggaaagttatttgagctccgtcctgagcagtatgtcatgaaagtgggcgagggagatggggctcaatgcattagtggattcactgctctggatgtaccacc

SEQ ID NO: 13204 - DNA, 382 bp, Gossypium hirsutum
  Clone ID: LIB3135-055-Q1-K1-A7
gaatttccttgatacagctgaagctgaagtgaggtcacttatctccttgtattctgaagtgggtagaagtgcggattcattatcccaatacttcggagaggatcctggacgatgtccttttgaacaagtgactcacatattggttgttttcgttaagatgtttaaaaagtcgcgagaggagaacgagaagctggctgatgctgagaaaaagaaattggagaaggaagccatcaaagaacgagcagcagcaaatgtaactgttaagaaggatgggaccgatacaaatgagccgaatcttacttctcatatcctgaattctcaccttctgaaacacgctccctaatagtaatgaagcttttgcaatcaagcaacaatggaagct

SEQ ID NO: 13205 - DNA, 391 bp, Gossypium hirsutum
  unsure (1)..(391): unsure at all n locations; Clone ID: LIB3135-055-Q1-K1-A9
ctgtggtattggtgaagtatttgaaatgcagaacaatggctggagggttgtgccatgccttcatgatctggttttgttgnagctttgagcttgggatatggtagcaacttgtgatgctgcatgttgttgtttgatagttttagtaccgatggtggtcgtcaaggatattctcaagtgttctgtctagaatatcttaaatctttatgtatttagcttcactgtttattttgttgaggcacaatgttccaaatttatcaatgggattgctgctgctttttgaataatggagacacaggtacttcaaatgaactaattgaataattcgactgattatttggtttaaatttgtttaaattaaaacttaaatgtgaaggttgtggatttaattttg

SEQ ID NO: 13206 - DNA, 409 bp, Gossypium hirsutum
  Clone ID: LIB3135-055-Q1-K1-B1
accaaagttattgctgatggcggttatgagaagatctttcggacaacatttgagactgttcctgaggaactgcttctgaagacatatgcttgctacttgtccacctccgctggtcctgttattggagttttatatatgtcaacccataagcttggtttttgcagagacagacctctggcttatcaagttggtgatcagactcaatatagctattataaggtggttattccattacaccagctgagggcagtgaattcatcagctagcaaagccaacccagctgagaaatacatccagattatatcggttgacaaccatgaattctggttcatggggttcgtacactacgacagcgcagttaaaaatcttcaaagagcattgcagtcccgtggctcatgatgtgatgtta

SEQ ID NO: 13207 - DNA, 354 bp, Gossypium hirsutum
  Clone ID: LIB3135-055-Q1-K1-B10
gagaatcgccctacatttccacttccttcaacccaaggtgaagtccgagttatagtgcttggagaccctccaccgcttctgctgcaaaggcagatgcggcgtcaaagtttattttgagcctcgttccctctggagcaacacatcttacaaaatagatgcgtttttcagtagggcactctcggaacaagtgttccctcgtttccgcctcatgttggcaccagtgacaagtagcagaaccaattaatcttctgtagttaagattactgaaagtacgcaaaaatttttgtcaaaagcgtcatattgtaatcttactttagagggaagactagattcacattttttggaaaattgtta

SEQ ID NO: 13208 - DNA, 412 bp, Gossypium hirsutum
  Clone ID: LIB3135-055-Q1-K1-B11
tgcattgctgctgcaacaagatggatgccactacccctaaatactcgaaggctaggtatgatgaaatcgggaacgaagtctcttcctacttgaagaacgtgggatacaaccctgacacgattccatttgctcccatctctggttttgagggtgacaacatgattgagaggtctaccaacttggactggtacaaaggccctactcttcttgaggctctcgaccacatcaatgagcccacgaggccttcagacaagcctttacgtctcccacttcaggatgtgtacaagactggtggcataggaactgtaccagttggtcgtgatgaaaccggtgtctacaaacctgttatggttgcgacatttggccctattggtctgacaaccgaagataaaccaattgagatgcaccatga

SEQ ID NO: 13209 - DNA, 290 bp, Gossypium hirsutum
  Clone ID: LIB3135-055-Q1-K1-B12
cgctttgctgctgcaacaaaatgtatgccactacccctaaatgctctaaaggttggtatggggaaattgtaaacgacatctcttcctacttgaagaacgtgtgcttcagccctgacaagattacatttgctcccatctctgtttttgatggtgacaacatgatgcataggtctaccatcttggactggtacagaggccctacactgctcgaagctcttgaccacatcaatgagcccaaaaagccttcagacaagccttttcggctcccacttcatgatgtgtacaagatt

SEQ ID NO: 13210 - DNA, 419 bp, Gossypium hirsutum
  unsure (1)..(419): unsure at all n locations; Clone ID: LIB3135-055-Q1-K1-B2
ggccattgatcctcttcaacttgctcagcttggaaaaaggttagatgagtatgaagaagattacgatgaggaagggtagggctaagtagttagggggcaaggctcttaagaaagttagtgttccacatcagattagaactcaagtagaaaggtcaagaaaaggcaaatgtcgaaatgacctcattggaatatggaagtatatcctatgtacgtctctctctctctctgtctggttatccttgctaacaaaactttaaaatggtagctttccacaccaatgaaacacctgtcttggaacttgcttcttactcaacgaaagaacatggctttttaatgtaataaaattgccctcagaaaaactatgttgaactattgatcccncnnaaaaaannnnnnnaaaaataaattaaataaaataa

SEQ ID NO: 13211 - DNA, 440 bp, Gossypium hirsutum
  Clone ID: LIB3135-055-Q1-K1-B4
cccacgcgtcctgtacatcgtggcaaagaatgtcagactgcgtaccttgctaaagtcccggcgttggctcaacgtctttatcttcgctctcatgtccattgtagcaacgattgcatctctgaggctcatagctggggattcccaagaataccatgtgtgtgctgctgtgtgatatctacaagggctgttaaaaaggcctaaaataagcagaaatccgattcgtatttaaccttcgctttgggtttcgcttataataataatatcaatgttaggtatttattcgcgcctcggttcataactttaaaaaaaaaagagatccccacttttttttaaaacctgatcagaaattagccttaccgaacccaattttattgtaaatttaatttagctagcggttaaatcctgttgggttaaaaaaaaataaatattttttattttct

SEQ ID NO: 13212 - DNA, 410 bp, Gossypium hirsutum
  Clone ID: LIB3135-055-Q1-K1-B5
gcaaataatggaaaatcttgcaaatcaacttcgagagatacgacagttatcagaacccgggaaggctttgcaacaggcctctttgccacctccatcctctaaggtcaagtcaaagaaaagatttctacaaggtgctcctttatgagcaatgagaagcatttaagagagatgatggtacttttgaatttcgataaacaagatgagctacataatttgattcattggcttcgcttggtgtcagctgatatcttttaaaggcttcaattgcaactttcgacttcacaagttcctcaaagaaatgagcttctggtgatcacactctctgtaactaccacttgggcttacagattacgggttttgagtgcatttgaatggccattcgctgacgttattatatgtagttatatctt

SEQ ID NO: 13213 - DNA, 451 bp, Gossypium hirsutum
  Clone ID: LIB3135-055-Q1-K1-B6
ctcaattacacccaaacaagcaaagaagtccaagatagatatcatgggccgtggagttagcagcggtgggggacagagttctttgggttacctttttgggagtggagaatcccccaaacccaccccgaaacatgtcagtcctagcactggcaccgtcaatgaagttcctcagacacagaatgaggttgtcaaggaaaccccaccaccagctgttgtccctaaggatattcctgcaggcattcctgggaacaatgcaaacaattatttccgtgctgatggccagaactgtggcaactttcttacgtatcatgctcacattcagatgatgttaacaaagctgtcacatagaaacattgatgaagaattgttttatacatgatttatctgaaggatcggcctacaacaaaggttcatgcagcacctggcggaggatcttccctggaataccttt

SEQ ID NO: 13214 - DNA, 213 bp, Gossypium hirsutum
  Clone ID: LIB3135-055-Q1-K1-B7
ccaaaaaagagagcaaggaccaaaggggcaggagagaagcgggacagaaagcgagacgcaaacggacaaaaagagaagaaagcccgaaaaaaagaccagagaaagacaggcgaaacaaaggaaaggaaaaagaagaaaagaacacacaaaaaaaggggcgaaagggaaccaaaacaaaagacgggggagaaaaaggagaaaaccgaaggaaga

SEQ ID NO: 13215 - DNA, 449 bp, Gossypium hirsutum
  Clone ID: LIB3135-055-Q1-K1-B8
gtgataaccatcgagaactcacgttcagatgaaaagctcctttctgtattccgggaaggagtgaagtatggtgctggaatcggccctggtgtctatgacatccactctcccagaataccatcaaccgaagagattgctgaccgaattaacaagatgcttgctgtgcttgagacaaacatcttgtgggttaacccagactgtggtctcaagactcgcaagtatgccgaggtgaagccagccctgaacaacatggttgcagctgccaagctgctccgcacccaacttgcgagtgccaagtgagaggcatatccaaggtcggacatcatcctttatatcgaaaatgatccaaaggaaatttggcttaaatcatttgaataactgtgtgtggaaagatttgtaagcgtatcatatgcccctctttgagggcaaatggtttccctttctttttt

SEQ ID NO: 13216 - DNA, 455 bp, Gossypium hirsutum
  Clone ID: LIB3135-055-Q1-K1-B9
cgcaccatgtgcaccatacttgctatgacaagatacaaggatgcgatttacatgaaggtgaatgggggaaagtctgtaccattgtccattggagttatgtgcatgatggaaaggctaaaaaggcaaaggaagtagtggaagcagtagaccctgataagaatttggtcactttcagagtgatcgaaggagatctaatggaagagtataagagctttgtaatcacgattcaagtttcgcccaagagcgagggtagtggcagcgtagtgcactgtactttggaatactagaagctgcacggtgggattgatcatcctgagactctgctgcacttcgttcaagatgtatctaaagacattgacggccacctcacccaagcaagttaagcagtatcacatgatgctatcgttgccgatacttgaagcactattcatctatttaatgaataaagtgacaac

SEQ ID NO: 13217 - DNA, 421 bp, Gossypium hirsutum
  Clone ID: LIB3135-055-Q1-K1-C1
caaggctagcagtgtggaggagattgatgaggagaggcttgatagggtgtttaggaccaacatctattcccaattcttcctgtccaggcatgctctgaagtacatgaaagaaggcagctccataatcaatactacatccgtaaatgcatataaagggaatgacaagctacttgattacacagcaaccaagggtgcaattgtggctttcactagaggcctttcacaacagctggtgaaccgaggcgtacgtgtgaataccgtagcacccgggcccatatggactccattgataccagcatcatttgatgaagaagaaaccgctcagtttggagctcaagttccaatgaaaagacctgggcagcccagcgaggttgcaccatgctttgtgttccttgcatgtaaccactgctccttctacatg

SEQ ID NO: 13218 - DNA, 441 bp, Gossypium hirsutum
  Clone ID: LIB3135-055-Q1-K1-C10
gggaatgctggctctgcgattggaatactatcgaaggatggtgtcgtcttggttggtgaaaagaaagttacttccaagcttcttcaaacctccacatttacggaaaagatgtccaagatggatgatcatgttgcttgtgccgtggcgggaataatgtctgatgcaaatatcctaatcaacactgctagggtgcaagctcaacgatacacatatgcttaccaagagccaatgcccgttgaacagttggttcaatctctctgtgatacaaagcagggttatacccagtttggtggtctccgcccattcggtgtttcatttctttttgcaggatgggacaagaactatggattccaactttacatgagtgatcctagtggtaactacagtggatggaaagctgcagctattggtgcaaataatcaagcagctcagtcaatgttg

SEQ ID NO: 13219 - DNA, 255 bp, Gossypium hirsutum
  Clone ID: LIB3135-055-Q1-K1-C11
cccacgcgtccgggcatttttgccagatgacatcaatgattgtagatttaatccaccgctccattactgccctggccttgaatgggcatatgaggagatgaagcgtcttcaaagagatggctcttcttcagcaggggagacatcttatagctctgaaaattgatattcaatcatatcaaaccgctcttgtttgttcctcctcccgtgtttggtgcttcaatttaatctctttaataaacactagtgggcttgtgt

SEQ ID NO: 13220 - DNA, 309 bp, Gossypium hirsutum
  Clone ID: LIB3135-055-Q1-K1-C12
gccggtgtcattgtgaatccaaaaggagaaatgaaaggttctgctataactggtccaattgggaaggagtgtgctgatctttggccaaggattgcaagtgcagccaatgctattgtttaggaagtcaaaatctgtgctttggactataatattatagtttgctgcttcaatattttgttgtatttctttttggatttgaagaaatgtactttatggacaggttttccgatataagagaagaaaatttttgttggcgtaaaaaataaatatgaagatttttgtataaattcaaaaaaaaataaagggtgg

SEQ ID NO: 13221 - DNA, 397 bp, Gossypium hirsutum
  Clone ID: LIB3135-055-Q1-K1-C2
tgtgccaccgtcagcgtactatcattcgggtggttggaggctaaatcctaatttatacgaggaaggcaaggtgtgccttagccttctaaacacatggacaggcaagggaaacgaagtttgggatccatcgtcttcaagcatccttcaagtcctagtttcactgcaagggttagtgctaaatgctaagccatatttcaacgaagctgggtatgataagcacgttgggacagccgaaggagagaaaaattcgttggcgtacaacgagaatactttcttactcaactgcaagtcaatgatgtatctaatgcggaagcccccgaaagactttgaacaacttatcaaagagcatttcagacaacgcgggtattacatacttaaagcctgtgatgcatacatg

SEQ ID NO: 13222 - DNA, 418 bp, Gossypium hirsutum
  Clone ID: LIB3135-055-Q1-K1-C3
agcaaagcacatattttccaacaggtaaacaaaattaattattcaataaataaaaaccctaagtaattttggtggaaatgtcgggtaaaggagcgaaagggttgattacggctggcaaatccgccaaagacaaagataaggacaagaagaaacccatctctcgctcatctcgtgctggtctccagttcccggtgggtcgtgtccaccgtctgttgaagacaagagttaatgcacatggaagggttggagcaacagctgctgtatatactgctgccatactggagtacctgactgcagaggtgctagaactggcaggtaacgcaagcaaggatctgaaggttaagcgtataacgcctaggcatttgcagcttgcaattcggggtgacgaagaacttgataccttgatcaagggaaccat

SEQ ID NO: 13223 - DNA, 436 bp, Gossypium hirsutum
  unsure (1)..(436): unsure at all n locations; Clone ID: LIB3135-055-Q1-K1-C4
gaaaacatttccttagagcataaaagaaaatttacgaacatgccgggtgtcaatcctgaaattgagttcccagccattgagttccgttcatcggatttgaagcgaggaaccgaagggtggaaccgtttgtgcaagagggttcaacgggcttgtgagactttcggttgtttcgaggtggtatacgaaaaggtatccacgaaacttctagaggatgcgtttgggttgatgaaagaaatggttgagctcccagtggagacgaagcagaagaataatattcccatgccttaccatggttgggttggaccttgcaagcaggtttctgtgttgtatgaaggcttttgagttggagatgccttcaactatgactctgttaaaagttttgctcaacttatgtggnctaatggtcacccacacttttttgacactattataccct

SEQ ID NO: 13224 - DNA, 438 bp, Gossypium hirsutum
  Clone ID: LIB3135-055-Q1-K1-C5
cggacgcgtgggggcttcttggctaacaaccaagccccattgcttgtcaacttgtacccctatttcagctacgatgacaacaacgttatcgatctaccatacgcactcttcactgctccaaaccctgttgtggaggatccccccttgcggtacagtaacctgttcgataccatcttggatgcagtttactccgccctgcagaaggctggtgggggttctttggagattgtaatatcggaaagtggatggcctaccgctcgaggtacgaaaagggcagcaccaagtattgaaaattcaagaacctataaccagaacttgatcaaccacgtgaaaaaagggacgcctaagaagcctggaaagcctatataaacgtatatttttgccatgtttgatgagaataccaaaacgggcgaaggaatcgaaaaacactggggactt

SEQ ID NO: 13225 - DNA, 452 bp, Gossypium hirsutum
  Clone ID: LIB3135-055-Q1-K1-C6
cccacgcgtccgcccacgcgtccgattacgtttcataaagaaataatcatctttttttaacttatttatctttactactaaggttttttttttttttaattttatttgggtcctgctattatatattataaacaaaactcctataatggctacatcctcgggttcatcagcaacacaaatcaactcaggctcagaagaagcattaatggacgaaaggaaaaggaaacgaatgatatcgaacagggaatcagcaaggagatcaaggatgaggaaacaaaagcatttagatgatctaatgactcagttgactcagttgcagaaacaaaaccatgagatcatcacaaacataaacttcaccacacaacacctcttgaatgttgagtcagagaactcggtgcttagagctcaactcaatgaactcactcataggttacagtccttgaatgaaatca

SEQ ID NO: 13226 - DNA, 396 bp, Gossypium hirsutum
  Clone ID: LIB3135-055-Q1-K1-C7
cccggaagacccaggccgacccaggcgtccgatcacgcgtccgggaaaatgatggatactgttttctatgaataaaaccctggtgtattgtaggaggacgcagacgcatcaagggacaagagggaaatcaacgattataaaaatccagggccacaagtaaaccgccaaactgaatacatatttaggcttatttcacactggtctttcatagcattctacccttgttcactttcctgtgaagacaaaacataaagcgcattataaggagtgagcatcatcagaaggttgtactgctgtgctacggtaatacctgactgcattagggctccaactgtcaaggaacgaaagtgctgatcttaaggtgaggcggttaacgcctatgcacttgtaaattgc

SEQ ID NO: 13227 - DNA, 404 bp, Gossypium hirsutum
  Clone ID: LIB3135-055-Q1-K1-C9
cgcaccatgttcactatacttgcttttacttgattcctggttgcgatttacatgtatgggaatgggggatagtccgtaccatagtccattgtgggtgattgcatgatgtgcatgctaataaggctaaggcagtagtgcaagcagctgaccctgattagaatttggtcactctcatagtgatcgaaggagatctaatggaacatgttgagagctttggattcactatttacttttgtggcaaaagcaatggattgaggcgctcgtttgcatctggactttgaaatacaatgaagctccacggtgcggattgagcatcctgagactctgctgcaattcgttcaagatgtttataaagacatttactgccacctgacctaagcaagttaagcattatcacatgatgc

SEQ ID NO: 13228 - DNA, 454 bp, Gossypium hirsutum
  Clone ID: LIB3135-055-Q1-K1-D1
tgcgatgacatgcagagctgttgtataggtctctttttcccctgctatttgtttggaaagaatgcagaatttttgggttcgggtactctagtcggatcctgcatcacccatttcattctttgggcccttgtcaacactctctgctgcgtcttaactcaaggcttctatttggctttacctggatttggatgctttatctcttgttatccttgtggctatcggagggcacttcgctccagatacaatttgcaggaagcaccttgtggggactttgctactcactttttctgccatctttgtgccatttgtcaagagtacagggagattcgtgaaagggcagaggaccctaaaccccctgatcttaatctggctgtcgtaactgcaccagacgtccagacaatggaatcatcacatctctagtaatgaggtgctattactttggaattttgtttct

SEQ ID NO: 13229 - DNA, 452 bp, Gossypium hirsutum
  Clone ID: LIB3135-055-Q1-K1-D10
ggcacttctgaagagcagcggaagaagcattggcgagaatcaaggtccatgagttgagacagaaatcaaaaactgagcttttggctcagttgaaagatctcaaagctgagctcgctcttcttcgtgttgccaaagttaccggtggtgcacctaacaagctttccaagataaaggtggtgaggttgtcaattgctcaggtgttgacagtgatctcacagaagcagaaggctgcactgagggaggcatataagaagaagaagttcttgccccttgatctccgtccaaagaagaccagagccatcaagagaaggcttaccaagcatcaggcatcgcttgagacagaacgtgaaaagaagaaggaaatgtacttccccatgaagaagtatgccattaaggtgtaggataagatatttaagattctattttgaaatcccgttgtgtttacttatttg

SEQ ID NO: 13230 - DNA, 362 bp, Gossypium hirsutum
  unsure (1)..(362): unsure at all n locations; Clone ID: LIB3135-055-Q1-K1-D11
ggcgaaagttcaagtcatcttctctgaaggcgaatcgtcatcgaaacccagaacacaaaccaaaaggagtgtccgacagagctcgaacccagactcgtccgattcggattaactgtgggttgtctcggtttgtaagctttctttacctgtttcagtggaaatcaataggatttatcatcattccgtgtttaaatactttaaaagcaaatgaagagaatattgtttgttgtatgaatgagatcatttaatcatctcgatctttnaaaaaaaaacaattatttagtaatcaaacaagagtcttgaataaataactcttttatgcttatttggttcattatccatttaaaaaaaaaaaaataaaa

SEQ ID NO: 13231 - DNA, 108 bp, Gossypium hirsutum
  Clone ID: LIB3135-055-Q1-K1-D12
ggctatggttctataaacattgtttcaaatttctttaacattcccatccagggtactagggtagtatagtatgtgactggcttttgtcctagaaacttacgatcatga

SEQ ID NO: 13232 - DNA, 422 bp, Gossypium hirsutum
  Clone ID: LIB3135-055-Q1-K1-D2
gatggaattcacctacagaactccaatgatgtgctaattcatagcagtgatctcgcctgtggagatgactgtgtttccatacaaacaggatgctcaaatgtatacatacacaatgtgaactgtggaccagggcatggaataagcattggaagcttaggaagggataatactaaagcctgtgtctcaaacatcactgtcagggatatcgttatgcataacacaatgaatggtgtcagaattaagacatggcagggtggatcgggatctgttcagggggttctgttctcaaacattcaagtttccgaggtccaacttccaattgtgatcgatcagttctactgcgacaaaaggaaatgttcgaacgaaacagctgcagtcgctctatcaggaatcacctatgaaaaaataagaggaacatacac

SEQ ID NO: 13233 - DNA, 455 bp, Gossypium hirsutum
  Clone ID: LIB3135-055-Q1-K1-D3
gttatcgatctaccatacgcactcttcactgttccaaaccctgttgtggaggatccccccttgcggtacagtaacctgttcgatgccatcttggatgcagtttactccgccctggagaaggctggtgggggttctttggagattgtaatatcggaaagtggatggcctaccgctggaggtaggaaaagggcagcaacaagtattgaaaattcaagaacctataaccagaacttgatcaaccacgtgaaaaaagggacgcctaagaagcctggaaagcctatagaaacgtatatttttgccatgtttgatgagaataccaaaacgggcgaagaaatcgaaaaacactggggactttttcttccaaataggcagcctaaataccaaataaattttaactaaatagctgcacagaatctgtagatgaagggcatttcaaccatgctagctattctact

SEQ ID NO: 13234 - DNA, 433 bp, Gossypium hirsutum
  Clone ID: LIB3135-055-Q1-K1-D4
aaaaaaccagacatggcttccaacactgttgcatccgctgctcttcttcttaccttgaacttgttgttcttcactttggttagctctacctacgtgccttgcccaccaccaccaaagagccacaagcctacccacaaaagcccaccctcggcacctgaacagccaggcacttgccccagagatgcactgaaactaggcgtttgtgctgatttgttgggctcagtgcgcgttgttgttggaccgtcgaggaccaaatgctgctctctcatttcgggtttggctgatctcgatgctgctgtttgcctttgcactgctattaaagctaatgtgttgggggttaacctaaacgttcctgtttcattgtctttgctcctcaattcctgcgaaaagcaaatgcctgctggttacaaatgtgcttaaactcattttcact

SEQ ID NO: 13235 - DNA, 249 bp, Gossypium hirsutum
  Clone ID: LIB3135-055-Q1-K1-D5
tcgtgaattggctggaggaagcctaagaagaggaataagcgcgtcgataataatagtgttatcaacaatcaacaagttatgataattaaccttgatatcttttccttgtctttattaagctatatgtttgccgattcttttaacatttggtgtgtgcctgctcaaatatttgctgcgctcgtatgctaagcttaatggattattaacttacataaagaaatatggtgctttctgtaccataatatgggt

SEQ ID NO: 13236 - DNA, 427 bp, Gossypium hirsutum
  Clone ID: LIB3135-055-Q1-K1-D6
cccacgcgtccgcattaccaaatcaaagccaaaactagtggttgttgaacttaaaacactgttctgttctccccctttcctcttggtgtccggcttcagttccatctatttgtccatggatcttacacctcagcaacttatccagttcaacggctccgacccatccaagcccatctacgttgcaatcaatggtcgcatctacgatgtcaccgccggcaaatccttctacggtcctggtggtgcctacgccatgttcgccggcaaagatgccagcagagctcttgcaaagatgagcaagaacgaagaagatgtctgtcccaaccttgacggcctctctgaaaaggagatggatgtccttaacgattgggtcaagaaatttgaagctaagtaccctgttgtcgggcgcgtcgtctcttgaaaatttgca

SEQ ID NO: 13237 - DNA, 404 bp, Gossypium hirsutum
  Clone ID: LIB3135-055-Q1-K1-D8
gagaatcgccctccatttccacttccttcaacccaaggtgaagtccgagttatagtgcttggagaccctccaccgcttctgctgcaaaggcagatgcggcgtcaaagtttattttgagcctcgttccctctggagcaacacatcttacagaatagatccgcttttcagtagggcactctcggaacaagtgttccctcgtttccgcctcatgttggcaccagtgacaagtagcagaaccaattaatcttctgtagttaagattactgaaagtaggcaaaaatttttgccaaaagcgtcatattgtaatcttaattttagagggaagatctagattccacaactttttgtaaaaatgtttataattctcctgcacatgaatctggtcatcatgtacaagaagttta

SEQ ID NO: 13238 - DNA, 379 bp, Gossypium hirsutum
  Clone ID: LIB3135-055-Q1-K1-D9
gcgggattacccgctgagtttaagcatatcaataagcgggggaaacgaaacttaccacgagtccactattcacggctagcgaaccgggaaaagccgagcttgagaatcggacgccatcggcgtccgaattgtaatctgcagaagctgcctcagcgacggaccggtcccaagtccactgtaaaggggcgccgtagagggtgagagccccatcttgcccccaccctgtcgcaccaagaggcgctgactacgagtcgggttgattggtaatgcagccctaatcgggcggtcaattgcgtccaatgctaaatacaggcgaaagaccgatatcgaacatgcaccacgaggtgaagaatcgactatgaatccataacaaataaat

SEQ ID NO: 13239 - DNA, 383 bp, Gossypium hirsutum
  Clone ID: LIB3135-055-Q1-K1-E1
gggcctttgggggataagcttgaaaaaattagctatgagaacaagtttgaggcagctgcaggtggaggaagtatttgcaagagctcaatgaaattctacactgttggcgataatgttatcactgaagacgaaatcaaggctctcattaaagggagtgaaggagtttacaagcctgttgaagcttacctcttggctaatcccgaagcctgcaactaggatataagttgctttaaattcttatgcttgcttttaaagaggggtttgattttaatgttgtgcttttgatattttctttttcatcttaaaacctatattgtcttctggttgttcagtaagaatgatggtggtggtgatcgaactttgatcatctttgatatataatg

SEQ ID NO: 13240 - DNA, 324 bp, Gossypium hirsutum
  Clone ID: LIB3135-055-Q1-K1-E10
cccacgcgtccgctccaccatcacccccaaaaaacaaagcaaattgtagaagatggcaacacaagcacttgtatcatcgtctcttacctactcagtggagactgcaaggcagattcttggagctaaacgacaaattgggtcttcaaggaaaggatcctttgttgttaaggcagcttcgactccacccgttaagcaaggagctgatagacctttatggtttgcatctaaacaaagcctttcatacttggatggcagccttccaggtgattatggatttgaccccttgggactctcagaccctgaaggtccaagaaggttcatcga

SEQ ID NO: 13241 - DNA, 370 bp, Gossypium hirsutum
  Clone ID: LIB3135-055-Q1-K1-E11
agattctacatatatttgcagcagttgcgtatgcagagattctaattcgtgcttgtatttgaggccaaaacgaaactggaattgttttcttgaataccctgatttaattctaaacgtgtttcagtgtaaacacaaaaggggcattcttgtgtgccaaggaagcagcaaacatgctgaacccgcgcagaggaggtcggatcatactgctgtcatcatcaatggctgctgcactgaagccaggattcggtgcatacgcatcatcgaatgcagctatagaggcaatggtgaaaatactagcaaaggaactcaaaggaactggtatcactgcgaattgcgtggcaccaatgccgattgcgacagagatgttctt

SEQ ID NO: 13242 - DNA, 429 bp, Gossypium hirsutum
  Clone ID: LIB3135-055-Q1-K1-E12
ttgtgaggttgagggtccacctcatgcaagtcgctttaggtgcaaggtcactattgatgagaaaacctatgagggtttggagttttttccaacaataaaggaagctgaacatgcagctgcaagagttgcattatcatgtttggcaccagatgctattgaagaagtccaggttactgattaatggagtgtttttccctttgttgctttatgcatttatgatattttttaaaatgttcagttgtgaatctctagagcttgagttttttccctttgtatattttttttcttcctcaggaagactctagcttattcaagaaccttttgcaagaattaatgcagaaggaaggttgtcctctaccagtttacaccacaactagatctggagaagcccatgcatcaatgtttggtttcagtgttgaggtgaaaaga

SEQ ID NO: 13243 - DNA, 418 bp, Gossypium hirsutum
  Clone ID: LIB3135-055-Q1-K1-E2
cccacgcgtccgaaaaaaaaaaaaaaaagggaaagcaagtttttatggctccccaagacaaaaatgcgagcaaaaccttgaagaaagctaacggtactggaagtacgagcagccaagaggtgcatttcaggggagtaaggaagaggccatggggtaggtacgctgccgaaatcaaagatcccggcaagaaaagccgcgtttggcttggtactttcgatacggctgaggaagctgccagagcctacgacgcggcggcgcgtgagtttcgtggacctaaggctaagaccaacttccctttaccggatgaaaccaactgttacaagggccagaaccagcagagccctagccaaagcagcacggtggaggaatctggaagcccaacggtggagcgtggagtcaacaccttgtccggggcagt

SEQ ID NO: 13244 - DNA, 110 bp, Gossypium hirsutum
  Clone ID: LIB3135-055-Q1-K1-E3
tcgctgaaattaatagttgtagatgggaataatctttttctatatgtactctttgatttaaagttgaatggcttagataaatccttttgtggaaaaaaaaacacctttaa

SEQ ID NO: 13245 - DNA, 429 bp, Gossypium hirsutum
  Clone ID: LIB3135-055-Q1-K1-E4
cgaagagcggtgtcggggtggcatcgatgggagtgatgaggccggagctggtgatgaaatcgatcgtgcccgttgttatggctggagttttaggtatttatgggttgattattgcggttattatcagcactgggattaacccaaaggccaaatcttactacctgttcgatggctatgctcatctttcctctggtctcgcttgtggcctcgccggtctctctgccggtatggccattggaatcgtcggcgatgctggagttagagccaatgcccaacaaccaaagctttttgttggaatgattcttattctcatttttgctgaggctttggctctctatggactcattgtcggtatcattctctcttcccgggctggtcaatcccgagcagaatagagtgcaaagttccgaaacttgggtcattgctagt

SEQ ID NO: 13246 - DNA, 431 bp, Gossypium hirsutum
  Clone ID: LIB3135-055-Q1-K1-E5
gaggaactgaagttggagaaagaaagcttggcgatggatctttctcgatgtaccgaaaacctggagataaccaagtctaaattacacgaaaccgaattgcttctaacagaagctaaatctcaattggcttctgctcagaaatcaaacagcttggctgagacacagcttaagtgcatggcagagtcgtatagatcactcgaaacgcatgcagaggagttagcgactgagctgaacattttccgggtaaaaaccgaaacttttgaaaatgagcttcaagatgaaaagaaaggtcatcatgatgctttagctagatgtaaagaacttgaagagcatttgcaaagcaaggaaatctgctcggtttgttcttcagcagccaatgttgaccgcacgagcaagcaggagaaagattagcagctgcggcagagaaatta

SEQ ID NO: 13247 - DNA, 217 bp, Gossypium hirsutum
  Clone ID: LIB3135-055-Q1-K1-E6
gatggtggaggtggtggtggagacttgtacttgaaggctggtttgttggtgacagtgggggttttggggttgctttgagtttgatatccattagattattttatatgtagttgagttgctatagaaatagcaaattcatttttatttattggctagattattctatattcttctgcaaaaaaaaccatacattactggaaactcatgaacatttttt

SEQ ID NO: 13248 - DNA, 449 bp, Gossypium hirsutum
  Clone ID: LIB3135-055-Q1-K1-E7
tctcccttttataaaatattagtttgtatttcgtggacttaaatgaaaatggaaaaaaaggaaaaacagaataaaataatgatgaacaaccaccttttgaaatgtattcgtttggctgatctcttattgttttctcgtgtatattttgtattcaaaactcgtcccttttacaatgaaaaacgaaggctttataaccaaaatacaaacaatttctgcctatttctttgctcaagtcgcaggtgctgtgaaatcgtggaggaagagtgcatgatcgtgcaacgtgcgagctaggaattcgttcgtgggtgttgaagtgtgggagttgcggcgtgggcaaatggaaccctagggtttgctattttttgaaaaaatttgggtcgttgggcttgtaatcgggccttttaattttagtgatttgggtctgtatcttgggtcgggcaaaatttggg

SEQ ID NO: 13249 - DNA, 368 bp, Gossypium hirsutum
  unsure (1)..(368): unsure at all n locations; Clone ID: LIB3135-055-Q1-K1-E8
cccannctttctaatccatcaagttcaatagnaagactattgaagatgatggtaataatagagaatcttagaaaagaggacaaatgcaccacaagcagactttagagtgtaagaatggatgataaaaaacgcaaaaaataaagtaaaatatcataataataaaagatacaaaagacttaagaaaaaccaaaaaaaaaatatgactagattgaggcagttcttctttgctatgtgactaacattgagtgatataaaaatgttaatattaaagaaaataattcattattgatctaattaataccatttacgtgaaaaaaactgccttaattataaagtttaaaattataaataatataatttcttcattt

SEQ ID NO: 13250 - DNA, 373 bp, Gossypium hirsutum
  Clone ID: LIB3135-055-Q1-K1-E9
gcgagctttccggattctattatccgtatgggaaatctaaggcctataactggtacaggaggagaattttgaccgcatgggcgccccgtgaagccaacctctataagatccaactcacatgctgctatttgcagctcaatgtagtgtttgctgagcccaacgctaacaaaaatgggcggaaaggaacctcttttactactaaaaatcaatactgctcatacattgtaactctttgatgccttctatacaactctacgtcttttgttttgtagccctaatcgggcggttaattccgtccgaggcttaataccggcgatagaccgatagcgaacaaataccaacaggggaagaatcgacaaggatatcattacat

SEQ ID NO: 13251 - DNA, 315 bp, Gossypium hirsutum
  Clone ID: LIB3135-055-Q1-K1-F1
gagaaagggagctgataagctctttatgatggtgtataacctagcgttagagacataccctggagggtcgaagcacgagccgaatcaccactaattgcttgatggtgtctccactgtgtgtagaacagagtggcacatctaagataggagatttcagacctgaatgagactaccgaaagacgtgccaaaagagtgccagaatcctttgttcataccataatctatgatccaatcttgatacacgtcgtgagagatgtgtcggataacacccatgcaaagcctaaacacacctataatcctatcgtgattaacaag

SEQ ID NO: 13252 - DNA, 422 bp, Gossypium hirsutum
  Clone ID: LIB3135-055-Q1-K1-F10
gggggtgccactgtcaacaacctcctaatgcaaattcaggcggacttgctgggaagttctgtggtcagaccacctgacatagaaacaaccgctctcggagctgcatatgctgctggaatagctgtaggagtgtggaaagaagaggagctttttgcttcgggacaaattatcaaaaccgcatccatattctccccaaaatcaagtgtagaatggaggaagaagaaggtggattcttggtgcaaagctgttgaaagaacgtttggcttggctgatcttgaaatgtgatacaacagttattttcggtttcgacttcctggtgaccattgtctcggcttttgtagatgttttattttatttttgaatttacagacaaaacccatgcttatattcaactgaataaaatgctgactgtattactctgg

SEQ ID NO: 13253 - DNA, 366 bp, Gossypium hirsutum
  Clone ID: LIB3135-055-Q1-K1-F11
cccacgcgtccggggaacgatgtctgtcccattcctggaactaccaagatcgaaaacttcaatcagaacattggagctttgtccgtgaaattaacacccgaagagatggcagagctagaatccattgcttcagcagattcagtgaagggagaccgatatggtggcactgtcgcaacctactatgaatcggatactcctcccttgtcttcatggaaaccttaaatgagagcatacttgttcaaatcaatacaatcttcaagatgagttatggacctaatgtaaggcctctactttgtttttagaataaattttctgtgagatttaataataaaacggcttttggtgaaaaaaaagtttcccttttaa

SEQ ID NO: 13254 - DNA, 412 bp, Gossypium hirsutum
  Clone ID: LIB3135-055-Q1-K1-F12
cggacgcgtgggctagccaatgcttgcgatgtgagccattttggcttcttccaaaggtcaagcgttcgggagtttatcgtctttgtttctcgaaccgtcgccaaacgaacccctcccggtcagcgccagtccgtccagcacgaagagtacaacgtacattcttacaacagaaatggactttgtgcaattggatttatggatgatcactaccctgttcgaagtgctttttcgcttctgaaccaggtgatagatgaatatcagaaaaactttggggaatcatggagaactgcacaagctgatagcactgaaccttgggcctatttggataatgctttgaccaaatttcaggacccagctgaggcagattaattattggaaattcagagggaagtggatgagactaaaatcattc

SEQ ID NO: 13255 - DNA, 284 bp, Gossypium hirsutum
  Clone ID: LIB3135-055-Q1-K1-F2
cccacgcgtccgttttttttttacaaaacaagcttagctttgaaataagaaaaataacacacacacgcacaattaatatgatcctatgaactaactaaaatcacaacatcgtactacattgattcgttcgtggattcatcgacatctattaaaataatctaacctcagacacgtctttatgatcttcatgaaccagcaaaacaccataaattattaaaagaaacatataataagacatgaaaatatttgttacttctgagaaaaaaaaataaaatgagaaaatt

SEQ ID NO: 13256 - DNA, 454 bp, Gossypium hirsutum
  Clone ID: LIB3135-055-Q1-K1-F3
cccacgcgtccgcccacgcgtccgaacagcttctctgctggagtcacgagcagagcaagcttccctgcagtggtttgaatgctacgacagagaccagaatgaagatctcctggaatcgatgcgctatttcattgaagctgctgaagttcactcttcaattgatgccggcaacaaaacacgcagggcttgtgcccaggcttctcttgtctcgcttcaaatacgcattccggattctaaatggctcaacctatctgaaaccaatgctaggcgagctctagttgagcaatctcgattccaagaggctcttattgttgcagaagcctatggtcttaatcagccgacagaatgggccctagtcctttggaatcagatgctcaatccagaactcacagaagagtttgtggctgaatttgtggctgtgctttcacttcagccatctatgcttagcgaactg

SEQ ID NO: 13257 - DNA, 67 bp, Gossypium hirsutum
  Clone ID: LIB3135-055-Q1-K1-F4
aaaaaaaaaaaaatatattaaaaaaaaaaaattaataaaaaaaaaaaaccaaccaaaaaaaaggaaa

SEQ ID NO: 13258 - DNA, 452 bp, Gossypium hirsutum
  Clone ID: LIB3135-055-Q1-K1-F5
gaagcaatccgatgtttctgacatcaaaagatttgtacaattaattaaagacttgagagacaaggaattggtcctgctcagaacgaaacaaagggcaaagaggccaaaatcaatgataccaacgataaaattaaagatgctttttattatacggatacaaggcacaaatgacatgcatccaaaaactaaaaagatcctatacaacctgagattgaggaaagttttcagtggagtgcttgtgaaagccactgacggtgttatacacatgctgcataaggaggatccatatgttacttatggataccctaaccttaacaatgtgaatgagctggcttacaagaagggctatgcactgattgacaagaaagcaaatcctcagaccgataataacatcattgaacaaacattgggaaagcattgcatcatatgcattgtagatatcatacatgaaa

SEQ ID NO: 13259 - DNA, 446 bp, Gossypium hirsutum
  unsure (1)..(446): unsure at all n locations; Clone ID: LIB3135-055-Q1-K1-F6
actgcaattaaaatcccagaattacttaaacaacaatggctacctatgaaggtaaagttttcactgaagaacaagaagctttggtggtcaagtcatggactgtaatgaagaagaatgcagctgaattgggtcttaaattcttcttgaagatatttgagattgcaccatcagccaagaaactattctcattcttgagagactcaaatgttccattggagcaaaacacaaagctgaagccccatgccatgtctgtctttgtcatgacatgtgaatctgcagttcaactgcgtaaagcaggcaaagttacagtgagggaatcaaatttgaagaaattaggagctacccattttaagtatggggtagttgatgaacattttgaggtaacaaaanttgctcttttggagaccataaaagaagcagtaccagatatgtggtcagatgagatg

SEQ ID NO: 13260 - DNA, 423 bp, Gossypium hirsutum
  Clone ID: LIB3135-055-Q1-K1-F7
cccacgcgtccgaaacaatagatcaggtgaacgtgttgctagcgactcaaggaagcgtaatccttccgactttgcattatggaaggctgcaaagccaggtgagccatcttgggacagcccttggggacctggacgacctgggtggcacatataatgtagtgcactgagtgcacattatttaagcttcaaacttgacattcatggcggtgggcttgatttgatttttcctcaccatgaaaatgaaattgctcaaagttgtgctgcatgctaagagagcgacgtaagttattggatgcacaatgggcatgttactaataacaatgagaagatgtcaaaatctgtgcgttactttttcacaattcgtcagattactgagagatatcatacactggctgtgcgatacttcttgataaatgcacacta

SEQ ID NO: 13261 - DNA, 250 bp, Gossypium hirsutum
  Clone ID: LIB3135-055-Q1-K1-F8
gggagtgtgagcaactatgttgtgacgcatgctacttgccctgttaccatcgtcaaggaacaatcaagcttcagcaagcactgagtagtttacataatattttctagtttgatttcccaaacaataatttgatggacgagtgtatgttgcttgatcatgttttaccaagtagcttacgcagttttacgtttgtttactgaatcttaaagatatatggtactttgtgagttaaaaaaaaaaagaaataatt

SEQ ID NO: 13262 - DNA, 252 bp, Gossypium hirsutum
  Clone ID: LIB3135-055-Q1-K1-F9
gggagtgtgagcaactatgttgtgacgcatgctacttgccctgttaccatcgtcaaggaacaatcaagctccagcaagcactgagtagtttacataatattttctagtttgatttcccaaacaataatttgatggacgagtgtatgttgcttgatcatgttttaccaagtagcttacgcagttttacgtttgtttactgaatcttaaagatatatggtactttgtgagttataaaaaaacaacaataaaatt

SEQ ID NO: 13263 - DNA, 365 bp, Gossypium hirsutum
  Clone ID: LIB3135-055-Q1-K1-G1
acgcccacgcgtgcgggcaagtggttgagggtactgctgctgcccatcctattgggtcaaatcctggtgtgggaggggccaaatcacataatactcgaggggagggaaatccccatggatatggtactggagggacttacagttaatcccttttttcttgttttgtttgaggaaataagtaatgcacaagatgatgcaggtatgttatgatagaaatcaaatattgagcttagtactgtgaaacgaggtttttgcatgaagcttgagcttaatggttatgataacgcataaacattatcttcaacaaaaatcaactttgaattctgttgggacaaaataaaaaaatgatgggtaggaaattttac

SEQ ID NO: 13264 - DNA, 439 bp, Gossypium hirsutum
  Clone ID: LIB3135-055-Q1-K1-G10
cccacgcgtccggttcaattaatgtgaatgcctctctagtataagaactaattagttgcttgttggattgtgatcctggtctgtcatgtgagttggttagcagctatattacaagtgttgatacatgcccaagccattatgttggtgttgttcttggagaaccttcctcaacaccttctcccaatcaggtggatgacatttccaggttcgtgtggaactttctggcagatagaacatcaactccaaagggcaatactactgtttgctcaaaggattgtagcaacaatggtggagtgtgcattatagcacaaaccgatgggaaaggcatttgtgttaactccacaaccaggtacgtaccggcatattcaactcgcttgaagttggactcttgaacatggaaagtgctgtcttcgaactcctgagatcctatggtgatgct

SEQ ID NO: 13265 - DNA, 401 bp, Gossypium hirsutum
  Clone ID: LIB3135-055-Q1-K1-G11
cactgcagcaggctttaggcaagcttcgcaataataacaatgagggtggtcgtggtggtatatgttcgtctgaggaagagctcaatgattttatctatagccttcaatatcgcatccagcatgaaagcatcccgttgtccgaggagaagcaacttcttagagaaattaaacaactagaggggacccgggaaaaagttattgctaatgctgcgatgagagcaaagattcaggaatcacttggtcagaaagaagccattcaagatcaagttaaacttatgggtgttgatttggatggcgtaaggaaggaacaaaatgcgatctggtctaagaaaaagcaaatttaagaaaaagtcaatgccatagagagtaaaatcgaatctttacaagaggagctgaatgct

SEQ ID NO: 13266 - DNA, 433 bp, Gossypium hirsutum
  Clone ID: LIB3135-055-Q1-K1-G12
gttgagattgaaataaagttatttaaaaaagggggtaggtataatgcacgcaggccaagtcaagaaaaggacttccttacttttatttcatagtagtcttaatgactagtagtttgaagccttaaccggtttttttcggcgctcggttccttcgtcttaagtcaagttcagtttactttttcgattttgaatggaactcttagtcgagctgatggcgagatcgattttttgttcgaggttcaagagaaaagagaggaaccaccgcccaatgatgcttttacgaaagtacggtcaccggtggcgaataccttctcgacactatcgaacctaaaatccactctcaatcgctctttttttattagaggaattgttttcgtatcctggacttaaggaagggcaaaagtgccctatctgccttgttgtgatagggggg

SEQ ID NO: 13267 - DNA, 463 bp, Gossypium hirsutum
  unsure (1)..(463): unsure at all n locations; Clone ID: LIB3135-055-Q1-K1-G2
ggctactaagatcattccgaccgaaaaccatattgtttgggaggatatagtgagcatccttcagccctaggatagctctgacaacttgcccttatcatgtgggggtgcattttccgccgaagctcatatccatgcaaatggagatggatctctaaacctgacagcacaaatcatgtggagcggttgcaagtagcctgactctctttgcatcatatattgctccatgcttatctctatcagtttgtgctgtgtgacccacggaggctgtctacttctttatattaataatactattaaataaatttgacagccaccccataatatactactggattcctacttcttctaccttacctattcaacattgtgtgccctgtttctcctttttcttttcttttctgtaatagnatatacacacacgattgtgtgaattaataaaaaaatgtctgtctgtgtctaaaat

SEQ ID NO: 13268 - DNA, 380 bp, Gossypium hirsutum
  Clone ID: LIB3135-055-Q1-K1-G4
gagatttaactgaaatttggagcattgacatgaaagggaaagcaaatggtgcagtggagacctgtctggaaagtgaagcctcatttcgttcaatgcgtatgtttatgaacttttcagacccatttttggcaaggaggtttaatgcaaatgtttgcacatgggcatttggtatgaatttgtttgatctacatgaatggagaaggaaaaacttaaccatgctctatcgaaattacttgcaactgggacttaagaggtcattgtggaagggaggaagcttgcccataggttggattaccttctacaaccagactgtggctttagaaaagagatggcatacccttgggctaggttataactcagatgttccacggggtgatatt

SEQ ID NO: 13269 - DNA, 268 bp, Gossypium hirsutum
  Clone ID: LIB3135-055-Q1-K1-G6
gctgctattcctctcgcacgatcgctgtatacacgtatgcatgctacaccggtattccctatacaaggtttgacctcaccaatcatttcaaggcttaggcactaaaacctaagattgcctccctcttcggataaaaaaacttcttgtacatattggacactgtaccatcagccaagaaactcattgtcattctagagagactcatatgttccattgctgcaaaacactcagctgaagccccatgccatgtctgtctttgtcatgacat

SEQ ID NO: 13270 - DNA, 157 bp, Gossypium hirsutum
  Clone ID: LIB3135-055-Q1-K1-G8
cccacgcgtccgcccacgcgttcgtgcttacaagacaagacaaaagacagcttctagatgttctttgactgaacatatagaggaagcaaccttctatctggcctctaaaaaaaaaaaaaaaaaaaagaggaaaaaaaaaaaaaggatgcaaaaaaga

SEQ ID NO: 13271 - DNA, 364 bp, Gossypium hirsutum
  Clone ID: LIB3135-055-Q1-K1-G9
gccacgcgtacgaattcatactcatttaacccctttcattatcgtcccaatcactacagggatctttattactgaaaaatgtgttgctgtggcgtaaactgtggttgcgggactggctgcacgagtggcagatgctcgagaggatgcaggatgatcccagacctgaacgttgcctagatgaccacacctgagactctggttcttggtgtatctccccacatagctcactttgagggagctgagatggaattcggggcgtggaacggttgaaagtgtggagacaactgcacctgccacccttgcaattgtgaatgattagagaccaaagccaaagcttcctgtgagcagagacgcctatgtcttt

SEQ ID NO: 13272 - DNA, 413 bp, Gossypium hirsutum
  unsure (1)..(413): unsure at all n locations; Clone ID: LIB3135-055-Q1-K1-H1
aaaaaccctgttctggaaacaactcaggaaaataaataaataaataaataaataaaacgacgacgaagaagaagaagaagatgttccgtgatgtttcaagctgcaacacctacaactatggcgatgccttgtattgggactcccgttatattcaagaanctggtggtgcctttgactggtaccaacgttactcttctcttcgcccttttgttcgtcgctatgtccctacttcctctcgtgttctcatggtcggctgtggaaatgcccttatgtcggaggatatggtcaaggatggatatgaagacattatgaacattgatatttcctcagtggcttttgaaatgatgggaaggaaatatgagtttgttcctcagctgaaatacatgcaaatggatgtcagggatatgagtttt

SEQ ID NO: 13273 - DNA, 455 bp, Gossypium hirsutum
  Clone ID: LIB3135-055-Q1-K1-H10
ctttgttcaaattgacggtacactgaacaagctatccacgctgagggaatatgttgatgacacagaggactacattaatataatgctcgatgacaaacagaaccatctccttcaaatgggagtcatgctaacaacggcaacccttgtcatcagtgcttttatcgtagttgcaggtatctttggcatgaacatccatatcgagctattcgatgaagataaagcagggatgccagagtttctgtggacaattggaggtggtgctgccggctcgatattcctttatgtaatagctatcgcatggtgtaagtacaagcggttattagagtaagtcttctgagaccgtactgtatatcgcattgaaaaaaataagatgacattgaaacatctattgtataaacttttccagaatgttggacacgataagcttatattttactgcctctatagtcgactga

SEQ ID NO: 13274 - DNA, 205 bp, Gossypium hirsutum
  Clone ID: LIB3135-055-Q1-K1-H12
gcctctgcttctttaagcatggcaacaactttctttagcattcccatcaagggtaatagtatagtatagtttgagactggttattgccagagaaacttaggatcatgagactgcaagagaatctgtagatatgatttccatgtaatttaatagttgattgtttgctctccttcaaaatgcaactttctttgccaccattgccgat

SEQ ID NO: 13275 - DNA, 237 bp, Gossypium hirsutum
  Clone ID: LIB3135-055-Q1-K1-H2
acggatgggctaaaacatttgtaggcttatttgtgctcgttccaactaaacattttgcgttgctcatgtcgggcgagggtagcataatcccggcaggtttggaccttcaacccccttccctacgcacaaggcaaagttacaaacatagtcattcaattaccttgtaaaaaggtttacatgtattaacacataacactctttggtatttaaccaatgagggatctatcttaaatatat

SEQ ID NO: 13276 - DNA, 425 bp, Gossypium hirsutum
  Clone ID: LIB3135-055-Q1-K1-H3
agagagagaaacacagagagggagaaatggtttctctgaagctacagaagcggctctccgcgagcgttctaaagtgtggaaaaggaaaggtttggctcgatcctaatgaagtcaacgagatctctatggccaactcccggcagaacataaggaagttggttaaagatggttttatcatcaggaagccaaccaagattcactctccatctcgtgctcgtcgcatgaaggaagccaagagaaagggacgtcactctggatatggtaagcgcaagggtacaagggaggcaagggtgcccacaaagatcttatggatgagaaggatgcgtgttcttagacgcctactccgcaagtacaggggaatcaaagaagattgacaagcacatgtaccatgtacatgtacatgaaaagtaaagggtattgtgttt

SEQ ID NO: 13277 - DNA, 308 bp, Gossypium hirsutum
  Clone ID: LIB3135-055-Q1-K1-H4
gtatcaggtgctcgctgtgttggaactctgttgtacgagatgaagcgtcgtgggaaggactgtcgctttggagtgatctcaatgtgcataggaactggaatgggggcagcagctgtttttgaaaggggagactgtgttgatgaactctgcaatgcttgagctgtcaaaaactaaggatgctccatagatatgcttgttgctaccttacaatttgtattaaatatatgacttttcattttcccatgattagatagttgtttgtgagttgtcaaagctttcattttgaaaaatcaaaataaagtttacat

SEQ ID NO: 13278 - DNA, 394 bp, Gossypium hirsutum
  Clone ID: LIB3135-055-Q1-K1-H5
gtttgaattcagaggataaataccccaagggcttggttgttgcatttgcattgaagaacatttcaggtggggacgctgcagagaaaaatggttctgatgaacctgcaaaggatggtgctactgagaagaatgaagagaagactgcagaaaatgacgaagataacaaagataagggtgatgataaacaacctggtgtgggtaacgaaacggagaacaaaaagtccgtccagaaatgatgaggggaacagaacataaaaacactgcatctgttttcaaagacgatatgaatgttgttttacgggaagatttgaaggaggccttccaaaaatttggcactgtgaagtttgttgacttcaaagctgttgaggagaagggttacattcggtttgatgaa

SEQ ID NO: 13279 - DNA, 428 bp, Gossypium hirsutum
  Clone ID: LIB3135-055-Q1-K1-H6
gccacgcgtccgaccacgcgtacgccttcaccccctccgccatactactatcactcaccttgcccaccagtgaaatcacctccacctacaggctatatttacgcttctcctgcaccacctactgactattgagtctagaaagatcaaccacaagaccgcaacgtccatgttctagttgctgaaaaagaatcagagaaggcacccaggacagaaaacttggccatgaaagattttgaagtccattgaataagagtttggacattgcatgtgggagctacacatttgatagtccaagccatactgcattcaattgtgtggtggccatcttacacattctcttaatatgttcaagtggcttgtgaagaaagcttgagagacaacttgcctagtggctgtaaaatatcggtcaataacatgcttaatatatt

SEQ ID NO: 13280 - DNA, 434 bp, Gossypium hirsutum
  Clone ID: LIB3135-055-Q1-K1-H7
ggagtttcgtaggcacccgccctccccaccacctccagacccttttgcaccaccaccaccaccgcacttatatggtgcacccccaccacctccgccttactatgctgcacctcctcctcccgcaccccctcatcatcaccatccaccgggtccaccgccaccgcctcacgctttttcaccacctcctggacctcctccaccaccttattttgatccatatagaccaccaccgccttggaatcgccctcctccaccatactagctagctataaataattgccttgagagttttatatttcagcagtgtacgagctttatctccccatgaggcaattaaaggttatgtaggctttttttacccttcttcctttcccccctctgtctggaattttccttggttttaatagccttaagaaacttatttctaattatat

SEQ ID NO: 13281 - DNA, 391 bp, Gossypium hirsutum
  Clone ID: LIB3135-055-Q1-K1-H8
aagaaaactaaattctcttagagctctggcctgtggccgacctagctcatcccagagcaccaccgcctttggccccacatgcctaacgcgccaccgtttgtgtcttgaaacccggcggttagggctttcaaaaccctatcctcttcgcgatgaatcgaagggtattccgacgatctcggcgataacggaggtatgaggcctgagattacggtgcaccgacagtggagactctcggagtaccccgacgtttctggacaactcattgattaaggccagctgatgtgacgtgggggacaggggcattgatggctcttgctttacgagttggaacgggcctgcatagcttacggcgctaaaagatgcagaaaccctaaggtttctgacctggggt

SEQ ID NO: 13282 - DNA, 207 bp, Gossypium hirsutum
  unsure (1)..(207): unsure at all n locations; Clone ID: LIB3135-055-Q1-K1-H9
aagaagactaaacattcttagagatttggcgtgagatccatctatggaatactatagtaggagcgaatttggccttacatgccatacacgccatagggtgggtgttgataccacgtggctagggctgataataccctatcctcttagagatgaaggngggggttttagaggaatcaagcttactaacggaggcatgaggcctgatat

SEQ ID NO: 13283 - DNA, 320 bp, Gossypium hirsutum
  Clone ID: LIB3135-056-Q1-K1-A1
cgcaaaagtaggaatatagttccaggcaactttccaaactgtaattttgatctttgaaggaatatgtagattccataatttcctgtaaaattttttattctcggcctgtaaattataactactaggatccagtgtagtctgttataatagtttgtaggcgctcctaatagagaaaattccagatggttccccccataattggaaatcgtcgtgctctgtccttgccaaagggatctgcttgattttttttaacaatatctgcattgagtaagctggaatagattgaaggactggccttaataaaaacctcctttttttcc

SEQ ID NO: 13284 - DNA, 393 bp, Gossypium hirsutum
  Clone ID: LIB3135-056-Q1-K1-A10
cccacgcgtccggtgttctgggaccttggttctaaaacgaaaagaatacaagatctgtccaatcaatgggttcaatgtatgctgctgttcttttccttggtatccaaaacgcttcttctgtgcaacctgttgtggcggtcgaaaggacagtcttttatagagaaagagctgctggaatgtactctgcaatgccatatgccattgcacaggtgttaatagagataccatatatttttgttcaagcttctgtgtatggccttatagtctatgctatgatcggattcgaatggacggttgctaagttcttctggtatctcttcttcatgttcttcaccttactttacttcaccttctacggcatgatggctgttgctgtcacaccaaatcattaca

SEQ ID NO: 13285 - DNA, 291 bp, Gossypium hirsutum
  Clone ID: LIB3135-056-Q1-K1-A11
gcagttgaagtagcaacccaaaatttcagctaatcgaaagaagggaagctcgacgatttgaggaattttcttctccaagattcagcttgtaatttatgctgcttacaattgattcttgttttgtttcaattgctatgagtggttaaaatattcaagcttagttagacacttatgaaacctagcacaaggtatttgaagatttattttgtttaaatttggatttggcattcttgagttgcttgttttatcgttcaaggaatttttctaaatcaattagattgatcacctact

SEQ ID NO: 13286 - DNA, 360 bp, Gossypium hirsutum
  Clone ID: LIB3135-056-Q1-K1-A12
aacacgggtaggtgggactcttgtatgaatgtgcaccaatgagctttattgtggaacaagctggtgggaaaggatctgatggacatcaaagaatccttgatatccaacccgttgagatccatcaacgtgtaccactttatattggaagccaagaagaggtggagaaactggagaagtatttggcttgaataagatgcaaatgaaaaaagggtagtatttttgtttatggatataaagaaatacactttatgttgtaattcaaaatgaagacgaacttgtccttgttctgtaaattttatgggaatctttttcgtggcaatggcagcactttaagaaggtcattgtatgaccccttggttt

SEQ ID NO: 13287 - DNA, 333 bp, Gossypium hirsutum
  Clone ID: LIB3135-056-Q1-K1-A2
cccacgcgtccgcgagaagtcgatctggtgggatgagtgtatctttggcaagtgctgatggccgtgttgtaggaggaggagttgctgggcttcttatagctgcctgccctgtacaagttgttgtcggcagctttttacctggcaaccagcatgatcaaaaacccaaaaagcagaagatcgagtccataccagctactgttgcaccaaacccgagtattgccgctgcaccagcttcaaatgctgagaaagaggatggcataaatgttgtttcgccgcaacaaaattcgaatgccctgaaaccaagcctcaccggtgctacctttcggagagaaa

SEQ ID NO: 13288 - DNA, 317 bp, Gossypium hirsutum
  Clone ID: LIB3135-056-Q1-K1-A3
acgcaagtgaagagatatcaggaaagaaaattaaagtcgggttgctttcgggtttttgagcttggttcgtaaaatttggtgtataagtaacacaatgactagcattatggatgcagagcgtgacaagtatagcatgattaatttcgaagagacggagttacgtttaggattacccacaggcattgaaaatgataatgaaaccgccaaaaataatgggaaaagagggtattcggatatggttgatttgaagcttaacctttcaacaacaaaggaagcatccgtggatgaagctgagaagatgaaagagaaaaaacact

SEQ ID NO: 13289 - DNA, 399 bp, Gossypium hirsutum
  Clone ID: LIB3135-056-Q1-K1-A5
ttcttggttgatccacgcgttcggatccattgtgggtgccaccttagaggttatccagaagaagaggagtgagaaacccgaagttcgtgatgcagccagggaagctgctctccgagaaatcaaggaaaggatcaagaagactaatgatgaaaagaaggcaaagaaggcagaagtagcagcgaagcaacagaagacacaaggcaagggtaaccctccaaagggtggtgcacccaaaggtcccaagcttggtggtggtggtggaaagcgataactttacccagttattatctgtttttacataggtagtatgttgattttgaaggcatttgtatggactgaatggccatcggccgcgtatctttttttgctttttatgcgttatcattaaaccttgaactc

SEQ ID NO: 13290 - DNA, 392 bp, Gossypium hirsutum
  Clone ID: LIB3135-056-Q1-K1-A6
tcggaaatgaaaaaaaaattgaatcgtccattagcaggtccttcctctccccattttctccatatgcttagcattaataaagctcagggtaaacaacaaaccacatttatcaacaactatacagctcgaaaccctaaaacggacataagagttcatcagacaagatcctactatccagactcagtctcatcgagcagtcattcccctaccccgatctttatcaacaagccactccaccgccttcggtaccttctcaatccatacatcagacaactatactttcttccctccattgccaagccatgcgtcgtcgcattcgcccctcgagcttctagcttcttgatgacagtaaaggcgagcttttcaacacacacatctttaaaacccaacta

SEQ ID NO: 13291 - DNA, 216 bp, Gossypium hirsutum
  Clone ID: LIB3135-056-Q1-K1-A7
caggtgactaaccggttccttcgctgcttgacaaaccgagtagattgtattagctaccaaattacaaccccttagtttgtataaagtagggatgtaatccttagctattcgccacatatgtatttttattttacttggtatttggagtccccgcagttttgtaaaaagtgtagttagataatcaatctgaaaattaggcctcttttgttggcattt

SEQ ID NO: 13292 - DNA, 293 bp, Gossypium hirsutum
  Clone ID: LIB3135-056-Q1-K1-A8
cccacgcgtccgagagaatcagagccgcagctgccgccgtcgccatggtgaagtttcttaaaccaaacaaggcagttatcgtcctccagggccgatacgctggccgcaaagccgtcattgtcagatctttcgacgatggcacacgtgaccgcgcctatggccattgtttggttgcagggataaagaagtattcaagcaaggttatccgcaaggactccgcgaagaaaaccgccaagaagtcacgcggcaagtgctttatcaagctcgtcaattacccaacactgatgcccacg

SEQ ID NO: 13293 - DNA, 318 bp, Gossypium hirsutum
  Clone ID: LIB3135-056-Q1-K1-A9
atttatgcttggatggggagaagcttgcctctggttcctcacatgggtctatatacttgaataactcccgatcgtcggtgcttgtcaagaagatcaaggcatacgaggaagcttgtgtagacatcgctttccaccctatcttgtctaatgtaattgcttcatgcagttggaatggagatgtttcagtgtttgagtgagactatgtacaataaaacatcatcttatttgtcattaaggtgtaagatgctttatgagatcaaaactgtctaatgctccggacttggaaggcatttggtctacacctattaaagagaaggc

SEQ ID NO: 13294 - DNA, 369 bp, Gossypium hirsutum
  unsure (1)..(369): unsure at all n locations; Clone ID: LIB3135-056-Q1-K1-B1
cccacgcgtccgagcacgtgccgtcaccggaaatcacgtgggagaaagaagtgaaaagtgaagggagatggaatgagcttgatttcgggttggatttcatagatgaagacccatttgccagtcaagttgattaccaaatggagcaactgtcaccattgcaagacatgttcatgtatctacccaagacattttaagccaacgtagaccaaaaatcctacaattgtggggtccaatccaaattaaaaacatttttaatttagatccatgcacacacacattgccaaacgaacaatgggtcaaattcaaattcaatatgaggnggtgggtgacaaacaattggatcgctcgtgggtgtaatataatatgagc

SEQ ID NO: 13295 - DNA, 226 bp, Gossypium hirsutum
  Clone ID: LIB3135-056-Q1-K1-B11
atccatgcgttcggtacatggaactctacgagtggaagaaggttgacctgtcagatgcagcccagaaggaacgggtgaatcagatgattgaagactgcgagccatttgagggagagcctctcttggatgccaagtgctttaagtgatagaatatgttcttaattttacttttttatatttctggtacctttttgcatgtcaggttttatttatagatcgctgcttt

SEQ ID NO: 13296 - DNA, 305 bp, Gossypium hirsutum
  Clone ID: LIB3135-056-Q1-K1-B12
cttcacggcgctgaaaccgcagctcatggtcgaagcacccaaggcagctgatgcggtgcagttctacaagaccgcgtttggcgctgttgaggctggccgtaccgtgtaccctaagcgcaaggctgagcaggagcagcctcacgtcctctccgctcaacttgagcttgctggctctaccattctcgtttctgacatcgctgataactctactccggtgaaaaccgaggggactggatgtgtgctctgcctggagactgaggacgtcgaagctgcaattgccaaagcttgcagcgctggaggcgttg

SEQ ID NO: 13297 - DNA, 395 bp, Gossypium hirsutum
  Clone ID: LIB3135-056-Q1-K1-B2
gggaagccttagtaactagtactaggagagaaacaaagagaaaaaaaccagatgtccaccacctttggaaccatgaatgaaactctgtgtacctcttcttcttctgagtggaagcaactgtatgaacaaaccattgatgcttgtttcggattctccgatgctactgccgtcaccgtcaccacgaacaacttaacctccaacacttcatatgcagccgccgttgaccactacttggcccccaaggcctgtatatcaaagtctattcggagacgatctagagcttcaaagaggacacccgtcaccctcctcaatgccgacgccaaaaacttccgatcctttgggcaacaattcacgggctgtcgccgtcgtagcacctccttttcatttttcaaaaa

SEQ ID NO: 13298 - DNA, 413 bp, Gossypium hirsutum
  Clone ID: LIB3135-056-Q1-K1-B3
cgtccgcccacgcgttcgcccacgcgtccgaaactgcgtgaagagattcaatcgcagtctgctgctaagcttcctgaggcaccagtgatgcaccctcctactgaatccccaacgtagaggtgccccaacctactctgtccaagcaccctaccaagggtaagaagtcaaaggccaatgacactagctaaccacaactgagagagctaccctagatgaattagttgcggcaagagcggtaatagtaccggcataagaagttggaaaggtccctttgtagcatactttacagaagaatcttactcatcctcaaaagttcggttagtagtttcagaggcatcgagttcaaaatcaaaaggctgattacccggggaaagggactttcaaaggcttatctattatctattcccccattt

SEQ ID NO: 13299 - DNA, 394 bp, Gossypium hirsutum
  Clone ID: LIB3135-056-Q1-K1-B4
aaaaaaaaaaaaaaaataaaaaaaaaaacaataaaaaaaaaaaaaaaaaaaaaaaaaaaaaaagggggagataaaaaaaaaaaaaaaacaaaaaaaaaaaaaaaaaaaaaagggggggccgcttaaaaggaacaaagcaaacgaacccgggcaggcaaagcaaaagctcataaaagggggcaccaaaataaaaaaaaagggccggcgcaaaaaaaaggcggaacgggaaaaacccgggcggaaccaaacaaaaacgccaggaaaaaaaacccccttaggccagtgggcgaaaaaacaaaaaggcccgaaccaaaggccctaccaaaaaagggggaaaccagaaaggcaaaaggaaccccccctgaacgggcacataaagcgcgggggggggggg

SEQ ID NO: 13300 - DNA, 301 bp, Gossypium hirsutum
  Clone ID: LIB3135-056-Q1-K1-B5
tggggccttcgcgtccgtggtcagcacaccaagactactggtcgcagagggaagactgtcggtgtgtctaagaagcgttgaaggcttcatatatattttggaaaaattgatgtagtcttgcagagtgttcatttccttgaatgtaagcactgtttgcacgaagacaaattttggatgtgatttttttttgttgtttcttgacaagtggtaagactgtagtagtgttgggtctttatcggttgctattaggaatacttgctttactgaatatttttagattaaatgtttttaatttggtttg

SEQ ID NO: 13301 - DNA, 452 bp, Gossypium hirsutum
  Clone ID: LIB3135-056-Q1-K1-B6
tcggccgattgccccatcacctacatcaaccacttcatcgtgctcgtccacgtcatcgacggctggtgcagcttcaccttgttcaaagcagacaatattggatgccgcagccgctatttccgagggcaaaaacgacgtcgttaacgagatcctgacccgattagctcaagctgctaactcaaaaggtagctcagaacagaggttgatggagtgcatgctatcagctcttaaatcgagggttaactcggttgaaaacccaccaccggtggccgagttgttcagcaaagaacacgctgcttcaactcagttgctttatgatctgtcttccttgctttaaacttgggttcttggctgctaatcaggcgtatcctgcatgccactttagacaaaccaagctataaaaaagatcaaggtggtggatttagattatggggtaggggggcagacatgaa

SEQ ID NO: 13302 - DNA, 407 bp, Gossypium hirsutum
  Clone ID: LIB3135-056-Q1-K1-B8
taacggcagggagcccgggaaaacaaaaaattaaaaaaaaaaaaaaaaaaaaaaaaagagaagggaaaaaaaaaaaaaaaaagaaaacaaaaaaaaaaaaaaaaaaaaaaaaaaaaaaagggggggcggccgaaaaaaagaaaccaaactaacgcgcgcgggcaaggaatgaaatattttttcgatggagcaaacaaaaaaaaactggcgggccgtttataaacaaggacgggggaaaaaaaacccgggacgaaccaaaaataaacgggaggaaaaacaccccccttaagcaagtggaaaaaaaaaaaaaaagggccgaaacgatctttctaacaaaaagggagcccataatggaaggtaaaagggaccccccctggggcgcaataaaaaaagggcggagggggggg

SEQ ID NO: 13303 - DNA, 311 bp, Gossypium hirsutum
  Clone ID: LIB3135-056-Q1-K1-C1
aagtcaagttcctcactcaaatccttacgccggaaagaaaaagcacttttggatgtaaagacccgctgactcttcactttactactcgcttggtgactaacctaccaaacctacccaatcgtacgcagctccttcgtccctttcctctctttcaacccatctcacatctgcgatatggcttggacccttctttgagtgggagagtgtgttgcaattatcctcgaaagtctccctgccctcgtaaggccaagcgaaaaacgtcaaggctccacaccctgagaaatttttcacgttcctcattcgagctttct

SEQ ID NO: 13304 - DNA, 284 bp, Gossypium hirsutum
  Clone ID: LIB3135-056-Q1-K1-C10
cgcaaacagaagcttcaggtggcgctttctttgtgaggtatatatcacgctcagtgttgggtttcggcttctaaccattgattcccacaggcatcttcttcacctagaaataaagagtagagggaggaagagagaggatatgaagcagggaaagcaagcagcatatgattaaaatggtggagggagagcagtaggctttgtttatgaaatgttaacgttagacgacgttgtattgtagatttgttgtacgtactgattggaaatatagagattgctcttggtgg

SEQ ID NO: 13305 - DNA, 397 bp, Gossypium hirsutum
  unsure (1)..(397): unsure at all n locations; Clone ID: LIB3135-056-Q1-K1-C11
cccacgcgtccggggggttctgttctttaacattcaagtttctgaggtccaacttccaattgtgatcgatcagttctactgtgacaaaaggaaatgttcgaacgaaacagctgcagtcgctctatcaggaatcacctatgaaaaaataagaggaacatacacagtaaaacctgtccacttcgcctgcagcgatagccttccatgtataggtgtaaccttatctgccattgaactaaaaccagtgcaggaacattactacctctacgatccattctgttggcanactttcggagagttgaccacccctcctgttcccccaatcagttgtttacaaattgggaagccaacaaataacagagtccaatctgatcatgatgtgtgctgagcattagtgtag

SEQ ID NO: 13306 - DNA, 421 bp, Gossypium hirsutum
  Clone ID: LIB3135-056-Q1-K1-C12
cccacgcgtccgcaggtttacgatgtggcaaaatttttggaagaccatcctggtggcgacgaagtgttattatcagcaacagggaaggatgccacagatgattttgaggatgttggacacagtgatagtgcacgagacatgatggatcaatactatgtcggagagatcgacatctcaactatccccaagaagacgacatataaacccccgaaccagccacactataatcaagacaagacatccgagttcatcatcaagctccttcagttcttagttccccttgccatcttgtgtttagccgttggtattcatcactacaccaaatcgtcttaaaattaatcgagattgtgttacaatgacggaaaaaccttgcgtttcatttatgctttattttctatgaaaaggctcaaataatcttaag

SEQ ID NO: 13307 - DNA, 311 bp, Gossypium hirsutum
  Clone ID: LIB3135-056-Q1-K1-C2
gacttgtagaaatccttatgagcctcaaaattaggcgtggtgtaattattgtcctgtaaatactttgtaacaagggcccgataaccactcccaacagagtaatctgcagaaccctcatatttccagaccaatatatcctccggactagctagaaagtgggatgggaagaatgcggcttacctactcctcatcaacaagtattaaaaatcaaatccctgttccagccaaggttcattccaaatattgacactataactattaccaatttgccacaaaactccgttttcaataaaatctcgagccccttccca

SEQ ID NO: 13308 - DNA, 308 bp, Gossypium hirsutum
  Clone ID: LIB3135-056-Q1-K1-C3
gttcctttgggttttcgtaagttttataattttattagataatgccgaaggtttgttacagaattttgcttttccttgccttggactttgagggcattgttagtgttgtttttgtaactggaataattgcaactgcagccagttgatatttctctgaactctgaataattttcccggattttgaggagaaccaaatataattgttctttaaaaaaaaaaaaataaacttgtcttatatatatattaaattatcaagtcaatattaatataaaaaataaatataaaataaaggggggggccggttttaa

SEQ ID NO: 13309 - DNA, 317 bp, Gossypium hirsutum
  Clone ID: LIB3135-056-Q1-K1-C4
aaaaaatgtgtgcgtcggaaagaaccttgagacggccggaaaatcgagttcctacaccggagaccgatttcagatcggcgttcgaggtactcgacgcggatcgcgacgggaagataagcagagacgatttaagaagattttacgccggattttcatacggcttcgaagatgccgactaaatgatcgggacgatgatttcattagcggatttaaacagcgacggattcgtggagtacgacgagttctagcgcgttttatgagggtataataacagaaagaaggtttcaagttacggtgtaatggaagatgttttcaag

SEQ ID NO: 13310 - DNA, 174 bp, Gossypium hirsutum
  Clone ID: LIB3135-056-Q1-K1-C7
aaaaaagttattgtttgaagcttttatggatttaatctgtatttttccctgtttttttgtaatgttttatgatacttatttttatccactggtagtaaggatcaagttgaacttgaagttttgttatctaaatattatgtgattttgatattagttaagcttaattcttggttc

SEQ ID NO: 13311 - DNA, 288 bp, Gossypium hirsutum
  unsure (1)..(288): unsure at all n locations; Clone ID: LIB3135-056-Q1-K1-C9
cccacgcgtccgattgggaccaaaaggttcagaatgtcacaaggcagcagtgataggagacacaataggggatccactgaaagacacttcaggtccatcactcaacatcctcatcaagctcatggctgttgaatctttggtctttgctcctttcttcgccgctcatggaggctntctttttaaattcatctaaatttcaagcttcttttaacaataaatacatacatgcatatatatatatatatcaaccggtagagttgttagttagaggatatggggaacttttgt

SEQ ID NO: 13312 - DNA, 388 bp, Gossypium hirsutum
  Clone ID: LIB3135-056-Q1-K1-D1
gtgcttttgattccttttttgttcttactattttggtgttaatctatgcctttgttgagtttgttgagtaaaaatctcttttttattgatgaaaaatggtcgaacccttacaaaatgtttaaatttggcttttatagccataccacttgattttgtattattttctgtcttttctttctaatcccttgcaggtgcaagtcgttggagaggcggtggagacgtgaccggtggagcggcggagcaggcttttggcagaggggtaggtggccgaaagtcaaggggtggttgctgcgccaaaaagctagggggctagggtttgtgatggctttgtcttttctgaattgggtttagggtttcaattgggtttgggctaaatgtggggtttagt

SEQ ID NO: 13313 - DNA, 343 bp, Gossypium hirsutum
  Clone ID: LIB3135-056-Q1-K1-D10
cccacgcgtccgatagatctcttttccacctatgttaaaggggtatgccgctatatatgctacaccgaagtatgctcctagctaagctactggctttggatctgcctctcgagcacgagggtcgtattcaattcataaggctatcgatcatgaaggtttgcctatggctctgtatctacctctgtctgctggtgcttattttgataagctgcaggatcaacgactggatcagctggaactacaaaaggctatggctatggaacttttttggatacttagcaaggtgctgcatcaaccggcgatactttctatgccgagagcaccaatagatagcttagagaac

SEQ ID NO: 13314 - DNA, 191 bp, Gossypium hirsutum
  Clone ID: LIB3135-056-Q1-K1-D11
cgcgtccgcggacgcgtggggaacaatttaaggttcaaatacaatgtacaaagtttatttaaaaaaggagggaaaataaaaaaaaaagggcggacgaaaataagagaaccaagattaaatacgtgggcatgcgacgaaatagatctatatatagtggccacctaaatttcaaaatcacttgggctttcgaa

SEQ ID NO: 13315 - DNA, 277 bp, Gossypium hirsutum
  Clone ID: LIB3135-056-Q1-K1-D12
gaggtattggaactgtccctgttggtcgtgttgaaactggtgtcctcaaacccggtatgggtgttacttttggtcctactggtctgaccactgaagtttagtctgttgagatgcaccatgaatccctcccggaagccttccctggtgacaatgttgggttcaacgttaagaacgttgctgttaaggatcttaaacgtggttttgttgctttaaactccaaggattatccggcctatgaagctgccaactttactcttacatggtatcatttataacc

SEQ ID NO: 13316 - DNA, 347 bp, Gossypium hirsutum
  Clone ID: LIB3135-056-Q1-K1-D3
tcgcccacgcgtccgcccacgcgtccgcccaaacatgagccgacatcccatagtgaaatgggctcagagattggatgacgtcttcataactattgagcttcctgatgctcaggacgtgaagcttaaactagatcccgaaggaaaattcttcttctctgccaaaagtggagcggacaaaatcccctatgaagttgatttggatctgcatgacaaagttgacgttgatggaagcaaggctagtgttggaaatagaaatatctgttaccttgtgaaaaaggccgagagcaagtggtggagcagattactgaagcaggaagggagacctcctgtgttcttgaaaagtgatt

SEQ ID NO: 13317 - DNA, 292 bp, Gossypium hirsutum
  Clone ID: LIB3135-056-Q1-K1-D4
gctgtttggccttcagtgtatactgcaatggcttttatggatcaatttgataaagacagtgatgggatgattgagaacgaagggttccctgaccaaacctacgatgcatggcctgttgatggtgtgagtgcatacagtggtgggctatgggtggcagccctccaagctactgcatctattgctcatcaagtaggtgatgatgaagctgctgcctattttcataccaagtatcaaaaggcaaaatctgtatatgcaacattgtggaatgggttctacttcaactacgacaaca

SEQ ID NO: 13318 - DNA, 360 bp, Gossypium hirsutum
  Clone ID: LIB3135-056-Q1-K1-D5
aacggaggtccatacaaggcatcgattccacttagtcaggccacaaaccctgaagcagatgttttacttgcttatgagatgaatggagaagtaagcaacttctctcttatgatcatattctttcccacactcgggaaaaccagaactcaaactgaactcaacaagtatgctaaaatggttgcatcttttataaaaatataaaaaatgaactattatcttgctatctttgccaaagcctctcaacagggatcatggttacccgttgagagtaattgtaccaggtgttataggtgctcgttccgtcaagtgggctgattctatcaatataatagcagaaaaaatgccaagggatttttcatg

SEQ ID NO: 13319 - DNA, 195 bp, Gossypium hirsutum
  Clone ID: LIB3135-056-Q1-K1-D6
cccacgcgtccggggaactgaaaatgtctattgttccaatgctttttctttaaactaatgtggaacattattcttcgtgatatgagtaatcttccccttttattctcaaagaaaaaaaacaatctcacactctttataaactactactcaaacttgatctcaactatgataactaaaatgtgtttcacatttaat

SEQ ID NO: 13320 - DNA, 347 bp, Gossypium hirsutum
  unsure (1)..(347): unsure at all n locations; Clone ID: LIB3135-056-Q1-K1-D7
gttgttcagaaggatgtaaaaaataatgttgtatttgtgtcaagaaattatttctcgttggacaaaagaaggcgtgtgtttcgtgttggctctttgaagtggtttagtgggtcacctcctaaccatattgatcagctccaatgcaaggtcagacatggtcctggcttttataactgcaattttaaaatggagcatggtgaagatggcaatgacgatattgcggttgcccagttatctgaggatgatcaaggtcttgccgctgggcagtttgcagccttctatgagagacaaacctgcttaggttctggtgtgatattggagtcctgggatgatcngggatttcccgt

SEQ ID NO: 13321 - DNA, 354 bp, Gossypium hirsutum
  Clone ID: LIB3135-056-Q1-K1-D8
caccacaagaggaaaaagaagagcttgatgcaagggcaaagcaaggggagactgtggttcctggtgggactcgtgggaaaagcttggatgctcagattaacctagctgaagggaggcacaaaggaggggaaacaaggaagcaacaactaggaactgaagggtaccaagaaatgggacgcaaaggtggtctgagcaactctgatatgtctggtggtgaacgtgcagctgatgaaggtgtcaccatagatgaatccaagttcagaaccaaaaactaaatatcatctcccacgacagaaccctagctactctttttttatatatagaccctaataatggatggttggtttagggttt

SEQ ID NO: 13322 - DNA, 144 bp, Gossypium hirsutum
  Clone ID: LIB3135-056-Q1-K1-D9
agctggcagaggtgcaggactaatgctggcgaggcttgtgaaattggaactcgcgcctaacgtgaccttttgcagttacaggtggcatgaatcaacatacataattgggcgtgcggactccatgagaatgcttacttaatatag

SEQ ID NO: 13323 - DNA, 331 bp, Gossypium hirsutum
  Clone ID: LIB3135-056-Q1-K1-E1
cccacgcgtccgcttctttgtctccctttagttttatacaattgaatcataataactatttttgtccattcaaaagactattacagaagttatttatgataataattataaaataaatcaattacataatttgtttaaaaaaaaaaaaaaaaaaaaaaaaaaaaataataaaattaataaaaaaaaaaaaaaatttattaaaaaaaaaaaaaaaaaaaaaaaaaaagggcggcctttttaaaaaaactaaatttactttctctttatttcaacaatatatttttttttatagtgtcacttaaaataaatttaattggcctttttttaaaaa

SEQ ID NO: 13324 - DNA, 293 bp, Gossypium hirsutum
  Clone ID: LIB3135-056-Q1-K1-E10
gtgaattgcctgacgcatgaacacgacaaataggaagtgtttcgtctcagtattctgtgatgcgtggtggaaagttggcgaccatagcaagcactacattatggactggacatagcgatataaggtcgactggaaggaaatcacgggaagtcatgaatgacgcaccgacctttagcacggagaatatgcgaaataacacgaaagttatatattacagccgaacgtgtatgtctatcattggaggagttattgctggaactttagggatcacaggctttatcggggatatcttt

SEQ ID NO: 13325 - DNA, 359 bp, Gossypium hirsutum
  Clone ID: LIB3135-056-Q1-K1-E2
cgcgtccggtgccctgatggggagagggctcagcggggacgcctacgagatttagctgttttcgaaagggtacatggagatcctcggaaaacatctccatctttagctgtcaaaaagaaccatatcagtaaagcatgtccaagcatcggatgtgcgccctcttgcagtattagaagatacattaaactaccttttaaacctactggactcgagtgaacatcctttcgaagtggttcatgacttcattttcgataggactcgatcaataaggcaggatcttagcatgcagcatatagtcaatgatagagcaatttgcatgtacgagaaaatgggacgatatttcttgcccaggaacatat

SEQ ID NO: 13326 - DNA, 364 bp, Gossypium hirsutum
  Clone ID: LIB3135-056-Q1-K1-E3
cccacgcgtccgcccacgcgtccgtggccgggaaattcaacggcgtaggtacggttagcggtatcctcacggccaaagacgtcgccgtcgatgggttctgcatgaggtgcgggactcacgggtcgaaccgggttggtcgggttcgaggtacttttatctgggttggaaactcggagactcaatgtcctggtcaatgcgcctggccatttcaccagcctatttatggtccccaaactccaccgttgggggctcccaatggagacgttgggattgacggaatgatcatcatcttggtcacccctttggcttacactgttaccaacccgtttaacaacggtgatttcaggggcccgttgacgcgcct

SEQ ID NO: 13327 - DNA, 305 bp, Gossypium hirsutum
  Clone ID: LIB3135-056-Q1-K1-E4
atcacctgctttaagcccagttcgtgacccacttggactgcctgaaggcatgcgatggcttcagccgcaaaactagaacaaatgttgcatcgaaatttattttgtaaaaaccctctttcagaggccaccatctctcagattcaaggctcaagccgtccatatagcccataaagcgcagatgaaagttctacttgcttccgttgtgctgttcagtagggtccagtcacgaaaaacatgctcccgggtcttcagcccttgcttgtacctctgacaggaagcctcaggtattaaacgcttagcttctt

SEQ ID NO: 13328 - DNA, 436 bp, Gossypium hirsutum
  Clone ID: LIB3135-056-Q1-K1-E5
gcgtcgacggcggttgggagtaaatcaaggtctcaatcgccattgatatgaccttgatcggcggctcgtatcctccatcggctggtgcgtttcgtggggacgttaggtcgtatttggaccctatcataggccacttagcatgggctagaacacccttgcttgccaacatttacacttactttagctattcaggcaatccaagggatatctcactttcatatgctcttttcacatccccttcacctgttggatgggatcaaggacgtggataccaaaacctattcgatgcaatggtggattcattatactcggctctcgaaaaagccggacagggagggctcgaagttgtgggatcagaaagtggatgggcttcagccggggggttcgggacatcgatcgataacgcggccacttatttatcgaacttaataagaca

SEQ ID NO: 13329 - DNA, 446 bp, Gossypium hirsutum
  Clone ID: LIB3135-056-Q1-K1-E6
ttcggaagagttgtgtgattattgaattgtagattgtaattgttggtgctttactgcactctttgctccatgatattgctgctttcttctttcaggcatttgcagatgaaattggcataccttttttggaaaccagtgcaaaagatgccacaaatgttgaacaagctttcatggccatggctgcctctgtcaaagatagaatggcaagccaaccaacggcaaacaatgcaaagcctccaacagtacacatccgaggtcagcctgttgcacagcagagtggctgctgctcttcctaatgtaaaggttaatgatgtattaggaagctatctttcttatgcagaattgctgcctttcgtggcatgtaagattacttgtttcttaactccataggtttaatgaacttattatttcttcggacccgacctcattagaagatctaattcatt

SEQ ID NO: 13330 - DNA, 384 bp, Gossypium hirsutum
  Clone ID: LIB3135-056-Q1-K1-E7
gtttcgaattctgggtttaattcgttttggtggggggtagtacccaggtttagacaaattgtggacatcacggctatacacggagtttctcgggatcttattcatgtccgtactgtacgacgtaagggttgtgtgaacgaaagcaacccttcgccgcacggtgggcgtggagctttgccttctgaaggtggtagtccttcccatctcctcttccttgctggtggtggtattggcttttagagtttcagctgtatatatatagatatcttttaatcttccatagatatataaaaaaattccattggaggaagcttttttagatcgcttataagaagaaaagaaattgttgccaagatgatgcttaagattaagaaggttgcgact

SEQ ID NO: 13331 - DNA, 380 bp, Gossypium hirsutum
  Clone ID: LIB3135-056-Q1-K1-E8
caaggtgttgccgatgagctgattccattgatgcaagaacgattccctgagcttggactccttaaagaagattacattgagatgacttggattgaatctatattgttctggaaccaactttcaaatgaaacatcggagattttactcgataggagcaataggaattcccttgttcctctttcatacaaatcaaaatctgattacgtaaggaaaccaatgccagaaatagcattacaagggctatggtcccgacttctcgaggtcaacgaaacaagcacagcagttgtaaacatcatatcttacggaggaaaaatggacgaaatcccagagacagaaactccattccctcatcggaaaggcaccttatacaagataaacta

SEQ ID NO: 13332 - DNA, 451 bp, Gossypium hirsutum
  Clone ID: LIB3135-056-Q1-K1-E9
gaaagatagatacgctttgaaatatgtttatgcatggcatgcaataacaggatactggggaggagttaaacctggaattactgaaatggaacactatgaaccaaagttagtatatcctgtttcatcaccaggggttcggtcaaatgattattccgatgttttgcagtccattactatcaatggtgttggtttagtgaaaccagagaaagcttttgagttctataatgatcttcattcatatttggcatctgctggtattgatggtgttaaagttgatgttcaaagcattcttgaaactcttggagctggccatggtgggaagagtaaaactcactagaaaataccatcaggcattagaggcttcaatatctagcactttccatgacaatgcaattattgcttgtatgagtcacaacactgatcctttatatagggcaaagagcacagctgt

SEQ ID NO: 13333 - DNA, 393 bp, Gossypium hirsutum
  Clone ID: LIB3135-056-Q1-K1-F1
ggcgtttggatccgacgagttaatctctgtcgccttcgccatctccgaagcagcttatgtcacccctcaaattcaaggagaagtggacgtttcaaacgtgatcaaagcaaaaatcgcttctcacccttattatcctcgtttgcttgaagcttatattgattgccagaaggtcggagctactccggagattgcgaggatattagacgaaattctgatggagaccgatgttaacaagcgggatatcctgccaacctgcttgggagccgatcctgagctcgatgagttcatggaaacttactgcgatatgttggtgaaatacaagtctgatatttcaaggccttttgatgaagcgaccacttttcctaaacaagatcgagatgcagctttgaaatc

SEQ ID NO: 13334 - DNA, 378 bp, Gossypium hirsutum
  Clone ID: LIB3135-056-Q1-K1-F10
cccacgcgtccgcacgacccacacagcagggtgagataccagttcctagggctggtcatgcgggtgtgactggtgcggagaactgctttatcgttggagggggagacaacaaaagcggggcatgagaaactgtggtccttaacatgtcaaccctcgcttgctcaggtgtgacatcacttgaagggcgcgttcctcttgctagtgagggtttaagcatggatctgggcttgcttaatggggaagacatacttctatcttgtggaggatttaatggacacttccacagtgacgttcatgttcttagacctagtcacaagtcatcctatgcaatccaagcaaatggatgggtcttttcctgacagagactctgctgggcat

SEQ ID NO: 13335 - DNA, 375 bp, Gossypium hirsutum
  Clone ID: LIB3135-056-Q1-K1-F11
cgcgtccgacatgggctatgaagaaagccaaagtggtaacgcactatggcttcattcctctggtgatcattatcggcatgaactctgaacccaagccccaactttatcaattgctaagccctgtctgattcagttgcttatttcttaaccacccacatcttggtttaactatgtaatttgcttgttgcctatctgtcgaaactacatggtattatgttaggcatatgctttatatgatgttgactgttctattctatgtgcttgagaatacattttatgtaattcgaatcttatttgagtttctcaatattttcttttactcaaaaaaaaaatatctttaatttttctatttctcttttattatatatctaattt

SEQ ID NO: 13336 - DNA, 132 bp, Gossypium hirsutum
  Clone ID: LIB3135-056-Q1-K1-F12
atgctaatgtgagctggccactaggctggggaagcttacgagtaaaaataattgcttttatcaacgcttttagttgttctttaggtttcaaggttctatggcattgaataaatatgtttttgcattttgcaa

SEQ ID NO: 13337 - DNA, 313 bp, Gossypium hirsutum
  Clone ID: LIB3135-056-Q1-K1-F2
ccaaatcggagccaagttctgggaagttgtttgtgctgagcatggcatagatgcaactgggcgttaccaaggagacttggatcttcaacttgagcgaatcaatgtctactacaatgaagccagttgtggtagattcgttcctcgtgctgttctcatggatcttgaacctggaaccatggacagcatcagatctggccccgtcggtcagatttttagaccagataacttcgtttttggtcagtctggtgctggtaacaactgggctaagggccattacactgaaggtgctgagttaatcgactccgtacttgat

SEQ ID NO: 13338 - DNA, 371 bp, Gossypium hirsutum
  Clone ID: LIB3135-056-Q1-K1-F3
gcgcccacgcgttcgcccagttcactaagctgtgtagcacgaagagcatcttgaccgtcaatggcggctttccagggcctgagattcgggttcgcagaggggacacagtttttgtcaacgtccacaatcaaggaaaccatgctgtatccctcaagtgggagggcgttaagggttcaattgatggttcgaatgagttgattcagccagggagaaacttcacttacaagatagagttaaagggtggaataggaactctatggtggcacgccaccagtgcttgggctgcggcaaccgtgcacggggcctttgtcatttttgcggcagcgaatgaagactatcctttttccgcacctactttttgaccaaacaat

SEQ ID NO: 13339 - DNA, 346 bp, Gossypium hirsutum
  Clone ID: LIB3135-056-Q1-K1-F4
gatctaagatcgcggagcggacggcgcgtaatctgctaggttttctttaaagccctagctaccaccacggtgtcgtcgtcaaaactccgccgccgacttcgatttaagtggaatcggcgcaactactaatcgtgggtgaagcgacgtgggtgatgggcggttgctgcaacgggaggacaacgtgcggcgccaatctgctgttacccactgcttaagggtaggctgggaattgggttagtgacttgggctttgaatgggtttgggctttaggcttagttgggcccgggctaaatttatgtcttacacataaaattatgaaaatgtgaaaaattttttgttcgtaaaa

SEQ ID NO: 13340 - DNA, 411 bp, Gossypium hirsutum
  Clone ID: LIB3135-056-Q1-K1-F5
cggacgcgtgggtgattacccagttgacaaggtctctcgctatgtttctgatgatggtgctgctatgttaacttttgaagaactgtacgagacatcagagtttgccaggaaatgggtacctttctgcaagaaataacgttaagctctgggctccagaatggtattttacatggaagattgactagccgaaggataaagttcaaccatcatttcttaaagatcatagagctttgaaggtaagggtcagtttggttgtgctatatcactacatataaaaatttttcatcatgtttgcttctttgtttctgttacagatagaagatgaagactttgaagtttgagttagcgggcttgttgcaagacacagaaagttccttgaagaaggatggattatgcaggatgggacgccat

SEQ ID NO: 13341 - DNA, 172 bp, Gossypium hirsutum
  Clone ID: LIB3135-056-Q1-K1-F6
aaatctaggaagccgctggcgttatattccaaccgtaacgaaaatacacccaggtctggcggtatcctaacgttgttgagggccatcaaaaggaggggatagaagctggtcatttggcaacaggtggaaccgcatgcaagcttcatctttaataaggaggccttcatgctga

SEQ ID NO: 13342 - DNA, 443 bp, Gossypium hirsutum
  unsure (1)..(443): unsure at all n locations; Clone ID: LIB3135-056-Q1-K1-F7
cccacgcgtccgcccacgcgtccgccgttcgtttggtttcctgaattcgctccgcccgatttctcagggtccatttcaaagagaagcgaccaagtaaactacagattgagtgaataaattatataaacccttgcccaaatcttcctcccccaccaccaaaacgtggagaagaaagttttatacagtcggtcatttacagaggcattgaacaatggatgaagatcacaacaacggcggctttttgatatgggaaaaactgatagatcgttttggttgatgaagtgccccgtcgtggtcgccaagtcatggaagagccaactagcttcttcttcttcttcttcttcttcttcttcttctgattctcagcctctcgccaaggttgtctntttccttgaaccctttcaaacccgacgaccctttcttacaccagtttactatggagg

SEQ ID NO: 13343 - DNA, 444 bp, Gossypium hirsutum
  Clone ID: LIB3135-056-Q1-K1-F8
ggaagaagaaaaaaaataaaaaataaatttattaagcctctgctaagctttttcagcccgagctctcaacgccgccgttctccgacaagtcaattctcggggctccgtcaagctccgatttgagcgaggcgaacgcagttttgacggcgaatcctcgaaggtgatcgtgggagcacgtgcgaggaaggcgcgcaagggccggcgacgagggtggctgctgctagcttttctgcttaggcttttcttgatttaatttcgtgttgggctagggttagctctttaggttattgggcttggtaatttgggcctcgcttatttattttgcgctttgggttaaaattcgccctttgggttttataattcggtaaataggggctggggcaaaaaatggggtaattacaaagtattatttgggttaatggaaattaaaaaagaaaaacctta

SEQ ID NO: 13344 - DNA, 210 bp, Gossypium hirsutum
  Clone ID: LIB3135-056-Q1-K1-F9
ttcagaacctgccttagacatcgtgtgttttttatggattcagcgacgtttctaggaacatcctggtgtcaacacagcagtgatgaagctgagtgtccatataacccacccccacagctcgagtgatagggctgaccttcatgagaagcttaacaacaccttgcagtcacggaagcatttaaacatggtaacctcgctgatgcataacat

SEQ ID NO: 13345 - DNA, 364 bp, Gossypium hirsutum
  Clone ID: LIB3135-056-Q1-K1-G1
ggtcgcccacgcgttcgcccacgcgtccgcccacgcgtccgaaaaaacttcaaatcctctcccccttttctctctgccaacccagaatccggcgaggagtagaccggtcgcagtcgtgccgtccgccgtgccggccaccgtgaatcggaaaatggtagtggagcaagtaggtggctgacgtgacagtggcggtggagcagaggcgatggccaaattctgacatggggcggcagcagttgattaggctagggtttttagttccccctttttttgttttgtgtattgggcttgggttcttttaggcttaaggcatttagttgggtattaatttgggccagcaaattggacttgtataattataact

SEQ ID NO: 13346 - DNA, 236 bp, Gossypium hirsutum
  Clone ID: LIB3135-056-Q1-K1-G10
ccggttctaacgggccgctttgggcttcgttgtacatgggtcatttaattttattattttggttttcgtttcgggcctgggctattaagtttgatatgagagggaagataaacgttgataaaaatttctggtaaatgagaaatttttgttaagcttgtaagaaatctagcaaaagtagaatttttctttagtttaaacatttagaatctatcaaaacacctctctttttgtatact

SEQ ID NO: 13347 - DNA, 329 bp, Gossypium hirsutum
  Clone ID: LIB3135-056-Q1-K1-G11
tgttcggccatgcgtctgagggggacgttatgaactcaaagctcatgacgagacacatattgagtgtggaagttgagggcacacataaacgctatataacaatgatgtggtaaacctgctcgacattgagggggtaaacctgcgcatgttgaaggattgtttggtgacgaaccattcaaaggtaagggaaagggagcaccttatgaacccaaaccttctcatagacacctattgaatgtggaagttgaggacacacataaaccttcacgacactcagggggtaaaactttcacatgttgaaggatttcctgacggtaagccatccatga

SEQ ID NO: 13348 - DNA, 313 bp, Gossypium hirsutum
  Clone ID: LIB3135-056-Q1-K1-G12
ggacgcgtgggcagctcattgtctctagcttcttcatttgcggtctcattgctccccacaaggcttgttccccatactgctgctattgaagaacctcatattgctcactgttgctgtgccttattttatctcagaaagcctcttcttcatggacttgagcttttatgactatggctagttcgaacagtcctatacctgtgggcgatgggtttaatgagtatgaaagtgcttttaaacgtcaaaaggcttatcacttcaaaagtgggggatgaaatgaccaaagcttggattgcgagaaccaaaaatgaatttg

SEQ ID NO: 13349 - DNA, 419 bp, Gossypium hirsutum
  Clone ID: LIB3135-056-Q1-K1-G3
cccacgcgttcgcccacgcgtccggttcgaatcactggcggtatgaaggtgaaagctgatagggatgagtcttccccttatgcagccatgcttgcagcacaagatgtttctcaacgctgcaaggagttgggtattactgcccttcatataaagctccgagctactggaggaaacaagacgaagacccctggtcctggtgctcagtctgcacttagagcccttgctcgttcaggcatgaaaattggtcgaatagaggatgttactcccattcccactgatagtactcgtagaaagggtggcagacgtggaagaaggctgtgattctttgctttatatcaattactcactcagctactactgctgtggtgcttggagttttcttttgtaaacaagtttctttacattcaagtgtgttttgc

SEQ ID NO: 13350 - DNA, 386 bp, Gossypium hirsutum
  Clone ID: LIB3135-056-Q1-K1-G4
gcgtccgcctgccgattttctcccagtcacgcatcttttctgccgatttgctccctccatttcttttcttttctttttctctctgccactctttcgattgccttctcaaccaatcgacctttttcttttcttggtctctctgtcactctttcaattgctctcagttggtgggtctccacgttactgcaactgaaagggtgttcttcatatatctctgcccccatcaagtcagtacaggttagtttccccgattgcatgtttctattgctgcttattttctattgctgcttatttccctttgagtcatcatatatcattgaagtaaaagagaagtttatcttcatctgttgtgcatgtatatgattgaaaaatagatttgttatctc

SEQ ID NO: 13351 - DNA, 325 bp, Gossypium hirsutum
  Clone ID: LIB3135-056-Q1-K1-G5
tagagcacctcgtttacacgtgcgccaatgtttttcagggaagtctatcatgcaatcaaaagaattgatctttttgagaaatcgatgtcttactccattactttgaaggaacaaaacaagagaacaatagcctgacaaatggttcggtccgattcgggtgccgtttaggcaagatccgaatcgaacccatcattgatttgagatattgatagggtgaatacccggtctattcaatgctaggcataatgagtataaggacctcaaaaatgctcttttcgtcctatgaatcttaaggggtatgaagtttcatgtttgattttttaat

SEQ ID NO: 13352 - DNA, 297 bp, Gossypium hirsutum
  Clone ID: LIB3135-056-Q1-K1-G7
cccacgcgtccggtgaaccaaaaagactttagcttttcgcttctagagagaccatgtgggcttaccaggatctcatatacggtgacgagcttctttctgactcattcccctacaaggaaatagagaatgggatgctgtgggaagttgagggaaagtgggttgtgcaaggagctattgatgttgacattggtgccaatcctttagccgaagatgctgatgaggatgaaggtgttgatgaccaatctgtgaaggttgttgacattgttgacactttcatgcttcaggagcaaccccctt

SEQ ID NO: 13353 - DNA, 449 bp, Gossypium hirsutum
  Clone ID: LIB3135-056-Q1-K1-G9
cccacgcgtccgatcacttcgtgtaacagttcaaggtgaagttattgaacaatcatttggagaggagcacttgtgcttcaggacgcttcaacgttttactgctgctacacttgagcatggaatgcatccccctgtctcaccaaatccagaatggcgtgcactcatggatgaaatggcagtagttgcaacaaaggaataccgttctgtagtcttccaggaacctcgctttgttgaatacttccgcctagcaacaccagaattggagtatggtcggatgaatattggaagccgtccatcaaaaaggaaaccaagtggaggcattgaatcactccgtgcaaatcccatggatctttgcatggactcaaacaagatttcatttaccctgtgtggctttgcctttggggcttgcattttaagcacgtcaattcagaaggatataaagaaatctc

SEQ ID NO: 13354 - DNA, 384 bp, Gossypium hirsutum
  Clone ID: LIB3135-056-Q1-K1-H1
ttgttcctaggagtttacgaccagcaaatgaagagcctcacttcatcatctcatctgatttaaaactgaatcactcaaactaccaacagaagagacacacgcatatacgtacatacatatgcatatttaaaaaatacgtacacactacattttaaatttgagtaagaaatatattgaagcatgtggaggaggttgtggtggcgcgaggctttgaagcagggtgtgtctgcggccgttgggaggagactttcgcctcctccgccgaacccgctgctgttgggtggagtgacattgggaaccaatttagtattccgcggtacaaaaattaaggtttcttcttcatcttgtgaaggccaatgcaaccctctgatttcaaaaaaggca

SEQ ID NO: 13355 - DNA, 320 bp, Gossypium hirsutum
  Clone ID: LIB3135-056-Q1-K1-H10
cacttacggggcttgacgcctgccattgtaccattcattgatcgaactcttcttcgtgctcgggacccaccaacgcctaagctccaccatgttgaatatgacccttcaccggcattgaagtctgcattaaaatctcaatcagatgatcataagccatccattgtctccacctttgagctcacagctgatcaattgaacaccctgaaagccaaagcaaaatgttgcaaatgcaaacggtggtataaaatagcagcttcaacatccttggctgcacatatatggcgttgggtaagtaaagcaaggggtctcttagctgatca

SEQ ID NO: 13356 - DNA, 327 bp, Gossypium hirsutum
  Clone ID: LIB3135-056-Q1-K1-H11
aaaaaaaagaagcaaaaaaacatggccaaagttctgttgttcattgctctatgtgtgcttccagctttggttagtgctacacgcattctgaataaccaattggtggttgaaggctatgtgtactgtgatacttgccgtgctggttttgaaacccctaagactagaaggctagctgatgccatggttaagctggtatgctccgacaggaagaccggcggagtttgttttcgagaaggagggatataccgacaaaaccggaaaataccattcgtgtatccgaggatcacttggatcagatctgtgatgcagttcttgtgaagagccccc

SEQ ID NO: 13357 - DNA, 316 bp, Gossypium hirsutum
  Clone ID: LIB3135-056-Q1-K1-H12
gcgtccgagaccacagcctatgctgggcaaaggtgttacgaatacctgccatgtctgccaccgcggcctccttgattccttcaccttctgctctcttgggtgcaaggtggttgggacatccaagaacttgattaagaaaggaaaattatccacagaaatggagtactcataaggtgagtcgctaaacataagtgttagcattggagggtataccagaacatacagcaaagcttgacgccattgacgccgacacctacgggcaggaagaggaagggagtacctcatcgagctcctatgggaggctcattataggata

SEQ ID NO: 13358 - DNA, 414 bp, Gossypium hirsutum
  Clone ID: LIB3135-056-Q1-K1-H2
gcgtccggcctcacttgaagatgaacaaagcaaagtcaggtcctttttctgctcatccttctttttgaggatggtcctcatttcaaaacaaagttgaagatagtaaacatgataagagcacagcttctgttttttgctttgtggttcatccaaattatgccctatctttgtagttttctatcatgttatttattccttactaagaaagtttgggacctcacctagattgagaacaatgccgttgaaggaggaaatagtgatataaaagatcgacgtgtgccgcatatcaaggcattgatttactatttatatcaagtcatgatataaaaacatcatctttctgggatacttacatttattgaacttattatcaagaccggggatttaccatttggtcaattgttattttggaaa

SEQ ID NO: 13359 - DNA, 434 bp, Gossypium hirsutum
  Clone ID: LIB3135-056-Q1-K1-H3
aaaaacaacagaggaaagaaaagggaaatctgctaggttttctttaaagccctagctaccaccacgtcgccgccgtcaaaactccgccgccgactccgattcaagtggaatcggcgcaactactaatcgtgggtgaagcgacgtgggtgatgggcggttgctgcaacgtgaggacaacgtgcggcgccaatctgctgttacccactgcttagggttaggctgggatttgggttagtgacttgggcttgtaatgggtttgggctttaggcttagttgggcccgggcaaaatttaggtcttacacataaaattatgaaaatgtgaaaaatctatgtacgtaaaaatatatgtaaatatgtatgtgtacatttatgtatatgtataaagctatgaaatatataaaatatataggtaggtatatgtatatgtgtttat

SEQ ID NO: 13360 - DNA, 308 bp, Gossypium hirsutum
  Clone ID: LIB3135-056-Q1-K1-H4
gacaatttatggttaacaactggatggaacccaaaatgagtggggttggtgcaaacaaaagctcggtgcaaatgccattcttgccgtgtcccttgctgtttgcaaagctggagctgaagtcaagaaactttccctttacaagcacattgctaaccttgccggtaacagcaagatggttcttcctgtccctgctttcaatggcatcaatggtggttcacatgcaggaaacaaacttgctatgcaggagttcatgattcttcctgtaggagcatcatccttttaggaggccatgaaaatgggtgttgaag

SEQ ID NO: 13361 - DNA, 342 bp, Gossypium hirsutum
  Clone ID: LIB3135-056-Q1-K1-H5
ggcctgtcagaagtgagactgacgtatgggatcatgaagagcatgcataatagaatgccaggctacacgatgatgttcctattcctggataatacgataagatgaggaggatatgactcatgagcgtttaaggctgaggacatgttttataagaggagcgctgctctatacatggtgttgtgattgaggagtcctacttaaggttcaaagcaatggaaacccagacatcaatgtcagctgcatcgtggacccgcctcttccacaatgtctgaatggcagcattcatagttggatttattaatcttcttgaatctgtttgagtacagcctatacttgtgactc

SEQ ID NO: 13362 - DNA, 376 bp, Gossypium hirsutum
  Clone ID: LIB3135-056-Q1-K1-H6
gccacgcgtccgcccggatagaatctggatatgttggactgaaggatgttaacactggtataaaagacaacaagatgcaaagcttttttcttgcagagacgctgaaatatctttatcttcttttctcaccacctactgtcatcccattggatgagtgggtattcaacacagaagcgcaccctttgcggatagttaaccgcaatgatgcaaatcttgcagcattggaagggcaacataaaccctggatcaaaatacgaagcaggaaaactggtcgattgggtggtaattaggatttgtttccagcttattgttccttgctgaactatgagattttaatcctcaaatagacgacaagcctgacgttataacgatatca

SEQ ID NO: 13363 - DNA, 415 bp, Gossypium hirsutum
  Clone ID: LIB3135-056-Q1-K1-H7
gtcggaagtagtaagcatgctagaaggaaggagtggcatcccggaaatggtccctgatcctggtagttacaatcaagatttgaggtttaaagccatcagagaccatcataagtctatgaacaataataatagtaagtggagcagcagctcagcatctggtaatgagattgaggagtcctacttaaggttcaaagcaatggaaacccagacatcaatgtcagctgcatcgtggaccgcctcttccacaatgtctgaatggcagcattcatagttggatttattaatcttcttgaatctgtttgagtacagcctattacttgtgactcatgattgtgaggttccattgaaacatggtgtgaggtaagggggggatgctttatttattaatttggacaaggtgaaaaccttacaagat

SEQ ID NO: 13364 - DNA, 296 bp, Gossypium hirsutum
  Clone ID: LIB3135-056-Q1-K1-H9
agacggtggaaaaaggactccgtcttcttcaagaaagcgaagaaactgtttgatgttgagattttacatacagatcctcccaaagaagggtctcgaattggagttgttcgtttatgttcttattgggaaaatttaatgtctgattgtcgttgatttggggaatttaccaaaaatttgtcgaccaagtcgatgaaattggtgtgctaaattcgatggtttgctgcttcgttttctatgttaatcggagctgataattgtctaatctaaatttgtttaatatgtcgttgatgatttac

SEQ ID NO: 13365 - DNA, 260 bp, Gossypium hirsutum
  Clone ID: LIB3135-057-Q1-K1-A1
ggtgggtacaaccgtggaggcggtggatatggtggtcgccgtgaaggtggatatggaggtggtggttacggaggtggacgccgtgatggtggtggatacggtgacggtggatctcgttactcaggtggcggcggttcttgggcttaggttaaggcgttttaggatttgagtgagcttcggctcttattttagggtttaatgggtttgtttgttagtgtgtggtttctatcgatattttttcttgtatcatcaggagtttt

SEQ ID NO: 13366 - DNA, 394 bp, Gossypium hirsutum
  Clone ID: LIB3135-057-Q1-K1-A10
ctgaaggaggccgcatcagttttggatcacgagcagttttggcaagactggaataaatggcaaaagaaagatggcttgagtcttcatcttgttgaggattttagggtgacgccaatgaagctttctgaggtaaaggattctttgattatgagaaagtttggattggtggagcctgataattactggtacagggtttgtgaaggagagactgagtctgttgttcaaaggccatggcatctggtatggaaatcaaggaggttgatggatatagtgtcggcaattgcgtcaaagttgaactgggattatgactctgttcacattgtgagaggggagaaggcgaggaacagggacctgtggcctaatcttgcccaagataccttacctgatgccctta

SEQ ID NO: 13367 - DNA, 343 bp, Gossypium hirsutum
  Clone ID: LIB3135-057-Q1-K1-A12
cccacgcgttcgctttggcaacaagagcgatttgcttttgaaatacaatccggctcataagagagtcccggttcttcttcacaacgggaaaccaattgtagagtctcttgttatacttgaatacattgaggaaacttggaagcataatccctatttgccacaagatccttatgacaaagctaccgctcgattctggatcaagttcatcgacgaaaagtgctttcctaccctttggctagctgcatggagcgccgagaatgagcgagaaaaagtgaccaatgaagcttgcgagtatctgaaaacgcttgaaagtgcccttaatggaaagaaattctttggtgga

SEQ ID NO: 13368 - DNA, 286 bp, Gossypium hirsutum
  Clone ID: LIB3135-057-Q1-K1-A2
cgccacgaacggagatgcaacgttgacataaaggatcgattttgttgctatggttctgcctgcctcatctttaacaactaagcctgacgttgatcggaagtttagtgagtcaaaagccgcgtcgaaatatataaccacgttcgccctttgtacttgctgtttgggtctcgcatttgtttccaagataaatgccttgttctttataccgtccagttctgaaatgtaactattaacttgtttggagatatcgtgactagtgcttgacttgccttcatatattaccttg

SEQ ID NO: 13369 - DNA, 303 bp, Gossypium hirsutum
  Clone ID: LIB3135-057-Q1-K1-A3
ggaaatttgcattttgaggcctagcttttgcttaaaatttatgcttcaccctaaacggcgggggactggcttaaaaaaggataatcatcctgatcgataggcaaaaagtgtggaatgccggcaagaaatgaatagattcgatggaacataactcctaaagggaggcaagtgccaaatgaggggggggcgctttagggggtcaaagcttaccgccccgggcttgcgacgtcataacctttctataggggaccttaacattaattctctggccggggtttcacaacgtcgagattgggaaaacct

SEQ ID NO: 13370 - DNA, 308 bp, Gossypium hirsutum
  Clone ID: LIB3135-057-Q1-K1-A4
ccggataccaatctttaccgcacgttaaacaaagggagagtgcatgcatctcttaacatggacgtgggagcaccgaatccattgagattgaattcgaaaggctacagtggagtgatataggatgatgcgaattttatcggtggatcgtatgcatgatcgccgggggtgctttacagtgtgaagggctgcaaacttgatcattcttgagggcgagagtttttatattgtgcaattgatatagctgtgaatgagattggtcatctgcatcccgattgcttcacgtctattcagaacctttcattttctta

SEQ ID NO: 13371 - DNA, 444 bp, Gossypium hirsutum
  Clone ID: LIB3135-057-Q1-K1-A5
cttcatcagaagttgccgccaaggactcccttacgggagaacatgttcaaaatgatcaggctcaagagctcctaggaactgaaaagacacaggctgaccatgttgaggcttctattattgaaccaaactcctcagaagctcagacatctgtaccgcaatctggcattactgacgatgaagagcagcttgctcagaggcctgaggttgaccttgttgaggcctgcaatgaggaatctaatcctgcagaaggaccatcctcagcacaagccatctctgatgaatctaccaggtctgagaatgatccagggcttacacgtgcatcttcactgcaatctgaaaagtctgaggttcatcaggttgagacctgcaatatggaatcgaatcccacaggaccatcctcatcacaagtcatctgtaatgaatctaacaacccagggcttacac

SEQ ID NO: 13372 - DNA, 245 bp, Gossypium hirsutum
  Clone ID: LIB3135-057-Q1-K1-A6
cccacgcgtacgtgcaacctgaacacacctccattgcatgggctcttatcgcattaccactttctcgagtgacgataatgggtgggtttggtttgtatttggagcctgctggcctccctcgaggccgcctaacattgtcaccatcatctgcaatgattggggtcactgcctctggcattatgggagccattagcatcgcatgaaataccttgtcctgttctttgttatgatccataagcactctt

SEQ ID NO: 13373 - DNA, 419 bp, Gossypium hirsutum
  Clone ID: LIB3135-057-Q1-K1-A7
gccagcttcacctctcaggtcatcatcatgaaccaccctgggcagattggaaacggatatgccccagtccttgactgccatacctcccacattgctgtgaagttttctgaattgctgaccaagatcgacaggcgatctggaaaggagcttgagaaggagcccaagttcttgaagaatggtgatgcagggatgataaagatggttcccaccaagcctatggttgtggagactttctctgagtacccaccccttggacggtttgctgtcagggacatgcgtcagactgtggctgttggtgtcatcaagagcgttgagaagaaggatccaaccggtgctaaggtcaccaaatctgctgccaagaagaaatgagattgcatttgatagtatcaaagccttttgattttggtttctatgtagtc

SEQ ID NO: 13374 - DNA, 419 bp, Gossypium hirsutum
  Clone ID: LIB3135-057-Q1-K1-A8
ataaaaaggggtacattcatagaattccgaagtgggatgctcaacgtatctccaattggacgaaactgcagccaagaagaaagggatgaatttgaaaagtatgacaaggttcacaacatacgcccaaaaatggtttcggtgcttcgagaaaagtttgctcaccttaacttgacattctcaattggaggacaaataagctttgatggttgggacaaaacatactgcttgagataccttgaagaatttcaagagattcatttctttggtgacaaaacttacgagggagggaatgatcatgaaatttatgaatcagagagaacagagggacacacagttaccagccctgatgatacagtggagcagtgcaaagctcttttcatgagcaattgaaacttccctctcgtataccatttaaattt

SEQ ID NO: 13375 - DNA, 404 bp, Gossypium hirsutum
  Clone ID: LIB3135-057-Q1-K1-B1
ggggaatgcaaacggaagacaggacggagctaacggcggtgtcgacgatctatccggaagatccaatggcggcgaggccgttgttcctggagccgctgcagttggaattcgcgtgccatcgtctgattcaatggtgaatactccgccgcagagccctgggcggtctcgatccccgcttttattcgctcctcaggttcctgtagctcccttaccaagggctgatggccattcctttttcaaccaaacttggcggcatgattctcctgtggttgctgatagtccgtcagagaaaggaatccctgtcatcattacatggaattatggtggtaatgacgtggccgttgaaggttcttgggacaattggagatcaaggaagatgctgcagacatctggtaaggaccact

SEQ ID NO: 13376 - DNA, 230 bp, Gossypium hirsutum
  Clone ID: LIB3135-057-Q1-K1-B10
ttcaagcaagccgagctgatatcaaaatttctggtacttatatagcacttttcggtggtatgctaaaccctgaaacgaattcgttaccttcgtgggggacaaactagtattcgtattattttctgggagaaagtaatgccggtgtaagctgggtaaaactatgattttatggtgttctcgtttcagaagaatagcagaattgggaaaaaagatgatgctttgagctacta

SEQ ID NO: 13377 - DNA, 180 bp, Gossypium hirsutum
  Clone ID: LIB3135-057-Q1-K1-B11
gtcaaggacaaggaaaagataacagaagacggggaacgtgacaacaacttcgagaagacgggctaaacccgggaacgaactcgacgccataataggggacaaaccattgaagacatgaaaaaggaactgaaaagctagaaagaagcaagcatagcaaagcaaagaaaataaggtgggaca

SEQ ID NO: 13378 - DNA, 325 bp, Gossypium hirsutum
  Clone ID: LIB3135-057-Q1-K1-B2
aaaaaagttgaagcctgcaaaaaaaagacccatgttttcttgctcttttctcactctaaatttctctggctttattaaatgataatttagacaacaatggcgcatcatgggttacggtacacttgtttggaaaaatttaagggctttttttccttcgcaacttgcagaggtctctctctcaagtcctcagcatgatctctcatttttatccgttttggctttctcttttcaaccctttcttcccatcctctttatcctctctctctgcaaccttacctctcctcccatttccctcaccatgccaggcaaccaaaaagttatgtgg

SEQ ID NO: 13379 - DNA, 356 bp, Gossypium hirsutum
  Clone ID: LIB3135-057-Q1-K1-B3
attcattcaatttctttgcgaattttattgcaatttctgtttctttttcctccttcaacgaacgatgggcacgttctcggctttcttcgattctcaatcgagaagccagtggaattacaacactctcaagaatttccgtcagatctctccgattgttcaaacgcatctcaaaaaggtttatatgaccctatgttgtatgcttgttgcctctgcgtttggggcttatcttcatataatctggaacattgggggttccctcacgacatttgcatgctttggagccataatttggctccattctacccctccttgtcaagagcaaaagagggtttctcttctaatggcatcagcagttt

SEQ ID NO: 13380 - DNA, 283 bp, Gossypium hirsutum
  Clone ID: LIB3135-057-Q1-K1-B4
gttgattggcttcattatcttaggaggtgaagccattatgagctacaagtcattgccactgaagaaggaagttaagaaagtcatacatcttgtgctccatgccactgctctgattctaggcattattggaatctatacggcattcaagaatcataatgagagttcaatacctaatctctacagcgtgcattcttggcttgggattggaatcattaccctttatggcattcagtggatatatgggtttctcatattcttctaccctggagggtcgaccggacta

SEQ ID NO: 13381 - DNA, 257 bp, Gossypium hirsutum
  Clone ID: LIB3135-057-Q1-K1-B5
atgaaatcaagttcttggtaaaaactatcactttaaagtctggatgtcttcatcgaccggggggtgggctgttatcaacggtcctcccccagcgctccatgcaactgttcagtttctacgctttctgggaatctattcggcattcttccatcgttaagagactgccttaccaggtatctatagcgcgcggtcttgactttggatcccattcagttcacgctatggtacacaatctttgtatacactggggatatcct

SEQ ID NO: 13382 - DNA, 212 bp, Gossypium hirsutum
  Clone ID: LIB3135-057-Q1-K1-B6
cccacgcgtccggttggctaagaagcatggatgtagccctgcacaattagcacttgcctgggttcttcatcaaggggacgatgtagcaccgattcccggaacaaccaagataaagaatctcgatagtaacagtgattcactaaaagtaaagctcacagaagaagatttgaaagaaatatctaatgcggtcccgataaatgaagtagctggtg

SEQ ID NO: 13383 - DNA, 420 bp, Gossypium hirsutum
  Clone ID: LIB3135-057-Q1-K1-B7
ctcgacttttctgcatctccttgatccccgaccagcagtcccgcttgaaaatggcagcaaaatatattattggttctgctgtggcatcatttgctgttgcttatgtaattgataaactcgttgctgatgagaagatttttggagggactacaccccacactgtttccaacaaggaatggtgggaagaaactgacaagaaatttcaggcatggccacgcactgccggtccacctgtggtgatgaatcccatcagccgccagaatttcattgttaagtcgggttctgaatgacgtaatatttgcttgcattgtagtcgaagtgtcagtttgattttacattcgctgtgaagaaattgttgtattacacttgtgttaatccggctttgcatttaagagtagctcttgcgtcctaaatatgtct

SEQ ID NO: 13384 - DNA, 259 bp, Gossypium hirsutum
  Clone ID: LIB3135-057-Q1-K1-B8
aagaaagcaagccactatggttttaagagaagatcaaaatggccttaaaaaaattagcttgcatgggcctctttttgggacttaaaaattttttcttttccctaagcagtgcttggggctcttgctctttacccacccctaaaccaaggccaaacccaaaacccaacacccacacccctactgcatccgcacgaggcaggagccctagagatgccctcaaattacgtgtatgggccaatgtgcttaacttaatcaatgt

SEQ ID NO: 13385 - DNA, 277 bp, Gossypium hirsutum
  Clone ID: LIB3135-057-Q1-K1-B9
gtgccacgagacagaccaaaccaaaaacgatgagaagcagagagagaaagaaacagaagaaacagacctggcaaatgcagacatgaagaagaagaaaaacggcatgacggctgagaacagaaacgaaggcagagatgaaaacacaaaagacaacaaaacagacggggcccaaaaaaacaagggatacacaagaaaagacgagggagagaaaaaaaagaaacagggggatcgaaggaaggagaaggagcaaactgggcgttcagacgaagggcggaaa

SEQ ID NO: 13386 - DNA, 121 bp, Gossypium hirsutum
  Clone ID: LIB3135-057-Q1-K1-C10
gacacacatgcataccgggtccgcacactcttccgtggacaacatatggctgaaggaaaaacgcatccactgctctgttaaacctgatccaccgaaagcttattgcgtcctgcataaatcc

SEQ ID NO: 13387 - DNA, 377 bp, Gossypium hirsutum
  Clone ID: LIB3135-057-Q1-K1-C11
tccacgcgtacgctcttctgtgcagctcatcgttactccgacaaacatgactgccctttcgattaccgagctgctgctcgcaatgctattgctaaagccaacccacttgttcgggcagagaagctcgataaaatctgagaacaacccgggtcaagatgaagatatgtggatggcttatgtaagttggttactcgtctcatcaaatgtccccttgattgatattaaatgttgggagaccaacatagggagggacatgatttgcattggaaggctatatttttccgtttgtaagtgattttaattgtgcttgtttgatggacattgataagaacaaacttgaatgcttcttccttgggggatgcaattctacttctttt

SEQ ID NO: 13388 - DNA, 358 bp, Gossypium hirsutum
  Clone ID: LIB3135-057-Q1-K1-C2
atttttactctctgtgttggaaatgcttggggagaagctgcattgcttttagccgctggtgcaacaggaaatcgttctgctcttccttcgtcgacaataatgattaggcagccaattgctagatttcaaggtcaagcaacagatgttgaccttgcaagaaaggaagtaaagaatgtgaaaacagagttggttaaactctatgccaaacatatgggaaaatcaactgagcagattgaagaagatataaggcgcccaaaatattttagccctagtgaagcagttgaatatggcatcatagataacgtattgtacaatgaaaggagcagtgaagacagtggtgtggtttttaaccttaaaa

SEQ ID NO: 13389 - DNA, 384 bp, Gossypium hirsutum
  Clone ID: LIB3135-057-Q1-K1-C3
agactatttattagaaacctagtaatttctttgcttacacttgttagcataggatttctaggagcagaaaaaatcgcctatgaatggatctttcttatagtcattctattaataagtgtcattattttatatcgggaaataaataaaaaaaagaattggattcttttgttgctaatccattttttgttagtgattttggcttttatcttacgctctttcctatccgagatgatttcgactttgctaggagtttctttggttttttgcttttcttcggactcgagtgggggtggacatcttcctctttcgagtccgggcccttccgctccagcaagctccaataattctgatgctgattctttcggcatcaatggtatattggag

SEQ ID NO: 13390 - DNA, 413 bp, Gossypium hirsutum
  Clone ID: LIB3135-057-Q1-K1-C4
aaccgctgtcggtggtcaatctccggcagcctcacctactaaagctccgccggccgcggctactcctgctactgctcccgctactgcccctgttagcaaacctaaatcaccggctccaactgctgcccctaccacttccccaccaacttcttcaccaccggctgctgctccggagaagtctgcggcggttccagccccatctaaatctgctacggcttcttctcctccggctgctgctccggtgagttctccacctgctccagtacctgtgagctctcctccagccaaatcgcctcccgttgctgcaccgacgactccaccagagaagctcggctttcctccggttcctgttgctgcaccaactactgctgaggttccggccccacctccaagcaggaccagaaccaaagcca

SEQ ID NO: 13391 - DNA, 180 bp, Gossypium hirsutum
  Clone ID: LIB3135-057-Q1-K1-C5
cacaatcgtatggatttatttaaggcgtggatggatcattagacatacagcagttgcctgggctcaggatgttgggaacgatgtagctcctgttctcgaagcgacagctatgaatcgcaagtgttattgacaccgattcgctataaacaaagtttacagagggtgcttggcctgaaaatt

SEQ ID NO: 13392 - DNA, 359 bp, Gossypium hirsutum
  Clone ID: LIB3135-057-Q1-K1-C6
gagcgatagcagcttctatggagaatgcaaaagaatctattaaaacaactgaagatgataaagtatcattcacaactgaggaagaaccatgcttgactaagaagcctgcatatcctcctctacctgaagaacctaagggtgacaggaacctcttatgtagggttggagtccgacttcctgatgggcgcagggtacagagaaattttctccgaactgatccaatacagctactgtggtcattctgctattctcaacttggtgaagctgaatcaaagccattccgcctgactcaaccgatttcgagaagctccgaaatctctggattatgatagcatattatcattttaggagtcgggact

SEQ ID NO: 13393 - DNA, 251 bp, Gossypium hirsutum
  Clone ID: LIB3135-057-Q1-K1-C7
gcgaccacgcgtatcgagaaaagaacaagtcatgggaaactactatttccaacaaactggtgggaggtgccaaaatcactgaggagggagaaccccgaccatagacagcaacgtgatgggataataatgaaactacgaattgaaataaggaactagagggggctaaagagcaaacacaggctggatatgaagacggacgcgcagctaaaaatagctgtggacaacaaaagaaacgagcgaacgaacaaaga

SEQ ID NO: 13394 - DNA, 427 bp, Gossypium hirsutum
  Clone ID: LIB3135-057-Q1-K1-C9
tcgcccacgcgtccgaacgggccctggactatattatgtggacagtgaagggggaaggttaaaaggaatgcgtttctctgttggatctggttcaccatatgcttatggtgtgctggataatggctatcggtatgatatgtctgttgaagaggctgcagagttggccagaagagctatttatcatgccacattccgagatggagccagtggtggtgttgccagcgtttactacgtgggaccaaatgggtggaagaagctatctggtgatgatgttggagaacttcactataaatactattcagtgatgccaagcacagtggaacaggaaatggttgaaagaagtgggggataaatgggatctactcaacctaggccaagttgataagatggattaaatgggatttattcttatttacaatgaatactt

SEQ ID NO: 13395 - DNA, 388 bp, Gossypium hirsutum
  Clone ID: LIB3135-057-Q1-K1-D1
gcgattcacccatggtttaagggtattgaatgggacaagttatatcaaatgaaagctgcatttattcctgaagtcaatgatgagttggatacgcaaaatttcgagaagtttgaagaggttgacaaccaaattccatctgcagcaaaatcaggtccatggagaaagatgctttcatccaaagatataaactttatgggttacacatacaagaacgtcgaaattgtaaataataatcagttacccggcatcgctgaattgaagaagaagagctcaaaacccaagagaccttccatcaaatccctttttggtaagatattttcactattgttaagtttgggacactgcaagcaatgaatgttaatgttttgaaatcggtagcatatcaatc

SEQ ID NO: 13396 - DNA, 203 bp, Gossypium hirsutum
  unsure (1)..(203): unsure at all n locations; Clone ID: LIB3135-057-Q1-K1-D10
cccacgcgtccgaaagataaggatgctgaaccaacagaatttgaggagtctattgcgcaggcattcttcgatttggagaataccaatcaagatctgaaaagtgaccttaaagatctctatattaattcagcagtccaaattgatgtttctgggagccggaaaagctgtgntatccatgtcccgtatagattgaggaaagcttt

SEQ ID NO: 13397 - DNA, 244 bp, Gossypium hirsutum
  Clone ID: LIB3135-057-Q1-K1-D11
ccgacgcaaaagaacaatcatgaaacggaaggaaaagaaatcgaggaggcaacagctaacacatactctgtgcagaatgagaccaatcaagaggtgaaaagcgtgcaggctgacaagtatgatcatggagaggtgcaaaacgatcatggtgacaacccaaaagatgtcggtatgaaaatacagaagggagcggaggaaacaatggccaaggctcatgcaaaggttgtgagggaccgaaaaaaga

SEQ ID NO: 13398 - DNA, 168 bp, Gossypium hirsutum
  Clone ID: LIB3135-057-Q1-K1-D12
aaagctttgggtagattctttcttttaatatatcagaggtttcagaaagaaaaagagcattggtaagtgaaaatgggatctggcgctggaagttatcttaaggttttttttaaaaaccttgatattcttgctgggccagttattagtcttcagaatcctctttatgcc

SEQ ID NO: 13399 - DNA, 313 bp, Gossypium hirsutum
  Clone ID: LIB3135-057-Q1-K1-D2
ctaaaagcttgcttgatagtgatctccaagatggtaactacatatcagctaagggcaagaaagtagtagtcatcggtggaggtgacactggtacagattgcattgggacatctatccggcatggatgtagcagcattgtaaatcttgagttgcttcctcagccaccgcagacaagagctcctggcaatccttggccacagtggcctcgcatattccgtgtagactatgggcaccaagaagctgctaccaaatttggaaaagacccaagatcctatgaggttttgactaagaggtttataggagatgataatgg

SEQ ID NO: 13400 - DNA, 332 bp, Gossypium hirsutum
  Clone ID: LIB3135-057-Q1-K1-D3
atacaagctcgctggaatgtgaaatccagggttgtgtctacgcatcatataacggcgggaacggcgtgctacatggtggctgaggcactcgaacaaatggtatagagacatatatgcggcatagatgtggcaaaattgaaaatctatcaatgcttacccagcgaacagaaccaagagctaacggcattacttgaccactgcggcataacttacttcgtgttgactatggacaccgacatactgatactaaatttggaacatacctgccatcctatgacgtttagactatgagtgatatatgcggtcatcacagagctgatcaaggacttaaa

SEQ ID NO: 13401 - DNA, 220 bp, Gossypium hirsutum
  Clone ID: LIB3135-057-Q1-K1-D4
aaccatcgtaggtggtaaattaacggctggttgatgtactaacgcttcatcaggcggggataggattgctactggtcgcgttactgcccctgttaactaacctaaaacaccgtatccaactgatgggcctaccacttcctcaccaacttatttaccaccggctgatggtactgagaactctggggaggattcagccccatctaaatctgctacagcttgt

SEQ ID NO: 13402 - DNA, 161 bp, Gossypium hirsutum
  Clone ID: LIB3135-057-Q1-K1-D5
aatttatgtgtgttagtacaaaatggatgtttttatttttatgaattcggcagccgcggggggaaatgatgttgagaaggtgatagacacggatccataatctaaaggactatatgtcattgatttgagtgcaatttggaatatatttattttaaagtttt

SEQ ID NO: 13403 - DNA, 408 bp, Gossypium hirsutum
  Clone ID: LIB3135-057-Q1-K1-D6
gcatttgttgcaggaaacgatgctggccgtgcatacaatacttttccaaagatgggagatgtgtgggttcctgataatatatttgagttgaaaccaacaatccgaaacttctttgagaatacatccatggtgcagcttgaccatcgtatccttgcaactaccactttaatctccatttgcggtttatggtggtcaaccaaaaagctcgacatccatccagctattcgaactttggttggagccacgtttggcatggctgctcttcaggtaaccctaggtgtatcaacacttttatcatatgtgcctgtttcacttggcactgaacatcaggcaggggccttaacccttttaacactgatgctacttctcaatcacactgtgaggaggccatcaatgtcacttttgaaa

SEQ ID NO: 13404 - DNA, 231 bp, Gossypium hirsutum
  Clone ID: LIB3135-057-Q1-K1-D9
ttcacgcgttcgtccacgcgtacgaccacgcgtgggagctgtgtaaggtgagggataagcgaggctatggagcaaaagataagccgggaggagataaggagggacacctggaaggggttacatacagcgacagacgaggggatgggcgttactccatatcaaacggtgaagatgagactgataagctgtgggagatacggaaaatgtcctccgatacctcttgaagtttag

SEQ ID NO: 13405 - DNA, 282 bp, Gossypium hirsutum
  Clone ID: LIB3135-057-Q1-K1-E1
gagagatagtcatggttttcgggaacagagggggccacgatctagcacatgtatgcagcgttcatatgcgaagctaatggggtgcagcattcgcgaaactgcttgacgagattggaggatctctatatgattacgatttcatggaaaacaacaccattgtcaatggcgcccgcatacaaaccaatcctctcggtgggcacacctacgtgaacgccctgcatccatatgataattggctgcaagacatcgatgaataggactagactagcccataaccataga

SEQ ID NO: 13406 - DNA, 270 bp, Gossypium hirsutum
  Clone ID: LIB3135-057-Q1-K1-E11
accaacaatatgccactagcactaatttggatgggaggtggatggcgtctcgctcaatcaagagaagagagttgtagattcgtagaaaaggggaagagcctttactttctatgttattagaaaaggcgcggtagcctatctatagttaggagtcttttcttgctcgctagcgctttatttttaataaggacgcttaggctctactaataaaatatatatgggcttttaattaaggtgcgcaggttttgaaccctatacaaagggccgttt

SEQ ID NO: 13407 - DNA, 121 bp, Gossypium hirsutum
  Clone ID: LIB3135-057-Q1-K1-E12
gctacgcgtgttaagatctctactgatgctttaatcaaagaaaagaacccacctggtgccggtgatatgctcacaccccttgttgttgggatcttttttggcgtgaaaactctctctggtg

SEQ ID NO: 13408 - DNA, 179 bp, Gossypium hirsutum
  Clone ID: LIB3135-057-Q1-K1-E2
aaaaaatagtaagggttaaaaagacacagattgtaaaacgaactaacaacaaaaaaacaaagggaataaacaaacgtgggggcggggcacccttctcgtgggttgcctgacgtttttgttggttctcttccggatcccgttttccatgcaaaaaagaccattccgctttgggcccgggt

SEQ ID NO: 13409 - DNA, 103 bp, Gossypium hirsutum
  Clone ID: LIB3135-057-Q1-K1-E3
cccacgcgtccggtttttaatcatcaattatatttattgtatgtcggataagttgtaaggccttattaatacttgtttttacccaatttggagatttatcact

SEQ ID NO: 13410 - DNA, 338 bp, Gossypium hirsutum
  Clone ID: LIB3135-057-Q1-K1-E4
gcgcgacctaacatgaggcaagctgtgagatatctcgacggagaggctgaattaccagaacttttgaaaccatcgaggatatatgagggagttggcgaagggtttgacgcttttctgcattcgtccatgtcctcaacatttgataatacgagttcgtattcattcacggatcaacatggcaatggtggtactagtattgtttctctttgagaaagtagactacttctatatatatatataacaaaaatgacagatatttcacatgttatagcatcattcttcaacgacaaaattttcagttctcacatacgaaggcattaatgagggatgtagctgaa

SEQ ID NO: 13411 - DNA, 326 bp, Gossypium hirsutum
  Clone ID: LIB3135-057-Q1-K1-E5
ggttgttgaatgcttgattagaagggatgtttatgatggaatgagtgaagaattggcttgcagaaacaccgttgcgtgcataacaggtattgtgccaaagaccatatcaacaaagggtatgctagctgtatacaactcattgatcgaggaaggcaaaaagcgatttgagggcgcttacattgcctcatattatacttgcatggaaatcctatatgagtgttactaaaatattgcgagtggaagcgagattcacagtgatgttttggctgggcgcccgttttattaaaaggagggcctacctgcctttcctatgggtgaaattgatc

SEQ ID NO: 13412 - DNA, 98 bp, Gossypium hirsutum
  Clone ID: LIB3135-057-Q1-K1-E6
cttttgcttggttactaaactcttagagggtttttagaatctctttagtgtcaaacactgtggaaaaaatttgacataaagagtctattttatacttc

SEQ ID NO: 13413 - DNA, 416 bp, Gossypium hirsutum
  Clone ID: LIB3135-057-Q1-K1-E7
cgcgcaacaaaataatctacacaaggaaatattattctgggcaaacacccagggcattcccagaagagatggtccattgtttccactgctgattcacatcgagggcagattgcatattagtaattagctttctgtattgcatgttagctcgtgtaggcaaataattccaggagattttccaaactgtaatcttaattttggagggtagatagccatagttttttatagaaattgttgtagtcggtctgtaaagcataagcactaggatcttccaaccttgtttataggcactacggatagagtattctcccgagagttcaccactccaagccaggaaatcattatgaggagcattcaccagaggaatatgcagaatcttttcaactactttgtgaggaaaggattgacaatcttct

SEQ ID NO: 13414 - DNA, 273 bp, Gossypium hirsutum
  Clone ID: LIB3135-057-Q1-K1-E8
gacccacgcgtgcgctggacaggtttgactgaatgggtattgtttctcctcgggacgttgccctactaggagcggtggagatcggtagaactcattgtgtgaatctggagcatcgtttgtacccataggtataccctgctcttaaccccgaccatgtttcacacatactccataattactcttgtcaaatgccagacccgaactcctgtcagtttgtgataaaaaaccgtactactcttatgtatttgtataacaactattactggaacatac

SEQ ID NO: 13415 - DNA, 416 bp, Gossypium hirsutum
  Clone ID: LIB3135-057-Q1-K1-E9
gtggcgccgcaatcctcttgtcgaaccgtcgttccgagaggaggcgtgccaagtatcgtcttgtgcatgttgttcgaacccataaaggtgcagatgataaagcctatcgatgcgtgttcgaagaagaagacaaagaaggcaatgttgggatatctttatctaaagatctcatggctattgctggagaggctttaaaatctaacattaccactattggtcctttagttctttcagcatctgagcaactcctatttcttctcacactcattgggcgttaaatctttaatcccaagtggaagccatatatttcagacttcaagcaagcgtttgaacacttctgtatccatgctggtggacgagcagtcatagatgaactgcaaaagaacctgcaactttcaacagagcacgtagaggca

SEQ ID NO: 13416 - DNA, 410 bp, Gossypium hirsutum
  Clone ID: LIB3135-057-Q1-K1-F11
cccacgcgtccgggatgggacgactgattcaagggtgccaatttgtaaccatgcgcacctgcttcgagttcgaacgggacgcgattaaattgcttatcaagctttaccagaaacctgtggttccggtaggcctgttgcctccgttgttatcactgccatcaaacgaggataacaaatgggaagctataaaaagctggcttgacagccaaggagagaaatcggttctctatattgctcttggcagtgaagtgaatctaagtgaagagtccatgcaccaattggcatttgggatagagaaatccaacttgcccttcatttgggtggtaaggaaaccgccagtgggtgaagggcagatgaatgacataattcctccagggttcgaaaaacgagtgtctaacaagggcttagtg

SEQ ID NO: 13417 - DNA, 379 bp, Gossypium hirsutum
  Clone ID: LIB3135-057-Q1-K1-F2
atctccagttccaacagtgacattttctttgaataccaagtataaatccttcactttttctattgatggctgaggttaaagggaaatgggtcaagcttaaccagaatggaactggtcctggagccagaagctcacacgccataaccattgtgggacaaaaggcgtatgtctttggaggtgagttcaccccaagagtcccggttgacaacaagctctacgtatttgatctcaataacttaacatggtctgttgccgatgtaactggcgatgtgccgcctccacgtgttggtgtcacaatggccactgttagtgaaaccatctatgtatttggtggtagggattctgcacacaaggagcttgatgagttatattctttgat

SEQ ID NO: 13418 - DNA, 317 bp, Gossypium hirsutum
  Clone ID: LIB3135-057-Q1-K1-F3
atccgactgtgcaacggatgggagctatccgtttccgcggtgctagagcattcactcgatcgatgggactctgatggtaagggcaaaagattctagacaggccaataacgagagctggtaacgtagccatagcctcgcacgccttgaccagcgttgtacaccactcgaaagctaaagcatgtcattctaccaaacatataccaccatacatcgtgctgtacgaattttatcatgaatactaaccatgggctggtgccgacattacataccatataccgactcacctccttgtggatacaactgccgcttgttacaga

SEQ ID NO: 13419 - DNA, 407 bp, Gossypium hirsutum
  unsure (1)..(407): unsure at all n locations; Clone ID: LIB3135-057-Q1-K1-F4
tccaagttaaagggttggaatttgtagaaatttaacgttttgaaggtacatatccatttggaggctgcagcactgtattttgaggtcagtcgagaggctattcaattcatgttatcagaacttgtacatgcattttctcaccattgcccattcatttgactcaatgtcagttgtgttgaaattgaattgggagcatttccactccatgaaatctgataagcagttaggagtgtttatcaattgaaattgtaatcatatttactctgccttctaagttgtatggcattttttgtgctttcttttattataataataaaaatctcttcaacttanaaaaaaaaaaacaacacaaanaacaaaccaacttattctcttttgatatttttcaaaaaaaaaaaaattaattt

SEQ ID NO: 13420 - DNA, 424 bp, Gossypium hirsutum
  Clone ID: LIB3135-057-Q1-K1-F6
ctcttatcaaaaaagaacacagtaatggctatttctttgaaatctacagcagcgggattggtccagttaaagaaccacaatacccattctccgtctcgctttccttcattcaaacccttagtttcaactaagagattcactccaatggctgctcttgctacttctcaaactcttggcatttctgaaaccttctctaaattgaaaaatcaaggcaaagttgcattcatcccctacatcacagctggtgatcccgacctttcaacaacagcagaggctcttaaggtgcttgattcatgtggctcggacataattgaactaggtgtaccatattctgatcctctggctgacggtcctgtgatccaggctgcggctacgcgttctttgcaagaggaaccaacttgatgcaatctttcgatgttgaaga

SEQ ID NO: 13421 - DNA, 278 bp, Gossypium hirsutum
  Clone ID: LIB3135-057-Q1-K1-F7
ggatgaagcaaagcaagatgaggggtcagtataaaacttggccagaaactaccacttgcggttgattatgattgtattatctggcttgcttttgagacaaactaaatatattgtcaagagagggacattactgagagtcccccctttcctattttatttttactaagtatgtttcatctgtgaaactgtgagaaaaaagagttatctgccttgaaacaccaatagatgcactggttgtttggcgaattatggagggaattaatgaaaatatgatattg

SEQ ID NO: 13422 - DNA, 383 bp, Gossypium hirsutum
  Clone ID: LIB3135-057-Q1-K1-F8
caatctttagatgtgtctcccgattctgatcaagagagtgcttcaacaagagcaatgggtaatattgaactctttgatggtgtagactgtctgacaaaatctcagctattagagactgttgaaagacatgagctggccaatggagatgataaagggtgtctagaacttgaaagcggcaagaaatctagtattgtgaaaaatacaagtgtggagattgtagttcatgaagatgcttttgactcgatctatggcaaaaatggctgcaaccttgctcgtctcaaagagatctcaggtgcaaaggttgaagtacatgaaccttgtggtggtgaaagtgaggggagggtgttgatatctgtgactccacatcaaacccttatagcaca

SEQ ID NO: 13423 - DNA, 286 bp, Gossypium hirsutum
  Clone ID: LIB3135-057-Q1-K1-F9
cccacgcgttcggcagaatttacatccagaggtggtgctagtggatccggaaagactagcttggcacataaaatggaaaatattgttggtcgtgaagtagtttccctcgaaagctattttaaaccagagcaagttaaggatttcaaatacgatgactttaactctctcgatttgcctttgctttctaaggagtggaaacattgttttcaaaatcattggaagcaataaactctcgttcccagcatctgttgacaacttcggagcaatcagtatcccatgtaatgcc

SEQ ID NO: 13424 - DNA, 440 bp, Gossypium hirsutum
  unsure (1)..(440): unsure at all n locations; Clone ID: LIB3135-057-Q1-K1-G1
gctacgcaaacgagcacacattcgctataattatgaggcaggtgccatcgctgataggcgcgcggaatgactttggctgtccttgcgcngacctaacgtgacatgctaaaattatcagactccacggataaactcgtgaacaccactactttccactagaatcaataacctctcttaccaaacccaaaatgattgaaaatgcagccttgcccaccacggtaaccaattaactaatcacgctcttagattgatccatcgttactattgcggaacgcttgaagatcagatataccacatatcatgttatacgttacatgctcatgcgggctctgccgctacctgtgcttcggaaaaaagtacttggcaaggttgtcgtttgcatcgatcgaagctttgaacatcaaaaggcttaagttattgattgaagcccattgaaatta

SEQ ID NO: 13425 - DNA, 348 bp, Gossypium hirsutum
  Clone ID: LIB3135-057-Q1-K1-G2
aagggatgccattgacacaaagaaccaagctgattccgttgtctaccacactgagaagcagctgaaagagcttggagacaaggttcctggtccagtcaaagagaaagttgaggcaaagttacaagaactcaatgatgcacttgcaggggactcaacacaagggatgaaggatgccatggctgcactcaaccaagaagttatgcaactaggccagtcactttacaaccaacctggtgccggaggcagcattgcaggacctgcagttggtggtgaaaccgtgccttcatattcatcacacaagggtcctgaaggggatgtaattgatgcagatttcactgacagcatgtg

SEQ ID NO: 13426 - DNA, 330 bp, Gossypium hirsutum
  Clone ID: LIB3135-057-Q1-K1-G3
gaaacactaccattcccaccaagaaggagcaggtgttttcaacttactctgataaccaacccggggtcttgatccaagtttatgagggtgagagagctcgaacccgggacaacaatttgttgggtaaattcgagctctctggcattccaccagcacccagaggcgttccccaaattacattttgcttcgacattgatgctaatggtatcttgaatgtctctgctgaggacaagactactggccagaagaacaagattacgatcacaaacgacaagggtcccttgtctaatgtagaaatcgagaagatggttcaagaagcgtataagtaca

SEQ ID NO: 13427 - DNA, 172 bp, Gossypium hirsutum
  Clone ID: LIB3135-057-Q1-K1-G4
gtttatgaatagtaggagacaagttggtgttgttctcctagaaaaccttgggagtttgcttggaaagctaaataaaaaggcttatgttgtcaaaaaaacaataaatcaaaatgtaaaatcatgtttctgaaatttttttcatgggaaaattttgcatgaaaatttttatggg

SEQ ID NO: 13428 - DNA, 421 bp, Gossypium hirsutum
  Clone ID: LIB3135-057-Q1-K1-G5
acagcacccaattccatggccacctcttccccacgtgaggataatgtctacatggcgaagctcgccgagcaagccgagcgctacgaggagatggtgaagttcatggagaccgtcgtctccgtcgtaccctcctccgacgagctctccgtcgaggaaaggaaccttctctctgtcgcatacaagaacgtcatcggcgcccgacgcgcctcctggaggatcgtttcctccatcgagcagaaggaggaagaacgcggcatcgccgaccatgtctccgtcatccgtgagtacagggccaacatcgaggctgagttgtccgagatttgcgccggattcttgaagcttctcgacgagaagctcgttccggcagctaagaccgtggattacagggtcttttatctgaaaatgaagggagattaccata

SEQ ID NO: 13429 - DNA, 448 bp, Gossypium hirsutum
  Clone ID: LIB3135-057-Q1-K1-G6
ctcatcctcagtttcatcggatacgagacaaccatctctagccaggcttccgtttgtggatgcattcttggcaaaggcgaagaacaataaaagtcttttatcaaacaggaagatttattcgcgtagatctaccattttgcccgaattcgttgatcaaactgtacggatttacaatgggaaaaattttgttcgctgcaagatcactgaaggcaaggttggtcataagtttggcgagtttgccttaactcgtaaaagaaaacatttgaggagcaaggctgagcctgcaaaaaagaagggcaaaaaataagcatttgcaaccaaagatcacatctcatttcgagagagtggtgattcatgagaaatatgggctgaaaggaaagcaatgaaacaaggaagaaaatggttttgaagtctaatttttttggttaaaggatgtaggatttggttt

SEQ ID NO: 13430 - DNA, 388 bp, Gossypium hirsutum
  Clone ID: LIB3135-057-Q1-K1-G7
cttgacctgccattactcaaagatttcttagtgattcaatccgtcgatcaaattagggggaaaaaatgggagggggagagcatgggcatgggcatgggcatggagttcaagatttcagggagaaggtgtggagcatgtcggggggtccgtactgccggcccaagcactggcgccgcaacactgccattgccatgttcggcgttttcctcatttgcatccccattgccatgaaatcaaccgagctcgagcaacgacctcatcagcctgtccgtccgattccttcacagctttggtgcaagaacttcggaaacaaagattattgaagtctgcctggggctgttggagtaccgatggcatatcagagcagcctatgatctgtatttgagac

SEQ ID NO: 13431 - DNA, 424 bp, Gossypium hirsutum
  Clone ID: LIB3135-057-Q1-K1-G8
caaattttgagagagaggtagatccgatggggaggtcgagaaggaaatacaaacaatctcgtgccaaggtcaaagtgggtctccccaggaaaaaccctcacgtctttaagccatgcttcactcttcctcccaagctccgttcactcgccaacgtcgacgatgccctctccaagtgggacgacaaagccagcgtcatccaaaactacaagtcctttgggatcgtttctaaccctaactacctcggcgttcgttctcgtacttcccacatcgtggagagcgattcactccaagtccctcattctccgccttctgatgaaccggctgatgaattcgagcccattgattcgggcagcgatctcgaagaggatgactaaaaacagcactggggaagaagcgaagagatggaaaaggcagacatttacag

SEQ ID NO: 13432 - DNA, 145 bp, Gossypium hirsutum
  Clone ID: LIB3135-057-Q1-K1-G9
gcgtaggcggatacttgattgagacacatgcgggggagctgcggcgcactatggactaccatggtctcttagttcacgcatgatattctttcgttcgtggcatctgatctgatctacctgaactgagtgacagagcttaacatgc

SEQ ID NO: 13433 - DNA, 256 bp, Gossypium hirsutum
  Clone ID: LIB3135-057-Q1-K1-H1
actttaaataattgaaataccgcatggaatgctcttaagcataattatgtggagaaaagttgagcatgagagcgggtgcacccacaggcacaagcagcataacatgtcaggaagaaagaaggaaacatgtcgggtggttattactcccggacaaaggacggaacccgcacactgttgctgcaaggtagccggttcctgatcatgatggcttgttgccatgaaagaaaccgagatcgagcaacgaccttatcaaact

SEQ ID NO: 13434 - DNA, 356 bp, Gossypium hirsutum
  Clone ID: LIB3135-057-Q1-K1-H2
cccacgcgtccggctcgtactggtgaacaaatgacaccgaatggctgcctgtgatatactccaaaagtgcaagcatattcctcagttgttactagcctttctagtgaagagacagctgaaggaaccaatataagcattattgagaaggaatgttggattcagaagcaactttcagcttttgtagcggccagtggagatcaacagtcatggagaaaagggaaaccattgagcactgaagttgcagttttgaaagatcatgtccctagtttcgatgtcactcgtgaacctgaggttatagatttattaaccccttctgccagctatagagtcaggccatgcaccaagaaaagaagaat

SEQ ID NO: 13435 - DNA, 54 bp, Gossypium hirsutum
  Clone ID: LIB3135-057-Q1-K1-H3
acaaaaaaacaatagttgttacataaaaaaaattagaaaaaatggatgccaaaa

SEQ ID NO: 13436 - DNA, 335 bp, Gossypium hirsutum
  Clone ID: LIB3135-057-Q1-K1-H6
cccacgcgtccgagcaaagacagtgctgaggaagatgcagtacaacatgatgagctataaggcaagaggaatacagtatttcgctggcaatttggttgagagcttaaacacaagtgcttaaattttccagtagtatctttttaagatgtagtcttattagtttttatttagataaaaagggaattaaatgctggcaagagaagtttgagtgacgcgttttagtatgatttcattaactctgcctaaactaagatttatccaatggttttgaacatttcaggctcgtatgttgccttttacttttcatttcttttttttgaattgaagagagggca

SEQ ID NO: 13437 - DNA, 338 bp, Gossypium hirsutum
  Clone ID: LIB3135-057-Q1-K1-H7
ctaagccaccggtttatacaccaccaaagaaagaaaaaccagaacccaaaccaccagtttattagcctccgaagaagccaccagtttatgagcctaaaccaccaaaaccaccagtttatgtaccaccaaagaaagagaaaccaggacccaagccaccagttgatgaacatccaaagaaaccaccgtatggtcactatccaggacaccctccattggggaagcctcaatagagagatcccatcggctagccatcccaagaactgagctactatggctatatagataaattagtatctatacaataagagtttcttcctactcaggatctattctcttgt

SEQ ID NO: 13438 - DNA, 356 bp, Gossypium hirsutum
  Clone ID: LIB3135-057-Q1-K1-H8
gtctctatatgtcagcatgagttacatgtgacatgccacatgttactatttggttactatgtcagtcatgtcaatttttaactgtagaaattgatgaaatttttacagaaatgatcagtttgctctttgatttaatgtacagagaataatttgcccattttttagtagagggggcaaaatgcaatatgacaccaaggattagggccttcatgatatttttacgctagaaagattagaagtaaatccactataccagtggatctagttttcgatgtttctaagatgcccttcatgtgtgcctccatacaaagctaagtgtatgttggtttttccatctaagtacttgattaatgttt

SEQ ID NO: 13439 - DNA, 240 bp, Gossypium hirsutum
  Clone ID: LIB3135-057-Q1-K1-H9
cgtggttcaagggctttgcttaatttcccgcatcggatcggtgacaatgagcctgaacctgttagagttaaggctaaacgtggggcaacaaatgattcggtttcgttcaatggttcatttcccaagaaaacgagaagcttggaagctaacaaggctgagttgaccactgtgtttcaattgggtctattgcaggttggggaacaattattggtgaatgaaaaattatcacaacttttaaaa

SEQ ID NO: 13440 - DNA, 344 bp, Gossypium hirsutum
  Clone ID: LIB3135-058-Q1-K1-A1
cgggggaagcacttgtacacgctgatgcatgtgagttgccatgttcttgcagctttgatgggggggaaaaaccaatggtgaacatccttctgtttggctggttgcagaaatgagttaatgatgtcgactttctcagcggtaatagacatttataactgcaaatggagttaatagttgcccaaaaccatgaagaactgagatggccagttatggactctgtgagaatcagatactgcttaccagaaagcttatttgtctggctgacaattatggggagtttagtttagccggtgaagtggatcttgtttagctgacatgaaacattcatgttctggtcccacaat

SEQ ID NO: 13441 - DNA, 415 bp, Gossypium hirsutum
  Clone ID: LIB3135-058-Q1-K1-A10
cccacgcgtccgggagaactaaatgagagccatttcttgaattcattcccacacatacagagacagagaaagccatttcttaatatcttacatctgtactcgaaattatacttcatttttacttgtaacaataataaatactactgaaaatagtaccaaaaatggaagactgggcaaccctttttttttttcaaaaaaaaaaaaagaaaaaagaggtttcaacgctttgcaaaatcatttattaaagtacccttctttggagctagttcacatctgacactggctgactgaccctttaagcattaaaaattgggggggggcggtttaaaggatccaaatttaacttccgcgtgggagaaacgaaaaaattttttataggggcacctataaataaattcctggcccgtgttttaaa

SEQ ID NO: 13442 - DNA, 448 bp, Gossypium hirsutum
  Clone ID: LIB3135-058-Q1-K1-A11
ctctctcggtgctcccgtcgtatatgactatccatctcttagatattcttattgtgactgccgtggtatcgtgaagaccgctgggtaagggaacttcttgcttggtcacacatgtgtatgctgcctttccagactttggatacaaagccgtttcttgggttgaagatcgattcacttttgaaccgccaaagaagcagcctcttctttaggctgcgaccggatcgctcgcggattgcatgcgctgccacaccagagacagagggtaaggtatgtgaaataggacagaaacaactagccctacctagtgacaaagcagtcacaggtgaatcaaaatatgctgaacttggagccgattatcttgatacggtctacaccgtgatcgggcttgacgaagagctaggaatcactgtggtagaggacaatggccaaagcatatcaactgtcatga

SEQ ID NO: 13443 - DNA, 352 bp, Gossypium hirsutum
  Clone ID: LIB3135-058-Q1-K1-A12
cccccacgcgtccgttcagtactttattcgatgtatgcttttttccgtaaaaagaaaaaaaaaaaaaaagagaaggggaatatttaaaaaaaataaaaactccatccaaaaaaaaaaaaaaaaaaaaaaaataaaatactaaatttaaaaacaatactaaaataaaaaattatttcttaataaattaaaaataaaaaattctcctccccttttctcacaccttatatttttttttcccgccctccaaaaaaaaatccctcctttttgataccctttatccctatcaaaacctaatttcttttccaacccaatttctctttaaaacccttgccatttctcccattttttccct

SEQ ID NO: 13444 - DNA, 224 bp, Gossypium hirsutum
  Clone ID: LIB3135-058-Q1-K1-A3
gctcgagccttaaaaccaacattgtttcttggtttgctagtatttagtatattgcagaagctttctggtgtgtgaatttctgctgatggcattgttccttatagcttcactctcttctttttatgttttctatatatttatttttgatattgttaatcatgggtgttgactattatatttaattcaaattattagtatgaaaaaaaaaaaaaaaacccttccca

SEQ ID NO: 13445 - DNA, 431 bp, Gossypium hirsutum
  Clone ID: LIB3135-058-Q1-K1-A4
ccacgcgtccgaccataggtacttggctgagttcaagactggagatgaccggaaagccgctgctgagaatacgctctctgcgtataaatctgctcaggacattgcagtttccgagctcgctccaactcatcctattcgtttgggattggctctgaacttttctgtcttctactatgagatcttgaattctccggaccgcgcttgcagtcttgcaaaacaggcttttgacgaagccatctcggagcttgatactctcggagaggattcatacaaagacagcactctgataatgcaacttcttcgtgataaccttactttgtggacctcggatatgcaggaggatggaacggaggaaatcaaagaagcctccaaacctgaggatgagaaacaacagtaaaatccgtaatcttcgagttagtattttacttctc

SEQ ID NO: 13446 - DNA, 297 bp, Gossypium hirsutum
  Clone ID: LIB3135-058-Q1-K1-A5
agatcgcgagcgggcgctcgcgatctcacgtgggctaaaatgtgggggtactttgcaagagcgagctgctcgtctgtttctgctaaaatctacccctttagataagcttccaaagaaactgcttgcgaagaagtgaaaagctatgtagtaggctaaggcttcatatcacctcatagtgtattgctaaggagtgctcctttttgtcaaatagagaaatgtatagatttctttcgcttctgttcaatattggataaattgggtcttggtagctgaaactctgttagctatgaggggata

SEQ ID NO: 13447 - DNA, 445 bp, Gossypium hirsutum
  Clone ID: LIB3135-058-Q1-K1-A6
gtccgaggcattgggagttctttgtcaagcagtacaaaaggaaagaggagtgagagagacagagatggaaagggacttggtagagaggttttacctagaaatggaactaataagattggtcgacccgcatccaatgtgaagggggaaaggaaactaaaaataaagcctaagcagaaaatgactcaactatctgtttctgtgaacggcattcttggtgagatgtcagagcaccccaaaccatcaacctccatatcaaagtcaaatgagataactatcaataataatgccaaagaaaaagatgattttggcctggatgtactggatgacttgcagctaccaggacaagatttgggttcatggttaaacattgatgatgatggattacaagatcatgatttcatgggccttgaaattcccatggatgatctttctgacttgaatatga

SEQ ID NO: 13448 - DNA, 442 bp, Gossypium hirsutum
  Clone ID: LIB3135-058-Q1-K1-A7
cgcgggtgaccacgcgtccggtgagagcatcgatggcctcttcagcatcatcaggaagggctgccacagagacaaagcctttctctgttcttttcgcttgcttaggcaacatctgccggagcccagctgctgaaggtgtctttagagatattgtgaaaaagaaaggccttgactccaagtttaacattgactctgctggcaccattaattaccatgagggaaatttggcagacccaagaatgagggcagcctcaaaaaggcgtgacattgagataacatctatttcaaggccaatccggccatcggactttagagattttgatcttattattgcaatggacaagcgaaatagagaggatatattagaggctttcaataggtggaaatcaagagacaaactccccgctgatgcctataaaaaagttagactgatgtgctctta

SEQ ID NO: 13449 - DNA, 369 bp, Gossypium hirsutum
  unsure (1)..(369): unsure at all n locations; Clone ID: LIB3135-058-Q1-K1-A8
acgcaaatntngctttgatttgctagtctttatgccattgtatttatgaagaatactatttctcttatcttgtggttaaattgcatagttttcaattcatatatgtccataccttagtgttttatatcggcggcgaaacggattagcgattatgatcagtactcccaagatcattgctttggatacgtcgtatacatcgagatgttctcggtttattgtaattatcccgtgatgcgaagtttggtctagcttcgggaataggtatttgttttacatatttgtattggacattcatgcaaaaggccgttcatgttggactgccgaagtgttcatatttgaatgattggggcaactctctttaagttggtc

SEQ ID NO: 13450 - DNA, 315 bp, Gossypium hirsutum
  unsure (1)..(315): unsure at all n locations; Clone ID: LIB3135-058-Q1-K1-B1
acgcgtcccgtcaccatctgccaaacgtgatcacaactcggagttggacgatggtttccgcgtatgttcggtttatagagtgagagtgccgtataatatcagaacaaacggaagagtttgtacacggcttaactcgactcgactctataacctatggtaactaagtcattaatgaagaaatatgttaccagttgagcaaagtttaggatatttatgtaattttttttagttgcgttgcttgatttgatttaattacttttttttgggaaggattggaattcaaagaaggtgtggtatggatttgaagattcntta

SEQ ID NO: 13451 - DNA, 379 bp, Gossypium hirsutum
  unsure (1)..(379): unsure at all n locations; Clone ID: LIB3135-058-Q1-K1-B10
cccacgcgtccggggagtatctctgagtccagacgatgaatctttgtatataggaatatgggacagaacgtatgcaagtttgctgcaatacaacaaaagacacacgtatgcatacttagattcgtacttgtgataatgttaaactgcgtgctgttgtagttatggagccctcttttgtgttctgttttgtttgtgtagggtgatttgaatgaagatcaaatattctatgacagtagaataagtgtatgttgtgtaagaactttgctagaaaggtgcgtgtacagtacaatctcatcctttaaatcatatgctatttgtatgattgattttctgttcttaaatgtaagttaataatagagtaaaattaacttgcttggnt

SEQ ID NO: 13452 - DNA, 455 bp, Gossypium hirsutum
  Clone ID: LIB3135-058-Q1-K1-B11
ggaaattatggaccacaaagggagaagaacaagaagcagcaaagaaagagttcattgagtgcctgaaattgttggaaggagagcttggaaataaggcttattttggtggggagaatcttggttacgttgatgttgtgttggttccattttacagttggttttatgcctatgaaaagtgtgggaattttagcattgaaacagagtgccccaagttgattgcatgggctaaaaggtgcatggagaaagacactgtttccaagtccctgcctgatcaagacaaaatctatgactttgttttgcatttgaagaaagtgttcggaattgagtaaaatattgtgcttacaatacatttcaagactcgcctaatatctatgtttcttaaataaatgggcacttcgttgtgccttgaatgttgatttgaattttgttttgttttaaggagtggattaattata

SEQ ID NO: 13453 - DNA, 454 bp, Gossypium hirsutum
  unsure (1)..(454): unsure at all n locations; Clone ID: LIB3135-058-Q1-K1-B12
catattagatgatccttttgatgatcctccccagttgtctgagttgattcctggtgcttctcctgaaggaaaaccaaaggatgaggttgatgatgatgttcggcttgaagatgattgggttcccatggatgaacaactaggtgcttcggagcttgaggaggttctccgtgcaaaggatgcccattcgagagcagttgtacttgaaagtattggggatattcctgatgctgaaattaagcctcctgagaatgttctatttgtttgtaaattgaatccagttactgaagtgagtgcttattttgtattcagtgttggcaataagtgtgtgtacgtgtattcattgatttgtttcacttattttgactttgattggagaagtttatcagagaggactgacaaggataagttggctgagaacatgcgggtgctttcatttntacagcattttactatt

SEQ ID NO: 13454 - DNA, 396 bp, Gossypium hirsutum
  Clone ID: LIB3135-058-Q1-K1-B3
gccgtacggagacgcgggcgcgcgcgaacggaggctcgcatgagtgcagaggcttggcacatgcgggtgagaggagctgctgcgatgctgaggctacgtgggaaggctagaggcgcgcttgtagggaaacagcgctaggggcttctagggttccttgcctctgatttttgttttgggctgcatggtaattgggcttgattaggttgggtattaagaaattcgggtttgggctattgggtttagaatcaggtttatgttacatctgggctttgtaatactaaacatttaaaaaaggactgctatatatataattttatttttggtttacaaaaaagaaaatgaaaaataaaactgtctaaaaaggttggggaagttgttatttggttatttttaaaa

SEQ ID NO: 13455 - DNA, 445 bp, Gossypium hirsutum
  Clone ID: LIB3135-058-Q1-K1-B4
cccacgcgtccggaaattacaggcctcaatattacgccgaaagttttgatcaaaccaagaaacggcgagactactatcattatacacgcgaggaaatctctccattgtggcatgatggacttaaatttctgttcgtgactgatggaacgctcagaatacattattatacgcctttgtttgatggtgtggttgttggaactgaagatgtgctaataacaccgttcacttgtgatcgaacttgttctggtgatgctgttgtagctggtattatgaggaaactgaccacttaccctgagatctttgaaaatcaagatgtcttagagagacagctccgcttcgcagttgcagcaggaattatatcacaatggacaattggtgctgtgagaggttttcctaccgagagtgctacacaaaatctgaaagaacaggtttatgtaccttcaat

SEQ ID NO: 13456 - DNA, 400 bp, Gossypium hirsutum
  Clone ID: LIB3135-058-Q1-K1-B7
caactggtgaccaagctactcgcaagagggaaatagctgccttcttagcccaaacttcccatgaaactactggtggggcaaggtgggctgcaccggatggtccttatgcatggggatactgctacaatagggaatggaatcccccttcatcttattgcgcttcggatccaaattacccttgtgctcctggtaaacaatattttggccggcgtcccatgcaactttcttggaactacaactacgggcagtgtggaaaggccatatgggtcgacttgttaaacaacccagacctgctatcaagtgatcccacaatttccttcaagtctgcgatatggttttggatgactccacaatcaccgaagccatcttgccacattgtgatcatcggagcatgatcacc

SEQ ID NO: 13457 - DNA, 429 bp, Gossypium hirsutum
  Clone ID: LIB3135-058-Q1-K1-B8
agtgtacggccgacattgtcggacaatgcccgaaccagttgaaggttcccggaggttgtaacgggccttgcccagtgttcaaaactgaagaacattgctgtaattctgggaactgtcaacctaccgacttctcgaggtttttcaaggagaggtgccccgatgcttatagttacccaaaggatgacccaacaagcttgtttacatgccccacagggactaattacaaggttattttctgcccatgaagagtatttgggatggttttaagtcctttctatacacaaattagtaggtttatatcaataaatggaataaactcgaatgctatttgagcacatttcttgatgtgcatatgttctgatttgtaataatagtgtttgtcatgaatgaaaatttggagtctctatgggtttcgttttgtgttcatca

SEQ ID NO: 13458 - DNA, 421 bp, Gossypium hirsutum
  Clone ID: LIB3135-058-Q1-K1-B9
cccacgcgtccgctagtcttctaatgtagcttcggactcattaactagtttgaatcaagatagggcctctgctttaactcttcctactgcagctccaagtagtagcttgccactggtacctccatcaagtactgctttagataaaactgctgtcgtgttgcccttttctgaaaaaactaagacagttcctgatcctgtaatgccattcaaaggcatggctgattctgcttcctccaccattgggacaacaagttcagttttaaatgatgggatgcttccttcattagtaaccccaggccagcttttacaaccaggactggtcccagcatctttgcctatgtcttcacaaacagctcagaaggatgtggaagttgttcatgtgtcatctccagaactgacaacatcagcccctgcactagca

SEQ ID NO: 13459 - DNA, 436 bp, Gossypium hirsutum
  Clone ID: LIB3135-058-Q1-K1-C1
tcgcccacgcgtccgcccacgcgtccggtttggatctccagtagaagatcttgaacagtgaagttgggcaaaaagcctagagatttcggaagtgatcatggtgactagctttacgatcgttgaacaatcgattgccatcctcgttatccttggtcatgtccctaatgccaaactccagccattttcttttgttggaataataattcttgatccatgagttggaccgtgttttggcttcatatggtggttgctcttggtgacttaagttttccaatcagttgttactttgtttcttgaatttgctagaaattattttgctaggattttattacaaacgtggtttcacgatcagatctgttttatctgctacagcaacaacgatttgaatagaaactcatcccatcaaagttctatttatcttgttggttcaagcaat

SEQ ID NO: 13460 - DNA, 453 bp, Gossypium hirsutum
  unsure (1)..(453): unsure at all n locations; Clone ID: LIB3135-058-Q1-K1-C10
cccacgcgtccggttgcttaccctctcgatgtcatccgcagaagaatgcaaatggtaggatggaaagatgctgcatcagttgtcactggtgatgggaggaataaggctcctcttgagtatactggcatgatcgatgcattcaggaaaactgttaggcacgagggctttggagcattatacaagggtctggtccctaattctgtgaaggttgtaccttcaatagctattgcgttcgtgacatatgaggtggtgaaagacattttaggagttgaaatcagaatatcagactaaaccggtaccaattctactcaatgtttttagggatgtgtgctatttttgtaggtaaaggggatatagagtaagataaactagggaacaaccttttaacctttttcttttcgtctcatcacgcanaaatgagtttagaaacttatacgagcctgccataatttg

SEQ ID NO: 13461 - DNA, 412 bp, Gossypium hirsutum
  unsure (1)..(412): unsure at all n locations; Clone ID: LIB3135-058-Q1-K1-C11
gtccgcccacgcgtccgattagtgccaaggctcaaaggaaggttgcgagagagatcaagactgctcgagcgttcggtttaatgccatttacaacgatggggacaaagtcattcgttttcggaagatcaatggaagttgataataaagattatgaatacgaggctttcgatgacatgactcccgctatggacgaaaaagatgcttgagccgagatttgagccttgaatagttccatttttatggtatcctcctaccatttctgatgttttggatgaaacagttcactgcatttactatcatattcggtgttttgactatatcagcaaatgatgttttcttctggacttgttaaaagaaaaaaaaccttgtacgttcttagattgatctangcttttatatagaatttatgttt

SEQ ID NO: 13462 - DNA, 455 bp, Gossypium hirsutum
  Clone ID: LIB3135-058-Q1-K1-C12
tgctgatgcagtgatcgaagtgctgccaactcagctcattccagacgacaatgaagggaaggttttgagagttaggttgataatgaaagaaggggttaagcatttcagtcctgtttacctgtttgatgaaggctcaaccatctcatggataccatgcggaaggaagctcacttgctcttaccctggcatcaaattccactatggccctgacacttactttggcaacgaggtttctattctggagatggacggccaatttgatagattagatgaacttatttatgttgaaagccatttgagcaacatctccaccaagttctatggagaagtcacccagcaaatgttgaagcatgcggatttccctggaagtaacaacggaactggcctcttccaaaccattgtcgggttgaagataagagatctctatgagcaaattacttccagcaaactgcagc

SEQ ID NO: 13463 - DNA, 427 bp, Gossypium hirsutum
  Clone ID: LIB3135-058-Q1-K1-C2
cccacgcgtccggtgaaggcaaaaatcgcaaagttaacggttggaccaccggaggatgactgtgatatcactccggttgtgtcggaatcatctgcaaatttcattgaagggctggtcaaggatgccaaagagaaaggagctatattttgtcaggagtacaagagagatggcaatcttatatggccattgttgttggacaatgttcggcctgatatgaggattgcatgggaggaaccattcggcccggttttgccagttataagaatcgactccattgaggaaggaatccaccattgcaatgctagcaacttcggtctccagggatgtgtgttcactaaggatgtcaacaaagcaatattgattagtgatgcaatggagaccgggacagttcagattaattccgcaccagctcgaggaccggatcatt

SEQ ID NO: 13464 - DNA, 455 bp, Gossypium hirsutum
  unsure (1)..(455): unsure at all n locations; Clone ID: LIB3135-058-Q1-K1-C3
cagcagccaaagtttttttggcagggttggatctgaactgtgggtcatttcttgggcaacacactgaggctgcagtaaaagcagggcttttgaatgaatcggccattgacaaggccgtgacgaacaacttcgccactttaatgcgactgggattcttcgatggtgatcccagcaagcaaccttacggtaaacttggccccaaagatgtatgtacacgagagcaccaagaattggcccgtgaagctgcaagacaagggattgtgttgctcaaaaacagccccgggtcgttgcctctatctccgactgcaatcaaaaccttagccgtaattggacccaacgccaatgtcacaaaaaccatgatcggaaactatgaaggcattccatgcaaatatacgacgccattgcagggtttaacgacctcngtggcaacaaactacgtgcctggtgcaccaatg

SEQ ID NO: 13465 - DNA, 457 bp, Gossypium hirsutum
  Clone ID: LIB3135-058-Q1-K1-C4
gtggcggtggccatgaccctttcgatatcttccagtctttctttggtggcaatccttttggtgctggtggaagcagccggggcagaagacaaagaaggggggaggatgtaatccatcccctcaaggtatcattggaagatctctacaatggaacatcgaaaaagctttctctttcacgaaacgtaatctgctccaagtgcaagggtaaagggtctaaatctggtgcatcaatgaaatgttccggttgtcaaggttcaggaatgaaagtctccatccggcacctcggtccttccatgatccaacaaatgcagcatccttgcaatgagtgcaagggtactggtgaaaccatcaacgataaggatcgttgcccacaatgcaaaggtgataaggttgtgcaagagaagaaagtcttggaggttattgttgagaaaggtatgcagaatggacaaagattact

SEQ ID NO: 13466 - DNA, 323 bp, Gossypium hirsutum
  Clone ID: LIB3135-058-Q1-K1-C6
ggctgattaaaactcggaatgcgcttaggagaaactggacattgattgtgttcacaataatgccgttatggagctgcttataggggtgagaactctattgacagaactcatctctgggctaggtgcacaagattcggctcctatgagtctaggtttgtctgatagtctctctagatacaaacggaacttcagcgccaataagggtgatactatgagtgagcaagctattgcgatgctcgatgatcttgctaaaaagctcaacacgtatgcaatgaggattcatgaatggtatggttggcatttttcagagcttacttagattg

SEQ ID NO: 13467 - DNA, 446 bp, Gossypium hirsutum
  Clone ID: LIB3135-058-Q1-K1-C7
cctgctttgctctgaaaagtccaagtttttctccaatggcgaccgtctctccaactcctctggtgaaagatgagctcgacatcgtgattcccacgattaggaacttggactttttggagatgtggagaccctttttccagccttaccatctcatcattgttcaagatggtgatcctaccaagaccatcaaggtccctgaaggcttcgattatgagctttacaataggaacgacatcaacaggattttgggtcctaaggcttcttgtatctctttcaaggattctgcttgtaggtgctttgggtacatggtttccaagaagaaatacatctataccattgatgatgactgctttgttgctaaagatccatctggcaaagacatcaatgcattggaacagcacatacagaacctactgagtgcatccactccatttttctttacactc

SEQ ID NO: 13468 - DNA, 404 bp, Gossypium hirsutum
  Clone ID: LIB3135-058-Q1-K1-C9
cccacgcgtccgcccacgcgtccgatggatttcatgttcgttgtattgataagtggcttaaatcgcacacatcatgccccaaatgcaggcattgtttgcttgaaacatgccaaaagatcatggggtttgatcaaagtagctcaccggaatcatgtgttccagctcaggacatcattgtgcatattcaatcattggaacctgaaggtgtggcgcgtgatattaggggggttagctgatataattctttttcttttggccgaaactggaaatccctttgccactccatctgaaggcgttatattccatgagcgaagctctttttggagtttgaaaggcacccaatttacaacattaatgttgttcgcaagttccatttatcaagcaaaccaaacttcataacatta

SEQ ID NO: 13469 - DNA, 186 bp, Gossypium hirsutum
  unsure (1)..(186): unsure at all n locations; Clone ID: LIB3135-058-Q1-K1-D1
ttgcaattaccagactctgggatggcatgatatgaggtacatactacagtacagctcaagcgcgaaaataaactgnatgtatcgcccgcatagatgcccatatgccagagctgaatgctctgtcaactggcgatattgcatttcgtggcatgcatctaaagaaagatcacagggttgacatgcatg

SEQ ID NO: 13470 - DNA, 454 bp, Gossypium hirsutum
  Clone ID: LIB3135-058-Q1-K1-D10
caataatttggcttaggttgcatctctgtgtctgatgcaacagagaggaagaactaacaaccgtagatcaaggtctttctccagatctcggcttgctgtcgaaggattttagttccccttttcactccccattaaaaaaaaaaaaaaaatcaattcctctcatagctcactagagatcttctctgttaaccatggcggctaacggatttgtaggagatgaacgcaaagttcaaaagaattactggattgaacactcggttgatctgacggtggaggctatgatgctcgactccaaagccgctgatattgacaaagaagaacgtcccgaagtgctctccttactccctccatatgaagggaaaaccattttggaactaggagctggcattggccgatttactggtgacttagctaagaaggctggtcatgttatagcattagacttcatgagaat

SEQ ID NO: 13471 - DNA, 318 bp, Gossypium hirsutum
  Clone ID: LIB3135-058-Q1-K1-D11
cgtccggaactggtagagcacaaggtcgatctttggatgattttccaaaccacaagattgttgcggtgggagctggaagtgcagggcttggtgttcttagcatggctgttcaagctgttgtaaggatgacaggaaatgcagatacagctgcacagaacttcctacttgataaagatgtacaattttgtacctcctttctagcttttttcatcctatttgtgcaaagccttttatgttcttttagatatgtaatgtcctttctcttgtgtaatgaagatgtggattttatgaactaatcatgtaaaaatgttttgctag

SEQ ID NO: 13472 - DNA, 454 bp, Gossypium hirsutum
  Clone ID: LIB3135-058-Q1-K1-D12
cccacgcgtccgagtgtccacgtcttaacaaccgggtactggccaacatatccacctatgggtgttcggcttcctcacgagttgaacatctatcaggacatctttaaggagttctacttaagcaagtacagtgggaggcggttaatgtggcaaaactcgttaggtcattgtgtgttgaaagccaattttaccaaaggtaaaaaggagctcgcagtttccttatttcagactgtagttctgatgttgttcaacgatgctgagaagcttagctttcaagacattaaggactctactgccatagaggataaggaattgagaaggaccttgcaatcccttgcatgcggtaaagtacgagtcctgcaaaagttgccgaaagggagggaggtggaagatgatgattctttcgttttcaatgaacgattttctgctcctctctatcgtataaaggaaatgc

SEQ ID NO: 13473 - DNA, 265 bp, Gossypium hirsutum
  unsure (1)..(265): unsure at all n locations; Clone ID: LIB3135-058-Q1-K1-D2
agtaccattagatcatcggcgttcctagaatgtgagctatgtgtatcgtgcatattatgcccttactatacctttcttacaggaagaataagatgatcaactctcacgctgaaaataagcctcctgagaatgttctacttgtttgtaaattgaatccagttactggagtgagtgcttattttgtattcanngntggccataagtgtgtgtacgcgtattcattgatttgtttcacttaatttcgacttttgattgggagaagttt

SEQ ID NO: 13474 - DNA, 450 bp, Gossypium hirsutum
  Clone ID: LIB3135-058-Q1-K1-D3
attccggtcgcccacgcgtcgggccaccaaaaaccatgtatcaccctcaagttccaggcgagcccacccaaaccaccactttcctcgtcgagactgccaccggcgccatccaaagcttccgccctatcaaacaaatccatcaacacctctgcgcatttcatttctatggctacgacatgacccgtcaagtcgaagcgcaccatttctgcgcacatcaaaacgaagaaatgcgacaatgtctcatatatgacaccccagaagccgatgcaaagctcatcggattggagtacatcatatcggagaatttgtttttgacgttgccggacgaagagaagccgctttggcattcacatttgtacgaagtgaagagtggggtgttgtttatgccgcgagttccagggccgatcgagaggcaagatctggacaaagtttgcaagacttatggggaga

SEQ ID NO: 13475 - DNA, 420 bp, Gossypium hirsutum
  unsure (1)..(420): unsure at all n locations; Clone ID: LIB3135-058-Q1-K1-D4
cccacgcgtncgcctaatcagtagctcatatttttttggagctgtgagacttaaaacgacatcatctgggttttgaagaaccaagaatttgttaatgaattagttcggaataagaggctaagactaggaaaaatgtgaatacttataatctttgttgtgggttggggtgctttaattgtggtattttctgcgcttgtaaatataaaatgtggtctggcagtgtattccttgtttgcagcgagtgaaagtgtcgctgcttacagcttttatactgctgccattaatttaattagcttcactgtcattatagggggtttaatttgtacatactcattaggttgattatcatgtcaattattcaaggatgcttaagtcataatcttattttatcgccctttattagaagggtgacatttattg

SEQ ID NO: 13476 - DNA, 428 bp, Gossypium hirsutum
  unsure (1)..(428): unsure at all n locations; Clone ID: LIB3135-058-Q1-K1-D5
cccacgcgtncgaaaaaaaagaaaactgagctttttattttctctgcaggtccatatgccggcgaggctccggccatcgctccgccgtgtctccgtcgctccggccaccgtgtaatcgcctcaggtataaaaaaatttctctctttttttgtgtgttttaaaatgtattcacttttcttttgtatatattgcctattcacacatatatgggtataaaatacatcgattggccatgaaatatcaacgaaaaagaaagaaaaaaataaaactaaccaccttaggactacggcttctgttcttgagggcttttggtctgtttggatgctttttttatttcttgaaggctaataatgcttttttttttgcttgaatctatgttctttttttgtatttgaaaaatgtccgaatgtacaaaaggtaatggattc

SEQ ID NO: 13477 - DNA, 397 bp, Gossypium hirsutum
  Clone ID: LIB3135-058-Q1-K1-D6
acccaaaccctggaagttatccacctccaggaagtactcaatctggttatggaatgccgccttcccaaactggctatgggaatcagccaccagcacagcctggttatggagctggatatggacaaccacaaacgcagaaacctttggccaatccgcagatgtatgggcaggctcaacagtcgcctagcaccccaggaagttatggccagccaggatatcattcacagccgccatcttctggttatggtcaaccagagacaggttcacaacttgcacaaccaccaagttatggtgcgacatctgcccagcctggatatggagccccaacctatggagctggttatggagcaccttataacacctcttatggtggtagttactcacagccttcaacata

SEQ ID NO: 13478 - DNA, 447 bp, Gossypium hirsutum
  Clone ID: LIB3135-058-Q1-K1-D7
gttctttcattttgataccatttttgcttcccctataaggctctacgagttttttttttcaaaaaatggttaagggtttcatggaaaagcttgaatgggcaagtagttatggtaagaaacaatgcagaaaccttttttggaaaatgaaagcagctttgaagagaagaaggaaaaggcagttcaagttccattatgatccttcaagttatgctctaaactttgatgatggttattgccattgtggtgtcggaacaagtacagtccaacttgctagattgcagggattttcagagtgtgagaatgttatttgggtttatgtttttgggatcaaattgtaaaaaaaaaaccaatctctttggttttgctttccatgttctgtttttgttcatcttgtttctgtagaaataaaagagggtaaagcttgcagctatggttttttggaggtac

SEQ ID NO: 13479 - DNA, 224 bp, Gossypium hirsutum
  Clone ID: LIB3135-058-Q1-K1-D8
ggctccccaaaaacctctgttggaactctttgttaagcttattattactttaactatccttttgttgtgttggatcattcctcaattgaacagatgttgttgagggtcaaaatactctgtttattgatttggtgttcaaacaatggcactgagtttgctatgggcttgaaattatcatttcccttttgtttcttttaaaaaaaaaaaaaaaaattaattttata

SEQ ID NO: 13480 - DNA, 367 bp, Gossypium hirsutum
  unsure (1)..(367): unsure at all n locations; Clone ID: LIB3135-058-Q1-K1-E1
agagcccccagcttggatgtgccacaatgtcccccggtcgtgaacgtgcccgtgttatcttgaccaactccaatggcatttcatccaccacccgttatgccaatagcatgggcttcatggttgacaaggctgaagttggctgtgctgagatgatgaagatgtatcgggaggatgaggaggatgtctagtgtgtgggtttggatttatttgcatatgaaatgtgatgttgtctgctatttgttatgtgaattgcttcgttatttctacgttnnaaaaaataataccagaaataaaagcagagcaacgagcactctttttggacccaaagccggctataagacggccgatcccgggccggagacatttg

SEQ ID NO: 13481 - DNA, 447 bp, Gossypium hirsutum
  Clone ID: LIB3135-058-Q1-K1-E12
gcaccagccgacgacatggggaggagacctgcaaggtgttatcgccaaatcaagaataagccataccccaaatctcgatactgccgaggtgtcccagatcctaagatcagaatttatgacgttgggatgaagaaaaaaggtgttgatgagtttcctttctgtgtccatcttgtgagttgggagaaggagaacgtctcaagtgaggcattggaagctgcccgtattgcctgcaacaagtacatggccaagtttgcagggaaggatgctttccatttgagagtgcgggttcatcccttccatgttctgcgtatcaacaagatgctttcatgtgccggtgctgataggcttcagaccggaatgaggggtgcttttggaaaacctcaaggaacatgtgccagagttgacattggtcacgttctgctctctcgtcgttgcaaggatagcaca

SEQ ID NO: 13482 - DNA, 200 bp, Gossypium hirsutum
  Clone ID: LIB3135-058-Q1-K1-E2
gagaactagtagtttacatcatattttgtccatattttgtagtgttcttcaattgtacatgtgaaaaaaggggggcttggatggtcaagcattctagtttagagaataaaacaggtaaaaattaaaacggcatcgttatatctcatatcttgatgcatttgttttggtgttgtaatctttaatgttttttctttattgtg

SEQ ID NO: 13483 - DNA, 262 bp, Gossypium hirsutum
  unsure (1)..(262): unsure at all n locations; Clone ID: LIB3135-058-Q1-K1-E3
tcccgttcttcgttcacggtctaagtctcgctcccgctcttattccggttcagactccaagtccagttctcgctctcgctcagtgtcccgctccacatctgctttcccgtctagctctcgttctcgctccacatctttatactcttctccttcntcgagcggagctctcgagtcgcagcctcctagcgtcaagtggactgagcattaggcaggcgtccctctcgaattaaaatattctgtcgagagacttcatcgagtttgt

SEQ ID NO: 13484 - DNA, 218 bp, Gossypium hirsutum
  unsure (1)..(218): unsure at all n locations; Clone ID: LIB3135-058-Q1-K1-E4
cacgcgtacgcccacgcgtccggttccnccatactccccatattgaatgtgtttgcctattggagcgttgttgaatgatagccttcacctatgggatatatgggattctctattttatttcatgataaaaattataagtactgtaacttataataattcaattttgttttatatttttggtccatagatttttaattggtgcattacttggttggaat

SEQ ID NO: 13485 - DNA, 387 bp, Gossypium hirsutum
  unsure (1)..(387): unsure at all n locations; Clone ID: LIB3135-058-Q1-K1-E5
cccgggggcctttgtgtatctcacggtggtcgctttccgcccttctcttctgaggggaaacctcctataacggtggggaagggacacaacgatttgacactctgtacggtgtttcggaaaaagacttgctgtgatgctgaccagacacatcctgctttgctgtctattangaggctggctttaacacgcgaagccagcgaagagtgtttgcatttgtgggaatagctggaatgttccatatgccatccacgcaggggagttcatcctggacccccacttatatgcacattcttctgtgatagagtatatcaggcctgctctaatgcttacttctcaatggatgcaaagacacaaggtttagcaccatgtggagcaaatgactttgtt

SEQ ID NO: 13486 - DNA, 456 bp, Gossypium hirsutum
  Clone ID: LIB3135-058-Q1-K1-E6
tccgcccacgcgtccggctgtttgcctttgcaccgctatcaaagctaacatcttaggcatcaaccttaacagtccagtttcccttagcttgctcctcaacgtttgctcaaagaatgttccttccaacttccaatgctaagtcttcactgttcccaatattctttctagtcttccttattgcgtttggttattgaaagttacggcttccgacatttgcagcaaaccagtggtttttcatttgtaactttattatttggatttccttgtgagggagggatactgaataaatttaatacttctcttcaagtgtttttcttttggggttttttttatctccaaaagacatgaaaaagacttgtattattcccttgcttttgcttctctatccatttactattggattttgtatgtgaaccaatctacgttgaacgaataatacatctttattcgatttta

SEQ ID NO: 13487 - DNA, 312 bp, Gossypium hirsutum
  Clone ID: LIB3135-058-Q1-K1-E7
ctaccatcaacggtatgatgcttttattaaattttccgatcatacaactcaaatgggccgcttctttagtttacctggtggtgcccgaatggaatgggtcaatactatttgctttctgcaccatttaatatgaatgttcaaactttttgatgttgcaaaactatatggcactatggattatgctgtacatatttattttcctgtaagaaagataaaatcattatagagcataatccatgcacaaattaagcaaaaagcgcataaagctggcataaagagcgtgaaagccccacaattgccccttgagataca

SEQ ID NO: 13488 - DNA, 438 bp, Gossypium hirsutum
  Clone ID: LIB3135-058-Q1-K1-E8
cccacgcgtccggaacaaccaaacatacaggttgcttagaagtcccaagttagagaacatgggtcgtggagtcagcagtggtgggggacagagttctttgggttaccttttcgggagcggagaagctccacctccaaaaccaaccaacgtcacgagtactggcaccaccagtaatgaagttcctcagaagcagattgaggttgtgaaggaaactgtgcaaaaaccgaccactgcttcaccatcatcgggtgatgccaaggagatccctgcaggtgttccagggagcaaaacgaacaactatttccgagctgatggccagaattgtggcaactttcttacggagcgcaggacaactaaggttcacgcagcgcctggcggtgggtcttccttggattacctgtttggtggcagcgagaagtgatatgtgagatattaaat

SEQ ID NO: 13489 - DNA, 211 bp, Gossypium hirsutum
  Clone ID: LIB3135-058-Q1-K1-E9
gacatggatgatgtgcatcgctttgatccagttcatggacaatgggcccaaatagagacagggggggagaaaccaacgggccgaagggcattttctataggggggattggcaaatgcatgatcatatacggctgggaagtggatcctcgtgatttatgctaccatcgtgctgagaaaatttctggagaggtatactgtgtggacacagaca

SEQ ID NO: 13490 - DNA, 434 bp, Gossypium hirsutum
  Clone ID: LIB3135-058-Q1-K1-F1
ctaacttttggactcaacgaaactctaagtctctggttagacaacgtaacctggaaccgaaggcttggtgttaagtcctctaactatcaactcatagcttcaggaatagtttcaggtttataaaccttagcttaggaaatgccttagagaaaaatccaacaacctataattccttaagacaggagtcccagacagattagtgattagtattggatggattatcgagttattaattcacccgatggaatcatacgagccaggaaggttcacattgccggaaacgaggcttttctttaccctgcttttcccatgtctcccgaacacgaacccaatcgagatgaaagtttataacccgggaagatcagagggcttcggataggaactcatcagtatgattctttcttttttttaatgactagtctcttcctttcttc

SEQ ID NO: 13491 - DNA, 460 bp, Gossypium hirsutum
  Clone ID: LIB3135-058-Q1-K1-F10
cctgagcctaagccaccagtttataccccaccaaagaaagagaagcctgaacccaagccaccagtgtatgaaccaccaaagaaggaaaagcctaagcctaagccaccggtttatacaccaccaaagaaagaaaaaccagaacccaaaccaccagtttatcagcctccgaagaagccaccagtttatgagcctaaaccaccaaaaccaccagtttatgtaccaccaaagaaagagaaaccaggacccaagccaccagtttatgaacatccaaagaaaccaccgtatggtcactatccaggacaccctccattggggaagcctcaatagagagatcccatcggctagccatcccaagaactgagctactatggctatatagataaattagtatctatacaataagagtttcttcctactcatgttctattctctcgtatgtcatggaagaatgtttctttta

SEQ ID NO: 13492 - DNA, 342 bp, Gossypium hirsutum
  Clone ID: LIB3135-058-Q1-K1-F11
cccacgcgtccgggctgatgtattttttagtaggtagcgttccgagttcctagggaggagttgggcttccaagttatctattatcgctctaagtagatttaatcgccacttacatttgcggtgctgctttttctttcacatgttagttcgatgatacaataaagtgtacacaaataggcgttctataaaatgccgtgttctgacattgagctaataacaccgttcacttgtgatcgaacttgttctggtgatgctgttgtagctggtattatgaggaaactgaccacttaccctgacatctttgaaaatcaaggtgtcttagatagacagctccgcttttca

SEQ ID NO: 13493 - DNA, 181 bp, Gossypium hirsutum
  Clone ID: LIB3135-058-Q1-K1-F12
cccacgcgtccgaaaaaaaaaaaataaataaataataaatatataataattcaagggggtgggggggtaaaaaaaaataaaataaaaaaataaaggggggtcgcttatgagagaacaaaaattttggacacgttcatgggacgtgataggtcttttttagggtcacctaaatttaattttg

SEQ ID NO: 13494 - DNA, 427 bp, Gossypium hirsutum
  Clone ID: LIB3135-058-Q1-K1-F2
gtcaaatgcacatcttcgtcaaaccctaacggagaagactataaccctagacgtcgagtcgttggacaccattgacaatgtcaaagctcacatccaagacaaggaaggcattccacctgaccaacaacgtcttatcttcggcgccaagcaactcgaagatggccgcaccttagccgactacaacatccagaaagaatccactctacaccttgtcctccgtctcaggggaggtgcgaagaaaagaaagaagaagacctacaccaagcccaagaagatcaagcacaagaagaagaaggtcaagctcgctgtcctccagatttacaaggtggatgagtccgggaaggttcacagactgagaaaagagtgccctactgcggaatgtggcgccgagaccttcatggctaaccattttgataggcactattgc

SEQ ID NO: 13495 - DNA, 354 bp, Gossypium hirsutum
  Clone ID: LIB3135-058-Q1-K1-F3
tttgggggaatgttccttaacctactatgatacaacggcttatgatgctggtctttcaaggtcttggtccctaatcatgggtatgcattctaaaaactcacgtgttgttataagaactttagtttgtgctgtttatgcattaacgttagccaggattgtaggaaagaagtttagataacgcctgctttcctttcttttattagcaaatgggtttctgtcgcctacttcgatgctattccaatcatccgaacatcgtggaatagttttaaagttgtaccttgtgcaagacatttgaatttatcttttttttcttttttcgtttctggtcggtgcgaaatgctcatccttggcatt

SEQ ID NO: 13496 - DNA, 168 bp, Gossypium hirsutum
  Clone ID: LIB3135-058-Q1-K1-F4
gtctagtcgtgtgtctgcatcatctgttgtaacctgttattcttagattgattgtgtgtgttctatagataccaccatgtggatccgagtcctctgcaaaatgacagactgtactatagaggcttaaaatttgatatgagcctgaaataattcatatttccttgcttc

SEQ ID NO: 13497 - DNA, 435 bp, Gossypium hirsutum
  Clone ID: LIB3135-058-Q1-K1-F5
gccattcgctcaagtcgggtactaagaaaggtctctaaaaagacggtgaaagtgctcatggcgtgactcgggagaaagtacggtatggcgactaaagcggcgctgaatgcgcctcaacagtcgacgcggcgctagtcgtgtccctgaacatttgttttacctctggcatggatacgaccaccgcctatgtgcatgtccgtcaatatgacagtactatttacccatgtgttagtgtgtcactgaaaaacgcagctagaaactacgcgagaaataatgaagaaatcatgaaagagaacaccttatcaaccacctgaaaaaaaattcgtttcttattatacgactaggaatccgcaagagaaataccctggtgcttcctataggccttcttatagccggaaaatacattgccttagccatttccctggcgatctggct

SEQ ID NO: 13498 - DNA, 373 bp, Gossypium hirsutum
  Clone ID: LIB3135-058-Q1-K1-F6
caaagactcacttcaagttctacgctaatgaacctggcacaggccctagctgaccacaaaatgtgctacgaggagatgccacttcaagagttgcaggcaacacaggagcagcaaaccatccaaaacctatgtgacacactaagaaccattctccggttatagatagttgaatgctacatttcttttttcggttgttgtatgttattgtcattgtcatccgtgctttaggatactgcagggtatgttgtattatataagggtatacatgatggcaaaatgaaatgcaatctaaatcaagctttgaagcgtataatgtcgaaaccgttttttgaaaaaaaaaattaacttttatgctttttttctcctctttctt

SEQ ID NO: 13499 - DNA, 385 bp, Gossypium hirsutum
  Clone ID: LIB3135-058-Q1-K1-F7
cgcgtccgcaattcatgaatatgctcgagaaatatggaacataaagcctgttgaattaccataattttggttagactttttcaaccatggggactgcccttttgcctgttaataactgctctctttgttgtaatgcaaggaaaacatgcatattgtaacaagtcaagcctctataaatgcaataaaattttgaattagaaaaaaaaaaaaaaaaaaaaaaaaaaaaaaaaaaaaaaaaaatataaataataataataaaaataaattttctgactttcccatcaaatgtaatttaaattttatttctatttctttcattttttttaatatttacttttccttgtctttttaaattctaattttaattggacataaactttaaaaa

SEQ ID NO: 13500 - DNA, 447 bp, Gossypium hirsutum
  Clone ID: LIB3135-058-Q1-K1-F8
ggctgaagctcagtcaaagtgctgtcttaaaaccctagttttcgagctctctttcagttttccggaatccatgtcaaggagaaaggttagggagcccaaggaggagaatactaaccttggacctgctgttcgagagggtgagcatgtttttggggtggctcacatttttgcttcattcaatgacacatttattcacgtgactgatttgtctggaagggaaacaatggttcgaatcactggtggtatgaaggtgaaagctgatagggatgagtcttccccttatgcggccatgcttgcggcacaagatgtttctcaacgctgcaaggagttgggtattactgcccttcatataaagctccgagctactggaggaaacaagacgaagacccctggtcctggtgctcagtcagcacttagagcccttgctcgttcaggcataaaattggt

SEQ ID NO: 13501 - DNA, 337 bp, Gossypium hirsutum
  Clone ID: LIB3135-058-Q1-K1-F9
ttcagggtttccttatgggttcaatacatttcacggtggtgttgctcatgggtttccccagctgacgacacgagggcagcagcctgataatgttttgaagaatcttctgttgttgattggggtgtttgtcgtcctcgctttgctttattggtgaaatagttcagcatttaagctgttatccagtgttggatattcagtgtctgtagatataccagcagcactggcgaatgattatgtttgggcttgagaaaaagttgtctatatgaatgatactgtcatttttgtttctttttagcatcagcaacaactcaaaccagtgttaatgttcaccttttca

SEQ ID NO: 13502 - DNA, 369 bp, Gossypium hirsutum
  Clone ID: LIB3135-058-Q1-K1-G1
tgaaaaccttacagcttatcttaaggttcatggaaccctaaatgcagaagcagaacgcgcaaagattaagaataaaatggatgaaatactgaagcagcaggagaagctgaagaagatcatcagtgcatcaggatatcaagaaaaagttccatctcacattcaagaagagaatgcaacaaagctggcaaaacttctccaagaatttgagtttttcaagaaagaaagcgatcgtttagaatctgaatcgcagcatcaaaagtaaggttaacccctcccttttgagtttctcgattcgaatgataatttgaatggcattacactatctcttcttttttatgattgctatgttactgtctaaacctcaccata

SEQ ID NO: 13503 - DNA, 427 bp, Gossypium hirsutum
  unsure (1)..(427): unsure at all n locations; Clone ID: LIB3135-058-Q1-K1-G10
gaaaagggtnggaatagaagactgtttcgagcaaatcatatctttcgagacactgaatcctaatttgtcagaatcgaagtgtgtcgttctcaagccgtcgacggatgccatcaaaattgctcttcacgtcgcacgtgttgattccccacgcaccctatttctagacgacaatgttcagaatatatccgctggaaagactttgggcctctggacttgtttggttgggaagagtggtgagggaaaggaagccgattatgcaatagaagaagtcaagactttgggggatgtgataccagaaatctgggtcaacaaacaggatggtggtgacagaagcagaagtgaatgggagttggatcaattcaatatctctggngacctaattgaaaacgatgtgggcttagctcttacggccccattatgcacatga

SEQ ID NO: 13504 - DNA, 213 bp, Gossypium hirsutum
  unsure (1)..(213): unsure at all n locations; Clone ID: LIB3135-058-Q1-K1-G11
caactatgaaggcaaaactgataaaacaataatttagattgtgttgtgatggggctgtcatttgtcaacactagcgtggaatttatattgtgttgttaatttgcactagtattaaaataaagtgacatccattaataaagattgctactactatcgtctaatgtgtcatcagtttgacagtttgtagtttgaataaatgatatcgcttgtgng

SEQ ID NO: 13505 - DNA, 404 bp, Gossypium hirsutum
  Clone ID: LIB3135-058-Q1-K1-G2
ggaatccgagttcccaagtcgcgtcatctctcgggtcttgcttggaagctcaagtgcaagaaaatcaaagcaagttgaggggtttggaaacggtttcgaaccgcttgcaagaagaaattgatgaaaaagacaatgaagtctcggttttgaggaagaaattagctgagattcattggggtaacaccaagttgtccaagaaattatctggtaacctcaattcagcttgtgatgttcttttaaccgttagggtatttcattccgttttgcatgatgcttgcagagcaactcataagttcagtaagattttgattggtttgatgataaaagctgggtgggatcttgatttggttgccaattctatttatcctgatattgtttatgctaagatagggctcactagattt

SEQ ID NO: 13506 - DNA, 298 bp, Gossypium hirsutum
  Clone ID: LIB3135-058-Q1-K1-G3
cggacgcgtggggtcacagcctggaaagccctgttttgccttcacggttcgaacagacacaccgggtgattaattaagatcgggacaaagaaaagccatggtgaattcaaaccctgtactaaatttacgttgccatcactaggctggccctctttgcaaaaagaaggaaacaagggaaaggactggtgctccacttggaagggataggtcttttatgaaaggctctgctgctgggggcactacaagcgcattctatgggttcaaccatgtgatgccgatagtgaggaggtatgtaaag

SEQ ID NO: 13507 - DNA, 400 bp, Gossypium hirsutum
  Clone ID: LIB3135-058-Q1-K1-G4
tgctgctaatggtgctgcagtagtattggcagaaaaaggccagcttgatgtttcaaaagatatttttactcacgtccaagaaggtgcaagtgggagcgtttttgtccaaatgccagatgtatggataaacttggctcatattttcttcgctcaaggaaattttgctttggctgtaaaaatgtatcaaaattgcctgcggaagttctattataatacggactcccaaattcttctatacttagctaggacgcattatgaagctgaacaatggcaagaatgcaagaaaactttattgagagccatccacttagctccttcaaactacacattacggtttgatgcaggagtagcaatgcagaaattctcaacatcaacactacagaaagaaaagaggactgca

SEQ ID NO: 13508 - DNA, 302 bp, Gossypium hirsutum
  Clone ID: LIB3135-058-Q1-K1-G5
gtccagaaaggaaaggagaaagtggacaaggcgtgactcgagagaaattacggtttggtcacagtcggattgttgaatgagcatccaaagccgattctgagctaatcgtggtggtgaacatttcttttacttatggcatgtataggaacttagtcattgtgcatatttgtaaatatgactctactatttaatgatgtgttagtatttgatgatgaatggttgcttaaatggtccaggatgaagttaattattgttgaaaaaaaacaccttataaaccacctgaaaaaaaattccgtacttat

SEQ ID NO: 13509 - DNA, 419 bp, Gossypium hirsutum
  Clone ID: LIB3135-058-Q1-K1-G6
cgtatccatttatgctctcttatatgcacctgtcatctcagctgagaaagcataccatgaacaattgtcggttcccgagattacaaatgctgtgtttgagccttcaagcatgatggcaaaatgtgaccctaggcatgggaagtacatggcatgttgcttgatgtatcggggagatgttgtccccaaggatgttaatgctgctgttgctaccatcaaaacgaagaggactgtgcagttcgttgactggtgccctactggcttcaaatgtggtattaactatcagcctccaactgttgtacccggaggagatctcgcgaaggtgcagcgagctgtttgcatgataagcaacaacacagcagtggctgaggtgtttgcacgcattgaccacaaattccatctcatgtactcgaagagagctt

SEQ ID NO: 13510 - DNA, 225 bp, Gossypium hirsutum
  Clone ID: LIB3135-058-Q1-K1-G7
cccacgcgtccggcggcggtgcatctgaaggcagctggaggtcttaagtttaggtttcaaagtgggcttgggcctatattgttatgggtttggtttgggtttagtagttagtaattttaagtttctctattactgtttggtttgggttctctcttttttgatcgatgttgttactgttctcttaaaatcataaaaatggaatgaagtatcttcttttcaattttc

SEQ ID NO: 13511 - DNA, 449 bp, Gossypium hirsutum
  Clone ID: LIB3135-058-Q1-K1-G8
cccacgcgtccgaaaaaattaaaaagagggaaaaattaaattcacgatttgggtgttataaagtcgatgtcgaggccttggctactagtttttatagtgcttatagtaatgctcacttctcaattcgaatggaagcagcaggttggtgaagaaattgagctaacttccactgtttctctcaaagatcaatccctttccaaacgccaagaatacgtcaaagaaaacatcatactttctcaagaaaggaatattcagaaactgaacgagcaagtgaggaatcttcgtgaacaattgctatggtgtaaggctgaaaccgagattagtaacggctctgcatttgctttgagtgaacatttaagtgagattgagcagcagccaatgttagatgactaacattatggggtcactgccaatagagtcacaatactgcttgctatgtgcaatacata

SEQ ID NO: 13512 - DNA, 450 bp, Gossypium hirsutum
  Clone ID: LIB3135-058-Q1-K1-G9
ccatcaccgctgagaaaattgcaacaattgttaaagctgcaaatgtttcggttgaatcttattggccaagcttgtttgcaaagcttttcgaaaagtgcaacattgaggatcttataaccaatgttggtgctgctggtgctggtgctccagttgccgcagctgcacctgttgctgctggcggtggtggtggtgccgctgctccacctcctgctgaggaaaagaagaaggaagaaccagaggaagagagtgatgacgatatgggattcagtttgtttgattagaagttcctttcagtgcttgatttggttgattactgttttaatgcattaaagctgtgacagtagttgttgaggcttcttggtattattattatttatctgcttttgagtaaaaactttctttgagttgtatgtttgaatcttctatatataaaacgtttctaaccaattt

SEQ ID NO: 13513 - DNA, 441 bp, Gossypium hirsutum
  Clone ID: LIB3135-058-Q1-K1-H1
ggaagaggtgggtggttttgccaagttgggaaccgcttgcggggttaaggcatggaggagttgtagtggcattcagtgatgccagagttataccatggatttggagccttactcctgtttgtctacttgttggttagcacaccacttctctatgacttctacaactatcgtcccaatgaaccccaatactctgttctgcttggtgatttcttgcagtgtgttgcgcaatgtggtgcattaattttctttgtggggatgaagaactcgatgccaaagaggcaactaaggaggaagtccccgaagcaaaaagctacttagatgtaatcaaagaagtaaaattttggcaatctccagtaaaactttgcaggtctatctgattggatcctttctcgatttctagcttttatctgttctttattaactgaagcatttgtactatcg

SEQ ID NO: 13514 - DNA, 417 bp, Gossypium hirsutum
  unsure (1)..(417): unsure at all n locations; Clone ID: LIB3135-058-Q1-K1-H10
cccacgcgtccgggtttccaagggctaaaaacattggtcgatgttggcggtggtaccggtgccacgcttagcatgatcgtctctaagtaccccaccataaaaggcattaactttgatttgcctcatgtcattgaggatgctcctagctgtcctggtgtggagcatgttggtggagacatgtttgtaagtgtaccaaaaggagatgccattttcatgaagtggatatgtcatgattggagcgacgaacactgcgccaagtttttgaagaactgctatgaagctttgccagacaacgggaaagtgattgttgccgaatgcattcttcctgattaccccgaccctagccttgccacgaagttggttgtccatattgattgcattatgttggctcacaaccctggtgngaaagagaggacc

SEQ ID NO: 13515 - DNA, 258 bp, Gossypium hirsutum
  Clone ID: LIB3135-058-Q1-K1-H11
cgcgtccgtgaaaaagcttgttcccattgccactaaatctttccaaaaaaaaaaaaaaaaaagggggaggggggaaaaggaaaccaaaaaaaggaagcaagggggaagggacatgggctggcctagcttggcttgctttttatcgagacactacatcatgcggacaaggagaaaactgaaagtttatattcttgatctggtagggtggcgttaccacctatgtccttgcataagggctgggaatggtggaatcacatc

SEQ ID NO: 13516 - DNA, 224 bp, Gossypium hirsutum
  Clone ID: LIB3135-058-Q1-K1-H12
aattccaaattccaaaatcctttcttttctttcctggtttggcttcctttcccatgaaaaattctcaagagaatccaatcttcatgcaagcagaagttgaagatgaaggagtttggggtaaagggtgtgggtgttttaatctcttctgcctcaaacggcgccgatcatacaaccacatcaatgaatccaacaccttactgcaccagagaggggaacaacacacg

SEQ ID NO: 13517 - DNA, 346 bp, Gossypium hirsutum
  Clone ID: LIB3135-058-Q1-K1-H2
ctcgaaaacagaagccacttctgactacactgtttgcggttgtggatgacatattctgcttggttcaaggccacattgagaatattgctgttcttaagcaacactatggcttgaacaaaacagcatatgaggggatcattgttattgaagcttaccgaaccctcagagacagaggtccttaccctccggatcaagatgtaagagatatccaagggaaatttgctttcattatctttgatagctcttgaaaagccacatatatagcttccgatgctgatggaagagtacctttcttctggggaactgatgctgaaaaccaccttgttcttgcagatgatgcggagac

SEQ ID NO: 13518 - DNA, 443 bp, Gossypium hirsutum
  unsure (1)..(443): unsure at all n locations; Clone ID: LIB3135-058-Q1-K1-H3
tggcaacataagacattgagactgacttaataaaatggggagatgatcactctccaggaggtttcaacacacaagaatgctactttgtgaccatgctaggtcctttggcctaaaatttaaagttgaagaaatgggaatccatgatttggtgaatgagttcatggcaatgaagaaacaaggtggtggtactaaagaatggttggcattcaattgcatggtgggactcccacacataggcaaaaacaagagcaggaagcttgtaaatgagttcctaggcatagctaaacaattattgacaagttgtggtgacaatgcaagaacaacaaaaaggggaattataacgcttcgtgaangagatgcttgtgagaaccttaaagatggtacaggctcaagttttgggcatattttatgcgcattgatgcactaccaagctattaggaatc

SEQ ID NO: 13519 - DNA, 302 bp, Gossypium hirsutum
  unsure (1)..(302): unsure at all n locations; Clone ID: LIB3135-058-Q1-K1-H4
cggacgcgtgggcggacgcgtggggccctttctttcctggaaaataaaattgcagggaaggatatgaagagctcaagtcagtatacaatgttactagggtgtttgtttgtttgtttgtttgttgtgtttttttttttttggtcttttccttttttggttgggagtttgtggtgatgaacatgatgagatgctcgatcaaattgctaaagttgggtgtgtaaatttgaatcacatatatattttattaaaaaaaaaacangnnacatagaaaaaaataactaaaaataactaaacaatttttg

SEQ ID NO: 13520 - DNA, 329 bp, Gossypium hirsutum
  Clone ID: LIB3135-058-Q1-K1-H5
aaaaccttgcagtggcttgttcccattgccactaatacaaccaaagcgcatcatgggtttggatgggttggagaatgggcaaacaccgggtctgagatgaatcgtaaacctgctggccagactaacttgctcaggatcgagacactacatcatgcggacaaggagaaaactgaagtttatattcttgatctggtagtgtggcttcaccaccttgttactcaagtaagggctgggaatggtggaatcacatctcctgttaagtctccaattaggtctccaaaccagaagacagctcaactatcaactcagaagcagtccccatcatcgat

SEQ ID NO: 13521 - DNA, 306 bp, Gossypium hirsutum
  Clone ID: LIB3135-058-Q1-K1-H6
cgcgacgtgccataactctttatctttctatcttctactatctgaaaaagcatcggcctttttttatacctatccctattcctatcccaagccaaagtccaaatattcaaatttgatgatacaaattctggatttgtgattcaaagtgtgatgatttgggttgaaagttgttttgggggggtttgagagaagggaaagagattttgccatttttgtggaaatggtgataaataggcataatggtaaatgagatggaactaactatatttcttaccttctgaaagatattcaatgcttttgatgaat

SEQ ID NO: 13522 - DNA, 409 bp, Gossypium hirsutum
  Clone ID: LIB3135-058-Q1-K1-H7
cgacaagtgcagcaaagggaagggttactttggtggggatgaagttgggtaccttgatatagcttttgggagcttcttgggatggcttagagtgacggagaagttcaatgcgatgaagctgctggacgaggggaagacgcctggtctggtaaaatgggcggacaggttctgttcccatgccgctgtgaaggacgttatgcctgataccgacaagcttgcggagtttggtaagtttgttattgccaaaataagagccgctggcgctgctgctgaaatgcattagaacaaaaattagcacatcttggatggaactaatgaatatattatctctgtttcttcactttgtgatgatgaacaaagatatatatatatattccagtaataaacccttttctttggctattggatt

SEQ ID NO: 13523 - DNA, 411 bp, Gossypium hirsutum
  Clone ID: LIB3135-058-Q1-K1-H8
gttcatgcaatttgattctcctttaggagaaggaaaaggaaggagggttgaggagctgctaaaacgatgcccaaatcttaaaaaaattattatttttagggttatttcaaaagccaagccacacaaggaatgccagatggtggatttcacttggctttgcaatagtagaagctgttatagttgcttgttattctcttcagtattcaatttatgcagccagttacaagtactttgggccaagcatgtgatggtgacttctttcttttggtttgtggtgcaatgactatgacatggatctgtgatacaatattagaatctggattttgtatctttcttatcacatttactccttatttgttattcattccatttgttacagacaagtttttttaattttatgataagaactga

SEQ ID NO: 13524 - DNA, 332 bp, Gossypium hirsutum
  Clone ID: LIB3135-058-Q1-K1-H9
cgaggtattagaattcctaggtcaaaacatagcaatctgtctttgataaaagaccaactttccaaccttccatgttggctaagctcgcaaacaagatgctgaatttggacttgatgatcgaaaaggactcgctatattctatttctacaaatgccgcaactacacctgatgctgctggcgggggtggtggtgccgatgctccacctcctgctgaggaaaagaagaatgaagaaccccaggcagagagtgatgaccatatgggattcagtttggttgattagaactttctttcagagctagatttccgtgattacagatggaatgcattaaag

SEQ ID NO: 13525 - DNA, 374 bp, Gossypium hirsutum
  unsure (1)..(374): unsure at all n locations; Clone ID: LIB3135-059-Q1-K1-A10
ccgggctgttcgatgtcggaaccggtgacaatcgttatcttccaaatggagttgggcttggagaggttatattctcagtttagtaagggtgtgatttagaggggatagctagtagctttaagcatttgtattctgagagcaagtagattttcatgtatctagagagtcgttggattatcgtatcctttaatcggagacgtgtgggaactttgcttatctttgtgtaatcatgcaactctccctgtgtaatcctatgttaaatgttagtagctttgtattagggatcgagtgtcggatatttgatatgttggatatgaatatgtttcattcatcgagttccttttnnaaaaaaagaattttaaaattaaattaat

SEQ ID NO: 13526 - DNA, 247 bp, Gossypium hirsutum
  Clone ID: LIB3135-059-Q1-K1-A11
gcgatttctacgaccccaaaccaccattcagagacagatctaaaagttctcttgtcgaagtcaacgtcaaagtgtatctcaaccattggtaagatttccgtacttctgtgccttcgagccacatctggtgatttctgctttgttcttgccccattgtgttcaaccttgtaacttagaatgttctgtgcaagttgtcttcctgtgatggatatccgttcgtgtactagcttggttcttaagtaccata

SEQ ID NO: 13527 - DNA, 368 bp, Gossypium hirsutum
  Clone ID: LIB3135-059-Q1-K1-A12
tcgaccactcgtacggtcccctattgttggaaatttacagctaataaactccaaaaccgggcccgagatatctgctgcgtagccaagctcaagaattattctaaagggaaatcctttgctaacatataatgagaattatactgtggatttgcatttgaagaaagacattggggatttgcaggtggcaagcgatgctcttctgaggattgctggcgtctcaaaacatagcatgtttcttgatatggatacgactgatatagctgcaggtgagcttgggatcaccatcaaaaacaagtacaaacttgcacaaagaatactcttaactctttagatcttttttacttatactatttagagattaatattta

SEQ ID NO: 13528 - DNA, 89 bp, Gossypium hirsutum
  Clone ID: LIB3135-059-Q1-K1-A9
gcggcttttctgagttttggttgtatattttttttttcaaaattccttcttggggttttgatagggtaataaagtttgagttttgggtg

SEQ ID NO: 13529 - DNA, 458 bp, Gossypium hirsutum
  unsure (1)..(458): unsure at all n locations; Clone ID: LIB3135-059-Q1-K1-B10
cgacaaatagctgaattaaattttcgaatatgtatgtgtttggaaatcggctcagagcccggagaagcaattccgtactgtcagaaggccatctccgtttgcaagtctcggctgcagcgactcacaaatgaagtaaagacttcctcagacctggcatcatcttcagctacatctgaattggatgatggtgttcaacagtcctcctctggctctcaaactgtcatatctgtcaaagataaagaagcagagatcgaaacacttgctggacttgctgaagaccttgaaaagaagctcgaagatctacaacagctggtagccaacccaaagtccattattgccgaaatcctgngaatggcatctgccaaggcaaaggctgatgagaagagtgcatctcctgctgtggggagttcatcgcggatgggtactgttaacagtaatggaggtttgattcttcactg

SEQ ID NO: 13530 - DNA, 323 bp, Gossypium hirsutum
  Clone ID: LIB3135-059-Q1-K1-B11
gggaaacataattgctaatgctgatggagtggcagaggcaacaattgtggacaagcagatgccactaagtggccccaatgcggttgttggaagagcatttgtggttcatgagcttgaggatgatcttggaaagggtggacatgaacttagtctaaccactgggaatgctggcggaagattggcatgtggtgttgttggcttgactccggtataaatcttatcgatgaaaccagtttggtgttgtgctatttgttggttggatttggcagcttcttttatagagccgcatgtgatgttgctttcaatgttgatagcgtgttata

SEQ ID NO: 13531 - DNA, 401 bp, Gossypium hirsutum
  Clone ID: LIB3135-059-Q1-K1-B12
gctttatgtccaaacccattcaccctttgtcattccccatggaaactcctaccacaggagggtcggactctgcagttgcagggctttctgatgatacggccacgccacaaagagatgcccatcgctggagcagtgctagcagcagcaatgatgttgcatatttctgagccatttgaatctgtgatttttggggttctttcatgtggacacactttccatgctgaatgtttggagcagacaacacagaaagctcgcataagtgaccctccttgtcctgtatgtaccaagctcgaagagcaaaattctccagagaaccgagtcttctctaggcttaagaatagtatttcacggcttacatcattttcggaggatggaccatcaaggacttggagctgtgcaca

SEQ ID NO: 13532 - DNA, 327 bp, Gossypium hirsutum
  unsure (1)..(327): unsure at all n locations; Clone ID: LIB3135-059-Q1-K1-B9
tcattgcccggcacggatgtcgcaaggatggcatgcgtttcagttgagatgcgaggtgtggcttcgaataatgatctatggaggaagaaagttgaagaggagtttggacattggttaggagtaacgaggaactggaaaaagatatatcattcatgttgngagagtaagaaaaaagcgtaaacgggcgattacacggtggccaagctttcctcgtgtcaataagccttcttacttccccggtaggaaagatcctattccacttggaagtgttcatgttgtccatgatgatgattatgaccttcctgctcgtcttcgtgtaccgcccct

SEQ ID NO: 13533 - DNA, 305 bp, Gossypium hirsutum
  unsure (1)..(305): unsure at all n locations; Clone ID: LIB3135-059-Q1-K1-C11
ctcaacttgatactgctgcgagnttttcctattctaaaaaaaaaaaaaaaaaaaagaaaaagtgaaaaaaaaaaaaaaaaagaaaaaaaaaaaaaaaaaaaaaaaaaaaaaaaaaaaaaaaaaaaaaaataataaaattattaaatactaataatataaaatcaattatgtggcctcttatttacaacataatttttctaaaaaccattgcataacacaactttttcacctttgatcacataaaaaaatctctagactcctaattaaaaaaacagtccaaaaaaaaaaccttttcttactatttt

SEQ ID NO: 13534 - DNA, 432 bp, Gossypium hirsutum
  Clone ID: LIB3135-059-Q1-K1-C12
cccacgcgtccgcccacgcgtccgcatcggtggacgtgcatgttagcaaagataatgaagggcaagagagagctgttgagaaaaggcctaaacggttggctatggatgtctctccttttggtttgttggaccccatgtcacctatgagatcaatgcgtcaaatgatggacacaatggaccggatattcgaggacgcaattgacattccccggcaccaacagaacacgaggagacgtacgtgcaccttgggacatcaaagatggcgaacacgacatcaaaaagcgattcgacatgccaaggctcggaaaagacgaggttaaggtttccgtagaagacgacatactggtcataaaaggagaacacaaaaaggaagaaacccaagacgattggacaaacaagaagtacagttcttacaatactagtcttcaacta

SEQ ID NO: 13535 - DNA, 399 bp, Gossypium hirsutum
  Clone ID: LIB3135-059-Q1-K1-C9
ctggcagcagatcacaaacaatctttagtattcttggactcctaatctctgatgcgggcgggtgataacatggttgcatgctgttggcttaaagaatgttgtgatgataattaatgttcatagtataatttaattccacgtagtatactttttgctgccctaagatcattacttgttcttctgggatgtatcatctgtttcttttctgaattacagcttgtttccttttgatagtggtacttggttcactaaatacttgctccctcttgctagtctcagctgatggatctgtttttggtttcagtttttttagagaattcgtaatgtatttaatatgatatctgggagatttgcaatctgaacttttctgttctctggcagagtggggagttaagggaa

SEQ ID NO: 13536 - DNA, 354 bp, Gossypium hirsutum
  Clone ID: LIB3135-059-Q1-K1-D10
ataccagtactatttgttcccttgcttactcttcgcttagccgctcaaaaagacgaagaggtcagtctaaactaaaggggttgcgggatatctgatcccaacatcaaatcaaagatgagaaattccttaatgagtatcaacctctttcgccagaaaataaaatgtttgtggaatatcggcgggataacctgtgcttccagacctcgttgaaagcggccattctctatactatctaaatgctaaatgatgaatagctctctagttttgagctgaaaatagcacacgaatctactaaaggttgcagtgaagaaagaagagagctcccgcctatctaaatcctttacgaccagaacg

SEQ ID NO: 13537 - DNA, 463 bp, Gossypium hirsutum
  Clone ID: LIB3135-059-Q1-K1-D11
cccacgcgtccgctcctacccgtcttataaatagaaaggagaaaaaaaatggcgaggaaagcgttcaaagtcgaaaaatgatcgttcgtcttcaacctccgttacttccgctaagaacccatcaacagtctccaatcagtatttctctcttacccctttgttttatagtattttttgcagaataaattatggctttcttagtttgttttgcttgtaaggaatttttggggttaacaatagacacttttgcttggaaaaaaaattgttagtcaaatggcgttaagggtaaaatcaagtgagaaaatgaagaagacagctgaagagagtgttgttagcgagagagaaaagagacccaagtcgaagtcaagacccaaatcgaagctgaagaagaaaacaaaaatcgatgctaaaatgcctaagaaaccccccactgctttcttttacttcttggaggcatttcgta

SEQ ID NO: 13538 - DNA, 140 bp, Gossypium hirsutum
  unsure (1)..(140): unsure at all n locations; Clone ID: LIB3135-059-Q1-K1-D12
ctccanaatgatggagatgcanggatgatcatcattatatttattcgattttaagttcatgatttgatttgtgtgttttctgaattgggatttggaaataatttactcaaatcaatgcatttattgtaggagtttttctt

SEQ ID NO: 13539 - DNA, 198 bp, Gossypium hirsutum
  unsure (1)..(198): unsure at all n locations; Clone ID: LIB3135-059-Q1-K1-D9
cngacgcgtgggcggacgcgtggttttattttaggcacaatgcctaaagctcatcgattgggggctctgtgcaaagctcgacccattgtggataaagctttgaaacttttataaataactcttatgttgggattttgtgcccttagtattgtaatgtttagaacttatcggtttaataaaatctcagagttaattatc

SEQ ID NO: 13540 - DNA, 448 bp, Gossypium hirsutum
  Clone ID: LIB3135-059-Q1-K1-E10
gctacctgtgttaagatctctactgatgcttcaatcaaagaaatgatcccacctggtgccggtgttatgctcacaccccttgttgttgggatcttttttggcgtggaaactctctctggtgtcctcgctggatctcttgtctctggtgtccagattgctatctctgcatccaacacaggaggtgcttgggataatgccaagaagtatattgaggctggtgcttctgaacatgcaaaaactcttggtcccaaaggttcacatccacataaggctgccgttattggtgacaccattggtgaccctttaaaggatacatctgggccatcgctgaacatcctcatcaagctaatggctgttgaatctcttgtctttgctcccttctttgctacacatggtgggctgctttttaagatattttaagtgaagacaaacatcggctactagtcta

SEQ ID NO: 13541 - DNA, 438 bp, Gossypium hirsutum
  unsure (1)..(438): unsure at all n locations; Clone ID: LIB3135-059-Q1-K1-E11
gaaacaacgaaagaatttgtggcgaagttggatctaaagcctggccaaaaggttggagatggtggctgtggcataggtggaggtgacttttatatggcaaaagaatttggagtctatgttgtgggcatcgatctgtccataaatatgatatcttttgctcttgaaagagccaatggactcgattgctctgtggaatttgaagttgctgattgcactacaaagacttatccagataacagctttgatgttatctacagccgtgacacgattctacacattcaagacaagcctgcactatttagatatttctacaaatggttgaagccagtgggcaaagttcttataagtgattactgcanaagcgcangagcttcatcgcccgaatttgcagagtacatcaagcagagaggctatgatctccatgatgtaaaagcttat

SEQ ID NO: 13542 - DNA, 265 bp, Gossypium hirsutum
  Clone ID: LIB3135-059-Q1-K1-E12
aaatatgtttctttttaatcagcattcaactattcaacaaaataattcaactatatcttacataacatgttagcttataattttctccttaattatcagattgctctttttcattatcacactttaaaaaataatatactatattttttataccgattatctcaaaattatataatatcatttccttccctaatcaatgttaacacttacttcctaaatatttctaaaattttttgtataaaacttttcctaactcttttttttt

SEQ ID NO: 13543 - DNA, 422 bp, Gossypium hirsutum
  Clone ID: LIB3135-059-Q1-K1-E9
attttaatggtgggtcttgatgcatctggtaaaaccaccattttgtacaagctcgagctcggcgaaatcgtcaccacaatccccaccattggattcaatgttgagactgtggaatacaagaacatcagcttcactgtttgggatgttggtggtcaggacaagattcgtcctttatggaggcactatttccagaatactcagggtctcattttcgtggtggatagcaacgacagggaccgtgttgttgaggcaagagatgagttgcacaggatgttgaatgaggatgaactgagagatgctgttttgcttgtatttgccaacaagcaagatcttcccaatgcaatgaatgctgccgaaataactgataagcttggtcttcattctcttcgtcagcgccactggtatattcagagtacgtgtgc

SEQ ID NO: 13544 - DNA, 168 bp, Gossypium hirsutum
  Clone ID: LIB3135-059-Q1-K1-F10
cgcgtgcgccacgcgttctgtctcgacacattatcaagaacgactgttggcttgtcatcgagggcctgcttctgaacgtcacaacattcatgtaaaaacatccatgaggagaagaggtgttgttgtaatcaccagggaaggatgccacaaaagaattcaactatttcg

SEQ ID NO: 13545 - DNA, 341 bp, Gossypium hirsutum
  Clone ID: LIB3135-059-Q1-K1-F11
aaaaaccggccgaccgacgcgtgcggccgtgaaggttgatacggaaactgttgggtttatggtggaggtggatactgaggtggactgcgtgattgaagatacggtgactgctcatctcgttactcaagaggcggcggtgcatctgaaggcaactggaggtcttaaatttagggtttcaaagtgggcttgggcctatattgttatgggtttggtttgggtttggtagttggtaattctaaagttactctgttactgtttggtttgggttctctcgtttttgatcgatgttgttactgttctcttaaaagcataaaaattgaatgaagtatcttcttttcaaa

SEQ ID NO: 13546 - DNA, 443 bp, Gossypium hirsutum
  unsure (1)..(443): unsure at all n locations; Clone ID: LIB3135-059-Q1-K1-F9
cccacgcgtccgcccacgcgtccgtccacgcttccgcatcgatccctggtgccccgatgctgctgccttcaaattcccgtggaataccancagaggttaagtcctctggtctcaaatggatttttgccaccagcttcaaaacctggcaggggtaagattacgactgcatctacactcctggatataattaagtatgtggagattgctatatcttgccggaagggtcgaacaggtactgccgctggtgatgtggcttttccaaagggaaaagagaacttggcatccgtacttaaacgctacaagcgccgattgtccaccaaacaagtcagcaccgatgacggaacaggatcacgcaaggttccaacaactccaatgttggcttcttacaactcatagcttncgttccactctctcccaattatgcttgttgagctgttcgattt

SEQ ID NO: 13547 - DNA, 310 bp, Gossypium hirsutum
  Clone ID: LIB3135-059-Q1-K1-G10
cccacgcgttcgagagaaccggagctactgtcgtcgtcgccgccatggtgaagtgtctgaggtccaacaaggccgtgattgtcctccaaggccgatatgctgggcgcaaagcggtgatcgttagatccttcgacgatggaacacgtgaccgcccctatggccactgtttggttgcagggataaagaagtacccgagcaaggtcatccgcaaggattccgccaagaaaacagcaaagaaatcgcgcgtcaagtgcttcgtcaagctcgtcaactaccagcacctgatgcccacccgctacaccctcgacgt

SEQ ID NO: 13548 - DNA, 456 bp, Gossypium hirsutum
  Clone ID: LIB3135-059-Q1-K1-G11
cccacgcgtccgagaaaatatcacatatcttcttctccttctcagaaatcttagtatcatcagtatggcctcaaatcccaaggtcttctttgacatgacgatcggtggtcagcccgctggtcggattgtgatggagcttttcgcagattgcactcctcgcactgcggagaacttccgtgccctctgtactggcgagaaaggcgtcggccgcagcggtaagcccctccactacaaaagctcttctttccatcgtgtgatccctaactttatgtgccaaggaggtgacttcaccgccggaaacggtaccggaggtgaatccatctacggatcaaagttcgctgacgagaacttcatcaagaagcacactggtcccggtattctctcaatggctaacgctggaccgggaactaacggatctcagttcttcatttgcacggctaagactgagtggctcga

SEQ ID NO: 13549 - DNA, 250 bp, Gossypium hirsutum
  Clone ID: LIB3135-059-Q1-K1-G12
gcgattattccctgatctttacaacacatatctttcgaacccacggcatagcatagtggatctgatattgatctacggtgttgagccctgtccctgcttatagccaagcaacaaccgctgaagcccctatccctgcccccatgtgaacatctaaatcgctatcctttattttttcttactttaataaaatgatttcatcacaattcacaattacttgatttccatatgtgaattgcatataaagaacact

SEQ ID NO: 13550 - DNA, 400 bp, Gossypium hirsutum
  Clone ID: LIB3135-059-Q1-K1-G9
aaagctttcgatgtggggaacccttatggttatatataaagcaccatatgctctcagttatcgaaatatggcaattctaggcgtgcaaggcgtctcggcactaccccaccactgtttgcagctctgctatgggttttttgcctttgccatagcagccaacttgttgagagattttagccccaaaaacattgggaaatgggttccacttccaatggcaatggccgtgcctttccttgtcggtgcttattttgctattgatatgtgtgtggggagtttggtcgtgtttgcatggcacaagctaaatggcaagaaggctgatttgatggttcctgctgttgcatccggcttgatctgcggagatggcttgtggcttcttccttcatctattcttgcttttgtt

SEQ ID NO: 13551 - DNA, 133 bp, Gossypium hirsutum
  Clone ID: LIB3135-059-Q1-K1-H10
aaacatttggatttatgaattaggtatttgtaatttgctatgcactgagtgtaatctgctgaaattttatgtgaattattcaaagcttgaatcatcattacctaaatgcatgcaactaagtatgttaattctt

SEQ ID NO: 13552 - DNA, 352 bp, Gossypium hirsutum
  unsure (1)..(352): unsure at all n locations; Clone ID: LIB3135-059-Q1-K1-H11
cccacgcgtncgatttgatatggtttaagttcgatcagcagttttttggatgcggatagccgggtcaggagtatagaagaagcatagcaggaatttcgagatccattacttattatcatttaagagtcataacagaaattacgagatgcattgtcaagtttgtggtttggttttgtgcgtacttgatcccaacccacctcatgaaaaagttccagatttgaagcttagagatttctattttgtactttatataattgctttttgatttgttgtcttgcatgaagtgatctactacacctacaccttcaatggagagaatatttgcttaaagtataggacacaaataattaaa

SEQ ID NO: 13553 - DNA, 304 bp, Gossypium hirsutum
  Clone ID: LIB3135-059-Q1-K1-H12
cggacgcgtggggttgtgtccgatttcgtcacttccgttgcgtcttccaagcctacaatagctcagccctcggtcgccacatggtggaaagccacagagaagtactatcagctcagcaagaaaccttattctcttgccatcacattgggttcacaaatccttgacgagaactactctttgggaaagtcgctaacaaatcaacagatcatggaattagcatcaaagggtggtcagaaaaacgccattaacgttgttttgacatcagctgacgtggctgtcgaagggttctgctcaagcaggtgtg

SEQ ID NO: 13554 - DNA, 440 bp, Gossypium hirsutum
  Clone ID: LIB3135-059-Q1-K1-H9
cccacgcgtccgcaccaagggaacgttgtctgtcccattcctggaactaccaagatcgaaggcttcaatcagaacattggagctttgtccgtgaaattaacacccgaagagatggcagagctagaatccattgcttcagcaggttcagtgaagggagaccgatatggtggcactatcgcaacctactatgaatcggatactcctcccttgtcttcatggaaaccttaaatcagagcatactagttcaaatcaatacaatctttaaggtgagttatgaacctaatgtaaggcccctactttgtttttagaataaattttctgtgagatttaataataaaagggcttttggtgataggttgtgcaagcttggttgtagctatatctacgtttgtaatatgttgagaatgtcgattccaggttaataaagcaaaagtttctat

SEQ ID NO: 13555 - DNA, 231 bp, Gossypium hirsutum
  Clone ID: LIB3135-060-Q1-K1-A1
acgcgcgaattccagctcgacccacgcgtacgctgtcgcgtggacctacacgtatgcaaccctatgaatccattggttggcttggtacaagtgggaagggaatgtataattttcaaagcctgtaagggattcctgtctagagcaaaaaaaggactcttaacttgttcataaagttttgttaattgtgattttagtatacaaattgatgtgtctctcatatattatatttgg

SEQ ID NO: 13556 - DNA, 420 bp, Gossypium hirsutum
  Clone ID: LIB3135-060-Q1-K1-A10
atggcccatcctttgcttctccaaagcgagtgattgcatgtcttattgaaaaggagattgagttcgaggctgtccctgttgatttgcttaaaggagagcacaaagaccctgaatttctcaagctccagccttttgaaacagtccctgtcactcaaaatggaaataatgtttaatttgaatcccgtccattcataaggtcctttccaaaaaattccaattaaaagggacttgtcctactggaaaaaccagtaaagaaaaggggccaggggaaaaattgcttaaaattgaagcacacaattttaacccattaatttacccctttacccttcatgttatggttgctttcaagatgggggtcccttctgatgaaaatttgatcaaagaaagcgaggaaaagctatgcaaagtgccggatattta

SEQ ID NO: 13557 - DNA, 362 bp, Gossypium hirsutum
  unsure (1)..(362): unsure at all n locations; Clone ID: LIB3135-060-Q1-K1-A11
gaccgacgcgtgcggccacgcgtccgggatcatcaacttcaacgtcagtgttttcattacgttctccatttactcgggctaagtctgtcaccactgacccttcaaaggctgtanttgctcttgttgtgttatatgaaaggtggtggcgtagcatcacagggacttatacatgctgcacaatttgcaaccacacaagtcatctgtaaagccacataaacttgatccacgtttccaatacttacatccttttcactgtactatccaggtgaaaccagaatacaaaaaccaccctcttgttaatttaaatattccccttgtaccttgtatttgtttccaccaacaaggattaaaaaacaattatt

SEQ ID NO: 13558 - DNA, 294 bp, Gossypium hirsutum
  Clone ID: LIB3135-060-Q1-K1-A12
gagggagaagacgtgaacatgaatctggcgaaaacagaggcgaagttgcttcatgagaaaagttcagacaaagcttacagtgatgaccatgtcataaggcttttggctacaagaagcagggcacatatcaatgcaactctgaatcactacaaaaatgaatatggaaatgacataaacaaggacttgaaggctgatcctaaggatgagttccttgcactactaaggtccacattgaagtgcttggtctatccggaaaagtattttaaaaaggtccttcgcctaccattcaataaa

SEQ ID NO: 13559 - DNA, 443 bp, Gossypium hirsutum
  Clone ID: LIB3135-060-Q1-K1-A2
atcttggtctcaataatcgattgattcatgtctaccacttcagtaaagagactgcccagaggcagatgcaagtgcaaaattttggtgagccctttttcttggtcattcatgaaggtgaaactctggctgaagttaaattgcggatacaaaagaaattgcaagtttctgatgaagagttctccaagtggaagtttgcatttatgtcattgggtcaaccagagtacctacaagactctgacattgtgttcaaacgttttcagagaagagatgtttatggggcttgggagcaataccttgggttagagcattctgatacctctcctagaaggacttatgttaatcagaaccgtaacacatttgagaaaccagttaaaatatacaactagtagaaagctagttatacattagcatatcagtcgatgtggagatccttcaagtgatgg

SEQ ID NO: 13560 - DNA, 268 bp, Gossypium hirsutum
  Clone ID: LIB3135-060-Q1-K1-A3
aaaaaaaattaactaaacacataaacaaacctataaatccataaaaaaaacttgatacaagagcaaaagaaatatataaatattcagagtttctaaaatattcctacctagatcaaagggccgccccttatttaggtcataaacttatttcacctttcattcaacgtaaacacattttttttgtctctcatataatatatttgctgggccattttttaacaccaaattctcttgtaaaaaccctggctttacccaatttatattcctt

SEQ ID NO: 13561 - DNA, 304 bp, Gossypium hirsutum
  Clone ID: LIB3135-060-Q1-K1-A4
cccactcattctcttactctttttctaacttttatttcaataagcaaactactcactaaaagaaagaatacatttattctccggaccttctcagatattataaaacatctcaaaaggctgcctcttcattaatatccatttttcacttatctttaatataagcacacagtccattatatatctaccaaacattaaaaatctcgcattcatcctattttacagatattctatataataactgttccccaaccattactgtaaatactatcttcatcatcattctctacatgttatcaagcttaac

SEQ ID NO: 13562 - DNA, 320 bp, Gossypium hirsutum
  Clone ID: LIB3135-060-Q1-K1-A5
atgaaacattaccctggagagaatgagggcattactgaagagatgagattcgttggcatggaacttcgtaatattaaaggtaaaaaggtcagttccgattgtgtttctgactctgaaaccgacactgaaaataccccaagcgatcaagaaaaagaagatgattctgaaactgtgaaaagcgatgaaaatggtggtgatggagaagcagagacttggagtcccactatggaaggatttcttaagtacttggttgatagcaaattcgtcttcaacactattgagcgcatcattgatgaatccgatgatgttgcttatgccta

SEQ ID NO: 13563 - DNA, 64 bp, Gossypium hirsutum
  Clone ID: LIB3135-060-Q1-K1-A6
cccacgcgtccggagaataaaaaaaaaaaaaaaaaaaaaaaaaaaaaaaaaaaaaagggggagg

SEQ ID NO: 13564 - DNA, 301 bp, Gossypium hirsutum
  Clone ID: LIB3135-060-Q1-K1-A7
catacccccttcgggcattactactttcgttatacgcgaagcaactgagcgataagtctgggatcgctgtattctcgcgatggcaaacgatctaacatcttcgcgagacggaccatgaatcaatcttgagaatcgagcatggggcttgaagaccctaccgcattccagccccgggaccttcaataggtcctttctctcttctcttttaccactgagtggtgagtttcctttctaggtaggtacctcttggattaggagtttgctccaacatctgccacacgtgagatcctgatcgtctttc

SEQ ID NO: 13565 - DNA, 420 bp, Gossypium hirsutum
  Clone ID: LIB3135-060-Q1-K1-A8
gctggtttctactgaaccatatgaaccagatgctacaacagaagagtcgaagttgttgatgagttcctctagcaaagacccatgcatttttggaagatatggtagctattctcttcatcacatccgcatctaggacactgggaattcctaacaacccttttgattttgaggttgctaaaagttgggataaagttccaagagatcctccatactgtcatttgaatttttgagggaatatgtaacttccataatttagtatagaaattttttcctcggtatgtaacattaatccattaagatcaaggttagtctgctgtaatagtttataagcactccttacggagaactcccctgtcggttctgctctccatacttgaaaagcctcttgtactgtctccgccagggggatctggaaaattt

SEQ ID NO: 13566 - DNA, 396 bp, Gossypium hirsutum
  Clone ID: LIB3135-060-Q1-K1-A9
gcgaacatccctagaagattccatcttgctggttacccatatgaggaacagaggcaactgaggaggctaggacagcacatgcagggaagaagtgagaggggggaggagtctgaggaagaagaaggagaaggagaagaagaagaagaagaagacaaccccagccgccgcatccgacaccagaaggaggatgagcaggggcgggaaagctcatcatgcaacaaccttttatgtgccttcgacagaaacttcctcgttcaagctttaaacgttgaccacgacatcattagaaaattccaccgtgtccaaggaattaaaggcaccttctccaaagtcaggtccaaactcaaggtcgtaccacaacccaaatggaaggagaaaaacctggggaaccccaac

SEQ ID NO: 13567 - DNA, 369 bp, Gossypium hirsutum
  Clone ID: LIB3135-060-Q1-K1-B1
atcctgttgagttcagatgtctcttttgaatagcagctactcattaaggtgctagatatctgtatggatagtatagaaactttgatgatgcgacttacggacagaactaacatgtggagcctggatgatggatccatggctgacaagctttagggatgcaaatggtaattcttttagctatatgtacagtatagggcaatagtattctctacagtagcttcccgccatcaaggttttcctttttctcttcattttgtatatttgggccttttcatgcactttgttgaatgcaagtttccatcgttgagctctagtactagtgtttttttttctttctaattaattaaatgcggtgaaggctttgatagt

SEQ ID NO: 13568 - DNA, 172 bp, Gossypium hirsutum
  Clone ID: LIB3135-060-Q1-K1-B10
cccacgcgtccgtgaaaagctagagaagaagtatgacattgttgtgaatattcaaggagatgagcctcgtattgaacctgagataatagatggaattgttaaagctctgcaggcagcaccagatgcagtgtttagcactgctgtgacttctttgaaccaaaaatgctttgat

SEQ ID NO: 13569 - DNA, 450 bp, Gossypium hirsutum
  Clone ID: LIB3135-060-Q1-K1-B11
cccacgcgtccgatccaatattcagactcggctacctctaagaaaattgggagttagctgcgacacagagaaacagagtggaaacaaagcagaaaggaagagaagaagagctaaaaaatatatagatatttaaaaaaaaattcatcaatggagataacgaaccctaaaccatcttcgaaacgcctgctattcgaccggcgttatggtggggtgttggatgaatggaaaaaccaatcgaagaaagctttggttgttgcccaagaaaggaaggtttctttcttttctttccttattaaaacaaatattaacaattgctttacttaaccactcttcttttttgggttttttcttgggggtcattttcgaaagggtttgcataattcctctaacaaaagctttcttgaagaccggtacaaattcgatcaattttgtgggaaggtctactgtaaa

SEQ ID NO: 13570 - DNA, 235 bp, Gossypium hirsutum
  Clone ID: LIB3135-060-Q1-K1-B12
ggcatatctatgggtggtctctagcgttacctgattctgtttaatttactactgtatcttgtcatggggaaaaggtcccccttgggtttcccaaggtgctttaaacctttggttattaattttcgttaaatttccgaactttttatttttgaaaaacaaaaacagttttacaaaagttaaactttttaccttgaaaattgaaaaacaaaacctttaaaaaggggccgcccctttt

SEQ ID NO: 13571 - DNA, 242 bp, Gossypium hirsutum
  Clone ID: LIB3135-060-Q1-K1-B2
cccacgcgtacgatcggatacaagtgtggagcttacacacttccttgaatggacctcacataggaggcaaatcactatgtaatttaagctttacttgtgtaccaatacaagcttgcagcttgcaatattgaataaaaagaaaaaaggacttggagacagcaaatgaaaattcttttagctatatatacagaataaggcaaatagtattctatacaaaaactatacaccataaaaagatttgg

SEQ ID NO: 13572 - DNA, 402 bp, Gossypium hirsutum
  Clone ID: LIB3135-060-Q1-K1-B4
atcggaaaaagagaaaacatgggttggatcggagacaccgtagactccatcaaatcaatccagatgcgccagctcctcacccaggtcgtcagccttggtatgattgttacgtctgccctcataatatggaagggattgatgtgtgtcactggcagtgagtctcctgttgtcgttgttctttcaggaagtatggaacctggcttcaagaggggggatattttgttcttacacatgagtaaagatccaattcgagctggagagattgttgtttttaatattgatggccgtgaaatcccttgtcaaacttgtgatctgcagcaatcccgatgattcagctatccatcaagcttcatcgcaagttagagcatcgtgtaattaacgtccatgaaaggcaagatactg

SEQ ID NO: 13573 - DNA, 377 bp, Gossypium hirsutum
  Clone ID: LIB3135-060-Q1-K1-B5
gttgttagccttgtacacaataatggtaatagtattgctgagaatggtaggaaatggggaggacaaggtctagacttaaatgcatggcctggagtcctggacattgaaggaagagatgagacaacagcgcttgcatctaggcaactgtctgttgtgagttcacaggctctggcagaggagcaagcaaggatgtatcaactggcaggtgatgttttgaaaaagaaggaacttgagggttgttgggatggatacaagcaatcttcatggtagtaggaatccttaaatgtccctatctggtgacccatgaaagcttttattcaaggataggcatgggctaacccccagaaagaacctgtgtgctcttaagaagggtgggt

SEQ ID NO: 13574 - DNA, 396 bp, Gossypium hirsutum
  Clone ID: LIB3135-060-Q1-K1-B6
acagaatcacagaaagacagcttcaacaatgaacagtagtttccaaaaagacttgactttggttttgcttccaaccaatctgtcatttatgttagaaacccacaatcaaacttccttatgtctgtcactctaatctcctaaggaccctctcacaaatatcttctttgctttgctttagttcgagttgttctcttttctgcaattctctgttattttctacatttcttttccattgaagaggaagctgtcttgtaagaatgaagccaacaaggggcagagaagctgcaacaatgaaggacaagaaggaagcaaaaaagcctgctgagaacaaggtcgtcggtaagcgaaaagcggcgagccggtccgataagagtgaccgatagcgcgcaaagaaca

SEQ ID NO: 13575 - DNA, 351 bp, Gossypium hirsutum
  unsure (1)..(351): unsure at all n locations; Clone ID: LIB3135-060-Q1-K1-B7
agcaaatatcgttgaattggacgcctcttgaagaaggattttacctgcatcttacgtgaaggacaatacctggcttgatgagcacccttattacggcacccattgacatggttaaaacccgtcttatgttgcagcgagaaagtgccgtatgaagctataaaaatggatttcgctgagcatatcacgtctgaagttggatgcgttggcattcctgagggcttctaccaaatacagaagaatattgctaacaatcagcatgatgttatcttttgcccttacattcctggaggtgctgggngtcatatattatagatttaacctcgttataaatgccatgtgatattgactcct

SEQ ID NO: 13576 - DNA, 401 bp, Gossypium hirsutum
  Clone ID: LIB3135-060-Q1-K1-B8
acgacatatacaatttagccaactcttgtgtatttcatccacgatgaatcccttcaaaacggtgccaaccctttctttcctgttcttaacccttttcagcttagcccatgcagccacatttgatataagaaacaactgcccttacaccgtttgggctgccgcatctccgggtggtggcatgagacttgaccaaggtcaagcatggcaaatcactgcagcctctggaaccacacaagcccgaatttgggctcgaaccaaatgcaatttcgatgcctccgggaaaggctcatgcgagacaggcgactgcggtggagtcctcgaatgcaagggatacggtaaagctcccaacacactagccgaatacgcaatcgaccaatttgagcaccaagacttcattgaca

SEQ ID NO: 13577 - DNA, 460 bp, Gossypium hirsutum
  Clone ID: LIB3135-060-Q1-K1-B9
gcgctgagcctaatccaccagtttatacaccaccaaagaaagagaagcctgagcccaaaccacgcggtataggaacccccaaagaaggaaaagcctgaacctaagccaccagtttatacaccaccaaagaaagagaagcctgagcccaaaccaccagtgtatggaccaccaaagaaggagaagccaccggcttataagcctccaaaaaacccaccagtgtatgagcctaagccaccaaaaccaccggtttacaccccaccaaaaaaagaaaaacccgtacctaaaccaacaattcattaatcttccaagaaaccaccggatggtcactattcaagacacccttcattggggaagcctcaatagagagataccataggcttgcaattccaaaaaccgagctattatgactatgctaatagataaattagtatccatgcaataagagctgcttaatactcat

SEQ ID NO: 13578 - DNA, 254 bp, Gossypium hirsutum
  Clone ID: LIB3135-060-Q1-K1-C1
aaaaaaaaaaaaataatataaacaataacaatacattttcttaaaccaaaccaaagtaaaacgagagagtctaatccattattgcgacagattaagagagctgttatttgtttcctacactcctcgtttcatttgaatggcacatgaaatcaatttttatatcctctgccggtcttttcaataaaaaacaaagggtccatccctttcactgtttaaatttatcatttgtgtgcaactaaaaacaatgatatccc

SEQ ID NO: 13579 - DNA, 336 bp, Gossypium hirsutum
  Clone ID: LIB3135-060-Q1-K1-C10
gtgaaggctgtttgattggagaaatttctcccttcaccttggcctgctgcgacgagactgtggcagcgggcgtcaagaccttgtcctccgggcatctaatggcctacatcgactgcggaggtccactgaaagaccttgttcgggtcgtttcatcaaggttgaaggaaaaaaacttgaatggaatgcttgaccatttcattttgtcaatgtcatgtggggaattctaataataataatctaataaaaattcaatggcaccctaacaattgccaaggcccgaaaaaattataagtcaattaattattcaacccagattgtgaaaacaacttaagcaat

SEQ ID NO: 13580 - DNA, 350 bp, Gossypium hirsutum
  Clone ID: LIB3135-060-Q1-K1-C11
ttttcgtgctcctgctaagatcctctggcgtaccattcgtggcatgattccccacaagaccaggcgtggggcagctgctcttgctcgattgaaggcttatgaggggattccagctccatatgataagacaaagaggatggttattcctgatgctctcaaggttttgaggcttcagaaaggacacaagtactgcttgttgggcaacctttcctctgaggttggatggaaccattttaacaccttcaaggacctcgaaaggaaaaggaaggaaaaacctcaggggccttataaaaaaaaaaagcacctaactaacctaagggttaaagccaaaaaggttgttaagaaaaacc

SEQ ID NO: 13581 - DNA, 246 bp, Gossypium hirsutum
  unsure (1)..(246): unsure at all n locations; Clone ID: LIB3135-060-Q1-K1-C12
ggcccactcgttctgtcaatcctggtcgtcaaactatcgactattgatttaagattganaagcgtgaagatgattacatgctggttttctgcccaactgtgtgtgatttctgcaaagttatgtgtagggacgtgggtgtttttattgacaatgccggtgtaaggcaactggctctcaattattttccccttaaaaatatgtttaaaaaggcttggaaccttaaaatccatccttatttttaattct

SEQ ID NO: 13582 - DNA, 381 bp, Gossypium hirsutum
  Clone ID: LIB3135-060-Q1-K1-C3
ctgctcatgacttggcatgggcactaatgggactgcctgtactttggcattctttgcgatggctgaataaattcagattattcccaacaggaaacatttgtttttgttgcagagtgtacatagaatcatgcttgaatatagggattgagttttcttgtagttttacaattaagatggcaaagcctgttgatccttttgctttgatttgtaaagttggtcattccaattccaagtccttttcagcagggttggtaaattgagatatctgtgcagtaagaactaattgacttggggttaaaaagcagtttgctaatggaaatggagggaagaaatcctattccaattcctggagtgtgttcatagaaaaatgcagcaatcctc

SEQ ID NO: 13583 - DNA, 390 bp, Gossypium hirsutum
  Clone ID: LIB3135-060-Q1-K1-C4
taaatttgataggagaaattcaacaatgcgtccaactcggggttatgcttttgtttctacgactgaaatcggtggcctcacacctgatagccggagcttacggtttctgcggcaggagtttgatcttcgctacgttgttcctcttggattttatcatgctgcccttaattttggggtttctggcggtgttgtctttccatgggggaatgggttctcaagtaggccgtcatctttgccagaaagattcttcttaggtggcaacatatctccggtttgtgctttaggagggccaacagccttgtggggatttaagacaaggtgattgggaccgacagtaccaaaaagacaggttaacaatgaaaatgccgatccctctggtgtggatttctt

SEQ ID NO: 13584 - DNA, 357 bp, Gossypium hirsutum
  Clone ID: LIB3135-060-Q1-K1-C5
cccacgcgtccgcccacgcgtacggtaaatttccaaaatctagacggtatttactgggttgacctaaggaatatttcgggtccttttccggatcttcttttcgggttacccaaactcttatatgcttacattgagaacagtaagctttcgggatccttacctgtgaatattggtaagctaaaacaactcggggccttgagtcttgaagggaatcggttcactggatccataccgagttctatctctgagttgactcagttaactcagttggttcttgggaaaaatgaattctccggtcatttcccggcggggattaaacagattaggaaccttagttacctgagtttagaacaaaac

SEQ ID NO: 13585 - DNA, 359 bp, Gossypium hirsutum
  Clone ID: LIB3135-060-Q1-K1-C6
aaaaaacatacaaacacacaaaacagttaatttacaaaatataaacagaatttacttgaggagcgctaatgaatatttcacctccttttccggatcttcttttcgtattatcccaaactcttatatgttcacattaaagaacaataagctttcagggatccttacctgtgaatattggtaacttaaaacaactcgcggccttgagtcttgaatggaatcggctcactggatccataccgagttctatctttgacctgactcaattaactaacacggttcttggaaaaaatgaattctccattcatttcccctcggtgatcaaacagattagcaaccttagttacctgaattcataacaa

SEQ ID NO: 13586 - DNA, 416 bp, Gossypium hirsutum
  Clone ID: LIB3135-060-Q1-K1-C7
cccacgcgtccggagcaattgggtcagggactggtattcttctggcagtcacaatcgtctggcagtatttcgagacttttgagaaggagaaggccagtgagcttggcttctttggattgtgagcttacgctttgactggagggatgcttgtgcttcttagctttcgcaattttgggttaggtgagggattcatttcgggcctacttttgacaacagagtttacaatttagttagttcaatatgttttgcttacacattttgtttgagaaatcacagaaaaagggtattgcctgaaagcagtgctacttttgtctagtataccttgcaatatagaagtttgttctatggttggacgcacgcgcaatgacaacacttcttatatcttgtgtatctttagttgcttgaggagagccttt

SEQ ID NO: 13587 - DNA, 357 bp, Gossypium hirsutum
  Clone ID: LIB3135-060-Q1-K1-C8
caggggagtatgagagaggactttttgctcatactgataaaccagtcagtacacttatttgtgaggatcaagtttcaggattggaaattgaggtcaacgacggccaatggatcaagttgaccaatctatctccttcttcttttgtttttgtagttggagatcctctcaaggcatggagtaatgggaggttgaaatcagtaaatcacagagtgatgatgagcggagacaaagatcgatactctatagcagcctttgtcattccaaatgagggtactataatcaggacacccgaagagcttatagatgaccaacatcctcggcttttcaaggacttcgatttcatggatttcttccttt

SEQ ID NO: 13588 - DNA, 366 bp, Gossypium hirsutum
  Clone ID: LIB3135-060-Q1-K1-C9
aattcggtcgacccacgctcgtctctacattcacatctccaatatatctaactaagaccatggtgaggtgcatacaagggtctttaaacctttttgtgcaggactatcattgtcaattgtctattttcttatcacccttcaattatctttgcaaaactttacttgtcagagttgttaattctagccttcccaactttatttggttggccttgccacctaaatactcaaaaaaccattttaaggcttcctaccctaaaacaaaattccaacccccccattgtttttttttcctaaaaccttttttaaaacctgtttccttaattaaaaccggtaaaatcccttcacccctttaaaaaacttgccctt

SEQ ID NO: 13589 - DNA, 432 bp, Gossypium hirsutum
  Clone ID: LIB3135-060-Q1-K1-D1
ctggggtgcaggttggaaccttctatcattgttgcttgcagtcaaacgttctaaaagaataagtggcatagatgctcttaggcatccttttttatgtggaccaagatggcgtgtggtcccatctatggatattattagatggggtcttgggtcaactgcagtgagaatcacagaggaatatatctatcgcacagctcagcgtgataggcttgcccactttattgaattaatggagatgttgaatccccattcaagaccaaagaactggctagagcttttgcccgggaaatggcgtctgttatactctacaggaaggcacataggcttaactcttcgccaacctcctctccgtgtcctcattggcgatgcatacctaacaattgcaagaccttctaagtcaaacgcacgcctttctgtaacatctgaaattgg

SEQ ID NO: 13590 - DNA, 425 bp, Gossypium hirsutum
  Clone ID: LIB3135-060-Q1-K1-D11
gcggcacgcgtacgagctcatggaatgttgcacatccggccacttgaaacagtgttaaatacggggtagggacttatactgcatcttcaaagaagtttactcagccttgaatatcataaaggtgaccgctgatcgagtagtctttcacataacattcactttaatggtaaagacactaatgaccacgagtatcgcatctgatggaacgataaatcaaaattaggggcttaatgtaagtagtttgaataaactcacctccttttgtttatcaattattatgaaacaaccattaggtattaattagcccgcttttttggttcctattatcccctagaccttaacccaccattaactacctttgtttttcctaaacctgatccgttttgttttggcaccagcctttacagcttctttggaacaccccc

SEQ ID NO: 13591 - DNA, 374 bp, Gossypium hirsutum
  Clone ID: LIB3135-060-Q1-K1-D12
ggaaaaaatcgcctatgaatggatctttcttatagtcattctattaataagtttcattattttgtatcgtgaaataaataaaaaaaagaattggattcttttgttgctaatccatcttttttattaatttggcttttaatttaaccctttttctatcccaaattatttccacttttcttagaatttctttggttttttgcttttctttggacttcaattggggttgacatcttcctttttccaattccggccctttcgcttcaacaagcttcaataattcttatgcttattctttcggcatcaatgttatattggaaaatttgccaacaaccgaaagcgaaagacagtcgtcagccttaacaaaaaccggcacc

SEQ ID NO: 13592 - DNA, 328 bp, Gossypium hirsutum
  Clone ID: LIB3135-060-Q1-K1-D2
ttcgtaatacgcgaagcacctgagcgatagctcttcgatcgctatattctcgcgatggcgggggagcgaagatcttcgcgagacggcccatgaatcaatctcgagaatcgagcatggggcttgtataccctaccgcattccggccccggggccttcaattggtcctttctctcttctcttttaccagtgagtggtgagtttcctttctaggtaggtacctcttggattcagagtttggtccaacatctgccacacatgagatcctgatcgtctttctcccagcgttgatgcctgctgggggaaggaaacaaaaaagcacataagctta

SEQ ID NO: 13593 - DNA, 380 bp, Gossypium hirsutum
  Clone ID: LIB3135-060-Q1-K1-D3
ctttttaactctaaagccaagaaagcaagcttctaaggttttgagagaagatcaaaatggcggctgaaagatcagcttccatggtcctccttttggcactcaacattctctttttttccctagtcagtgcttgtggctcttgctcttcacccacccctaaaccaaggccaaacccaaaccccaacacccccactcctactccatctgcacgaggcaggtgccctagggatgccctcaaattaggtgtatgtgccaatgtgcttaacctagtcaatgtcaccgttggttcacccccagtgatgccatgctgttcccttctcaatggccttgtcgacctcgaagctgctgcatgcctttgcaccgctatcagagcaaacatt

SEQ ID NO: 13594 - DNA, 306 bp, Gossypium hirsutum
  Clone ID: LIB3135-060-Q1-K1-D4
gtcaaacatatcaatcgttgacagcccctacatacgttaatgcggcaagacctgcaggttgatgagccctttcacaacctggtgcatcttccatgcccatgcagcatcagcagcagccgccatgggctaatgttagacaaggaggcgcagcggtgctgggtcggcctccttattacagtcgatgacctgtgtctattctataatgaaattaaatgatccctcgtctatcttatattcctcatataaagattcgccaattgaatctctttaagttatgactgaaatgaacatcccttttgatgccat

SEQ ID NO: 13595 - DNA, 95 bp, Gossypium hirsutum
  Clone ID: LIB3135-060-Q1-K1-D7
atcactcctccttatgacactctatttccctgtcatcaacaatggatcctcttagaggacgtggatcatactcattctaataatctacatatctt

SEQ ID NO: 13596 - DNA, 393 bp, Gossypium hirsutum
  Clone ID: LIB3135-060-Q1-K1-D8
tgcaaaaagtgttgatacgtcctatccacatagaaagcttaccctcttccacacattgccggtggatgctacagccgctatcactttggctgcaggaggggaatggttaagtgaaactctcgacgtcttgtttggtaaacgggatgtttacccaggcgccgtattcttgcctaaccgttcggccggagatgcctttgtatggtatagcaagctgcttagctacttgtatcgatttgccacagtgtggttagatacaatgcgctggcagcctcagcttggcaggatgggaatgaaggtcgaggaagcagggaagaaaaggttattcgctattggctcacccttgtatcatgccttggtacggcctatacatgattgagtcatgacggttttgac

SEQ ID NO: 13597 - DNA, 270 bp, Gossypium hirsutum
  unsure (1)..(270): unsure at all n locations; Clone ID: LIB3135-060-Q1-K1-E1
atcaagcctaccanaatacactcaaatggttcttattctccacagaacattacctcagctggccagatttcactctacacaacatcatccccttacaacacgaaccatccccccaataatctgcatcattgtattattgattaaccaacctaacagacacaataccatacattatatgttcctaaacatatctagcaaacactatcttatcatcctacagaactcaacaaacttcctcctataacatgattaccctaattaaataaatta

SEQ ID NO: 13598 - DNA, 333 bp, Gossypium hirsutum
  Clone ID: LIB3135-060-Q1-K1-E10
gcgccccgatgcttatagttacccataggatgacccaacaagcttgtttacatgccccacaggtgctaattgcaaagttattttatgaccatgaagagtacttggatgggtttaaagtcctttctattcccaacataataggttataatcaataaaggaataaacctcaattgcttttgaacacctttcttggagggcataaggtccgaattggaaatattatggttggcatgaatgaaaaattggaatcccttaattaaaaaaaataataaaaacccatattttaataataaaataacatagaaaacattacttgaaataaaccttattaat

SEQ ID NO: 13599 - DNA, 407 bp, Gossypium hirsutum
  Clone ID: LIB3135-060-Q1-K1-E11
attacaccttatacatatatttaaagtccctcacaaccctcaaaaactctggcttgagcgggaatactcacatcagcactcccccttgacaatcctctaaaccatctgcttgtccccgttgcctacatgttcagaacccaatatagtgcactctctacttactatttatacacgttcaaacaactcctttcatccaatctcacaatctcctgtactgagaaatccttgacagatcatgttgcaataaatgcacatcgtaatgcgtaccttaccgatttgaaacgcaataaactttttaaggtatttgttgatcgtgacatcttatttaccctcacaaacccaactcttacttccaaagaatggtacaaaaaccttgctttatttaaccgaatcctttaccaccccca

SEQ ID NO: 13600 - DNA, 424 bp, Gossypium hirsutum
  Clone ID: LIB3135-060-Q1-K1-E12
accactcatacgattttttcaataaattaacttcaacctctcatttaaacaattaccatcggatacatgaccacctatcatatcaaccctctcaaacctatacattactcccatcctcatctatacatcataacccacgatactatcttaaccaatattccataccatttttttttttcccttcattttcttattccctatacttaccctacttcttcaatatccttctatcttcaactatcgccttcaacggtccatgacccaattgaattcctcactttcaaattatcctttcacaactacctttaaacccaatctgcctcaatcccaattgtaaccccatctcttattccttaaaacacccttcttcttctttctaaaaaaacaacctttccttaaaactcaatttcaatctttatcccat

SEQ ID NO: 13601 - DNA, 437 bp, Gossypium hirsutum
  unsure (1)..(437): unsure at all n locations; Clone ID: LIB3135-060-Q1-K1-E2
cccacgcgtccgagcgcatgtgtgaaaaatcgatgatcaagaagcgatacatgtaccttacgagaagagattttgaaagagaatcccaatgtatgtgaatacatggctccttcactggacgctaggcaagatatggtggtagttgaggtgccaaagctaggcaaagaagcagccaccaaggccattaatgagtggggccagcccaagtccaagatcacccaccttgtcttttgcaccactagcggtgtggacatgcctggggctgactaccatctcaccaagcttttatgcctccgcccctccgttaagcgcctcatgatgtaccaacaaggttgcttcgcatgggggacggtgctccgagtggctaatgacttatctgagatcaacatangtgctcgtgtacttgtgtgtgctcggagattactgctgttaccttc

SEQ ID NO: 13602 - DNA, 418 bp, Gossypium hirsutum
  Clone ID: LIB3135-060-Q1-K1-E3
aagggtttctcaaggagaaccaaaagatgattatatcagaccgcaggggcttttattcacacccaggacattagacatttcagatacaggcacatcttttacattcaacatggattcatctttctctcaaagagtatcaatgaacgaaagcccggcactgcattcactgcaacagagattaagttccagtgaagaacctgatagtcatatttcctgtcaattaaatctaactctggcatcttcttcattgcaagtcaataaaagtccgatcttaactaggatgtcccaaccaagttgggaaatcggaaaagtctccgagtcaaggtctaatgccaacagtaaagactctgattctagacctttccatagcagaagatacatgattgatggggaaacaacattatcgtcatcgaaagat

SEQ ID NO: 13603 - DNA, 300 bp, Gossypium hirsutum
  Clone ID: LIB3135-060-Q1-K1-E4
cccacgcgtgcgcccactcgtccgcccactcgttctcccacacgtacgcccactcctgcgggctagtttcagtatcacttccatggctatcacggctgcttattatacattgtcatggcatatggatcgaggagaacagcctctgtctgaaatgctcgtcacattcgccctatctgttggcaccgccgtaggcatggacttttttgctacatggacacatctagctctgtggcatgcttccttatggcatatgcatgagtctcaccatccaccaagagaagagccattcgaactaaacta

SEQ ID NO: 13604 - DNA, 425 bp, Gossypium hirsutum
  Clone ID: LIB3135-060-Q1-K1-E5
gtccaaactggtgaaattgcaggcttgggaagctatacaaatggagagctaagtccgtcggggagttcaaacagattgaagaatcagattagcttctcatcaagactaccttcatccttgggcatcttgtcacagatttccgaagttgtcgatgatgctaaactcgaaactggatgccaatacggttcttggaacgattctgcaaacttcccagagaacttttctggctcgaaaacgacacaagataacgactccaacttcttttccgccaaccagaacagtgctagtggaagtcgtcttcatgtattgtctcaccatttgagtctgccgaagacatcgaatgaaacgcctgccatggagaagtttctaagctttcaagatccagtcccttgtaagattagagctaagcgtgggtgcgctacaca

SEQ ID NO: 13605 - DNA, 335 bp, Gossypium hirsutum
  Clone ID: LIB3135-060-Q1-K1-E6
aaaaaaaaaaaaaaaaataaaaaaattgaaatactatacaaataaaaaaaaaaaaaaaaaaagaaaatacaaacaaaaaaaaaaaaaaaaaataacttataataaaaaactggcctccccctttaaaatatccaaacttacttccccttccatccaacgtcataactcttctatatggacacctaaactaaattaagtgcccgtctttttacaacgcagagacttgtaaaaccttggcttccccaaactaaatcgccttgaacttcttccccttttaccaaattagctttatagcaaaaaggcctgaaccaatgtctcttccaaaaatttgccca

SEQ ID NO: 13606 - DNA, 265 bp, Gossypium hirsutum
  Clone ID: LIB3135-060-Q1-K1-E7
taaaaaaccacttttacttatggatttttatttctaaccccaatttttactaataagcctagtgatcttatcgatgcatttatcctaaataaatttctcgtttttctttcttttctttcttttaaaaaaaaactaaattccaggcgtatgcaaaatacaaaaatatatattgaataccgaagataaaaacaaaaaagcaccttatgattttatctattcttagtatggctttatcacagcgtgcgttaaataatgacaattacat

SEQ ID NO: 13607 - DNA, 239 bp, Gossypium hirsutum
  Clone ID: LIB3135-060-Q1-K1-E8
aaaaaaaaaaataaaacttatataaatcaaataaaaaaaaaaaatactataaaactaggccagagtatctcatcaatccataccgtcataaccaccttcttatatgcctctcttttcctactattaaaaaaaacctaactccccctcatatgcattataccactaacccttcttaaaacacaccatcactaaaaataaatcaccttacacttttaacaattctgactatggtctctacc

SEQ ID NO: 13608 - DNA, 447 bp, Gossypium hirsutum
  Clone ID: LIB3135-060-Q1-K1-E9
gcggtgtacctaatgcaccagtttatacacctcctaacaaagagaatcctgaccccaaaccaccggcgtagagaccaccatacaaggagatcccaccgtcttatatacctacttaatagccaccatcgtttgaccctaagccaccaaactaacccttttacacgccaccaaataaagagaatcccgaacctaaacaaccaatccttgagtttcccaaaaaaccacctattggtcattttcaagaacaccctcctttgggaaaccctcattaaaaaaacccaaccggttacaattccaaaaaaccaacctttattacttacttaattaattaaataattttccttccattagaacctcttaatacccaaggtccggtttcctggatagtaaggattaaaggcttcctttacctaccagaatgcctattgccgttcctatttgaattcc

SEQ ID NO: 13609 - DNA, 202 bp, Gossypium hirsutum
  Clone ID: LIB3135-060-Q1-K1-F1
cattcaacatggattcatccttctttaaagaggtcaatggacgaaagcccggcactgcattcactgcgacagagattcagttccagggaaaaacccggaagtcatatctcctggcaattaaaactaaccttggccttctctttaatgcaaggcaaaaaaaagtccatctttactttgatggccccacccaattgggaaaatt

SEQ ID NO: 13610 - DNA, 216 bp, Gossypium hirsutum
  unsure (1)..(216): unsure at all n locations; Clone ID: LIB3135-060-Q1-K1-F10
gcgcccacgcgtccgtttttaactctaaagccaatatagcatgccactaacgtttttatagaagagcaaaagtgcttctaaaagatcatcttccatgttcctacttttggcactcaacattctctntttttccctattcagtgcttgtggctcttgctcttcacccacccctaaaccaatgccaaacccaaacccaacccgcccactcctactcat

SEQ ID NO: 13611 - DNA, 383 bp, Gossypium hirsutum
  Clone ID: LIB3135-060-Q1-K1-F12
ggcgcatgcgtccgaatttaacccatactccccttatggattccctaacatctattgttaaaggggacactgtgaatgcttactactaccacattgttagcccatttacgaacacagctgttggtgcgtaacttacccatagcttttcaagtaatgagaacactctcacgattggtacacaacatgctctttacccgtttaccacaattattgttcaactgaacaactacggcaaaacaagtggtcttatccatcatgagtggctcccaaaatgcctcttcaatatctttggagacatggacaccacatcaatttaaaatactgctaaagtctctcttgccttttcactcaaaccccaaggaaaagcaatatcactgctttaa

SEQ ID NO: 13612 - DNA, 405 bp, Gossypium hirsutum
  Clone ID: LIB3135-060-Q1-K1-F2
cgtttaagcagtttcttgaagctgttataaatatgaagtttgatgaggagcccaattatgccaagctcatatccttctttgaaagcctaattggtccatgcataccattgagaccaattagaattgatggagctcttaaggttgggcaaaagcgtggaagattagtcattaatttggaagaagatgagcaacccaagaaaaaagtacgactgggtattcctgctactcagtgggtttctgtttacaatgcacgacgtcccatgaagcagcgatatcactacaacgtagcagattcaaggttgcatcagcatgtagagaagggtaatgaagatggattgtttattagttgtgtggcttcagcagcatatctctgggccctgatcatggatgcaggaacagggttct

SEQ ID NO: 13613 - DNA, 347 bp, Gossypium hirsutum
  Clone ID: LIB3135-060-Q1-K1-F3
cccacacgttcgaaattaaaacaaatataaatatagaatgtagaagaagaacccaattgtgcggaggtcatatccttctttgagagcctcattgctccatgcataccattgagaccaattagaattgatggagctctcaaaggtgggcacaagcgcggaagattagccattaatttggaagaagatgatcaacccaagaaataagtacgactgtgtattcctgctactcagatggtttctgtttacaatgcacgacttaccatgaagcagcgatatcactacaacgtaacagattcaaggttgcatcagcatgtatagaacggtaatgaagatggatcgttcattag

SEQ ID NO: 13614 - DNA, 438 bp, Gossypium hirsutum
  unsure (1)..(438): unsure at all n locations; Clone ID: LIB3135-060-Q1-K1-F4
cggacgcgtgggcagctgcatcatctgaatctaatcctgaaggagaagctgaatctgttgaagcagcagcagccgctaaatcgaaggccaaggctttacagcttgcacttgtgttcggtttttggtactttcagaacattgtctttaacatttacaataaaaaagcattgaatgtcttcccattcccttggctgcttgcttcttttcaactctttgctggttccatttggatgttggttctgtggtctttaaagttgcaaccttgtcccaaaatcacaaaaccttttattattgctcttcttggacctgcattttttcacacaataagccacatttcagcttgcgtttcgttntctaaagttgctgtttccttcactcatgttatcaaatcatcggagccctgtgtttcggttgttttctcttcattcctggtgatac

SEQ ID NO: 13615 - DNA, 353 bp, Gossypium hirsutum
  Clone ID: LIB3135-060-Q1-K1-F5
cccacgcgttcggttttatgtcctatatgttttcatcctgactggaagaatgatcagagggcgggttatattgatttaaaacatggataaactcattggtagctttgagacaatccacgttcaagatgctgcttggcatgagcttgcacctcgtcttggtaatttgttcacaattggaaaaggaactaagccatgtgtattccttcccaagggcaatggtcttaagtcgtccatcattgtcgatgctaagaagaggctttcagcccaaaatgctgcttgaacattaacacaagatatctagatatgccttgctactgtaacctattctggagtgactacatttcatgctttca

SEQ ID NO: 13616 - DNA, 402 bp, Gossypium hirsutum
  Clone ID: LIB3135-060-Q1-K1-F6
aaagcggccacggctgctgctgcagtggcaaatgttaattctgctcaagattagatgagcggtaagactgatgagctgaattatggttataatgtttctgaaagaagaaaattgactagttgtgcatttggcatccagtgttattctgcatcaagctttgctgtagttggtctatagataagagaccaaagattgcagtgtcattttcttaaaagaacttttttcctttattccttcttcagttgctgcttggtggctttttactgcttatatggtgtttatgtacagttagagtaagtggaaacctttattatattaaactggggagggatggtaaacggaaattgtagatgaagaaaattttatatatggaaacatgttaatttctccctaatattgatg

SEQ ID NO: 13617 - DNA, 399 bp, Gossypium hirsutum
  Clone ID: LIB3135-060-Q1-K1-F7
gtttttgctcttttcccgttttccatttcctatcttcacagcggaatttagggtttgggagggttgaatatgagctctacgggtggatcaacgaaaggagggagagggaaaccgaatgcatcaaagtcggtttcgaggtcgcacaatgccggtcttcaatttcctgtcgggaggatcgccaggttcttgaaagctggaaaatatgccgagcgtgttggtgccggagctcccgtctatctctctgccgtgcttgagtaccttgctgctgaggttctagaacttgctgggaatgcagcgagagacaacaaaaagacccgaattgttccaagacacatccaactggcagtaaggaacgatgaagagttgagcaagcttttaggttcagtcactattgcaaat

SEQ ID NO: 13618 - DNA, 372 bp, Gossypium hirsutum
  Clone ID: LIB3135-060-Q1-K1-F9
gcgcaaaaccccattttatgacatatccgaagctatgaaatcttgattccataatgtttctgctggatgagcgtttatgattgttgatatatgctgcttgatactatatattgcttttgactttttcaagagtcaaaaaataatgactcttaaaaacggcaatctatttttcgtttaaccatccaaattgctactctgtcctaataatcaatgttgaaattttctttttctgtcccttaaacataatcttcctatcgattaaattccttttccttctaattattttctttccccaggtaattatttaaattttttattgatcctttttaattaaaatcgcttccattctaaagcctaatcaaccaaccattt

SEQ ID NO: 13619 - DNA, 194 bp, Gossypium hirsutum
  Clone ID: LIB3135-060-Q1-K1-G1
aaaaaaaaaaaaataataaaaaaaaaaaaaataaaatatcattccaaaataaaaaaaatcaagggtgagagtttctaaaattacattaactagcatcaaatataataaaacctaattaaatctcatacggccggcctttttcaaaagtctcacattaaaaaaaccttgctttaaacaaccttattttccttaaa

SEQ ID NO: 13620 - DNA, 403 bp, Gossypium hirsutum
  Clone ID: LIB3135-060-Q1-K1-G11
gggtcgacgacccatgcggcgagcgctcccgtcaagatcgtctatccttattaccgcttgttgaacacaatcagtcacaggacttccggctaacttactccgacctctatacctatgccacccataaaagtactggctgtacaaatactttctgatttcaacctaataccgcatcgatgagctgaatggctaccaaaaacacccggatgcgcctttttgattgccaacaagtttttcttatttcttggcaccaaaaacctacctttcctgccatttttattaacgttttccctttcttttccttgggaaccttttcaacccttcttgtcctttccaagtttccaaacccttcttattgttcattttttcttttctaaaccttactaaaaaactttccaagccc

SEQ ID NO: 13621 - DNA, 400 bp, Gossypium hirsutum
  Clone ID: LIB3135-060-Q1-K1-G2
cccacgcatacgtatcgcttatttcgcgtccttactgtgcactcgatggcaaatcgatgggggaggcctgaggtgtatccgctgttcgcggccgtatgtgttgctgtcagaatctgcgggtttcagttggtgcgaaatatcttcatcaaccctgaagtcagggtaaccaaagagaacagggctgctggggttttggacaactttgctgagggagaaaaatattctgaacatttcttgagaaaatatgtccgcaacaagacgccagaaatcatgcccagtatcaacatcttcttcactgacccaaagtgaggcttcactcttgctttatgctgaaactaatattaaaaaatagaagaactaagtcttattcaatcaataccaagttttggcctttctttct

SEQ ID NO: 13622 - DNA, 327 bp, Gossypium hirsutum
  Clone ID: LIB3135-060-Q1-K1-G3
cccacgcatacaaatcgcttatttcacgttcttactgtgcactcaatggcaaatcgatgaaaaaggccttatgtttatccgctgttcacaaccttaagttttactgtcaaaatctatctctttcacttgacgcgaaatatcttcatcaaccctgaactcagggtaaccaaacataacaggacttctgggactttggacaactttacttagggagaaaaatattctgaacatttcttgagaaaatatgtccgcaacaagactccataaattatgcccattatcaacatcttcttcacttacccaaaatgaagctttactctttcttta

SEQ ID NO: 13623 - DNA, 431 bp, Gossypium hirsutum
  unsure (1)..(431): unsure at all n locations; Clone ID: LIB3135-060-Q1-K1-G4
ctcgtcctttgcagattaagcccaatgctgatggctacgcttcaccatcacaagcaatggagttgaatttgaagtcatcatcatcatcatcatcatcagcagcagcagcagcagcaacatcttcgacttcatttagttccttctatcaaagtaaagatcccattcctctactatcacctcttgttttgcctactttgcttcaatcatcttatctccatcaagaagggaatacagcaacataaatctctgtgaaaggtgttaaggcttccttgttataaatacgtgatttatcttgtcttccctgtgtttcacattagattgtcattactatatattctctgatactctttctgtttactaaaactcatgtatttaacagcattttgagaagcattccatctcattgattttaatantttatatcactctac

SEQ ID NO: 13624 - DNA, 330 bp, Gossypium hirsutum
  Clone ID: LIB3135-060-Q1-K1-G5
gtttaataatgggtagagcttcagaaaatgatagtaatgagggtgtgttggttttcggaaggtaatgggtgaacggctatggtgatagtgagggatgagggttgaagatgatttgaacagtaagaccgtgaaaggtttttagaatttggtttagcactgttgtgttcgctgattgaagattggagactcgttttctccttagcttattcgtgaaattttggcttatattatgtaatacaaatcgcaacgagcatcttgattcgttttcaaaaaataaaattacaaataaattaaaaaataaaaaaacagtatttcgctttttatgtttca

SEQ ID NO: 13625 - DNA, 373 bp, Gossypium hirsutum
  Clone ID: LIB3135-060-Q1-K1-G7
tcaaagaccacttttacttatggatccgcatttctaaccccaatttctaccaagaaagcaagtgatctcatctatgcatttagcataggtaaatttctcggttttctttcttttctttcttttaaaaaaaaactaaaaaccaggcatatgcaaaagaagaaaaaatatattgaacacggaacagaaaaatttaaaatcaccttctgattttttttattcttagtattgcattttcacagcgtgcgtaaaaaattacggattacatttctgacttttatagccagattttcaaaataaataaaaacttaaaaatcctgttttcctactgtcgcttgctgtgaaatccgttactggctactcctggtgtattcct

SEQ ID NO: 13626 - DNA, 305 bp, Gossypium hirsutum
  Clone ID: LIB3135-060-Q1-K1-G8
gcgctgcacagcttccccaagaacccatcattctcagattttctctcagcgtttaagggtggaacgatgtccactgtcggagaagctgcttgctcttacgctgctcttattctttatgatgatggcatccccatcaccgctgagaagatttctacactagttaaagctgcaaatgtctctgttgaatcctactggccaagcttgttcgctaagctttttgagaagtgcaacattgaagatctcataaccaatgttggagctcgtggtggtggtgccccagtagctgcagctgcacctgttgctgc

SEQ ID NO: 13627 - DNA, 363 bp, Gossypium hirsutum
  Clone ID: LIB3135-060-Q1-K1-H1
gacgatctgtcatcatccccaccgtccactttatcatcatcaacatcatcatcaccatcaggctcgattcaatcagcaacagcaccatcgtctccttcaacactggattctcccaccagacgactgaaaatgacaagctctgaatagagcagcatattttactactaataaaaaagatttcaacttttagaaaactagaccaaacccctccctgcaattctcccgttaataatttttgacggttcttgttgcgctttgcaaatcaatcaaagctcgctttctcttctttctaagttttcgtactttctgttaatcatatttatataatggaacaaaaagggattccaattactaactcagatt

SEQ ID NO: 13628 - DNA, 301 bp, Gossypium hirsutum
  unsure (1)..(301): unsure at all n locations; Clone ID: LIB3135-060-Q1-K1-H10
aattaccgactcgacggacgcgtcctnccacgcgtatttccacgctgttttccacgcttcctgttcaggatatcacccttcacttagccttgctttaacagagatgggtcctcttcatagagctgctaacaaaaattgtagacctctggtggaactccttttgagattcatccctgagaaaagttcaagtaaattaggattggaaaaccagatggcagctggtgggattcatgaaagcttcttgtttacgcctgatgctctaagcccttcaagtttgactcctcttcacattgcagctggt

SEQ ID NO: 13629 - DNA, 363 bp, Gossypium hirsutum
  Clone ID: LIB3135-060-Q1-K1-H11
ggcgaaaaatatcgaaagccctaactttgccgttcgagcctaatggcggaagccgccgttttcgccttctgtactctcacaactcaccatctttcttttgaatcccaaaaagaaacattgtctcgtgtgtacttgggtaaccttgaccaacaattttcgtaccggaaccttgaaaacaagttccgtgcctttgaagtaatccgaagggtttggtttgttcaaaggcaacctgtttttcctttcattaattttaagaacccaaaaacccccaaaaatccaatccctaattaaattgccaaaattgcttgaaaacttaaccttcttattattcttaaagaaaaagttgaccttgaagttgtcaag

SEQ ID NO: 13630 - DNA, 298 bp, Gossypium hirsutum
  Clone ID: LIB3135-060-Q1-K1-H2
tgttaacttactaaaccggtcaggtttaagcatgtttaaaattgaagattgtaatgaggagggaggaaagcaatacgaggaaggtcccatggctcgacatcataaatgtttagaacaggaataacactgtgcatctcttgtctccggccgtctaactggtagcgtaagtagaaagaaactaactcttcttctgtaagaaaaaaccgaaaaccagcttggatctgcattaacagtacgacggtcttaggtgcgctttgctataaagtccaatgctgcgctgtgctatgcttaatctttt

SEQ ID NO: 13631 - DNA, 419 bp, Gossypium hirsutum
  Clone ID: LIB3135-060-Q1-K1-H3
tgactatcagagatgaatcagtagacctgtcaagtgcttactctcaagggatacggaattgggtgacccaggtgctacagtcttcaggagtggatatatcacaggcgagcatctctgtgaaaattgatgttggtaaacgagtagctgctggaatgacttctatgccatccagttctaaggagaaagatatccaatatacaagcaatcaagagatggcacaaactggagttcgcagctacacagaggagtctgatcaggcttataagaggcacggaactggaaaaagctagtgtatgattcttggtctatttttctttcaaattttcttcattctgttcctttttcgttcgattagggtgctcatttttgcaatgccatggtccttatatttttaagtcttaagagcaaatgtaaatgtt

SEQ ID NO: 13632 - DNA, 219 bp, Gossypium hirsutum
  unsure (1)..(219): unsure at all n locations; Clone ID: LIB3135-060-Q1-K1-H4
cccacgcgtncgattgcttttatgctttgtatgagcacattcaattgtgtccaggtcaaggatggaggcatacatgatgatttaccagattttatttatatcgggctttagttacaacacaatgtatgaaatgtatgaagtgactaaagatattagctataatcatctttttatatgtgaaagctgatatacaatatacaaacaatcaaaagatggctc

SEQ ID NO: 13633 - DNA, 208 bp, Gossypium hirsutum
  Clone ID: LIB3135-060-Q1-K1-H5
cccacgcgtccgaggaaactgagtttccttttatcttctgttttgttttgttgttggtggggtgtttatcgttttctagttttacttggtatagatgaaaagacagatgtatgaacaatgtaaaacaaatgcttcagtgttgtacgttaaaataaaaaggatatacatttttgagttggttaatgatgattccctttgcatttgtaag

SEQ ID NO: 13634 - DNA, 371 bp, Gossypium hirsutum
  Clone ID: LIB3135-060-Q1-K1-H6
ctggttgatagtgacagcttggggaagaaagttgctccaccggaaggtagatcgaggatcgacatacgtttgcgaacgaagaatcagaaacctgttgaggaggtcgtggacgtaggagatcagaacttgaatgtggaagacgttgaggagtttgttcccaagacgtggaatctgaggcctaggaagccgatatcaaagcctcggaatcaaaatggaggtgcgccgaagatggtggcttcggctcacgataacaaaactcagaggccagagtcgagtcggtctatgaatgtcaccgagtccaaaccagctgagtagattgcgaagaaacagaacgtctcaatttcgcttactagggaagaaattgatgagga

SEQ ID NO: 13635 - DNA, 400 bp, Gossypium hirsutum
  Clone ID: LIB3135-060-Q1-K1-H7
cccacgcgtccgagaatacatactgaaaccaggggatggcactgtggatatcaatagggtagaggaatacatatcctttgtcgttgatgcaactggcaaggctggaattattcggcaaatggaggcatttcgagctggatttaatcaggtttttgatgttgcatcattacaaatatttactccccaagagttggactatttgctatgtggtcgcagagagttgcgggaggccgagacacttgctgatcatataaaattcgatcatggatatactgcaaagagccctgcagttgttaatttacttgaaattatgggagaatttacaccagagcaacatcgggccttctgccaatttgttactggtgcgcctaaacttccacctggtggtcttgcagtgctg

SEQ ID NO: 13636 - DNA, 195 bp, Gossypium hirsutum
  Clone ID: LIB3135-060-Q1-K1-H8
cccacgcgtccgcaattacatacagtaaaatgttgctggaactgcagatgagcctggatgggcttatttcatatctgtagtcaatctcgcacaatgcatggagcctgtaatcgaagattacgatgttaccttcaaacagaatctttagacctatgcatgcaccataatccttgcatttactgacaatgcatcaaa

SEQ ID NO: 13637 - DNA, 402 bp, Gossypium hirsutum
  Clone ID: LIB3135-061-Q1-K1-A1
ccacgcgtccgccgcaaggctgctccagctcctgcacaacagcctgaacaaggaatttgggccaaaactgaaagaacatatgcaatactgtatggagcatcctgaagaaataagcaagctagctaaggtcaaagctcaggtttctgaagtcaaaggtgttatgatggagaacatcgaaaaggtgttagatagaggggaaaagatagagctgctagtggataagactgagaatcttcataatcaggctcaagactttcgaagtacagggacaaaaatccgaagaaaaatgtggctacaaaacatgaagatcaagctgattgttctaggaatacttattgccttgatccttatcattgtcctctctgtttgccatggtttcaactgtggcaaaaaaataaatgc

SEQ ID NO: 13638 - DNA, 380 bp, Gossypium hirsutum
  Clone ID: LIB3135-061-Q1-K1-A11
cttggaaggtgtgatcacagccatcgatctgtccaggaaaacatttagccggatacaatggaactatgtttttgcgatggcgtacaatgtggtggcaataccaattgctgctggggttttgtatccatcattagggataaagttgccaccatgggcagctggtgcctgtatggccctttcttcggtaagcgtggtgtgctcttctttacttcttcggagatataaaaagcccagacttaccactatacttgaaataactgtagagtagaaacaaaatttgaacaactatttttctctccatcgccttcctttaggtttgtgtttttataaagaggggaattgagggggtgcgagtgaatcataaatttcccaattttgtg

SEQ ID NO: 13639 - DNA, 256 bp, Gossypium hirsutum
  Clone ID: LIB3135-061-Q1-K1-A2
cggacgcgtgggcggacgcgtgggttgtgtgccatattatggtttctgatagggatggttagggtcgtaaggagttcgatctcctcgtgaagatataatgtaagtgggaagttttgttagttatgttctactgggaagttggtgaaattgttgcatagtgaagtccaaatttgtcattaaattaaatagtttttaatgtctcaggaagaagtgttagcagaaggaaagcataataggtaccttgaaatttctttgt

SEQ ID NO: 13640 - DNA, 389 bp, Gossypium hirsutum
  Clone ID: LIB3135-061-Q1-K1-A3
cccacgcgtacggttgtcttctgtcttccctgtccatttatctcatgcgaggagtccttgggatcccttgtgcatattttctatgttgtctctgtgattcaggctttaattgtatgttgtcagagacatggttgtaagaccgatggattagattcccataatcgcctagttactgatatctgtggcattcttggagaaactggttgtgctcattggtattttgtgtcaaatagtgtcgaccattcttgtgatattaaagatatgattcgaagattgagtttcccgtacttacggagatgtgcattgttgtggaagttgcttaaatcgtctttcccagcacctttctgctaaagagatgatgtgtggagagtctcttatgcaacaactga

SEQ ID NO: 13641 - DNA, 290 bp, Gossypium hirsutum
  Clone ID: LIB3135-061-Q1-K1-A4
cttagctgaagcaaacgatggggaagagaaagaaggcaaggttgagaaaaaggtaaatgagaaacagatgaaagacactaagaatactacatcaagattatataaagatcagtgcactgcatttgtatcaaatcttaacattacggcaaaagacgaagatctccatcaattcttcagtgatgttgggggggtcactgcaattcgaattctgcatgacaagttcactggaaaatcaaggggactggcatatgtggattttaaggatgatgtacaccttgctgcagctgtag

SEQ ID NO: 13642 - DNA, 358 bp, Gossypium hirsutum
  Clone ID: LIB3135-061-Q1-K1-A5
aggaatagccagattcacatcctccattcgatatggacgagtgtggtgatagaattctcgacctgctatcacttgcagctgacatagatgtcatgccattcggtgatcttgttaaggggcaagaaaagcatgatgttgctcggtccttttctgcacttctacaattggtgaacaatggagatgttctgttagaactaaccggacttcgtggtgagtctgtttgtcatacgcctgaaaaccctttacatgtccacatccttacatcaagacaagaggagtgtggtaactcaacttggaattcccaaaacgagaggtagatcaccatgacgtacaaaacctacaaaagctgacagaaata

SEQ ID NO: 13643 - DNA, 211 bp, Gossypium hirsutum
  Clone ID: LIB3135-061-Q1-K1-A6
cggaagaccacgcgacccacgcctcctttctatactcgtgggtagtgtgccatattattgtccatgataggaatgcctggggtccttgggagttccatcgatctcgtgaaaacataacgtaagtgggaaggcctggtcctttttacacactgtgaatttcgcgaaactgctgacttggcaagtccaattttgacgttagactcaaaagctt

SEQ ID NO: 13644 - DNA, 391 bp, Gossypium hirsutum
  Clone ID: LIB3135-061-Q1-K1-A7
gaacgaccgacgcgacccacgcataccatactctaagcctcactgcaagctgtgactacctgcgccagacggctagatgcgtggtgtgaggctctgcaaaccattgtgttctttatgggttattccgcatggcactagactgacggacagtggtatcatggaagagcatgagatagcgaaactaacccgttcaacaacgaatcatatcttaaaccatatccaccaatgatggtcgtgttcgaacccgtgctgctgggagatgaaaactcacattacctacctaaatatcacccggctgaccgatttataaaggacggacacccatctatctaccggaaacaccctaagcaaacattaccggcagacgaaagagtagcaccactaaaatacc

SEQ ID NO: 13645 - DNA, 232 bp, Gossypium hirsutum
  Clone ID: LIB3135-061-Q1-K1-A8
accacgcgtccggcaacaggccgagggagttaagatgtcaaagaagtgaatgaagtaatggtgtgtttgtctctgtacgagtttgaatgcaaaactcgggtttcatttcgtgtgttagatctttagttttatataattatagacctctgatgaaaccactgagctgttataagaaatggaagatgtttgtggtattgatgatcaatataatgtactattatgttgaatgtgc

SEQ ID NO: 13646 - DNA, 190 bp, Gossypium hirsutum
  Clone ID: LIB3135-061-Q1-K1-A9
atttttgatattttaaaagactttctacttaatactactaaatacttacacctctatttagggtagatactgtatgcatatggggctaagttcgcaaagattcagtactctattgatgtttggtgcttcgtatataggctaactattagaattttactcatgctgtggaacatcatttgctccctgttat

SEQ ID NO: 13647 - DNA, 416 bp, Gossypium hirsutum
  Clone ID: LIB3135-061-Q1-K1-B1
gtttataacatattctcaagttcactacaagctgtctttctgagcaacggtcactaaattatttatatctggagctacgaaactctgaattaagtttcgttaattttccctgaaactagacttatttttctttcttccataaaattttcaaattttttggtttagccaaatagtacagtttattcctcaaagttacccctgattcactgtctgacagttccgacccttctatactaaagttcaattatctcatagtacaagactcaaataatgttctcgtctatttatcttgaaactaaactcatatgtctacttatttttttctagaatttttggttgggccaattagtacagtttattagttaaagtctcccctgtttcagggtatgaccactctaacccctgtgcactacaaa

SEQ ID NO: 13648 - DNA, 354 bp, Gossypium hirsutum
  Clone ID: LIB3135-061-Q1-K1-B11
caaagtggtatcaacaggggcgattctgatttgaagagatgccccaacactctgtaacatatcacaagaccataagaggtggttagtattctctggtgctaccttgcaaaggggacaatcaactctaacacgcaaggacctttgcttcagattacagtaattaggcaaaaagttgttgaacaatctccatacatgaactttgattcttttggtacgcgcatagcccataaagacctgtaaaaatccttgtaacccacattattaggattgatgtaatttgtgtttagaagatgttctgtaattaagaccctgtatccgctttttaaaaaaaagaaaaagtttggtgtaataata

SEQ ID NO: 13649 - DNA, 236 bp, Gossypium hirsutum
  Clone ID: LIB3135-061-Q1-K1-B2
cccacgcgtccggcaacaggccgagggagttaagaagtcaaagaagtgaatgaagtaatgttgtgtttgtctctgtacgagtttgaatgcaaaactcgggtttcatttcgtgttttacatctttagttttatataattatagaactctgatgaaaccactgagctgttataagaaatggaagatgtttgtggtattgattattagtataatgtactattatgttgaatgtgctatg

SEQ ID NO: 13650 - DNA, 325 bp, Gossypium hirsutum
  Clone ID: LIB3135-061-Q1-K1-B3
ggctaactcggaggccaccttgggtacatacaagggtgatgcaaagattagtgagggtgctgcagagagccttcatgttaaggactacaaatactaagaatttagtcttgtggtctgtgtatcagagaaattttctgtattgatgatagacgtttagtgctgtttttgggggttgtccgtttcttctcatggaatttaggttgtgaaatcagactcaaataagcttggggggccttagttctcgctgagtgttcatggttttttgtttgcttcagtttaaaacaatattctcagcatatacaactgagtgtgctttgcacttttt

SEQ ID NO: 13651 - DNA, 349 bp, Gossypium hirsutum
  Clone ID: LIB3135-061-Q1-K1-B4
ctacgctagacagtagtatcgaacaacagctttccaagaccaagaagaagcaggcaagtagtattagtagtgcagcagcaaaagcctcgactgataaagtgaacaagggagaggagaaaggcaaccgggaaaggagtgcagtcgcagcagcaggtgaagcaaattcaaagaccgcgaagctgggagttggtttaagagggacagccaacatagctttgatggctaagaaatggaggaggttgtcaatgaaagggagagaaccacaaaatctggaaggccttgagagactggtgaaactggacctccagtgttttccctcgctcggaaaccacctacttggctggtaccc

SEQ ID NO: 13652 - DNA, 323 bp, Gossypium hirsutum
  Clone ID: LIB3135-061-Q1-K1-B5
aggctataccatcaaacttactcacatccgatctgattcttttagcgtctttcactctgttagggatatgtggagctactaaactctgcatgaactttcaataatttttcctgaaactagacttatataactttcttccataaaatattcaaattttttgctttagtcgaagggtgcacgttatttctcaaagtaacccctgattcactgtctgacaaattcaacccttctatactaaagttcaattatctcatcgtacaatactcaaatcatgatctcgaatatttatcttgaaactaaactaatgtgtgtacttatttttt

SEQ ID NO: 13653 - DNA, 411 bp, Gossypium hirsutum
  Clone ID: LIB3135-061-Q1-K1-B7
agacaaggaaggcatccccccagaccagcaacgtctcatctttgccggaaaacagctcggagacggccgtaccttggccgactacaacatccagaaggagtcaactctacaccttgtccttcgtttgcgcggcgggatgcaaatcttcgttaagacgcttaccggaaagacgatcactctcgaggtcgagagctctgacacgatcgacaacgtgaaagccaaaatccaagacaaggaaggcatcccgccagaccagcaacgtctcatcttcggcggaaagcaactcgaggacgggcggactttagccgattacaatattcagaaggaatcgactcttcatctggttctacgtcttcgaggtgggatgcacatcttcgtcaagactttgaccggttagaccattactttaga

SEQ ID NO: 13654 - DNA, 417 bp, Gossypium hirsutum
  unsure (1)..(417): unsure at all n locations; Clone ID: LIB3135-061-Q1-K1-B8
cccacgcgaccgacccaaaccgncggttgttaagcctccgccatatacacctaagccaccttactatccaatggggccggggatatcaccaccaacactgcctccaaagccaccagtctaccccagtccaccaatagtgaacccaccaacaccgccgattctgccacctcctattgtgaatccaccaacaccgccgattctaccaccaccatcaccacctattgtgaacccaccaacgcctcctatcgtgaagccaccttcaccgggaacaccgtgtccttcaccaccacctccggcacaacatacatgccccatagacactctcaagctaggtgcatgtgtggactcgttgggtggcttagtacacatcggcataggtagcagcgccaaagacacttgctgccctgtactacaagg

SEQ ID NO: 13655 - DNA, 391 bp, Gossypium hirsutum
  Clone ID: LIB3135-061-Q1-K1-B9
tgctgatctccattgtgttgattggaacccccatgatgacaatcttatcctgactgggtctgcagatcatactgtacgtatgtttgatcgaagaaatctgacttctaatggaattggatcacccatttacaagtttgagggtcataaagctgctgttctatgcgtgcagtggtctccagacaagtcatctgtatttggcagttctgctgaggatgggctcttgaacatttgggactatgacaaggttggcaagaaggtggaacgtgcttcaagatctcctagtgcttctgcgggactgtttttccagcacgctggacacagggacaaagttgttgacttccatttgaatgcatcttatccatggactgttgttagtgtgtctgatgaactg

SEQ ID NO: 13656 - DNA, 338 bp, Gossypium hirsutum
  Clone ID: LIB3135-061-Q1-K1-C1
gtgaaaaacgtcattgattcacatgtacttaatctagataaagtacatgtgaaaaacgtcggtgattcaacaaaattattgttttgcttaaaacttactaagcttacgaaagcttactctgttcgttcatgtttttggtctgtaggttgtggattctgactactagctcggggatcgtcagcacttcatcacactatctaccattacggtagccatgagattggattatcttatggcatgtatagaatagactagtagcgaaagaataatttggttattgtatataagccatgcgaaaatgacatcttttgaatgtttacttatagaagtttacattt

SEQ ID NO: 13657 - DNA, 133 bp, Gossypium hirsutum
  Clone ID: LIB3135-061-Q1-K1-C10
ttcgccttgggttggcttgttctccggaatcaggcactcaaagtctatgttccatcatgtgagagctatggaagaatgtggccacacatgcatacacgaataatgggtgccctgctgttataccaagatacta
